United States Patent Application Publication US 2013/0332133 A1 - sequence listing, part 16

SEQ ID NO: 169696 - protein, 295 aa, Unknown
  Bacterial polypetide isolated from the Sargasso Sea
KELGDLDNANSEFDELEEKIKKSGMTKEADEKASSELKKLQMMSPMSAEATVVRNFLDVLLSAPWKKKTKAKVSLDQAHKILDEDHYGLKTVKERIIEYLAVQKRVKKLKGPILCLVGPPGVGKTSLGASIARATGRKFVRMSLGGVRDEAEIRGHRRTYIGAMPGKIMQNLNKAGVRNPLFLLDEIDKMSMDFRGDPSSALLEVLDPEQNTTFNDHYMEVDFDLSDVMFICTANTLNIPPPLLDRMEVIRIEGYTEDEKMNIAEKYLVNKQTEANGLKDSEIKITNSAILSIIR

SEQ ID NO: 169697 - protein, 283 aa, Unknown
  Bacterial polypetide isolated from the Sargasso Sea
SKDAYAKAQAELNKLKQMSPMSAEATVVRTYIDWLVNVPWKAASKVRLDLAKAEEVLDADHYGLEEVKDRILEYLAVQKRVKKLKGPVLCLVGPPGVGKTSLAESIARSTNRKFVRMALGGVRDEAEIRGHRRTYIGSMPGRLIQKMTKVGVRNPLFLLDEIDKMGSDMRGDPASALLEVLDPEQNHNFNDHYLEVDYDLSDVMFLCTANSMNIPAPLLDRMEVIRLPGYTEDEKVNIATRYLAPKQIEANGLKKGELEFQEAAIRDIIRYYTREAGVRSLER

SEQ ID NO: 169698 - protein, 144 aa, Unknown
  Bacterial polypetide isolated from the Sargasso Sea
HVHVPEGATPKDGPSAGIAMVTSIVSVLTEISVRRDIAMTGEVTLRGNILPIGGLKEKLLAALRGGIRTVLIPKENAKDLREIPDQVKNGLEIIPLSHVSEVLNIALTDKPKPIEWDSESIIGTGSDSNGKGEDELDGETSIAH

SEQ ID NO: 169699 - protein, 290 aa, Unknown
  Bacterial polypetide isolated from the Sargasso Sea
RSTNRKFIRMSLGGVRDEAEIRGHRRTYIGSMPGKIIQKLTKVGVKNPLFLLDEVDKIGMDHRGDPASALLEVLDPEQNTSFSDHYLEVDYDLSEVMFVCTANSLNIPGPLLDRLEIIRIPGYIEDEKLQIAQNYLLPKQLERNGLENKELNLNKKVLLDLIRYYTREAGVRGLERQISKILRKVVKERLLSKKKTATKIDSKNLEKYSGVRKFKFGEAESSNTIGQVCGLAWTEVGGELLTIEASKVSGKGKTIKTGSLGEVMQESIQAALTVVRSRSDSLGIKKDFYE

SEQ ID NO: 169700 - protein, 241 aa, Unknown
  Bacterial polypetide isolated from the Sargasso Sea
LEVLDPEQNNKFNDHYLELDYDLSDVMFVCTANTLNIPPALLDRMEIIRIPGYTENEKNQIAKKYLVPKQVKNNGLKNSEINFNSSLIKQIIRYYTREAGVRGLEKEISKICRKVVKDLETRKKSKILLNKKSIKNYLGVEKYRNNEIEKKNLIGVTNGLAWTEVGGEILSIEVLLSIGKGKLTITGKLGEVMKESIQAASSYVRSQALTLGINPLDFDKYDIHVHVPEGATPKDGPSAGI

SEQ ID NO: 169701 - protein, 218 aa, Unknown
  Bacterial polypetide isolated from the Sargasso Sea
YGLAEESDQIGVATGLAWTEVGGDLLSIEAIKLPGKGRMKSTGKLGEVMKESIDAASSFVRSKSPSLGIIPTLFDKYDIHVHVPEGATPKDGPSAGIAMVTSIVSMLTEIPIRRDVAMTGEVTLRGNVLPIGGLKEKLLAALRGGIKKVIIPIENVKDLAEIPENVKNDLEIIPATSIDEVLKVALSENVQSIDWDFSEYENSDNLKSKKSGEIELPN

SEQ ID NO: 169702 - protein, 283 aa, Unknown
  Bacterial polypetide isolated from the Sargasso Sea
DYRGDPSSALLEALDPEQNTTFNDHYLEVDYDLSDVMFVTTANTLNILPPLLDRMEVIRLAGYTEDEKINIANKYLLPKQIKDNGVKEKEMKLGNDIIKEIIRSYTKESGVRNLEREISKVARKVVKKVVAGEEKEVSVDIKNLSDFLGVPKFKFGELESENRVGIVTGLAWTEYGGEILKIETVTMPGKGRMQITGKLGDVMQESVKAAKSFVRSKCLEYGIIPPLFEKKDFHIHVPEGATPKDGPSAGIGMVTSIVSSITNIPVRRDIAMTGEVTLTGQVL

SEQ ID NO: 169703 - protein, 316 aa, Unknown
  Bacterial polypetide isolated from the Sargasso Sea
VDVKKRLNAIIKIMENETSIIGVEKRIRGRVKTQMEKTQREYYLNEQLKAIQKELGEIEDGKDENTSLNKAILKSKMPKDVEKKCLQELKKLKNMSPMSAEATVVRNYLDWMVDLPWHKKSDVVIDLKKALEVLDKDHFGLEKVKERIIEFLAVQKRMDKIKGPILCLVGPPGVGKTSLGKSIAKATNREFVRMSVGGMRDEAEIRGHRRTYIGSLPGKIIQMMKKAGTKNPLILLDEIDKVGNDYRGDPSSALLEALDPEQNTTFNDHYLEVDYDLSDVMFVTTANTLNILPPLLDRMEVIRLAGYTEDEKINIA

SEQ ID NO: 169704 - protein, 311 aa, Unknown
  Bacterial polypetide isolated from the Sargasso Sea
GSDWRGDPSSALLEVLDPEQNDTFQDHYLEVDYDLSDVMFVTTANSLRIPGPLMDRMEIIRIQGYTEDEKVEIARRHLIDKQLEAHGLNDEEWSISDPALRDLIRYYTREAGVRNLERELANLTRKATKEILMDGVTTVSVSRRNLEKYAGVQKYRFGEVETEDIVGVTNGLAWTEVGGEILTIEAVMVPGKGKMVITGKLGEVMQESIQAARSFVQSRSVEFGVKPTIFDKRDIHVHVPEGATPKDGPSAGVGMVTSIVSVLTGVAVCKDVAMTGEVTLRGRVLPIGGLKEKLLAALRGGIRKVLIPKEN

SEQ ID NO: 169705 - protein, 286 aa, Unknown
  Bacterial polypetide isolated from the Sargasso Sea
SEVDIDLTKALNILDKDHFGLEKIKERIVEFLAVQKRMEKIKGPILCLVGPPGVGKTSLGKSIAKATNREFVRMSVGGMRDEAEIRGHRRTYIGSLPGKIIQMMKKAGTKNPLILLDEIDKVGNDYRGDPSSALLEALDPEQNTTFNDHYLEVDYDLSDVMFVTTANTLNILPPLLDRMEVIRLAGYTEDEKINIANKFLLPKQIKDNGVKEKEMKLDDDIIKEVIRGYTKESGVRNLEREISKIARKVVKKVVAGEESEVNINNKNLSDFLGVPKFKFWRIRSRE

SEQ ID NO: 169706 - protein, 247 aa, Unknown
  Bacterial polypetide isolated from the Sargasso Sea
KRLEKIYEILEKETSVISMEKRIRGRVKNQMEKTQREYYLNEQLKAIQKELGEIEEGKDEISNLSKAITKAKMTKDAQNKCLAELRKLKTMSPMSAEATVVRNYLDWMVDLPWSNKSKVIKDLTAAQKILDEDHFGLEKVKERIIEFLAVQKRVEKLKGPILCLVGPPGVGKTSLGKSIARATGRKFVRISLGGIRDEAEIRGHRRTYIGSLPGKIIQMMKKAGTKNPLFLLDEIDKVGSDYRGDPS

SEQ ID NO: 169707 - protein, 259 aa, Unknown
  Bacterial polypetide isolated from the Sargasso Sea
NKRVKINDFADQEKFIKCSYEYFNDVLDKNEDLNALAGTALKRLEKLSSVNKKISNETISSIKDLKDPSKIADNIASHLNTTISEKQHIFETADVKKRLNAVIKIMDNEASIIGVEKRIRGRVKTQMEKTQREYYLNEQLKAIQKELGEIEDGKDESSSLNKSILKAKMPKDVQKKCMSELKKLRSMSPMSAEATVVRNYLDWMIDLPWHKKDKVDIDLNKALKILDEDHFGLDKVKERIVEFLAVQKRMEKSKAPFSV

SEQ ID NO: 169708 - protein, 295 aa, Unknown
  Bacterial polypetide isolated from the Sargasso Sea
HKRCSINKIIDKDSYTVARVIELEDPVLKDNESANLVRLIKAKFEDYIGITKRIPPEIVSTVDSLDDLSRLIDTITGHLPIETSKKQDVLETIDLKERSEKILTFIESQLDVVDVEKKIRDRVKKQMEKSQREYYLNEQIKAAQKELGEIGEEGDELENLEKKIHEVGMTKEALKKAKSELAKFKHMAPSSAEASVVRTYLDCLVDVPWKKKSKIKTDIKASMDILEEDHYGLEEVKERIVEYLAVQKRVKSMKAPVLCLVGPPGVGKTSLGESIARATNRKFVRMSLGGVRDES

SEQ ID NO: 169709 - protein, 292 aa, Unknown
  Bacterial polypetide isolated from the Sargasso Sea
GDPSSALLEVLDPEQNTTFNDHYMEVDFDLSDVMFICTANTLNIPPPLLDRMEVIRIEGYTEDEKMNIAEKYLVNKQTEANGLKDSEIKITNSAILSIIRHYTREAGVRNLDREIAKISRKVVKSLVMKSKDETVHVRPGSLEKYLGVQKFKYGIAEKDNQIGQVTGLAWTQVGGELLTIESTAIPGKGKLINTGQLGDVMKESIQAATTVVRSRSKALGIKEDFHQKMDMHIHVPEGATPKDGPSAGIGMCTALISSLTDIPVKANVAMTGEITLRGEVLPIGGLKEKLLA

SEQ ID NO: 169710 - protein, 237 aa, Unknown
  Bacterial polypetide isolated from the Sargasso Sea
GYAREAGVRQLEKQLGKLVRKSVVKLLDDPETKIRIGAKDLEEALGMPVFRNERVLAGTGVITGLAWTSMGGATLPIEATRIHTLNRGFKLTGQLGDVMKESAEIAYSYVSSHLKQFGGDPTFFDQAFVHLHVPEGATPKDGPSAGITMASALLSLARNQAPKKGVAMTGELTLTGQVLPIGGVREKVIAARRQKIFELILPEANRGSYEELPDYLKEGLTVHFAKRYGDVAKVLFD

SEQ ID NO: 169711 - protein, 236 aa, Unknown
  Bacterial polypetide isolated from the Sargasso Sea
ERVNNPINEKDLKDLLGVQKFNYGEIEEENRIGVVTGLAWTEVGGEILKIESAVMPGKGKMQITGKLGDVMQESVKAAKSYIRSKSLDYGIIPPIFDKKDFHIHVPEGATPKDGPSAGIGMVTSIISAITEIPVDKNVAMTGEITLRGLVLPIGGLKEKLLAAHRAGIKKVLIPTENQKDLVEVPKTILKSMEIIPVKNVDEVLKVALTKPFKRVEWVEVDQISKKDKDKKELSTH

SEQ ID NO: 169712 - protein, 222 aa, Unknown
  Bacterial polypetide isolated from the Sargasso Sea
KVCRKKVKDLSLGAKATKLIDNRVVRNILGAEPYKYGQHDAENSLGQVNGLAWTSVGGELLQIEAAVTAGKGRVIKTGSLGDVMQESIQAALTVSKNIAKEKKIESEFFDKHDIHIHVPEGATPKDGPSAGITMCTAITSLATEKKVKANLAMTGEITLAGKVLKIGGLKEKLIAAKRSGITNVVVPYENLGDVEEIESNILKDLEIIPVKNISEVLKVALT

SEQ ID NO: 169713 - protein, 288 aa, Unknown
  Bacterial polypetide isolated from the Sargasso Sea
GVRDEAEIRGHRKTYIGSMPGRFIQAMKKSKSSNPLILLDEIDKLGSDWRGDPSSALLEVLDPEQNSKFNDHYLELDYDLSDVMFVCTANTLNIPPALLDRMEIIRIPGYTDKEKNQIAQKYLVPKQLKNNGLKKTEIRFNVKLLNQIIRNYTREAGVRNLEKEISKVCRKAVKDIETTRKKKINLDTKKLQNYLGITRFRSNEIEKKNLIGITNGLAWTEVGGEILSIEVILSIGKGKLTITGKLGEVMKESIQAATSYVKSKCLNLGINPKDFEKYDIHIHVPEGA

SEQ ID NO: 169714 - protein, 325 aa, Unknown
  Bacterial polypetide isolated from the Sargasso Sea
MSVGGMRDEAEIRGHRRTYIGSLPGKIIQMMKKAGTKNPLILLDEIDKIGNDYRGDPSSALLEALDPEQNTTFNDHYLEVDYDLSDVMFVTTANTLNILPPLLDRMEVIRLAGYTEDEKISIANKYLLPKQIKDNGVKEKEMKLDDNIIKEVIRGYTKESGVRNLEREISKLARKVVKKIVSGEEKEVGINNKNLSEFLGVPKFKFGELEAENRVGIVTGLAWTEYGGEILKIETVTMPGKGRMQITGKLGDVMQESVKAAKSFVRSKCLEYGIIPPVFEKKDFHIHVPEGATPKDGPSAGIGMVTSIVSSICNIPVRRDLAMTG

SEQ ID NO: 169715 - protein, 262 aa, Unknown
  Bacterial polypetide isolated from the Sargasso Sea
IRDEAEIRGHRRTYIGSLPGKIIQMMKKAGTKNPLFLLDEIDKVGSDYRGDPSSALLEALDPEQNKQFNDHYLEVDYDLSDVMFVTTANTLNILPPLLDRMEIIRLPGYTEDEKTNIAQKFLIPKQSKDNGLKNDEWKISPEVVKKIIRDYTRESGVRNLEREISKIARKMVKKIDSSEKVNNELLEKDINSYLGIKKYNYGEIESENKIGVSTGLAWTEVGGEILKIESVNMPGKGKMQITGKLGEVMQESVKAAKSYVRS

SEQ ID NO: 169716 - protein, 325 aa, Unknown
  Bacterial polypetide isolated from the Sargasso Sea
NDHHGLEKVKERILEYLAVQKRTNKLKGPILCLVGPPGVGKTSLGKSIANSTGRSFVRMSLGGVRDEAEIRGHRKTYIGSMPGRFIQAMKKSKSSNPLILLDEIDKLGSDWRGDPSSALLEVLDPEQNSKFNDHYLELDYDLSDVMFVCTANTLNIPPALLDRMEVIRIPGYTEKEKNQIAKKYLVPKQIKNHGIKKSEISFNSKVLNSIIRNYTKEAGVRNLEKEISKVCRKTVKKLETSRLKKVNLNEKSLQDFLGIAKFRSSEIEKKNLVGVTNGLAWTEVGGEILSVEVILSIGKGKLTITSKLGEVMKESIQAATSYVKS

SEQ ID NO: 169717 - protein, 196 aa, Unknown
  Bacterial polypetide isolated from the Sargasso Sea
QVGGELLTIDSTAVPGKGKLINTGQLGDVMKESIQAATTVVRSRSKSLGIEEDFHQKLDMHIHVPEGATPKDGPSAGIGMCTALVSSLTEISVKANVAMTGEITLRGEVLPIGGLKEKLLAAHRGGIETVVIPKDNEKDLVEIPKNIKEKLDIIPVKWIDEVLEIALEKMPEIAISETKTSGSSKNKPSSEKNLPH

SEQ ID NO: 169718 - protein, 271 aa, Unknown
  Bacterial polypetide isolated from the Sargasso Sea
KIILVTQKNSEIDDPKKTDVFMYGCEGSILQLLKLPDGTVKVLVEGIKRVKILDFNDNDKFITCDYTYYNDVLIKDEDLFPLASTALRRLEKLSSINKKISNETINTIKQLKDPSKIADNIASHITASISEKQQIFETVDVKKRLNAIIKIMENETSIIGVEKRIRGRVKTQMEKTQREYYLNEQLKAIQKELGEIEDGKDETTSLNKAITKAKMPKEVEKKCLQELKKLKNMSPMSAEATVVRNYLDWMTELPWHKKSEVDIDLKKALEI

SEQ ID NO: 169719 - protein, 279 aa, Unknown
  Bacterial polypetide isolated from the Sargasso Sea
RIIEFLAVQKRMEKIKGPILCLVGPPGVGKTSLGKSIAKATNRQFVRMSLGGIRDEAEIRGHRRTYIGSLPGKIIQMMKKAGTKNPLILLDEIDKVGNDYRGDPSSALLEALDPEQNTTFNDHYLEVDYDLSDVMFVTTANTLNILPPLLDRMEVIRIPGYTEDEKINIANKFLLPKTIKENGVKTGEMDLSDGTIKEVIRSYTKESGVRNLEREISKITRKVVKKVVNAEETNVKVNEKNLIDFLGVKKFKFGELESEDKVGIVTGLAWTELEEKFKN

SEQ ID NO: 169720 - protein, 299 aa, Unknown
  Bacterial polypetide isolated from the Sargasso Sea
QLKDPSKIVDNIVSNLNASISEKQQIFETLDVKKRLNAAIKMMESETSIIGVEKRIRGRVKTQMEKTQREYYLNEQLKAIQKELGEIEDGKDETTNLKKSIQKAKMPKEVEKKCMSELKKLKNMSPMSAEATVVRNYLDWMIDLPWFKKNDVDIDLNKGLKILDEDHFGLEKVKERIIEFLAVQKRMDKIKGPILCLVGPPGVGKTSLGKSIAKATNRQFIRMSLGGVRDEAEIRGHRRTYIGSLPGKIIQMMKKAGTKNPLFLLDEVDKIGNDYRGDPSSALLEALDPEQNTAFNDHY

SEQ ID NO: 169721 - protein, 291 aa, Unknown
  Bacterial polypetide isolated from the Sargasso Sea
MKGNKKIILVTQKNAEIDDPTEKDVFSYACESNILQLLKLPDGTVKVLAEGMRRVKIADLKNNENFMSCSFVYVNDYTPKEDNLLPLALTAIKKLEKLTAINKKVSSEIINNIKELKEPSKICDNIASHLNSTISEKQKLFETLDVSKRLNEVIKIMDNEASIIGVEKRIRGRVKTQMEKTQREYYLNEQLKAIQKELGEIEDGKDETSNLNKLILKARMPKEVQKKCLAELKKLKNMSPMSAEATVVRNYLDWMIDIPWYKKSEVDIDLIKATKTLDEDHFGLDKVKERI

SEQ ID NO: 169722 - protein, 269 aa, Unknown
  Bacterial polypetide isolated from the Sargasso Sea
MEKTQREYYLNEQLKAIQKELGETEDGRDEAGEFEERIEKTKLSKEAKEKALQELKKLKSMSPMSAEATVVRNYLDWMLSIPWGKRSRVKKDIKAAEKILNQDHYGLEKVKERILEYLAVQMRVRKIKGPILCLVGPPGVGKTSLGKSVATATGRNFVRMSLGGVRDEAEVRGHRRTYIGSMPGKVIQGMKKAKTSNPLFLLDEIDKLGADWRGDPSSALLEVLDPEQNNTFADHYLEVDYDLSDVMFVTTANTLRMPQPLLDRMENHP

SEQ ID NO: 169723 - protein, 293 aa, Unknown
  Bacterial polypetide isolated from the Sargasso Sea
SEIKKLKNMSPMSAEATVIRNYLDWILSVPWSKKSRLKNNLAEAQKVLDGDHFGIEKVKERIIEYLAVQKRTGKIKGPLLCLVGPPGVGKTSLGKSIANATGRKFVRMSLGGVRDEAEIRGHRRTYIGSMPGRIIQALKKAGTNNPLILLDEVDKLGADWRGDPSSALLEVLDPEQNNTFQDHYLEVDCDLSNVMFVTTANSLNMPKPLLDRMEIIRLSGYTELEKLEIAKSHLLPKVIKDHALKKEEFSLSDREMLEVIRSYTREAGVRGLEREISKLSRKLITEILLNKKK

SEQ ID NO: 169724 - protein, 299 aa, Unknown
  Bacterial polypetide isolated from the Sargasso Sea
LDRDHYGLEKVKERILEYLAVQQRVSKMKGPILCLVGPPGVGKTSLGKSIAKATNRKFVRMSLGGVRDEAEIRGHRRTYVGSLPGKIIQNMAKAGTKNPLILLDEIDKMAMDFRGDPASALLEVLDPEQNDTFNDHYLEVDFDLSDAMFVTTANTLEIPGPLKDRMEIIRISGYTEEEKSHIADRFLIPKQVANNGLKGSELKFGKPAVLEIIRHYTREAGVRGLEREISSVCRKIVRQLVKKASTAKVSVTPKSLEKFLGVKKFRYGLAGDKNRVGQVTGLAWTQTGGDLLTIEAVAL

SEQ ID NO: 169725 - protein, 243 aa, Unknown
  Bacterial polypetide isolated from the Sargasso Sea
PVQINMLSLMKKKLKEFLGVSRFRSSEIEKKNLIGVTNGLAWTEVGGEILSIEVILSIGKGKLTITGKLGEVMRESVQAAISYVKSHSLNLGIHPFDFDKFDIHVHVPEGATPKDGPSAGIAIFNSLVSSLTSNKVRKDVAMTGEITLRGRVLPIGGLKEKIYAATRAGIKKVLIPEENKNEIIEFDKEILKTIKIIPISEAKSILEHTLTKPVSPLNLTESEILEVQKNRFSETNPKENLRH

SEQ ID NO: 169726 - protein, 305 aa, Unknown
  Bacterial polypetide isolated from the Sargasso Sea
FYDEDLFPLAATALRRLEKLTSINKKISNETINTIKQLKDPSQIADNIAAHIAASISQKQQIFETNDVKKRLNAIIKIMENETSIIGVEKRIRGRVKTQMEKTQREYYLNEQLKAIQKELGEIEDGKDETTSINKAIAKAKMPKDVEKKCLQELKKLKNMSPMSAEATVVRNYLDWMTELPWHRKSEVDIDLAKAQNTLDKDHFGLEKIKERIVEFLAVQKRMEKIKGPILCLVGPPGVGKTSLGKSIAKATNREFVRMSVGGMRDEAEIRGHRRTYIGSLPGKIIQMMKKAGTKNPLILLDEID

SEQ ID NO: 169727 - protein, 262 aa, Unknown
  Bacterial polypetide isolated from the Sargasso Sea
EVKERIVEYLAVQKRVKSMKAPVLCLVGPPGVGKTSLGESIARATNRKFVRMSLGGVRDESEIRGHRRTYIGSMPGKIIQKLSKVGVKNPLFLLDEIDKIGMDHRGDPASALLEVLDPEQNNTFSDHYLEVDYDLSEVMFVCTANSLNIPTPLLDRMEIIRIPGYIEDEKINIANKYLLPKQMNRNGLKEKEIKINENVILSLIRYYTREAGVRGLERQIARILRKVVKERLVNKTKLEKATTITNKNLEKYSGVKKFKYGV

SEQ ID NO: 169728 - protein, 273 aa, Unknown
  Bacterial polypetide isolated from the Sargasso Sea
MPGRIIQSVRKSGTSNPVFVLDEIDKISSGSQGDPSSALLELLDPEQNNSFHDNFLEIGYDLSKVMFVATANNLSTMHPALLDRMELINVSGYTSEEKVSIANKFLIKKQLSEHGMNSSNFKISNKIIKEIISSYTRESGVRNLEKQIAKLIRNRAKNIVSNSNLNNYNDENYLKNVLGPQKFFRDKYENNNFAGVVTGLAWTSVGGEILFIESSLSEGKGNLSITGNLGKIMKESAVIALEYIKSNYQDLGINKEIDYSKYNIHIHVPEGAT

SEQ ID NO: 169729 - protein, 312 aa, Unknown
  Bacterial polypetide isolated from the Sargasso Sea
KQSVISVKKRIRGRVKNQMEKTQREYYLNEQLKAIQKELGEIEEGKDEVSNLNKAILKAKMPKDAETKCMSELKKLKAMSPMSAEATVVRNYLDWMIDLPWSNKSKIIKDLALAQKTLDEDHYGLAKVKERIIEYLAVQKRIEKLKGPILCLVGPPGVGKTSLGKSIARATGRKFVRISLGGIRDEAEIRGHRRTYIGSLPGKIIQMMKKAGTRNPLLLLDEIDKVGSDYRGDPSSALLEALDPEQNKQFNDHYLEVDYDLSDVLFVTTANTLNILPPLLDRLEVIRIPGYTEEEKVNISQKFLIPKQKVRT

SEQ ID NO: 169730 - protein, 255 aa, Unknown
  Bacterial polypetide isolated from the Sargasso Sea
YYLNEQMKAIQKELGETEDGVNELDEIEAQLKALKMPKAALEKGEAELKKLRNMGPMSAEATVVRNYLDWILALPWRKSSRLKKDIDAARAVLDADHYGLEKVKDRIVEFLAVQQRTKTMKGPILCLVGPPGVGKTSLGKSIAKATGRNYVRMALGGVRDEAEIRGHRRTYIGSLPGKILQGMKKAGTRNPLFLLDEVDKLGADWRGDPTSALLEVLDPAQNSSFQDHYLEVDFDLSNVMFITTANTLNMPQPLM

SEQ ID NO: 169731 - protein, 287 aa, Unknown
  Bacterial polypetide isolated from the Sargasso Sea
LDPEQNTTFNDHYLEVDYDLSDVMFVTTANTLNILPPLLDRMEVIRIPGYTEDEKINIANKFLLPKTIKENGVKSGEMDLSDGTIKEVIRNYTRESGVRNLEREISKITRKVVKKVVNSEETKVKINEKNLTDFLGVKKFKFGELESENKVGIVTGLAWTEFGGEILKIETVNMPGKGRMQITGKLGDVMQESVKAAKSYVRSKSLDFGIIPPIFEKKDFHIHVPEGATPKDGPSAGIAMVTSIVSSITKIPVRREIAMTGEVTITGQVLPIGGLKEKLLAAHRAGI

SEQ ID NO: 169732 - protein, 301 aa, Unknown
  Bacterial polypetide isolated from the Sargasso Sea
KAGTKNPLILLDEVDKIGNDYRGDPSSALLEALDPEQNTSFNDHYLEVDYDLSDVMFVTTANTLNILPPLLDRMEVIRIPGYTEDEKINIANNFLLPKQIKANGVKDKEFEVTDGTVKEIIRNYTRESGVRNLEREISKITRKVVKKVVNNEEKKVVVDQKNLSDFLGVKKFKYGELESKNRVGIVTGLAWTEVGGEILKIETVNMPGKGRMQITGKLGDVMQESVKAAKSFVRSKSLEYGIIPPIFEKKDFHIHVPEGATPKDGPSAGIGMVTSIVSSITNNPINREIAMTGEVTVTGQV

SEQ ID NO: 169733 - protein, 276 aa, Unknown
  Bacterial polypetide isolated from the Sargasso Sea
MKLDDNIIKEVIRGYTKESGVRNLEREISKLARKVVKKIVSGEEDEVEIKNNNLSDFLGVAKFKFGELEAENRVGIVTGLAWTEYGGEILKIETVTMPGKGRMQITGKLGDVMQESVKAAKSFVRSKCLEYGIIPPIFEKKDFHIHVPEGATPKDGPSAGIGMVTSIVSSITNIPVRRDVAMTGEVTLTGQVLPIGGLKEKLLAAHRAGIKEVLIPKENEKDLVDMPKKIIDDIKITPVEYADQVIKIALTKELKPTEWVEVEISKKDDKSQASIQ

SEQ ID NO: 169734 - protein, 290 aa, Unknown
  Bacterial polypetide isolated from the Sargasso Sea
REFVRMSVGGMRDEAEIRGHRRTYIGSLPGKIIQMMKKAGTKNPLILLDEIDKIGNDYRGDPSSALLEALDPEQNTTFNDHYLEVDYDLSDVMFVTTANTLNILPPLLDRMEVIRLAGYTEDEKISIADKYLLPKQIKDNGVKEKEMKLDDDIIKEVIRGYTKESGVRNLEREISKLARKVVKKIVAGEENEVRINNKNLPDFLGVPKFKFGELETENRVGIVTGLAWTEYGGEILKIETVTMPGKGRMQITGKLGDVMQESVKAAKSFVRSKCLEYGIIPPVLKKKTSI

SEQ ID NO: 169735 - protein, 171 aa, Unknown
  Bacterial polypetide isolated from the Sargasso Sea
FVESTISKGKGNLSLTGNLGKVMKESATISLEYIKSNAKLLKIKENIFNDYNFHLHVPEGATPKDGPSAGVTMITSLVSLLSQRKVKSKLAMTGEITLRGKVLPVGGIKEKILAAKRAKINSIILPADNKKNVDEIDKKYLKGLNFFYVENILEVVEYALLRKKVSNFKKL

SEQ ID NO: 169736 - protein, 279 aa, Unknown
  Bacterial polypetide isolated from the Sargasso Sea
LVGPPGVGKTSLGKSIARATGRKFVRISLGGIRDEAEIRGHRRTYIGSLPGKIIQMMKKAGTKNPLFLLDEIDKVGSDYRGDPSSALLEALDPEQNKQFNDHYLEVDYDLSDVMFVTTANTLNILPPLLDRLEVIRLPGYTEDEKINISQKYLIPKQRENNGLKKEEWEVTKEINKTIIRDYTRESGVRNLERELSKIARKIVKKIDSKEKVNTTIEDKDLQNFLGVKKYNFGEIENENKVGVATGLAWTEVGGEILKIESVNMPGKGKMQSTGKLGEV

SEQ ID NO: 169737 - protein, 311 aa, Unknown
  Bacterial polypetide isolated from the Sargasso Sea
NIGSHITATISEKQQIFETADVKKRLNAIIKIMENETSIIGVEKRIRGRVKTQMEKTQREYYLNEQLKAIQKELGEIEDGKDENTSLNKSILKAKMPKEVEKKCLQELKKLKNMSPMSAEATVVRNYLDWMIDLPWHKKSEVDIDLAKALNILDKDHFGLEKVKERIIEFLAVQKRMEKIKGPILCLVGPPGVGKTSLGKSIAKATNREFVRMSVGGMRDEAEIRGHRRTYIGSLPGKIIQMMKKAGTKNPLILLDEIDKIGNDYRGDPSSALLEALDPEQNTTFNDHYLEVDYDLSDVMFVTTANTLNIL

SEQ ID NO: 169738 - protein, 297 aa, Unknown
  Bacterial polypetide isolated from the Sargasso Sea
MMESETSIIGVEKRIRGRVKTQMEKTQREYYLNEQLKAIQKELGEIEDGKDETTNLKKSIQKAKMPKEVEKKCMSELKKLKNMSPMSAEATVVRNYLDWMIDLPWFKKNDVDIDLNKGLKILDEDHFGLEKVKERIIEFLAVQKRMEKIKGPILCLVGPPGVGKTSLGKSIAKATNRQFIRMSLGGVRDEAEIRGHRRTYIGSLPGKIIQMMKKAGTKNPLFLLDEVDKIGNDYRGDPSSALLEALDPEQNTAFNDHYLEVDYDLSDVMFVTTANTLNILPPLLDRMEVIRIPGYTE

SEQ ID NO: 169739 - protein, 286 aa, Unknown
  Bacterial polypetide isolated from the Sargasso Sea
EVIRIPGYTEDEKINIANKYLLPKQVKENGVKDGELNLEDGTIKEIIRSYTRESGVRNLEREISKVTRKVVKKVVNGEVEKVKVNDKNIPDFLGIKKFKFGEVEDKNKTGIVIGLAWTEVGGEILKIETVNMPGKGRMQITGKLGDVMQESVKAAKSYVRSKSLEYGIIPPFFEKKDFHIHVPEGATPKDGPSAGIAMVTSIVSSITNIPVNREIAMTGEVTITGQVLQIGGLKEKLLAAHRAGVKKVLIPKENEKDLVDIPKKVREDIKIIPVETADEVLKIALT

SEQ ID NO: 169740 - protein, 285 aa, Unknown
  Bacterial polypetide isolated from the Sargasso Sea
GDPSSALLEALDPEQNKQFNDHYLEVDYDLSDVMFVTTANTLNILPPLLDRLEVIRLPGYTEDEKVNISQRFLIPKQSENNGLKKDDWEISTDVNKKIIRDYTRESGVRNLEREISKIARKIVKKIDSKEKINKTLSENDLQGYLGVKKYNFGEMESENKIGVATGLAWTEVGGEILKIESVNMPGKGKMQSTGKLGEVMQESIKAAKSYVRSKSLDFGIIPPIFEKKDFHIHVPEGATPKDGPSAGIAIVTSIISSITGVPVNKDVAMTGEVTLRGNVLQIGGL

SEQ ID NO: 169741 - protein, 142 aa, Unknown
  Bacterial polypetide isolated from the Sargasso Sea
DIHVHVPEGATPKDGPSAGVAIFNSLVSSMTSNKVKRDVAMTGEITLRGRVLPIGGLKEKIYAAARAGIRTVLIPDENKNEIKELDKEVLKNIKIIPIYEAKSILEYTLTKPINPLNISESELLDAQKSSQIENNIKENLRH

SEQ ID NO: 169742 - protein, 229 aa, Unknown
  Bacterial polypetide isolated from the Sargasso Sea
LGVPKFKHSEIEDKDLVGITTGLAWTEVGGELLTIESALSPGKGKISSTGKLGEVMKESIQAAEAFVKSRANLFGISFKDIEKSDIHLHVPEGATPKDGPSAGVAMITSIISSLTGNPVKHLVAMTGEMTLRGRVLPIGGLKEKLLAASRGGIKTVIIPKENEKDLSEIPENIKDGLDIKPISVVDEALEIALLNPLIPIKEVHKDKQKSTDESINVQSTVSKNEITAH

SEQ ID NO: 169743 - protein, 263 aa, Unknown
  Bacterial polypetide isolated from the Sargasso Sea
IKFNTKILNQIIRNYTREAGVRSLEKEISKICRKTVKILETSNKNKITLDSSKLTSFLGVSKFRQNEIEKKHLVGITNGLAWTEVGGEILSIEVLLSIGKGKLTITGKLGDVMKESIQAACSYVRSKSITLGIHPNDFDKYDIHIHVPEGATPKDGPSAGIAIFNSLVSSLTNNKVRKDVAMTGEITLRGRVLPIGGLKEKLYAATRAGIKKVLIPEENFREVSEFDKDIIKSIKIVPVSEAISILKHTLIKRSSTVKFERIR

SEQ ID NO: 169744 - protein, 302 aa, Unknown
  Bacterial polypetide isolated from the Sargasso Sea
KVLFVCTANQLDTIPGPLLDRMEEIRLSGYIAEEKLAIAKNHLWPKLLERHGAKPSQIRINDAAIRLVIDAYSREAGVRGLEKRLSSLVRASILKMVEENAQRVRIGKREVKDILGQARFKPERAQRGRGVVTGLAWTAMGGATLSIESSKIHTLRRGFKLTGQLGEVMKESAEIAYSYIVAHLREFGCETDFFDMSMVHLHVPEGATPKDGPSAGVTMATALVSLARGERLPRPLAMTGELTLTGQVLAVGGIREKVIAARRARITEVILPFANKGDYEALPDYLREGITVHFVRSFREVF

SEQ ID NO: 169745 - protein, 240 aa, Unknown
  Bacterial polypetide isolated from the Sargasso Sea
MQDGKDEISNLNKSILKAKMPKEAQNKCFAELKKLKAMSPMSAEATVVRNYLDWMIDLPWSNKSKIIKDLKAAQEILDKDHYGLGKVKERIIEFLAVQKRIEKLKGPILCLVGPPGVGKTSLGKSIAKATGRKFVRISLGGIRDEAEIRGHRRTYIGSLPGKIIQMMKKAGSKNPLFLLDEIDKVGSDYRGDPSSALLEALDPEQNKQFNDHYLEVDYDLSDVMFVTTANTLNILPPLLD

SEQ ID NO: 169746 - protein, 283 aa, Unknown
  Bacterial polypetide isolated from the Sargasso Sea
GIRDEAEIRGHRRTYIGSLPGKIIQMMKKAGTKNPLFLLDEIDKVGNDYRGDPSSALLEALDPEQNKEFNDHYLEVDYDLSDVMFVTTANTLNILPPLLDRMEVIRLSGYTEDEKVNISQKFLIPNQSKNNGLQKNEWNLDEKVIRKIVRHYTRESGVRNLEREISKIARKLVKKIDNSEKVNNPVDDKDLKDLLGVQKFNYGEIEEENRVGVVTGLAWTEVGGEILKIESAIMPGKGKMQITGKLGDVMQESVKAAKSYIRSKSLEFGIIPPIFDKKDFHIH

SEQ ID NO: 169747 - protein, 280 aa, Unknown
  Bacterial polypetide isolated from the Sargasso Sea
FLDPEQNHTFMDHYLEVEFDLSDVLFFCTANVAQDIPPALQDRMEVINLSGYTELEKVHILKRHLLPKQIEENGLNSSLLGFQNKSFDIIIQQYTREAGVRNLEREVGKICRKIATKLVMDEPQKKISITPKRVREYLGVPKYKHGKVEENNEIGITSGLAWTQAGGELLTTEVTVMKGTGKVQLTGKLGDVMKESAHAALSYVRTNANRLGIYSSVFKETDIHVHVPEGAVPKDGPSAGVTITTSLVSAFTGIPVLREVAMTGEVTLRGKVLPIGGLKE

SEQ ID NO: 169748 - protein, 208 aa, Unknown
  Bacterial polypetide isolated from the Sargasso Sea
LDVIDVEKRIRSRVKKQMEKSQREYYLNEKIKAAQKELGEMGEEGDEFEVLKNKIEDSGMSKEAMKKAKSEFSKFKMMSPTSAEASVVRSYLECLIDVPWKKRGKVKSDIKAALETLNDDHYGLEEVKDRILEYLAVQKRVKNLKAPVLCLVGPPGVGKTSLGESIARATNRKFIRMSLGGVRDEAEIRGHRRTYIGSMPGKIIQKLT

SEQ ID NO: 169749 - protein, 289 aa, Unknown
  Bacterial polypetide isolated from the Sargasso Sea
NEQLKAIQKELGEIEDGKDETTSINKAITKAKMPKDVEKKCLQELKKLKNMSPMSAEATVVRNYLDWMTELPWYKKSEVDIDLAKAQNILDKDHFGLEKIKERIVEFLAVQKRMEKIKGPILCLVGPPGVGKTSLGKSIAKATNREFVRMSVGGMRDEAEIRGHRRTYIGSLPGKIIQMMKKAGTKNPLILLDEIDKIGNDYRGDPSSALLEALDPEQNTTFNDHYLEVDYDLSDVMFVTTANTLNILPPLLDRMEVIRLAGYTEDEKINIANKYLLPKQVKDNGVKDK

SEQ ID NO: 169750 - protein, 290 aa, Unknown
  Bacterial polypetide isolated from the Sargasso Sea
EEKKTSNPIILLDEIDKVGSDWRGDPSSALLEVLDPEQNNQFNDHYLEVDYDLSNVMFICTGNTYNIPGPLLDRLEVIEVSGYTEKEKVEIAKKYLIPRKMTKNILKNSEFKLDKSSITKIVRHYTRESGVRALEKVFDKLFRKLVFQLEKNKSRSKKPFVFDDKAIKNFLGPEKFKDSVLEKKNLVGITNGLAWTQVGGDILNIEVNLSSGKGMINATGKLGDVMKESITAALGYIKSNSVEFGVNPKVFDKIDIHLHVPEGAIPKDGPSAGITIFTSLISSLTDIKIK

SEQ ID NO: 169751 - protein, 292 aa, Unknown
  Bacterial polypetide isolated from the Sargasso Sea
GMDHRGDPASALLEVLDPEQNNTFSDHYLEVDYDLSEVMFVCTANSLNIPTPLLDRMEIIRIPGYIEDEKINIAEKYLLPKQMKRNGLKDEEIKLNKNVILSLIRYYTREAGVRGLERQIARILRKVVKERLVDSSTKQKPTSISSKNLEKYSGVKKFKYGVAEKDNAVGQVTGLAWTEVGGELLTIEASNIDGKGRVIKTGSLGDVMQESIQAALTVVRSRAESLGIQPNFYEKYDVHIHVPEGATPKDGPSAGGAMAISLISIFTGIPVRADTAMTGEITLRGQILKIGD

SEQ ID NO: 169752 - protein, 292 aa, Unknown
  Bacterial polypetide isolated from the Sargasso Sea
ILCLVGPPGVGKTSLGKSIANATGRSFIRMSLGGVRDEAEIRGHRKTYIGSMPGRFIQAMKKSKSSNPLILLDEIDKLGSDWRGDPSSALLEVLDPEQNNKFNDHYLELDYDLSDVMFVCTANTLNIPAALLDRMEVIRIPGYTDKEKNQIAQKYLIPKQIKNHALKKNELKFNTTIINQIIRNYTREAGVRNLEKEISKICRKAVKIIETSNNSKINLDSKKLQDLLGVIKYRSNEIEKKNLVGITNGLAWTEVGGEILSIEVLLSLGKGKLTITGKLGEVMKESIQAATS

SEQ ID NO: 169753 - protein, 250 aa, Unknown
  Bacterial polypetide isolated from the Sargasso Sea
MFITTANTLNILPPLLDRMEVIRLPGYTEDEKVNISQKYLIPKQRENNGLKKGEWGINEEVNRKIIRNYTREAGVRNLEREISKIARKTVKKIDSKEKINIPFKVNDLVDYLGVQKFNYGEVEEQNRIGVATGLAWTEVGGEILKIESAIMPGKGKMQITGKLGDVMQESVKAAKSYIRSKSLEYGIIPPIFEKKDFHIHVPEGATPKDGPSAGIAIITSIISAITEVPINKDVAMTGEITLRGVVLQIG

SEQ ID NO: 169754 - protein, 322 aa, Unknown
  Bacterial polypetide isolated from the Sargasso Sea
MFVCTANTLNIPPALLDRMEVIRIPGYTEKEKNKIAQKYLVPKQLLYHALLKKEAKFNQKIIYQIIRNYTREAGVRNLEKEISKVCRKIVKTLETSSKKTVDLDNKKLQDYLGVTRFRSNEIEKRNLIGVTNGLAWTEVGGEILSIEVLLSIGKGKLTITGKLGEVMKESIQAATSYVRSKCLHLGIHPLDFDKYDIHVHVPEGATPKDGPSAGIAIFNSLVSSLTSNKVHKDVAMTGEITLRGRVLPIGGLKEKIYAAVRAGIKTVIIPEENKREIVEFDKDLLKSLKIISVSEADSILEHTLIKPVCSIEFDRIRSTSIS

SEQ ID NO: 169755 - protein, 290 aa, Unknown
  Bacterial polypetide isolated from the Sargasso Sea
YRGDPSSALLEALDPEQNTTFNDHYLEVDYDLSDVMFVTTANTLNILPPLLDRMEVIRIPGYTEDEKINIANKYLLPKQIKENGVKENELDLKDGTIREIIRSYTRESGVRNLEREISKITRKVVKKIVNNEQNKVEVDDKNINDFLGIKKFKYGEVETENKVGIVTGLAWTEFGGEILKIETVHMPGKGRMQITGKLGDVMQESVKAAKSFVRSKSLEYGIIPPLFEKKDFHIHVPEGATPKDGPSAGIAMVTSIVSSITNIPINREIAMTGEVTITGQVLPIGGLKEK

SEQ ID NO: 169756 - protein, 274 aa, Unknown
  Bacterial polypetide isolated from the Sargasso Sea
VLELTDIKARCEFLIKSMEGELDILHVEKKIRSRVKQQMEKSQREYYLNEQMKAIQKELGEIGDESNDLDQLLSKIKALKLPNDANDKAMSEFNKLKMMSPMSAEATVVRNYLDILVNLPWNQSTEISTDMNRAFNVLEEDHHGLEKVKERVLEYLAVTKRVNKIRGPILCLVGPPGVGKTSLAKSIARATSRKFIKMSLGGVRDEAEIRGHRKTYIGSMPGKIMQNLSKVKTNNPLFLLDEIDKMAMDFRGDPSSALLEVLDPEQNNVFNDHY

SEQ ID NO: 169757 - protein, 220 aa, Unknown
  Bacterial polypetide isolated from the Sargasso Sea
KGPILCLVGPPGVGKTSLGKSIAKATGREYIRMALGGVRDEAEIRGHRRTYIGSLPGKIIHGMKKASAINPLFLLDEIDKLGNDYRGDPSSALLEVLDPEQNKTFQDHYLEIDYDLSKVLFITTSNTLNMPQALLDRMEIIRLSGYTEDEKLEIAKRHLIKKQMDNCKLKDTEFSINEEALKIIIQSYTREAGVRSLERQLAKLTRKVVTKIEKNEAKHF

SEQ ID NO: 169758 - protein, 276 aa, Unknown
  Bacterial polypetide isolated from the Sargasso Sea
FTGIVRYYTREAGVRNLEREISKLSRKSVTKIVKNEQKDIKVTMENLEDFLGVKKFRFGLAEQDDQIGVVTGLAWTSVGGDLLHIEALKLPGKGRMKTTGKLGDVMKESIDAANSYVRSISAEVGIKPPKFDKTDIHVHVPEGATPKDGPSAGLAMVTSIVSVLTGIPVRKDLAMTGEVTLRGNALPIGGLKEKLLAALRGGIKTVLIPEENEKDLADIPENVKSSLEIIPVKNVSEVLKIALTEAPVPIEWDEAAEEAAAAKALKEQNDSQTTKH

SEQ ID NO: 169759 - protein, 258 aa, Unknown
  Bacterial polypetide isolated from the Sargasso Sea
IADNIASHITATISEKQQIFETVDVKKRLNTIIKIMENETSIIGVEKRIRGRVKTQMEKTQREYYLNEQLKAIQKELGEIEDGKDENANLNKAITKAKMPKEVEKKCLQELKKLKNMSPMSAEATVVRNYLDWMTELPWHKKSEVDIDLTKALNILDKDHFGLEKIKERIVEFLAVQKRMEKIKGPILCLVGPPGVGKTSLGKSIAKATNREFVRMSVGGMRDEAEIRGHRRTYIGSLPGKIIQMMKKAGTKNPLILL

SEQ ID NO: 169760 - protein, 315 aa, Unknown
  Bacterial polypetide isolated from the Sargasso Sea
DILIKDEDLLPLALTAVRRLEKLTSVNKKISSETINNIKQLKDPSKIVDNIVSNLNASISEKQQIFETLDVKKRLNAAIKMMESETSIIGVEKRIRGRVKTQMEKTQREYYLNEQLKAIQKELGEIEDGKDETTNLKKSIQKAKMPKEVEKKCMSELKKLKNMSPMSAEATVVRNYLDWMIDLPWYKKNDVDIDLNKGLKILDEDHFGLEKVKERIIEFLAVQKRMDKIKGPILCLVGPPGVGKTSLGKSIAKATNRQFIRMSLGGVRDEAEIRGHRRTYIGSLPGKIIQMMKKAGTKNPLFLLDEVDKIGNDYR

SEQ ID NO: 169761 - protein, 220 aa, Unknown
  Bacterial polypetide isolated from the Sargasso Sea
FLGVPKFKFGELESKNRVGIVTGLAWTEYGGEILKIETVTMPGKGRMQITGKLGDVMQESVKAAKSFVRSKCLEYGIIPPIFEKKDFHIHVPEGATPKDGPSAGIGMVTSIVSSITNIPVRRDLAMTGEVTLTGQVLPIGGLKEKLLAAHRAGIKEVLIPKENEKDLVDMPKKITDDIKITPVEYADQVIKIALTKELKPTEWVEVDISKKGDKSQASIQ

SEQ ID NO: 169762 - protein, 278 aa, Unknown
  Bacterial polypetide isolated from the Sargasso Sea
PEVLTSVKQIEDPGKLADTIASHLAVKILEKQELLELENILARLEKVYAHMEGEIGVLQVEKRIRNRVKRQMEKTQREYYLNEQMKAIQKELGDNEDGSDELTDIAEKIKKTKLTKEARDKANAELKKLKNMSQMSAEATVVRNYLDWLLGIPWKKKSKIKKDLTLAQSVLDRDHHGLEKVKERIVEYLAVQQRTGKVKGPILCLVGPPGVGKTSLGKSIAESTGRNFVRMSLGGVRDEAEIRGHRRTYIGSLPGKIIHSMKKAKTSNPLFLLDEIDK

SEQ ID NO: 169763 - protein, 277 aa, Unknown
  Bacterial polypetide isolated from the Sargasso Sea
VRKMKGPILCLVGPPGVGKTSLGRSIARATHREFARMSLGGIRDEAEIRGHRRTYIGSMPGKIIQGMSKIGKKNPLFLLDEIDKMAMDFRGDPASALLEVLDPEQNNTFNDHYLEVDYDLSEVMFVTTANSLNIPAPLLDRMEVIRVSGYTEDEKVNIAKNYLIDKQLEQNGLKKNEITIRDSAIRDIIRYYTREAGVRNLDREIANICRKIVKRILLKPSSKKNIVTSKKLESLLGVKQFRYGMMEDENRIGQVTGLAWTEVGGELLTIEAAIVGG

SEQ ID NO: 169764 - protein, 258 aa, Unknown
  Bacterial polypetide isolated from the Sargasso Sea
IGVEKRIRGRVKTQMEKTQREYYLNEQLKAIQKELGEIEDGKDETTSLNKAITKAKMPKEVEKKCLQELKKLKNMSPMSAEATVVRNYLDWMTDLPWYKKSEVDIDLKKALEILDKDHFGLEKVKERIVEFLAVQKRMKKIKGPILCLVGPPGVGKTSLGKSIAKATNREFVRMSVGGMRDEAEIRGHRRTYIGSLPGKIIQMMKKAGTKNPLILLDEIDKIGNDYRGDPSSALLEALDPEQNTSFNDHYLEVDYDLS

SEQ ID NO: 169765 - protein, 249 aa, Unknown
  Bacterial polypetide isolated from the Sargasso Sea
KAKMPKDASKKCLSELKKLKSMSPMSAEATVVRNYLDWMVELPWSTKDKKIENIDIPEAKKILDEDHYGLEKVKERILEYLAVQRRVGKIKGAILCLVGPPGVGKTSLGKSIARATGRKFVRMSLGGIRDEAEIRGHRRTYIGSLPGKIIQQMKKAGTKNPLFLLDEIDKVGSDYRGDPSSALLEALDPEQNIAFNDHYLEVDYDLSDVMFVTTANTLNILPPLLDRLEVIRIPGYTEDEKVNIANNYL

SEQ ID NO: 169766 - protein, 269 aa, Unknown
  Bacterial polypetide isolated from the Sargasso Sea
EFLAVQKRMEKIKGPILCLVGPPGVGKTSLGKSIAKATNREFVRMSVGGMRDEAEIRGHRRTYIGSLPGKIIQMMKKAGTKNPLILLDEIDKIGNDYRGDPSSALLEALDPEQNTTFNDHYLEVDYDLSDVMFVTTANTLNILPPLLDRMEVIRLAGYTEDEKINIANKYLLPKQIKDNGVKEKEMKLEDDIIKEVIRGYTKESGVRNLEREISKLARKVVKKIVAGEEKEVQINNKNLPDFLGVAKFKFGELESENRVGIVTGLAWTE

SEQ ID NO: 169767 - protein, 279 aa, Unknown
  Bacterial polypetide isolated from the Sargasso Sea
FGLDKVKERIIEFLAVQKRMEKIKGPILCLVGPPGVGKTSLGKSIAKATNRQFIRMSLGGVRDEAEIRGHRRTYIGSLPGKIIQMMKKAGTKNPLFLLDEVDKIGNDYRGDPSSALLEALDPEQNTTFNDHYLEVDYDLSDVMFVTTANTLNILPPLLDRMEVIRIPGYTEDEKINIANKYLLPKQIKDNGVKEGELNLIDGTIKEIIRSYTRESGVRNLEREISKVTRKVVKKVVNGEENNVEVNDKNISEFLGVKKFKFGELEAKSKTGIVIGLAWT

SEQ ID NO: 169768 - protein, 210 aa, Unknown
  Bacterial polypetide isolated from the Sargasso Sea
EVKKRLNSIIKIMENETSIIGVEKRIRGRVKTQMEKTQREYYLNEQLKAIQKELGEIEDGKDETTNLKKSIQKAKMPKEVEKKCMAELKKLKNMSPMSAEATVVRNYLDWMVDIPWYKKDKVDINLNNALKILDEDHYGLEKIKERIIEFLAVQKRMDKIKGPILCLVGPPGVGKTSLGKSIAKATNRQFIRMSLGGVRDEAEIRGHRRT

SEQ ID NO: 169769 - protein, 274 aa, Unknown
  Bacterial polypetide isolated from the Sargasso Sea
KTDVFMYGCESSILQLLKLPDGTVKVLVEGLKRVKITDFKDDEKFISCTYEYNNDVINKDEDLMPLAITAVRRLEKLTSINKKISSDTITNIKELKDPIKIVDNIASHLNASILEKQQIFETTDVKKRLNGVIKIMESEASIIGVEKRIRGRVKTQMEKTQREYYLNEQLKAIQKELGEIEDGKDETSNLNKAILKAKMPKEVQKKCMSELKKLKNMSPMSAEATVVRNYLDWMIDLPWFKKDKVDIDLNKALKTLDEDHYGLEKVKERIIEFL

SEQ ID NO: 169770 - protein, 281 aa, Unknown
  Bacterial polypetide isolated from the Sargasso Sea
EALAKNLKNSFIELIKISPNLNEEHAGMLSNIDRPSRLADRATSLLSVSNSEKQQVLEELDVRKRVENAINLLQKEIQRIKLGEEIQSEVQDEISKTQREYYLREQMKTIQKELGEDSQTVELDDLKKKIEDVKMSDEANKVANKELDRLGRISPQSPEYSVARTYLEWLTELPWSKSSKDNLNVKEAQKTLDQDHYGLPKVKERVLEYLAVRSLKKKVTKEETVRGPILCFTGPPGVGKTSLGKSIAKSMGREFVRISLGGVRDEAEIRGHRRTYIGALP

SEQ ID NO: 169771 - protein, 297 aa, Unknown
  Bacterial polypetide isolated from the Sargasso Sea
KTQIAKRYLVPKQIQNHGLKKTEISFNSKVLNSIVRNYTKEAGVRNLEKEISKVCRKTVKKLETTKLKKIKLNDKSLQDFLGVAKFRSSEIEKKNLIGVTNGLAWTVVGGEILSVEVILSIGKGKLTITGKLGEVMRESIQAATSYVKSKSISLGINPKDFENYDIHIHVPEGATPKDGPSAGIAIFNSLVSSLTNNKIKRDVAMTGEITLRGRVLPIGGLKEKIYAASRAGIKKVLIPQENFREVSEFDKEVIKDIKIIPVSEAFSILEHTLIKPVISLNLTESQIKNNQNTTSTH

SEQ ID NO: 169772 - protein, 140 aa, Unknown
  Bacterial polypetide isolated from the Sargasso Sea
DKNDFHIHVPEGATPKDGPSAGVGMVTSIISAITEIPVNKNVAMTGEITLRGLVLPIGGLKEKLLAAHRAGIKKVLIPIENKKDLIEVPKTILDNMEIITVKNVDEVLKVALTKPFKRVEWVEVDQISNKGKSKEELSTH

SEQ ID NO: 169773 - protein, 263 aa, Unknown
  Bacterial polypetide isolated from the Sargasso Sea
GGVRDEAEIRGHRRTYIGALPGRIIQNIKKAGTNNPVFMLDEVDKLGSDFRGDPSSALLEVLDPEQNHSFNDHYLELDFDLSKVMFIATANNYGNIPPALRDRMEILEFSGYIQDEKVQIAKRHLIPKQIKENGLKNSEVTLDLNSIKELISAYTREAGVRQLERQVANVLRKVARDIVESKKKQIKVTKTKVHKLLGASRFHSELAERATEPGVVTGLAWTAAGGDILFIESTRMKGKGKLTLTGQLGDVMKESATAGLTFV

SEQ ID NO: 169774 - protein, 313 aa, Unknown
  Bacterial polypetide isolated from the Sargasso Sea
ISLGGIRDEAEIRGHRRTYIGSLPGKIIQQMKKAGSKNPLFLLDEIDKVGSDYRGDPSSALLEALDPEQNVNFNDHYLEVDYDLSDVMFVTTANTLSILPPLLDRLEVIRIPGYTEDEKVNIANNYLIPKQVKDNGLKENEFNLDSNVLKDIIRSYTKEAGVRNLEREISKIARKTVKGILTNENGAKKIGTENLHDFLGVKKFKYGEIENDNKVGIVTGLAWTEFGGEILKIESAVMPGKGKMQITGKLGDVMQESVKAAKSYVRSKSLEFGIIPPIFEKKDFHIHVPEGATPKDGPSAGIAMVTSIVSSIT

SEQ ID NO: 169775 - protein, 306 aa, Unknown
  Bacterial polypetide isolated from the Sargasso Sea
KNDTSFLKCDVEIADDINTTKDLDVYAQSLVKRFEKLIVLNKKDFNENLNIIKNSKDAKIIADNIAANLNVKIFQKQEILEIRDLRKRLEKIYEIVNKETSVISVEKKIRGRVKNQMEKTQREYYLNEQLKAIQKELGEIDEGKDEIANISRAITKAKMPKIAQEKCFSELKKLKSMSPMSAEATVVRNYLDWMTELPWSEKTKINTDLSSAQKILDEDHYGLEKVKERIIEFLAVQKRIQKMKGPILCLVGPPGVGKTSLGKSIAKATNRKFIRISLGGIRDEAEIRGHRRTYIGSLPGKIIQMM

SEQ ID NO: 169776 - protein, 271 aa, Unknown
  Bacterial polypetide isolated from the Sargasso Sea
IQKLKGPILCLVGPPGVGKTSLGKSIAKATNRKFIRISLGGIRDEAEIRGHRRTYIGSLPGKIIQMMKKAGSKNPLFLLDEIDKVGNDYRGDPSSALLEALDPEQNKEFNDHYLEVDYDLSDVMFVTTANTLNILPPLLDRMEVIRLSGYTEDEKVNISQKFLIPNQSKNNGLKEEEWSIDEDINRKIIRHYTRESGVRNLEREISKIARKLVKKIDNKEIISNPINEKDLKDLLGVQKFNYGEIEEENRIGVVTGLAWTEVGGEILKIES

SEQ ID NO: 169777 - protein, 245 aa, Unknown
  Bacterial polypetide isolated from the Sargasso Sea
APSVGKTSLAESIASATNRKFVRMALGGVRDEAEIRGHRRTYIGSMPGRLIQKMTKVGVRNPLFLLDEIDKMGSDMRGDPASALLEVLDPEQNHNFNDHYLEVDYDLSDVMFLCTSNSMNIPPALLDRMEVIRLPGYTEDEKINIAVKYLAPKQISANGLKKGEIEFEVEAIRDIVRYYTREAGVRGLERQIAKICRKAVKEHALEKRFSVKVVADSLEHFLGVKKFRYGLAEQQDQVGQVTGLA

SEQ ID NO: 169778 - protein, 319 aa, Unknown
  Bacterial polypetide isolated from the Sargasso Sea
SNISLFNSKNDYLSANYSLLKIKSQNNSNIRALIKIILEQFESYQKINKKISPEIISNLKNYRDYIKLADVVSANLNINLTQKQELLETASLEKSLDKIYGYLIAEIDSMQIEKKIKGRVKRQMEKTQKEYYLNEQMKAIQKELGDNEEVDDIVEIENKLKKLKLSSEAREKCKSELKKLKNMSPMSAEATVIRNYLDWVISIPWNNPSAISKNIKKAKSILESDHYGLEKVKDRILEYLAVQKRINKIKGPILCLVGPPGVGKTSLGKSIANSTGRNFVRMSLGGVRDEAEIRGHRKTYIGSMPGKILPAMKKSRSFY

SEQ ID NO: 169779 - protein, 300 aa, Unknown
  Bacterial polypetide isolated from the Sargasso Sea
KYLIPKQLKNHALKSNEIKFKSTIINNIIRGYTREAGVRNLEKEVSKICRKTVKNIETSSKKRVKLDSSTLKNYLGIPRFRNNEIEKKNLVGVTNGLAWTEVGGEILSVEVLLSLGKGKLTITGKLGEVMKESIQAATSYVRSQCLSLGIHPHDFEKYDIHVHVPEGATPKDGPSAGIAIFNSLVSSLTSNKIKKDVAMTGEITLRGRVLPIGGLKEKIYAAVRAGIKTVLIPEENYNELEEFDKDVIKALKIIPVSDATSILKHTLTKSIIPLNLSESDILRAQKSSFQSENVNEKITH

SEQ ID NO: 169780 - protein, 275 aa, Unknown
  Bacterial polypetide isolated from the Sargasso Sea
ALDPEQNTTFNDHYLEVDYDLSDVMFVTTANTLNILPPLLDRMEVIRLAGYTEDEKISIANKYLLPKQIKDNGVKEKEMKLDNDIIKEVIRGYTKESGVRNLEREISKLARKVVKKIVAGEEKEVGINNKNLSEFLGVPKFKFGELEAKNRVGIVTGLAWTEYGGEILKIETVTMPGKGRMQITGKLGDVMQESVKAAKSFVRSKCLEYGIIPPIFEKKDFHIHVPEGATPKDGPSAGIGMVTSIVSSITNIPVRRDLAMTGEVTLTGQVLPIGG

SEQ ID NO: 169781 - protein, 303 aa, Unknown
  Bacterial polypetide isolated from the Sargasso Sea
MDLEKKQTLLEITEPRRRLEIVYERMLEESEFKKVERKLKERVQGQIGKTQKEYYLNEQIKAIQKELGQGEDGKAEQEEYEKRLEDISLSQEAREIAEKELKKLKMMPPMSAEANVVRNYIDWLLDMPWGDKTEDRFDLDAAEKILNKGHYGLEKIKERIIEYLAVAQKVGSLKGPIICLVGPPGVGKTSLARSVADALGRNFARMSLGGVRDEAEVRGHRRTYVGAMPGKIIQSLRKVKSKNPLLLLDEVDKMTRGVMGDPSSALLEVLDPEQNHTFMDHYLEVEFDLSDVLFFCTANVAQD

SEQ ID NO: 169782 - protein, 321 aa, Unknown
  Bacterial polypetide isolated from the Sargasso Sea
DEAEIRGHRRTYIGALPGRIIQSLKKAKTNNPVFMLDEIDKLGSDFRGDPSSAMLEVLDPEQNHAFSDHYLEVDFDLSKVMFIATANYPDNIPPALYDRMEMIDFRGYIDDEKVQIAKKHLIPKQVKENGLTSKQVKFNDTGIKEIISSYTRESGVRSLEREISNVLRKIAVDVVNKKLKTASISKKSVNEYLGIPKFQSDLAERTTKPGVVTGMAWTAAGGDILFIESSKMKGKGILTLTGQLGDVMKESASAAFTYVKSHTDILNLKDDFADKMDIHVHCPAGAIPKDGPSAGVGMFTSLVSLLTNKPVKSKVAMTGEI

SEQ ID NO: 169783 - protein, 286 aa, Unknown
  Bacterial polypetide isolated from the Sargasso Sea
IQKELGEIEDGKDETTSINKAITKAKMPKDVEKKCLQELKKLKNMSPMSAEATVVRNYLDWMTELPWHKKSEVDIDLTKAQNTLDKDHFGLEKIKERIVEFLAVQKRMEKIKGPILCLVGPPGVGKTSLGKSIAKATNREFVRMSVGGMRDEAEIRGHRRTYIGSLPGKIIQMMKKAGTKNPLILLDEIDKIGNDYRGDPSSALLEALDPEQNTTFNDHYLEVDYDLSDVMFVTTANTLNILPPLLDRMEVIRLAGYTEDEKINIANKYLLPKQIKDNGVKDKEMN

SEQ ID NO: 169784 - protein, 283 aa, Unknown
  Bacterial polypetide isolated from the Sargasso Sea
CDLQIANDLNASKDLDDNAIGMVKKFEKLQILNKKDFDENLSNLKNLKSAEQITNNISANLNIEISEKQELLETRDLKRRLEKVYQYIEKETSVISVEKKIRGRVKNQMEKTQREYYLNEQLKAIQKELGEIDEGKDEISNISGAIAKAKMPKIAQEKCMSELKKLKSMSPMSAEATVVRNYLDWMTELPWSNKSKINTDLKNAQKILDEDHYGLEKVKERIIEFLAVQKRIQKMRGPILCLVGPPGVGKTSLGKSIAKATNRKFIRISLGGIRDEAEIRGHR

SEQ ID NO: 169785 - protein, 300 aa, Unknown
  Bacterial polypetide isolated from the Sargasso Sea
IILVTQKNSEIDDPKKTDIFMYGCEGSILQLLKLPDGTVKVLVEGVRRVKIIDFKDNEKFITCDFTPHNDVIDGDEDLYPLAVTAIRRMEKLTSINKKVSSETINTIKQLKDPSQIADNIASHITATISEKQQIFETIDVKKRLNAIIKIMENETSIIGVEKRIRGRVKTQMEKTQREYYLNEQLKAIQKELGEIEDGKDENTSLNKAILKSKMPKDVEKKCLQELKKLKNMSPMSAEATVVRNYLDWMIDLPWHKKSDVVIDLKKALEVLDKDHFGLEKVKERIIEFLAVQKRMDKIKG

SEQ ID NO: 169786 - protein, 270 aa, Unknown
  Bacterial polypetide isolated from the Sargasso Sea
KIVDTKLKNNNNLKALIKVVLENFEEYSRVNKKIPSEVVTNLNSMSDANKISDIVSINLTINMEQKQELLEMINIEERLNKIHLYLVSEIDSFQMEKKIKGRVKRQMEKTQKEYYLNEQMKAIQKELGDNEDTDDIAEIEKKLDTVKLSKEAKEKCKSEIKKLKNMSPMSAEATVIRNYLDWVLSIPWNNSSAVSKNIKKAKSILENDHYGLDKVKERILEYLAVQKRTDKIKGPILCLVGPPGVGKTSLGKSIATATGRNFVRMSLGGV

SEQ ID NO: 169787 - protein, 308 aa, Unknown
  Bacterial polypetide isolated from the Sargasso Sea
GKDELTSLSKAIADAKMPKLAKDKCLSELKKLKSMSPMSAEATVVRNYLDWMTELPWSNKSKINTDLNNAQKILDEDHYGLEKVKERIIEFLAVQKRIQKMKGPILCLVGPPGVGKTSLGKSIAKATNRKFIRISLGGIRDEAEIRGHRRTYIGSLPGKIIQMMKKAGTKNPLFLLDEIDKVGNDYRGDPSSALLEALDPEQNKEFNDHYLEVDYDLSDVMFVTTANTLNILPPLLDRMEVIRLSGYTEDEKVKISQKYLIPNQSKNNGLNKEEWTIDEDINRKIIRNYTRESGVRNLEREISKVARN

SEQ ID NO: 169788 - protein, 293 aa, Unknown
  Bacterial polypetide isolated from the Sargasso Sea
LSSEKQQIFETVDVKKRLNAIIKIMENETSIIGVEKRIRGRVKTQMEKTQREYYLNEQLKAIQKELGEIEDGKDETTSLNKAITKAKMPKEVEKKCLQELKKLKNMSPMSAEATVVRNYLDWMTELPWHKKSEVDIDLKKALDILDKDHFGLEKVKERIIEFLAVQKRMEKIKGPILCLVGPPGVGKTSLGKSIAKATNREFVRMSVGGMRDEAEIRGHRRTYIGSLPGKIIQMMKKAGTKNPLILLDEIDKIGNDYRGDPSSALLEALDPEQNTTFNDHYLEVDYDLSDVMF

SEQ ID NO: 169789 - protein, 183 aa, Unknown
  Bacterial polypetide isolated from the Sargasso Sea
GKLTITEKLGDVMKESIQAATSYVRSQSLNLGIHPHDFDKYDIHVHVPEGATPKDGPSAGIAIFNSLVSSLTSNKVIKDIAMTGEITLRGRVLPIGGLKEKIYAAVRAGIKKVLIPEENKSEIVEFDKDVVKAIKIIPVSEATSILKHSLTKPIIPLNLSESEISQAQKSTFRADNLNENITH

SEQ ID NO: 169790 - protein, 296 aa, Unknown
  Bacterial polypetide isolated from the Sargasso Sea
KNSEVDDPKKNDVFSYGCESNILQLLKLPDGTVKVLVEGIKRVKIIDFKDDEKFITCTYENQKDVLNKDEDLLPLALTAVRRLEKLTSVNKKVSSETINNIKQLKDPSKIVDNIVSNLNASISEKQQIFETLDVKKRLNAAIKMMESETSIIGVEKRIRGRVKTQMEKTQREYYLNEQLKAIQKELGEIEDGKDETTNLKKSIQKAKMPKEVEKKCMSELKKLKNMSPMSAEATVVRNYLDWMIDLPWFKKNDVDIDLNKGLKILDEDHFGLEKVKERIIEFLAVQKRMKKLKDQF

SEQ ID NO: 169791 - protein, 232 aa, Unknown
  Bacterial polypetide isolated from the Sargasso Sea
PPEVLTSVKQIEDTAKLADTIASHLAVKISEKQELLELDSILGRLEKIYAHMEGEIGVLQVEKRIRNRVKRQMEKTQREYYLNEQMKAIQKELGESEDGSDELSDIAERIKKVRLTKEAREKATAELKKLKNMSQMSAEATVVRNYLDWLLGIPWKKKSRVKKDLSAAQQVLDRDHHGLEKVKERIVEYLAVQQRTGKVKGPILCLVGPPGVGKTSLGKSIAESTGRNFVRM

SEQ ID NO: 169792 - protein, 257 aa, Unknown
  Bacterial polypetide isolated from the Sargasso Sea
LLEFLGYTENEKESIANKYLMPKQLDNNGLTEKDIKFNKNIFLEIIRSYTREAGVRNLEREISKICRKVVKKLLLNKKLKNIKLDKNNLKDYLGVKRFKHGEIEKENVIGLVNGLAWTEVGGEMLSVETAVIPGKGKYILTGQLGDVMQESIRAAMTIVRKRALNIGIDKDFYETKDIHVHFPEGATPKDGPSAGVGITTSLVSALTENPVKSSVAMTGEVNLHGQVLPIGGLKEKMLAASRAGIKTVIIPLENEKD

SEQ ID NO: 169793 - protein, 226 aa, Unknown
  Bacterial polypetide isolated from the Sargasso Sea
KRIAAIARWVALQTAWVKEYDARISIEKVDEILGVPRPKSLSELTDVPGVVTGLAWTSVGGDILFIESIISNGKGNLTMTGNLGTVMKESATIALEYIKAKHLDLGIDEEHIEKKNIHVHVPEGATPKDGPSAGIAMLTSMVSSFTNRKVKPHLAMTGEITLRGKVLPVGGIKEKLLAATRAGIKEVILCEANRKDVEEIKQDYLKNLKVHYVGWMREVLQIALEK

SEQ ID NO: 169794 - protein, 306 aa, Unknown
  Bacterial polypetide isolated from the Sargasso Sea
LLENYLDWLVSVPWDDKSKINTDLKKAENILNNDHYGLEKIKERIIEFLAVQKRVEKIQGPILCLVGPPGVGKTSLGKSIAKATGREFVRISLGGIRDESEIRGHRRTYIGSMPGKIIQGMKKVKKSNPLFLLDEVDKMGYDFRGDPSSALLEALDSEQNSKFNDHYLEVDYDLSSVMFITTANTLNIPPALLDRMEVIRLPGYVEDEKIEIAKKHLIPKNISNHGLKRSEWKINTNTLKELIKFYTKEAGVRNLERELSNLIRKAIRELSTSRKNNINITSKNLEKYARIKKFRKNELEDKDLVG

SEQ ID NO: 169795 - protein, 281 aa, Unknown
  Bacterial polypetide isolated from the Sargasso Sea
KTQREYYLNEQLKAIQKELGEIEDGKDETTNLKKSIQKAKMPKEVEKKCMSELKKLKNMSPMSAEATVVRNYLDWMIDLPWFKKDNVDIDLNKGLKILDEDHFGLEKVKERIIEFLAVQKRMEKIKGPILCLVGPPGVGKTSLGKSIAKATNRQFIRMSLGGVRDEAEIRGHRRTYIGSLPGKIIQMMKKAGTKNPLFLLDEVDKIGNDYRGDPSSALLEALDPEQNTAFNDHYLEVDYDLSDVMFVTTANTLNILPPLLDRMEVIRIPGYTEDEKINIAN

SEQ ID NO: 169796 - protein, 137 aa, Unknown
  Bacterial polypetide isolated from the Sargasso Sea
KSNTKLLNIKESIFNDYNFHLHVPEGATPKDGPSAGVTMITSLVSLLTQRKVKNKFAMTGEITLRGKVLPVGGIKEKILAAKRAKINSIILPTDNKKNVDEIDKKYLKGLNFFYVENILEVVEYALLRKKVSNFKKL

SEQ ID NO: 169797 - protein, 292 aa, Unknown
  Bacterial polypetide isolated from the Sargasso Sea
KERIVEYLAVQKRVKSMKAPVLCLVGPPGVGKTSLGESIARATNRKFVRMSLGGVRDESEIRGHRRTYIGSMPGKIIQKLSKVGVKNPLFLLDEIDKIGMDHRGDPASALLEVLDPEQNNTFSDHYLEVDYDLSEVMFVCTANSLNIPTPLLDRMEIIRIPGYIEDEKINIAEKYLLPKQMKRNGLKDEEIKFNKNVILSLIRYYTREAGVRGLERQIARILRKVVKERLLENKTKVKPTSISSKNLKKYSGVKKFKYGVAEKDNAVGQVTGLAWTEVGGELLTIEASNIDG

SEQ ID NO: 169798 - protein, 306 aa, Unknown
  Bacterial polypetide isolated from the Sargasso Sea
GADWRGDPTSALLEVLDPAQNNNFQDHYLEVDFDLSNVMFITTANTLNMPQPLMDRMEIIRLSGYTEDEKLEIAKRHLVTKQIKDHGLKDGELAIDDDALRNAIRLYTREAGVRNLEREIAKIARKTVTAIISGKVSSVTVTANNLGDYLGVQKFRFGEVEHADQVGVTTGLAWTEVGGELLNIEAVKVPGKGKVTATGKLGEVMKESIQAAEFFIKSRARSYGIDLMELAKHDVHVHVPEGATPKDGPSAGVGMATSIISAITGVEVRRDVAMTGEITLRGRVLPIGGLKEKILAAQRGGLKTVL

SEQ ID NO: 169799 - protein, 310 aa, Unknown
  Bacterial polypetide isolated from the Sargasso Sea
KRIRGRVKNQMEKTQREYYLNEQMKAIQKELGDIEDGKDEITQLQKAIIKAKMPKEAAKKCLAELKKLRSMSSMSAEATVVRNYLDWMVELPWNNKDKKLDNININDAKKVLDEDHYGLEKVKERILEYLAVQKRVGKMKGAILCLVGPPGVGKTSLGKSIARATGRKFVRMSLGGIRDEAEIRGHRRTYIGSLPGKIIQQMKKAGTKNPLFLLDEIDKVGNDYRGDPSSALLEALDPEQNIAFNDHYLEVDYDLSDVMFVTTANTLNILPPLLDRLEVIRIPGYTEDEKINIANNYLIPKQLKDNGVKK

SEQ ID NO: 169800 - protein, 236 aa, Unknown
  Bacterial polypetide isolated from the Sargasso Sea
MSEENEVEINNKNLSDFLGVAKFKFGELETENRVGIVTGLAWTEYGGEILKIETVVMPGKGRMQITGKLGDVMQESVKAAKSFVRSKCLEYGIIPPVFEKKDFHIHVPEGATPKDGPSAGIGMVTSIVSSITNIPVRRDVAMTGEVTLTGQVLPIGGLKEKLLAAHRAGIKEVLIPKENEKDLVDMPKKIIDDIKITPVEYADQVIKIALIKELKPTEWVEVDISKKDDKSQASIQ

SEQ ID NO: 169801 - protein, 291 aa, Unknown
  Bacterial polypetide isolated from the Sargasso Sea
YYLNEQMKAIQKELSEEDDSKDEITEFEEKINKLKLSKEAKVKAKSELKKLKGMGPTSAESSVVRNYLDWLISIPWKKFTRVKYDLSEAENILNEDHFGLDKVKDRIIEYLAVQSRTRKLKGPIICLVGAPGVGKTSLGKSLARATGRKFVRISLGGVRDESEIRGHRRTYIGSMPGKIIQSLKKGKSSNPLFLLDEIDKIGSDWRGDPASALLEVLDPEQNSTFNDHYLDLDYDLSDVMFVTTANSLNMPRPLLDRMEIINLSGYLENEKIEIAKRHLISKQLERNGLKN

SEQ ID NO: 169802 - protein, 260 aa, Unknown
  Bacterial polypetide isolated from the Sargasso Sea
LPKQIKDNGVKEKEMKLSDDIIKEVIRSYTKESGVRNLEREISKIARKVVKKVVSGEEKEVNIDTKNLPDFLGVPKFKSGELESENRVGIVTGLAWTEYGGEILKIETVTMPGKGRMQITGKLGDVMQESVKAAKSFVRSKCLEYGIIPPLFEKKDFHIHVPEGATPKDGPSAGIGMVTSIVSSITNIPVKRDVAMTGEVTLTGQVLPIGGLKEKLLAAHRAGIKEVLIPKENEKDLVDMPKKIIDEIKITPVEFADEVL

SEQ ID NO: 169803 - protein, 208 aa, Unknown
  Bacterial polypetide isolated from the Sargasso Sea
MGLAWTQVGGDILNIEVNLSSGKGMINATGKLGDVMKESITAALGYIKSNSVEFGVNPKVFDKVDIHLHVPEGAIPKDGPSAGITIFTSLISSLTEIKIKRDIAMTGEITLKGRVLPIGGLKEKLLAAIRYGIKTVIIPKENEKDLAEIQKDIQNKLVIKKVEFAKEVLDLALDGKISKINKKLDWRHLVTESMKPKNQQNQEKTFVN

SEQ ID NO: 169804 - protein, 180 aa, Unknown
  Bacterial polypetide isolated from the Sargasso Sea
KGKMQITGKLGDVMQESVKAAKSYIRSKSLEYGIIPPLFDKKDFHIHVPEGATPKDGPSAGIGMVTSIISAITEIPVDKKVAMTGEITLRGIVLPIGGLKEKLLAAHRAGIKKVIIPMENKKDLAEVPKTILETMEIIPVKNVDEVLKVALIKPLKRVEWVEVDQISKKEKSKKEELSTH

SEQ ID NO: 169805 - protein, 296 aa, Unknown
  Bacterial polypetide isolated from the Sargasso Sea
REYYLNEQLKAIQKELGEIEDGKDETSNLNKAIQKAKMPKEVQKKCLTELKKLKNMSPMSAEATVVRNYLDWMIDIPWYKKDKVDIDLNKGLKTLDDDHYGLEKVKERIIEFLAVQKRMEKIKGPILCLVGPPGVGKTSLGKSIAKATNRQFVRMSLGGVRDEAEIRGHRRTYIGSLPGKIIQMMKKAGTKNPLILLDEVDKVGNDYRGDPSSALLEALDPEQNTNFNDHYLEVDYDLSDVMFVTTANTLNILPPLLDRMEVIRIPGYTEDEKINIADKYLLPKQIKENGVKNEEL

SEQ ID NO: 169806 - protein, 322 aa, Unknown
  Bacterial polypetide isolated from the Sargasso Sea
SLDVINNVKTLNDPDKIVDIIVSNISISLSQKQEILEIIKTEERLNKVYGYLVSEIDSFQVEKKIKGRVKRQMEKTQKEYYLNEQMKAIQKELGDNEDLDEIAELEKKLNEYDLSKEAKEKCVSEIKKLKNMSPMSAEATVIRNYLDWVVSIPWNNPHQISQNINKASTILENDHYGLDKVKERILEYLAVQKRTNKLKGPILCLVGPPGVGKTSLGKSIANSTGRSFVRMSLGGVRDEAEIRGHRKTYIGSMPGRFIQAMKKSKSSNPLILLDEIDKLGSDWRGDPSSALLEVLDPEQNSKFNDHYLELDYDLSDGNVCVH

SEQ ID NO: 169807 - protein, 229 aa, Unknown
  Bacterial polypetide isolated from the Sargasso Sea
MAVQKRMEKLKGPILCLIGPPGVGKTSLGKSIAKATNRQFVRMSLGGVRDEAEIRGHRRTYIGSLPGKIIQMMKKAGTKNPLILLDEIDKVGNDYRGDPSSALLEALDPEQNVTFNDHYLEVDYDLSDVMFVTTANTLNILPPLLDRMEVIRIPGYTEDEKINIANKYLLPKQIKENGVKTEELELKDGTVKEIIRSYTRESGVRNLEREISKVARKVVKKVVSGEEKK

SEQ ID NO: 169808 - protein, 304 aa, Unknown
  Bacterial polypetide isolated from the Sargasso Sea
LGSDFRGDPSSAMLEVLDPEQNHAFSDHYLEVDFDLSKVMFISTANYPDNIPPALYDRMEMIDFRGYIDDEKVQIAKKHLIPKQVKENGLTSKQVKFNDTGIKEIISSYTRESGVRSLEREISNVLRKIAVDVVNKKLKTASISKKSVNEYLGIPKFQSDLAERTTKPGVVTGMAWTAAGGDILFVESSKMKGKGVLTLTGQLGDVMKESASAAFTYVKSHTDILNLKDDFADKMDIHVHCPAGAIPKDGPSAGVGMFTSLVSLLTNKPVKSKVAMTGEITLRGNVLAIGGVKEKVTAAHRAGI

SEQ ID NO: 169809 - protein, 311 aa, Unknown
  Bacterial polypetide isolated from the Sargasso Sea
VDVKKRLNAIIKIMENETSIIGVEKRIRGRVKTQMEKTQREYYLNEQLKAIQKELGEIEDGKDETTSLNKAITKAKMPKEVEKKCLQELKKLKNMSPMSAEATVVRNYLDWMTELPWHKKSEVDIDLKKALDVLDKDHFGLEKVKERIIEFLAVQKRMEKIKGPILCLVGPPGVGKTSLGKSIAKATNREFVRMSVGGMRDEAEIRGHRRTYIGSLPGKIIQMMKKAGTKNPLILLDEIDKIGNDYRGDPSSALLEALDPEQNTTFNDHYLEVDYDLSDVMFVTTANTLNILPPLLDRMEVIRLAGYTEDE

SEQ ID NO: 169810 - protein, 269 aa, Unknown
  Bacterial polypetide isolated from the Sargasso Sea
KIIQMMKKAGTSNPLFLLDEIDKVGSDYRGDPSSALLEALDPEQNKTFNDHYLEVDYDLSDVLFVTTANTLNILPPLLDRMEIIRLPGYTEDEKINISQKFLIPKQSEDNGLKKEEWEITEKVNKKIIRDYTRESGVRNLEREISKIARKMVKKIDSKEKVNKTISEGDLSKYLGIKKFNFGEIEKENQIGVVTGLAWTEVGGEILKIESVNMPGKGKMQITGKLGEVMQESVKAAKSYVRSKSLEYGIIPPFFEKKDFHIHVPEGATP

SEQ ID NO: 169811 - protein, 311 aa, Unknown
  Bacterial polypetide isolated from the Sargasso Sea
TAFKLPDGTVKVLVEGLKRVKIIDFQDDEKFITCAYEHCNDVFLKNEDLMPLAITAVRRLEKLSSINKKISSETITKIKELKDPAKIADNIASHLNVTISERQQIFETTDVKKRLNSVIKIMENETSIIGVEKKIRGRVKTQMEKTQREYYLNEQLKAIQKELGEIEEGKDETSNLNKAIQKAKMPKEVQKKCMSELKKLKNMSPMSAEATVVRNYLDWMIDIPWYKKDKIDIDLNKALNQLDEDHYGLEKVKERIIEFLAVQKRMDKIKGPILCLIGPPGVGKTSLGKSIAKATNRQFVRMSLGGVRDEA

SEQ ID NO: 169812 - protein, 297 aa, Unknown
  Bacterial polypetide isolated from the Sargasso Sea
EASVVRTYLDCLVDVPWKKKSKIKTDIKASMDILEKDHYGLEEVKERIVEYLAVQKRVKSMKAPVLCLVGPPGVGKTSLGESIARATNRKFVRMSLGGVRDESEIRGHRRTYIGSMPGKIIQKLSKVGVKNPLFLLDEIDKIGMDHRGDPASALLEVLDPEQNNTFSDHYLEVDYDLSEVMFVCTANSLNIPTPLLDRMEIIRIPGYIEDEKINIANKYLLPKQMERNGIKENEIKINKNVILSLIRYYTREAGVRGLERQIAKILRKVVKERLVTETKSDKATSITPKEFREVFGS

SEQ ID NO: 169813 - protein, 202 aa, Unknown
  Bacterial polypetide isolated from the Sargasso Sea
FLLDEVDKIGNDYRGDPSSALLEALDPEQNTAFNDHYLEVDYDLSDVMFVTTANTLNILPPLLDRMEVIRIPGYTEDEKINIANKYLLPKQVKENGVKNGELNLEDGTIKEIIRSYTRESGVRNLEREISKVTRKVVKKVVSGEVEKVQVNDKNIPDFLGIKKFKYGEVEDKDKTGIVIGLAWTEVGGEILKIETVNMPGKG

SEQ ID NO: 169814 - protein, 358 aa, Unknown
  Bacterial polypetide isolated from the Sargasso Sea
HSSKKELEVARLQSEISDEVNEKVSQHQREFFLREQLKIIQRELGLSKDDKTAEADTFRERMDALSPPEPVKKRFDDELHKLSVLETGSPEYGVTRNYLDWLTSVPWGQYTDDNLDLAHAQAVLSEHHTGLNDVKDRIIEFLAVGALRGEVKGSIILLVGPPGVGKTSIGKSIADALGRRFYRFSLGGMRDEAEIKGHRRTYIGAMPGKLVQALKETGTSNPVIMLDEVDKLGQSFQGDPASALLEVLDPEQNQDFLDHYLDERLDLSHALFICTANTLDSIPGPLLDRMEVIRLSGYITEEKVAIARQHLWPRSLERAGVKPAQLRISDSALRQVVEGYAREAGVRNLEKQLNKMIR

SEQ ID NO: 169815 - protein, 281 aa, Unknown
  Bacterial polypetide isolated from the Sargasso Sea
NFNDHYLEVDYDLSDVMFVTTANTLSILPPLLDRLEVIRIPGYTEDEKVNIANKYLIPKQIESNGLKNEEWNLEKDALKDIIRNYTKESGVRNLEREISKLARKTVKNILTSVEEKNFEINSKNLPDYLGVKKFKYDEIESDNRVGIVTGLAWTEFGGEILKIESAMMPGKGKMQITGKLGDVMQESVKAAKSYVRSKSLEFGIIPPIFEKKDFHVHVPEGATPKDGPSAGIAMVTSIISTITGIPVNKKIAMTGEVTLRGNVLPIGGLKEKLLAAHRARI

SEQ ID NO: 169816 - protein, 264 aa, Unknown
  Bacterial polypetide isolated from the Sargasso Sea
MIYLTYFFVTTANTLNILPPLLDRMEIIRLPGYTEDEKINISQKFLIPKQSEDNGLKKEEWEITENVNKKIIRDYTRESGVRNLEREISKIARKMVKKIDSKEKVNKNISEDDLSSYLGVKKYNFGEIEKENQIGVVTGLAWTEVGGEILKIESVNMPGKGKMQITGKLGEVMQESVKAAKSYVRSKSLEYGIIPPFFEKKDFHIHVPEGATPKDGPSAGIAIVTSIISSITGVPVSKDVAMTGEVTLKGNVLQIGGLKEKLLA

SEQ ID NO: 169817 - protein, 268 aa, Unknown
  Bacterial polypetide isolated from the Sargasso Sea
FKKDKVDIDLKNALKVLDDDHYGLDKVKERIIEFLAVQKRMDKIKGPILCLIGPPGVGKTSLGKSIARATNRQFVRMSLGGVRDEAEIRGHRRTYIGSLPGKIIQLMKKAGTKNPLILLDEIDKVGNDYRGDPSSALLEALDPEQNTTFNDHYLEVDYDLSDVMFVTTANTLNILPPLLDRMEVIRIPGYTEDEKINIANKYLLPKQIKENGVKTEELELEDGTIREIIRSFTRESGVRNLEREISKVARKVVKKVVSGEEKKVVVTN

SEQ ID NO: 169818 - protein, 310 aa, Unknown
  Bacterial polypetide isolated from the Sargasso Sea
DVLFFCTANVAQDIPPSLHDRMEVINLSGYTELEKFHILKRHLIPKQIEENGLTGKQIQFQKKSIENIIQQYTREAGVRNLEREVAKVCRKAATQLVIDPSIEKITATPVRIREFLGVPKYKFGKIEEQNEIGITSGLAWTQAGGELMMTEVSIMKGTGKLNLTGKLGEVMKESAHAALSYVRTNANRLGIFSSVFKETDIHIHVPEGAVPKDGPSAGVTITTALVSAFTEIPVRREVAMTGEITLRGKVLPIGGLKEKLLAAKRGLIKTVLIPSKNEKDLQEIPDEIKNQLDILSTDTVDKVLENALEK

SEQ ID NO: 169819 - protein, 173 aa, Unknown
  Bacterial polypetide isolated from the Sargasso Sea
KTGSLGEVMQESIQAALTVVRSRSDSLGIKKDFYEKFDTHIHVPEGATPKDGPSAGVGMTTALISAFTEIPVRSDVAMTGEITLRGQVLKIGGLKEKLLAAKRGGIKKVIIPLDNKADLKEIPDVITDKLEIIPVEWIDEVILHSLESQPKAINKSSSFKSKSKKSTKTVSKH

SEQ ID NO: 169820 - protein, 285 aa, Unknown
  Bacterial polypetide isolated from the Sargasso Sea
IIENEASIIGVEKRIRGRVKNQMEKTQREYYLNEQLKAIQKELGEIEDGKDETSNLNKAILKAKMPKEVQKKCMSELKKLRNMSPMSAEATVVRNYLDWMIDIPWYKKDQVDIDLNKAMKVLDQDHFGLEKVKERIIEFLAVQKRMQKIKGPILCLVGPPGVGKTSLGKSIARATNRQFVRMSLGGVRDEAEIRGHRRTYIGSLPGKILQMMKKAGTKNPLFLLDEVDKIGNDYRGDPSSALLEALDPEQNKTFNDHYLEVDYDLSDVLFVTTANTLNILPPIIR

SEQ ID NO: 169821 - protein, 290 aa, Unknown
  Bacterial polypetide isolated from the Sargasso Sea
SSALFEALDPEQNTTFNDHYLEVDYDLSDVLFVTTANTLNILPPLLDRMEVIRIPGYTEDEKINIANKYLLPKQIKDNGVKKGELQLSEGTIKEIIRSYTKESGVRNLEREISKIARKVVKKIVAYEETKVNVNENNISNFLGVKKHKFGELESENKIGIVTGLAWTEYGGEILKIETVNMPGKGKMQITGKLGDVMQESVKAAKSYVRSKSLEYGIIPPTFEKKDFHIHVPEGATPKDGPSAGIAMVTSIVSSVTNIPVNKEIAMTGEVTITGQVLPIGGLKEKLLAAP

SEQ ID NO: 169822 - protein, 299 aa, Unknown
  Bacterial polypetide isolated from the Sargasso Sea
GYIEDEKLQIAQNYLLPKQLERNGLEDKELNLNKNVLLDLIRYYTREAGVRGLERQISKILRKVVKERLLSKKKTATKIDSKNLEKYSGVRKFKFGEAESSNTIGQVCGLAWTEVGGELLTIEASKVSGKGKTIKTGSLGEVMQESIQAALTVVRSRSDSLGIKKDFYEKFDTHIHVPEGATPKDGPSAGVGMTTALISAFTEIPVRSDVAMTGEITLRGQVLKIGGLKEKLLAAKRGGIKKVIIPLDNKADLKEIPDVITDKLEIIPVEWIDEVILHSLESQPKAINKSSSFKSKSKK

SEQ ID NO: 169823 - protein, 305 aa, Unknown
  Bacterial polypetide isolated from the Sargasso Sea
SKIADNIASHLNTTISEKQQIFETIDIKKRLNGVIKIMENETSIIGVEKRIRGRVKTQMEKTQREYYLNEQLKAIQKELGEIEDGKDETSSLNKAIQKAKMPKEVQKKCMSELKKLKNMSPMSAEATVVRNYLDWMIDIPWFKKDKVDIDLNKALKILDEDHFGLEKVKERIVEFLAVQKRMEKLKGPILCLVGPPGVGKTSLGKSIARATNRQFVRMSLGGIRDEAEIRGHRRTYIGSLPGKIIQLMKKAGTKNPLILLDEIDKVGNDYRGDPSSALLEALDPEQNTTFNDHYLEVDYDLSDVL

SEQ ID NO: 169824 - protein, 312 aa, Unknown
  Bacterial polypetide isolated from the Sargasso Sea
LKNNLVDAQKVLDDDHFGIEKVKERIIEYLAVQKRTGKIKGPLLCLVGPPGVGKTSLGKSMANATGRKFVRMSLGGVRDEAEIRGHRRTYIGSMPGRIIQALKKAGTNNPLILLDEVDKLGADWRGDPSSALLEVLDPEQNNSFQDHYLEVDCDLSNVMFVTTANSLNMPKPLLDRMEIIRLSGYTELEKLEIAKQHLLPKVIKEHGLKNNEFSLTDKELLEVIRSYTREAGVRGLEREISKLSRKLITEILIKNKKKIKVDHKAINKFLGVPKFKHSEIEDKDLVGITTGLAWTEVGGELLTIESALSPGK

SEQ ID NO: 169825 - protein, 263 aa, Unknown
  Bacterial polypetide isolated from the Sargasso Sea
RGDPTSALLEVLDPEQNDTFNDHYLEVDYDLSDVMFVTTANTLRMPPPLLDRMEIIRIPGYTEDEKVEIAKRHLLPKQLKENGLKENEWSISDGAMRDLIRYYTREAGVRNLEREIANVARKSIKEILMEEHVTEIKVTSRNVDKYAGIRKFRFGEAEEENIVGVVTGLAWTEVGGELLTIESAKTPGKGKIQKTGKLGDVMQESVQAAETYVKSRAAEFGIKPTTFESIDIHVHVPEGATPKDGPSAGVAMVTSIVSVLTGI

SEQ ID NO: 169826 - protein, 280 aa, Unknown
  Bacterial polypetide isolated from the Sargasso Sea
VDLSDRFDKIMNFIQAELDVMQVEKKIRGRVKNQMEKTQREYYLNEQMKAIQKELGEGEDGKDDVQEYEEKIEATKLSKEAREKCYAEMKKLRSMSPMSAESGVIRNYLDWILSIPWNKKTKVKKDINFAEKVLNQDHYGLEKVKERILEYLAVQQRIKKMKGPILCLVGAPGVGKTSLGKSIARSTGRKFVRMSLGGVRDEAEIRGHRRTYIGSLPGKVLQMMKKAGSSNPLFLLDEIDKLGADYRGDPSSALLEVLDPEQNNSFNDHYLEVDYDLSDT

SEQ ID NO: 169827 - protein, 310 aa, Unknown
  Bacterial polypetide isolated from the Sargasso Sea
LGESIAKATGREFTEFSLGGVRDEAEIRGHRRTYIGSMPGKILQKMSKTGVKNPLFLLDEIDKMGADYRGDPSSALLEVLDPEQNHTFNDHFLEVDYDLSDVMFVCTANSLDIPGPLLDRMEIIRLPGYTEDEKLSIAKNYLVPKQLKNNGLKENEIKFEDSGLLDAIRYFTREAGVRALEREIAKICRKTIKKIADIKKKTIQKVNAKNLEDYLGVKKFDFGEAKEKDKIGQVTGLAWTQVGGELLTIEAATFKGKGRIIKTGRLGDVMQESIQAAVSVIRSRAEGLGINPEFSDLNDIHIHVPEGATP

SEQ ID NO: 169828 - protein, 112 aa, Unknown
  Bacterial polypetide isolated from the Sargasso Sea
KQDLHIHVPEGATPKDGPSAGITMCTAIASLILDKKVKANLAMTGEITLAGKVLKIGGLKEKLIAAKRSGITNVIIPHENKGDLEEIEANILKDVNIHPVKAIEEVLEKALV

SEQ ID NO: 169829 - protein, 296 aa, Unknown
  Bacterial polypetide isolated from the Sargasso Sea
KTSLVKSMANSTGRSFVRMSLGGVRDEAEIRGHRKTYIGSMPGRFIQAMKKSKSSNPLILLDEIDKLGSDWRGDPSSALLEVLDPEQNSKFNDHYLELDYDLSDVMFVCTANTLNIPPALLDRMEVIRIPGYTEKEKNQIAKKYLVPKQIKNHGIKNSEIAFSVKVLNSIIRYYTKEAGVRNLEKEISKVCRKAVKRLETTRLKKVNLNEKSLKDFLGISKFRTSEIEKRNLVGVTNGLAWTEVGGEILSVEVILSIGKGKLTITGKLGEVMRESIQAATSYVKSKSVNLGINPKD

SEQ ID NO: 169830 - protein, 308 aa, Unknown
  Bacterial polypetide isolated from the Sargasso Sea
TSPLLPLRDIVVFPSMVIPLFVGRDKSISALNEVMKNNKKIVLVTQKNSEVDDPKKTDVFLYGCESSILQLLKLPDGTVKVLVEGIKRVKIVDFKDDEKFITCSYEYNNEIISENEDLIPLAMTAVRRLEKLTSINKKISSETISNIKELKDPSKIADNIASHLNSTISEKQQIFETVDVKKRLNGVIKIMENETSIIGVEKRIRGRVKTQMEKTQREYYLNEQLKAIQKELGEIEDGKDETSSLNKAIQKAKMPKEVQKKCLTELKKLKNMSPMSAEATVVRNYLDWMIDIPWFKKDKVDIELNKAS

SEQ ID NO: 169831 - protein, 248 aa, Unknown
  Bacterial polypetide isolated from the Sargasso Sea
MFVTTANTLNILPPLLDRMEVIRIPGYTEDEKINIANKYLLPKQIKENGVKKEELELVDGTIKEIIRSYTRESGVRNLEREISKVARKVVKKVVNGEEKKVTVNDKNVHDFLGVKKFKYGEVESEDKVGIVTGLAWTEFGGEILKIETVHMPGKGRMQITGKLGDVMQESVKAAKSFVRSKSLEYGIIPPIFEKKDFHIHVPEGATPKDGPSAGIAMVTSIVSAITNNPVNKHIAMTGEVTLLGQYYK

SEQ ID NO: 169832 - protein, 260 aa, Unknown
  Bacterial polypetide isolated from the Sargasso Sea
VGPPGVGKTSLGQSIAKATNRKYTRMALGGVRDEAEIRGHRKTYIGALPGKLLQKLAKVEVKNPLFLFDEIDKMGMDHRGDPASALLEVLDPEQNHTFNDHYLEVDYDLSDVMFVCTSNSMDIPPALLDRMEIIRIPGYTEDEKVNIALRYLLPKQIKANGLRKHELKLPEETLRDLIRYYTREAGVRGLEREIAKICRKVVREHVESSDNASITLTPDMLEDYSGVKKFKYGLAEESNQVGQVTGLAWTQVGGELLTIE

SEQ ID NO: 169833 - protein, 94 aa, Unknown
  Bacterial polypetide isolated from the Sargasso Sea
MQGKGRRQVTGRLGDVMKESIQAAVSYVRFNAPALGIIPPEFEKKDIHVHVPEGATPKDGPSAGVAIVTSIVSILTGIPVNYKVAMTGEITLRG

SEQ ID NO: 169834 - protein, 159 aa, Unknown
  Bacterial polypetide isolated from the Sargasso Sea
SIQAATSYVKSKSVSLGINPRDFENYDIHIHVPEGATPKDGPSAGIAIFNSLVSSLTNNKIKRDVAMTGEITLRGRVLPIGGLKEKIYAASRAGIKKVLIPQENFREVSEFDKEVLKGIKIIPVSNAFSILEHTLVKSIIPLNLSESQLKNNQNTTSTH

SEQ ID NO: 169835 - protein, 290 aa, Unknown
  Bacterial polypetide isolated from the Sargasso Sea
ALLEALDPEQNKQFNDHYLEVDYDLSDVMFVTTANTLNILPPLLDRMEIIRIPGYTEDEKINISQKFLIPKQSKNNGLKDNEWKISEKLNKKIIRDYTRESGVRNLEREISKIARKIVKKIDAQEKVNHEILESELSNYLGVKKFNFGEMETENKVGVATGLAWTEVGGEILKIESVNMPGKGKMQITGKLGEVMQESVKAAKSYVRSKSLEYGIIPPLFEKKDFHVHVPEGATPKDGPSAGIAIVTSIISSITGVSVNKDVAMTGEVTLRGNVLQIGGLKEKLLAAHRA

SEQ ID NO: 169836 - protein, 305 aa, Unknown
  Bacterial polypetide isolated from the Sargasso Sea
RLAGYTEDEKISIANKYLLPKQIKDNGVKEKEMKLDDNIIKEVIRGYTKESGVRNLEREISKLARKVVKKIVAGEEKEVGINNKNLSDFLGVPKFKFGELEAENRVGIVTGLAWTEYGGEILKIETVTMPGKGRMQITGKLGDVMQESVKAAKSFVRSKCLEYGIIPPIFEKKDFHIHVPEGATPKDGPSAGIGMVTSIVSSITNIPVRRDVAMTGEVTLTGQVLPIGGLKEKLLAAHRAGIKEVLIPKENEKDLVDMPKKIIDDIKITPIEYADQVIKIALTKELKPTEWVEVEISKKDDKSQA

SEQ ID NO: 169837 - protein, 265 aa, Unknown
  Bacterial polypetide isolated from the Sargasso Sea
LKTMSPMSAEATVVRNYLDWVLSIPWNNPKPISKNISKASKILEIDHYGLEKVKDRILEYLAVQKRMDKLRGPILCLVGPPGVGKTSLGKSIANATGRNFVRMSLGGVRDEAEIRGHRKTYIGSMPGRFIQSMKKSKSSNPLILLDEIDKLGSDWRGDPSSALLEVLDPEQNSKFNDHYLEMDYDLSDVMFVCTANTLNIPPALLDRMEIIRIPGYTEKEKNQIAQKYLVPKQIRDHGLKKSELKFNTKILSYIIRNYTREAGVR

SEQ ID NO: 169838 - protein, 268 aa, Unknown
  Bacterial polypetide isolated from the Sargasso Sea
LNEVMKNDKKIILVTQKNSEIDDPKKTDIFMYGCEGNILQLLKLPDGTVKVLVEGVKRVKILDFKDNDKFIVCEYSALNDIINKDEDLYPLAATAVRRLEKLTSINKKISSETINNIKQLKDPSQIADNIASHISATISEKQQIFENVDVKKRLNSIIKIMENETSIIGVEKRIRGRVKTQMEKTQREYYLNEQLKAIQKELGEIEDGKDESTSLNKAILKAKMPKEVEKKCLQELKKLKNMSPMSAEATVVRNYLDWMTELPWFKKS

SEQ ID NO: 169839 - protein, 307 aa, Unknown
  Bacterial polypetide isolated from the Sargasso Sea
MRGDLSSACWRVLDPEQNDKFNDHYLELDYDLSDVMFVCTANTLNIPPALLDRMEIIRIPGYTEKEKNKIAQKYLIPKQLKNHHLKRNELKFSNQSINQIIRNYTREAGVRNLEKEVSKVCRKTVKLLETSNKKTVILNDKIMQDFLGISRFRSSEIEKINLVGVTNGLAWTEVGGEILSIEVILAIGKGRLTITGKLGEVMKESVQAAISYVKSHSLNLGIHPFDFDKYDIHVHVPEGATPKDGPSAGLAIFNSLVSSLTSNKVRKDVAMTGEITLRGRVLPIGGLKEKVYAASRAGIKKVLILRK

SEQ ID NO: 169840 - protein, 299 aa, Unknown
  Bacterial polypetide isolated from the Sargasso Sea
EVDKVGNDYRGDPSSALLEALDPEQNTTFNDHYLEVDYDLSDVMFVTTANTLNILPPLLDRMEVIRIPGYTEDEKINIANKYLLPKQIKDNGVKDGELNLADGTIKEIIRSYTRESGVRNLEREISKVTRKVVKKVVNNEQNNVEVSEKNISDFLGIKKFKFGELETENKIGIVIGLAWTEFGGEILKIETVNMPGKGRMQITGKLGDVMQESVKAAKSFVRSKSLEYGIIPPFFEKKDFHIHVPEGATPKDGPSAGIAMVTSIVSSMTNIPVDRNIAMTGEDTVTGQVLPIGGLKEKL

SEQ ID NO: 169841 - protein, 322 aa, Unknown
  Bacterial polypetide isolated from the Sargasso Sea
VGKTSLGKSIAKATNRQFVRMSLGGVRDEAEVRGHRRTYIGSLPGKIIQMMKKAGTKNPLFLLDEIDKVGNDYRGDPSSALLEALDPEQNTTFNDHYLEVDYDLSDVMFVTTANTLNILPPLLDRMEVIRIPGYTEDEKINIANKYLLPKQIKDNGVKEGEMKLADDTIKEIIRSYTRESGVRNLEREISKVTRKVVKKVVNNEEKSVDVNEKNIPDFLGIKKFKFGELETKDKVGIVIGLAWTEFGGEILKVETVNMPGKGRMQITGKLGDVMQESVKAAKSYVRSKCLEFGVTPPLFEKKDFHIHVPEGATPKDGPSAGI

SEQ ID NO: 169842 - protein, 286 aa, Unknown
  Bacterial polypetide isolated from the Sargasso Sea
RQFVRMSLGGVRDEAEVRGHRRTYIGSLPGKIIQMMKKAGTKNPLFLLDEIDKIGNDYRGDPSSALLEALDPEQNTTFNDHYLEVDYDLSDVMFVTTANTLNILPPLLDRMEVIRIPGYTEDEKINIANKFLLPKALKENGVKEGEMDLQEGTFKEIIRNYTRESGVRNLEREISKITRKVVKKVVNSEETKVKVEPKNINDFLGVKKFKFGELENEDKVGIVTGLAWTEFGGEILKIETVNMPGKGRMQITGKLGDVMQESVKAAKSYVRSKSLDFGIIPPIFEK

SEQ ID NO: 169843 - protein, 247 aa, Unknown
  Bacterial polypetide isolated from the Sargasso Sea
LTAIRRLEKLTSINKKISSETINSIKQLKDPSKIADNVASHLNTSISEKQQIFETLDVKKRLNGVIKIMENEASIIGVEKRIRGRVKNQMEKTQREYYLNEQLKAIQKELGEIEDGKDETTNLKKSIQKSKMPKDVEKKCLSELKKLKNMSPMSAEATVVRNYLDWMIDLPWYKKDKVDIDLNKALKILDEDHFGLEKIKERIIEFLAVQKRMEKIKGPILCLVGPPGVGKTSLGKSIAKATNRQFI

SEQ ID NO: 169844 - protein, 254 aa, Unknown
  Bacterial polypetide isolated from the Sargasso Sea
FLSSLLEAQIELIEVEQRIRGRVRKQMEKSQKEYFLNEQIKAAQKELGDISDEKNELDELQKKIEETKLSKEALEKVSSEFSKLRQMSPMSAEATVVRTYIETLLEVPWNKTTKINVDLNKAKEILDEDHYGLKEVKERILEYLAVQKRVKKMKAPVLCFVGPPGVGKTSLGESIARSVNREFTRLSLGGVRDEAEIRGHRKTYIGSMPGKIIQKLSKGKVKNPLFLLDEIDKIGMDHRGDPSSALLEVLDPEQ

SEQ ID NO: 169845 - protein, 312 aa, Unknown
  Bacterial polypetide isolated from the Sargasso Sea
VGNDYRGDPSSALLEALDPEQNKEFNDHYLEVDYDLSDVMFVTTANTLNILPPLLDRMEVIRLAGYTEDEKVNISQKYLIPNQSKNNGLKKDEWKIDENINRKIIRHYTRESGVRNLEREISKIARKLVKKIDNNEKVNNPIKDNDLKDLLGVQKFKYGEIEEENRIGVVTGLAWTEVGGEILKIESVVMPGKGKMQITGKLGDVMQESVKAAKSYIRSKSLDYGIIPPIFDKKDFHIHVPEGATPKDGPSAGIGMVTSIISAITEIPVNKDVAMTGEITLRGLVLPIGGLKEKLLAAHRAGIKKVLIPNGK

SEQ ID NO: 169846 - protein, 283 aa, Unknown
  Bacterial polypetide isolated from the Sargasso Sea
TNREFVRMSVGGMRDEAEIRGHRRTYIGSLPGKIIQMMKKAGTKNPLILLDEIDKIGNDYRGDPSSALLEALDPEQNTSFNDHYLEVDYDLSDVMFVTTANTLNILPPLLDRMEVIRLAGYTEDEKINIANKYLLPKQIKDNGVKDKEMNLSDNIIKEVIRGYTKESGVRNLEREISKIARKVVKKIVAGEEKEVTVNNKNLSDFLGVAKFNFGELESNNKVGIVVGLAWTEYGGEILKIETVTMPGKGRMQITGKLGDVMQESVKAAKSFVRSKCLEYGIIP

SEQ ID NO: 169847 - protein, 268 aa, Unknown
  Bacterial polypetide isolated from the Sargasso Sea
LDEIDKMENDYRGDPSSALLEALDPEQNTTFNDHYLEVDYDLSDVMFVTTANTLNILPPLLDRMEVIRIPGYTEDEKINIANKYLLPKQIKENGIKDGEMNLKEGTIKEIIRNYTRESGVRNLEREISKVTRKVVKKVVNEEEKKVEINDKNISDFLGVKKFKFGELESENRIGIVIGLAWTEFGGEILKVETVNMPGKGRMQITGKLGDVMQESVKAAKSFVRSKSLEYGIIPPVFEKKDFHIHVPEGATPKDGPSAGIAMVTSNSF

SEQ ID NO: 169848 - protein, 316 aa, Unknown
  Bacterial polypetide isolated from the Sargasso Sea
FPILVIPLFVGRDKSINALNEVMKKEKKIILVTQKNSEVDDPTKNDVFSYGCESNILQLLKLPDGTVKVLVEGINRVKITDYTDNKDFITCSYEKVTDQINKEEDLMQTALSAVKKLEKLTSINKKISSETINNIKVLKDPSKIADNIASHLNASISEKQQIFETQDVKKRLNLIIKIMENETSIIGVEKRIRGRVKTQMEKTQREYYLNEQLKAIQKELGEIEDGKDETSNLNKSILKAKMPKDVEKKCLSELKKLKNMSPMSAEATVVRNYLDWMIDLPWFKKDKTEIDLNKAQKVLDEDHFGLEKVKERIIDS

SEQ ID NO: 169849 - protein, 291 aa, Unknown
  Bacterial polypetide isolated from the Sargasso Sea
PMSAEATVVRNYLIWMVDLPWGNKSKVIKDLNTAQKILDEDHYGLEKVKERIIEFLAVQKRIEKLKGPILCLVGPPGVGKTSLGKSIARATGRKFVRISLGGIRDEAEIRGHRRTYIGSLPGKIIQMMKKAGTKNPLFLLDEIDKVGSDYRGDPSSALLEALDPEQNKQFNDHYLEVDYDLSDVMFVTTANTLNILPPLLDRMEIIRIPGYTEDEKTNIAQKFLIPKQSNDNGLKSNEWKITKEVIKKIIRDYTRESGVRNLEREISKIARKMVKKIDSSEKINNELMKKT

SEQ ID NO: 169850 - protein, 286 aa, Unknown
  Bacterial polypetide isolated from the Sargasso Sea
PLLDRMEVIRIPGYTEDEKINIANKYLLPKQIKENGVKKEELVLADGTIKEIIRSYTRESGVRNLEREISKVARKVVKKVVSGEDKKVTVNDSNVHDFLGVKKFKYGEVESEDKVGIVTGLAWTEFGGEILKIETVHMPGKGRMQITGKLGDVMQESVKAAKSFVRSKSVEYGIIPPIFEKKDFHIHVPEGATPKDGPSAGIGMVTSIVSAITNNPVNKDIAMTGEVTITGQVLPIGGLKEKLLAAHRAGIKQVIIPKDNEKDLTDIPKKVREDIKITVVESVDEV

SEQ ID NO: 169851 - protein, 243 aa, Unknown
  Bacterial polypetide isolated from the Sargasso Sea
RPEKISRGEGWSAKSWQYAGIRRFRYGEIEAEDMVGVVTGLAWTEVGGELLTIESLVLPGKGNMKYTGKLGDVMQESIQAAASYVRARAVDFGIKPTVFEKRDIHVHVPEGATPKDGPSAGVAMCVSIVSTLTRIPIRRDIAMTGEITLRGRVLPIGGLKEKLLAASRGGIKTVLIPHENEKDLADIPENVKKELEIISVSDLDEVIEHSFVTRPVAIDWPEFEDDDEINVSESKEKDSVVTH

SEQ ID NO: 169852 - protein, 308 aa, Unknown
  Bacterial polypetide isolated from the Sargasso Sea
KKIKGRVKRQMEKTQKEYYLNEQMKAIQKELGDNEDFDDNAELEKKINKINLTSEAKEKAKSELKKLKSMSPMSAESTVIKNYLDWIINIPWNNPSSISKNIFKAKSILDFDHYGLDEVKDRIIEYLAVQKRMNKIKGPILCLVGPPGVGKTSLGKSIANATGRNFVRMSLGGVRDEAEIRGHRRTYIGSMPGKFIQAMKKSKSSNPLILLDEIDKLGQDWRGDPSSALLEVLDPEQNNTFNDHYLEVDYDLSDAMFVCTANTLNIPPALLDRMEIIRIAGYTEKEKSQIAKRFLIPKQFKVNGLKKS

SEQ ID NO: 169853 - protein, 254 aa, Unknown
  Bacterial polypetide isolated from the Sargasso Sea
GSIKEIIKNYTRESGVRNLEREISKIARKVVKKVVNGEEKKVTINDKNLSDFLGVKKFKYGELENEDRVGIVTGLAWTEFGGEILKIETVHMPGKGKMQITGKLGDVMQESVRAAKSFVRSKSLEYGIIPPLFEKKDFHIHVPEGATPKDGPSAGIGMVTSIVSSITNNPVNKEIAMTGEVTLTGQVLPIGGLKEKLLAAHRAGIKHVIIPKDNEKNLVDIPKKVKEDIKISAVENVDEVLKIALKKELKKIEW

SEQ ID NO: 169854 - protein, 295 aa, Unknown
  Bacterial polypetide isolated from the Sargasso Sea
KIILVTQKNSEVDDPSRNDLFNFGCESTILQLLKLPDGTVKVLVEGLKRVKIVDFKDQEKFINCVYEYQNDILDAEENLNPLASIAVRRLEKLNSINKKISSETINTIKQLKEPSKIADNIASHLNCTISEKQQIFENNDVKKRLNGVIKIMENETSIIGVEKRIRGRVKTQMEKTQREYYLNEQLKAIQKELGEIEDGKDETSNLNKAILKAKMPKEVQKKCMQELKKLKNMSPMSAEATVVRNYLDWMIDLPWYKKDKVDIDLNKALKTLDEDHYGLEKVKERIIEFLAVQKR

SEQ ID NO: 169855 - protein, 304 aa, Unknown
  Bacterial polypetide isolated from the Sargasso Sea
AILKARMPKEVQTKCMNELKKLRNMSPMSAEATVVRNYLDWMIDLPWYKKDKVDINLDKALKVLELDHYGLEKVKERIIEFLAVQKRMEKIKGPILCLVGPPGVGKTSLGKSIAKATNRQFVRMSLGGIRDEAEVRGHRRTYIGSLPGKIIQMMKKAGTKNPLILLDEIDKVGNDYRGDPSSALLEALDPEQNTTFNDHYLEVDYDLSDVLFVTTANTLNILPPLLDRMEVIRIPGYTEDEKINIANNFLLPKQIKENGVKDGELKLSNGTVKEIIRNYTRESGVRNLEREISKVTRKVVKKVV

SEQ ID NO: 169856 - protein, 167 aa, Unknown
  Bacterial polypetide isolated from the Sargasso Sea
AAEFFIKSRAGSYGIDLRELAKTDLHVHVPEGATPKDGPSAGVAMVTSIVSAVTGIEVRRDIAMTGEITLRGRVLPIGGLKEKLLAALRGGLKTVLIPLENEKDLAEIPDNAKEGLEIISVGMVDEVLSEALVREPLPMGISSGSGEDAASVAIGDANDGSDDITAH

SEQ ID NO: 169857 - protein, 275 aa, Unknown
  Bacterial polypetide isolated from the Sargasso Sea
MTKEAQSKCLSELKKLKSMSPMSAEATVVRNYLDWMVDLPWFNKSKTIKDLKAAQKILDEDHYGLEKVKERIIEFLAVQKRIEKLKGPILCLVGPPGVGKTSLGKSIARATGRKFVRISLGGIRDEAEIRGHRRTYIGSLPGKIIQMMKKAGTKNPLFLLDEIDKVGSDYRGDPSSALLEALDPEQNKQFNDHYLEVDYDLSDVMFVTTANTLNILPPLLDRMEIIRIPGYTEDEKTNIAQKFLIPKQSKDNGLKKEEWKINHEVVKKIIRDYTR

SEQ ID NO: 169858 - protein, 246 aa, Unknown
  Bacterial polypetide isolated from the Sargasso Sea
SYIILKISMKQKLLEIDSTQKLLDKLLVHIENEIGILEVEKKIKSRVRRQMEKTQREYYLNEQLKAVQKELGDLDHGKNEFSEIEEKIKTLKLTNEAKEKAEAELKKLVSMSAMSAEASVVRNYLDWLLSVPWDEKSKINTDLKKAENILNNDHYGLEKVKERILEFLAVQKRVEKIQGPILCLVGPPGVGKTSLGKSIAKATGREFVRISLGGIRDESEIRGHRRTYIGSMPGKIIQGMKKIKKS

SEQ ID NO: 169859 - protein, 264 aa, Unknown
  Bacterial polypetide isolated from the Sargasso Sea
KKSKLKNNLPDAQKILDNDHFGIEKVKERIIEYLAVQKRTGKIKGPLLCLVGPPGVGKTSLGKSIANATGRKFVRMSLGGVRDEAEIRGHRRTYIGSMPGRIIQALKKAGTINPLILLDEVDKLGADWRGDPSSALLEVLDPEQNNTFQDHYLEVDCDLSNVMFVTTANSLNMPKPLLDRMEIIRLSGYTELEKLEIAKHHLLPKVIKEHGLNKSEFSLSDKELLEVIRSYTREAGVRGLEREISKLSRKLITEILTKDKKKIK

SEQ ID NO: 169860 - protein, 302 aa, Unknown
  Bacterial polypetide isolated from the Sargasso Sea
STKGAILCFVGPPGVGKTSLGRSIARALGREFYRFSVGGLTDESELKGHRRTYIGAMPGRFIQALKSVKTENPVILLDELDKMGQSYRGDPLSVLLEVLDPEQNREFMDHYLDLQYDLSNVLFIATANVLDTIPAALKDRLEIINLSGYISEEKIQIGTKYLIPKVLEESGLNKGQFRLPKKSLEKLIQEYTRETGVRGLEKQLKALSRGVALKVAKGEKSSKTVTPGDLKSLLGPALFPKDAFKPPEHPGIAQGLAWTPSGGSILNIEAIALQGEKAELKLTGQLGEVMQESSKIAHSLVR

SEQ ID NO: 169861 - protein, 291 aa, Unknown
  Bacterial polypetide isolated from the Sargasso Sea
KVGNDYRGDPSSALLEALDPEQNKEFNDHYLEVDYDLSDVMFVTTANTLNILPPLLDRMEVIRLSGYTEDEKLKISQKFLIPNQSKNNGLQKEEWNIDESLIRKIIRHYTRESGVRNLEREISKIARKLVKKIDNKEKVNNPISEKDLKNLLGVQKFNYGEIEEENRIGVVTGLAWTEVGGEILKIESAVMPGKGKMQITGKLGDVMQESVKAAKSYIRSKSLDYGIIPPVFDKKDFHIHVPEGATPKDGPSAGIGMVTSIISAITEIPVNKDVAMTGEITLRGLVLPIGG

SEQ ID NO: 169862 - protein, 288 aa, Unknown
  Bacterial polypetide isolated from the Sargasso Sea
GKDEISNLTKAIAKAKMPKEAQNKCMAELKKLKGMSPMSAEATVVRNYLDWMIDLPWGNKSKIISDLNSAQKVLDQDHYGLAKVKERIIEYLAVQKRIEKLKGPILCLVGPPGVGKTSLGKSIAKATGRKFVRISLGGIRDEAEIRGHRRTYIGSLPGKIIQMMKKAGTSNPLFLLDEIDKVGSDYRGDPSSALLEALDPEQNKTFNDHYLEVDYDLSDVLFVTTANTLNILPPLLDRMEIIRLPGYTEDEKINISQKFLIPKQSEDNGLKKDEWEISENVNKKIIRD

SEQ ID NO: 169863 - protein, 254 aa, Unknown
  Bacterial polypetide isolated from the Sargasso Sea
KGPILCLVGPPGVGKTFLGKSIAKSTNRQFVRMSLGGVRDEAEIRGHRRTYIGSLPGKIIQMMKKAGTKNPLILLDEIDKVGNDYRGDPSSALLEALDPEQNTSFNDHYLEVDYDLSDVMFVTTANTLNILPPLLDRMEVIRIPGYTEDEKINISNRFLLPKQIKENGVKDGELKIKDGTIKEIIRSYTRESGVRNLEREISKITRKVVKKVVNKEETEVEVNDKNISNFLGVKRFKYGEAESKDNIGVVTGLA

SEQ ID NO: 169864 - protein, 313 aa, Unknown
  Bacterial polypetide isolated from the Sargasso Sea
GHRRTYIGSMPGKIIQGMSKIGKKNPLFLLDEIDKMAMDFRGDPASALLEVLDPEQNHSFNDHYMEVDYDLSEVMFVTTANSLNIPPPLLDRMEVIRLSGYTEDEKVNIAKKYLIKKQLEQNGLKKDEITIRDNAVRDIIRYYTREAGVRNLDREIANICRKIVKRILLKPIDKKYIVTPKKLESLLGVKQYRYGMMEEENRVGQVTGLAWTEVGGELLTIEAAIVDGKGKITRTGKLGDVMQESIEAAMTVVRSRSELLGIEHEFYKEHDFHIHVPEGATPKDGPSAGVAMCTAMVSALCGIPVRSNVQDRR

SEQ ID NO: 169865 - protein, 224 aa, Unknown
  Bacterial polypetide isolated from the Sargasso Sea
NRQFIRMSLGGVRDEAEIRGHRRTYIGSLPGKIIQMMKKAGTKNPLFLLDEVDKIGNDYRGDPSSALLEALDPEQNTAFNDHYLEVDYDLSDVMFVTTANTLNILPPLLDRMEVIRIPGYTEDEKINIANKYLLPKQIKENGVKEGEMKLEDGTIKEIIRSYTRESGVRNLEREISKVTRKVVKKVVSGEVEKVQVNEKNIPDFLGIKKFKFGEVEDKDKTGVV

SEQ ID NO: 169866 - protein, 315 aa, Unknown
  Bacterial polypetide isolated from the Sargasso Sea
ILQLLKLPDGTVKVLVEGIKRVKIVDFKDEKEFISCAFEYNNDILSTQDDLLALGLTAIRRLEKLTSINKKISSETITNIKNLKDASKIADNIASHLNCTISEKQQLFETLDVKKRLNNVIKIMENETSIIGVEKRIRGRVKTQMEKTQREYYLNEQLKAIQKELGEIEDGKDETSNLNKSILKAKMPKEVQKKCMSELKKLKNMSPMSAEATVVRNYLDWMIDIPWFKKDKVDIDLNKALKQLDEDHYGLEKVKERIIEFLAVQKRMEKLKGPILCLVGPPGVGKTSLGKSIAKATNRQFVRMSLGGVRDEAEI

SEQ ID NO: 169867 - protein, 271 aa, Unknown
  Bacterial polypetide isolated from the Sargasso Sea
QGVGKTSLGKSIAKATNRQFVRMSLGGVRDEAEIRGHRRTYIGSLPGKIIQMMKKAGTKNPLFLLDEIDKVGNDYRGDPSSALLEALDPEQNTTFNDHYLEVDYDLSDVLFVTTANTLNILPPLLDRMEVIRIPGYTEDEKINIANKYLLPKQIKDNGVKEGEMKFDDDTIKDVIRYYTKESGVRNLEREISKISRKVVKKVVNKESETVKVDSENLSDFLGVRKFKFGEIEDTDKIGIVTGLAWTEFGGEILKIETVNMPGKGRMQITGK

SEQ ID NO: 169868 - protein, 269 aa, Unknown
  Bacterial polypetide isolated from the Sargasso Sea
SLGGVRDEAEIRGHRRTYIGSLPGKIIQMMKKAGTKNPLFLLDEVDKIGNDYRGDPSSALLEALDPEQNTAFNDHYLEVDYDLSDVMFVTTANTLNILPPLLDRMEVIRIPGYTEDEKINIANKYLLPKQVKENGVKEGELNLEDGTIKEIIRSYTRESGVRNLEREISKVTRKVVKKVVSGEVEKVQVNDKNIPDFLGIKKFKFGEVENKNKTGIVIGLAWTEVGGEILKIETVNMPGKGRMQITGKLGDVMQESVKAAKSYVRSKSL

SEQ ID NO: 169869 - protein, 291 aa, Unknown
  Bacterial polypetide isolated from the Sargasso Sea
IMLDEDHFGLDEVKERIIEYLAVQKRVKKPKGPILCLVGPPGVGKTSLGKSIARAANRKYVRMSLGGVRDEAEIRGHRRTYIGSMPGKIIQSLSKAKSNNPLFLLDEIDKMTMDFRGDPSSALLEVLDPEQNHSFSDHYLEVDYDLSSIMFVCTANTLDIPAPLLDRMEVIQLSGYTEDEKLNIAEKYLVPKQFNETGIKDNELSISRSALTEIIQRYTREAGVRSLERMISKICRKSLKLIITKPSKIKKRVSSKNLAKYLGAHKYNYESISKDNQIGQVNGLAWTRVGG

SEQ ID NO: 169870 - protein, 283 aa, Unknown
  Bacterial polypetide isolated from the Sargasso Sea
GYTEEEKISIANNYLIPKQIKDNGLKKEEWSLENSTLKEIIQNYTKEAGVRNLEREISKLARKTVKKILINEDTKTSINSQNLSEYLGVKKYKYGEIETDNKIGIVTGLAWTEFGGEILKIESAVMPGKGKMQITGKLGDVMQESVKAAKSYVRSKSLEFGIIPPTFEKKDFHIHVPEGATPKDGPSAGIAMVTSIVSSITGVPVNKDIAMTGEVTLRGRVLQIGGLKEKLLAAHRAGIPHVLIPEDNRKDLVDIPKNVLDDIKITSVNNVDEVLKIALVDEL

SEQ ID NO: 169871 - protein, 286 aa, Unknown
  Bacterial polypetide isolated from the Sargasso Sea
VVRNYLDWMIDIPWFKKDEVDIDLKKALKTLDEDHFGLEKVKERIVEFLAVQKRMEKIKGPILCLVGPPGVGKTSLGKSIAKATNRQFVRMSLGGVRDEAEIRGHRRTYIGSLPGKIIQMMKKAGTKNPLILLDEVDKIGNDYRGDPSSALLEALDPEQNTTFNDHYLEVDYDLSDVMFVTTANTLNILPPLLDRMEVIRISGYTEDEKINISDKFLIPKQIKENGIKDGEMDLNDGTVKEIIRHYTRESGVRNLEREISKITRKVVKKVVSGEEKKITVNSKNIS

SEQ ID NO: 169872 - protein, 177 aa, Unknown
  Bacterial polypetide isolated from the Sargasso Sea
VVLTGKLGEVMQESAKAAFSYVRSNSDYLGIDPEVFAKTDLHVHLPEGATPKDGPSAGLPLIMAIISSFTKISVKHNVGMTGEITLRGHVTEIGSLKEKLIAAKRGLLDTVLIPDENQKDLVDVPDEIKKGLDINIVKNVKEALVMALVAHPKEMKDQQKNVSDITWTSDSGSQPAA

SEQ ID NO: 169873 - protein, 276 aa, Unknown
  Bacterial polypetide isolated from the Sargasso Sea
DPEQNNSFNDHYLEVDYDLSDTMFITTANTLRMPPALLDRMEIIRIAGYTEDEKVEIVKQHLAPQMLEKHGLKSGELVLDDSAITGLIRYYTREAGVRSLERELANLARKTVKKIVAGDIESLTINEDNLHEFAGVRKFKFGEIDNDDQVGIVTGLAWTEVGGDILPIESVIMPGKGRMTITGKLGDVMKESIQAAKSYVRSRCIEFGIKPTIFPIRDIHIHVPEGAIPKDGPSAGLGMVTSIVSVLTGIPVRKDIAMTGEVTLRGKALGIGGLKK

SEQ ID NO: 169874 - protein, 311 aa, Unknown
  Bacterial polypetide isolated from the Sargasso Sea
LDRMEVIRLAGYTEDEKINIANKYLLPKQIKDNGVKEKEMNLSDDIIKEVIRSYTRESGVRNLEREISKIARKVVKKVVSGEKKEIDIDTKNLPDFLGVPKFKSSELETESRVGVVTGLAWTAYGGEILKIETVTMPGKGRMQITGKLGDVMQESVKAAKSFVRSKCLEYGIIPPLFEKKDFHIHVPEGATPKDGPSAGIGMVTSIVSSITNIPVKKDVAMTGEVTLTGQVLQIGGLKEKLLAAHRAGIKEVLIPKENEKDLVDIPKKIIEAIKITPVEFADEVLKIALTKELKKTEWVEVDLSKKDENLK

SEQ ID NO: 169875 - protein, 319 aa, Unknown
  Bacterial polypetide isolated from the Sargasso Sea
WYDYRGDPSSALLEALDPEQNTTFNDHYLEVDYDLSDVMFVTTANTLNILPPLLDRMEVIRLAGYTEDEKINIANKYLLPKQIKDNGVKDKEMNLQNDIIQEIIRSYTKESGVRNLEREISKVARKVVKKVVSGEEKEVKINKENLSDFLGVPKFKSGELETENRVGIVTGLAWTEYGGEILKIETATMPGKGRMQITGKLGDVMQESVKAAKSFVRSKCLEYGIIPPLFEKKDFHIHVPEGATPKDGPSAGIGMVTSIVSSITNIPVKRDVAMTGEVTLTGQVLPIGGLKEKLIAAHRAGIKEVLIPKENEKDLVDMP

SEQ ID NO: 169876 - protein, 297 aa, Unknown
  Bacterial polypetide isolated from the Sargasso Sea
LEVELRHKWEKTQREYYLNEQLKAIQKELGEIEDGKDESASLNKAILKSKMPKEVEKKCLQELKKLKNMSPMSAEATVVRNYLDWMTELPWHKKSEVDIDLTKALNVLDKDHFGLEKIKERIIEFLAVQKRMEKIKGPILCLVGPPGVGKTSLGKSIAKATNREFVRMSVGGMRDEAEIRGHRRTYIGSLPGKIIQMMKKAGTKNPLILLDEIDKIGNDYRGDPSSALLEALDPEQNTTFNDHYLEVDYDLSDVMFVTTANTLNILPPLLDRMEVIRLAGYTEDEKLILLINFFFLN

SEQ ID NO: 169877 - protein, 323 aa, Unknown
  Bacterial polypetide isolated from the Sargasso Sea
VTTANTLNILPPLLDRMEVIRIPGYTEDEKINIADKYLLPKQIKENGVQSGELDMLDGTIKEIIRSYTRESGVRNLEREISKVIRKVVKKVVNKEKDKVEVNSKNLNDFLGVKKFKYGELESENKVGIVIGLAWTQVGGEILKIETVNMPGKGKMQITGKLGDVMQESVKAAKSFVRSKSLEYGIIPPTFEKKDFHIHVPEGATPKDGPSAGIAMVTSIVSSITKIPVNKEIAMTGEVTITGQVLPIGGLKEKLLAAHRAGIKKVLIPKENEKDLIDVPKKVKEDIKILPVETADEVLKIALTKELKPTEWVEVEKISEEKKE

SEQ ID NO: 169878 - protein, 253 aa, Unknown
  Bacterial polypetide isolated from the Sargasso Sea
AKMPKDVEKKCLQELKKLKNMSPMSAEATVVRNYLDWMTELPWHKKSEIDIDLTKALNILDKDHFGLEKVKERIIEFLAVQKRMEKIKGPILCLVGPPGVGKTSLGKSIAKATNREFVRMSVGGMRDEAEIRGHRRTYIGSLPGKIIQMMKKAGTKNPLILLDEIDKIGNDYRGDPSSALLEALDPEQNTSFNDHYLEVDYDLSDVMFVTTANTLNILPPLLDRMEVIRLAGYTEDEKISIANKFLLPKQIKD

SEQ ID NO: 169879 - protein, 253 aa, Unknown
  Bacterial polypetide isolated from the Sargasso Sea
MFVTTANTLNILPPLLDRMEVIRLSGYTEDEKVNISQKFLIPNQSNNNGLKKEEWNIDEDIIRKIVRHYTRESGVRNLEREISKIARKLVKKIDNKEKVNNPINEKDLKELLGVQKFNYGEIEEENRVGVVTGLAWTEVGGEILKIESVVMPGKGKMQITGKLGDVMQESVKAAKSYIRSKSLEFGIIPPIFDKKDFHIHVPEGATPKDGPSAGVGMVTSIISAITEIPVDKNVAMTGEITLRGLVLPIGGLK

SEQ ID NO: 169880 - protein, 285 aa, Unknown
  Bacterial polypetide isolated from the Sargasso Sea
MVDLPWYKKDKVYVDLNKALETLDKDHYGLEKVKERIIEFLAVQKRIEKIRGPILCLVGPPGVGKTSLGKSIAKATGRQFVRMSLGGIRDEAEIRGHRRTYIGSLPGKIVQMMKKAGTKNPLFLLDEIDKVGADYRGDPSSALLEALDPEQNSTFNDHYLEVDYDLSDVMFVTTANTLNILPPLLDRLEVIRIPGYTEDEKISIANKYLLPKQIKDNGIKDGEIKFNDGTIQEIIRSYTKEAGVRNLEREISKISRKTVKKIVSGESSNVNINKENLSKFLGIKK

SEQ ID NO: 169881 - protein, 296 aa, Unknown
  Bacterial polypetide isolated from the Sargasso Sea
EKINIANKYLIPKQIKNNGLKENEWNLDKDALKDIIQGYTKESGVRNLEREISKLARKTVRNILTDESKKFEINLKNLSEYLGVKRFKFDEMETDNKIGVATGLAWTEFGGEILKIESAVMPGKGKMQITGKLGDVMQESVKAAKSYVRSKSLEFGIIPPIFEKKDFHVHVPEGATPKDGPSAGIAMVTSIISSITNIPINKKVAMTGEVTLRGHVLPIGGLKEKLLAAHRARIPLVIIPEENKKDLADIPKNILDNIEIKPVKSVDEVLKIALVKELKPVEWIEVDSLPKTKGQK

SEQ ID NO: 169882 - protein, 314 aa, Unknown
  Bacterial polypetide isolated from the Sargasso Sea
VRDEAEIRGHRRTYIGSLPGKIIQMMKKAGTKNPLILLDEIDKVGNDYRGDPSSALLEALDPEQNTTFNDHYLEVDYDLSDVMFVTTANTLNILPPLLDRMEVIRIPGYTEDEKINISERFLLPKQIKENGVKEGELDIKDGTIKEIIRSYTRESGVRNLEREISKITRKVVKKVVNKEETKVIVNDKNISDYLGIKKFKYGEAENENKVGVVTGLAWTEFGGEILKIETVNMPGKGRMQITGKLGDVMQESAKAAKSFVRSKSLDYGIIPPTFEKKDFHIHVPEGATPKDGPSAGIAMVTSIVSSITEIPVDR

SEQ ID NO: 169883 - protein, 294 aa, Unknown
  Bacterial polypetide isolated from the Sargasso Sea
ATNREFVRMSVGGMRDEAEIRGHRRTYIGSLPGKIIQMMKKAGTKNPLILLDEIDKIGNDYRGDPSSALLEALDPEQNTTFNDHYLEVDYDLSDVMFVTTANTLNILPPLLDRMEVIRLAGYTEDEKINIANKFLLPKQIKDNGVKEKEMKLGDDIIKEIIRSYTKESGVRNLEREISKVARKVVKKVVAGEEKEVNIDTKNLSDFLGVPKFKFGELESENRVGIVTGLAWTEYGGEILKIETVTMPGKGRMQITGKLGDVMQESVKAAKSFVRSKCLEYGIIPPLFEKKDFHI

SEQ ID NO: 169884 - protein, 284 aa, Unknown
  Bacterial polypetide isolated from the Sargasso Sea
TVLQLLKLPDGTVKVLVEGEARARVIRFTENDNYYEVYADIVPEQLGPDEELEALSRSVIAQFEKYIKLNKKVPTEALASINQIEEPGKLVDTVASHISLKISEKQELLEIDELAERMERVIAFMEAEIGVLRVEKKIRTRVKRQMEKTQREYYLNEQMKAIQKELGETEEGKDETQELEEKINKTKLSKEAREKALTELKKLRNMSPMSAEATVVRNYLDWMVSIPWRKQTKIEKDINNAQSILEADHYGLEKVKERILEYLAVQQRTKKLKGPILCLVGPPR

SEQ ID NO: 169885 - protein, 273 aa, Unknown
  Bacterial polypetide isolated from the Sargasso Sea
LSVDSDEPHILADRIAPLLNMELRKKQDLLENADPKRRLEIVYGRMLEEKEFKKVERKLKERVQGQIGRTQKEYYLNEQVKAIQKELGHGEDGKAEMEEYAKKIEEIKLSVEAKEMAEKELKKIKMMPSMSSEANVVRNYLDWLLSMPWEEKTEDNFDLGKAEKVLDSQHYGLEKVKERIVEYLAVAKQVGKMKGPIICLVGPPGVGKTSLARSVAEALGRKFAHVSLGGVRDEAEIRGHRRTYIGAMPGKVIQSLRKVKYKNPLLLFDEIDK

SEQ ID NO: 169886 - protein, 291 aa, Unknown
  Bacterial polypetide isolated from the Sargasso Sea
IAEDINTSKDLDVYAQGLVKRFEKLIVLNKKDFNENLNIIKNSKDAKIIADNIAANLNIKIFQKQEILEIRDLRKRLEKIYEIVNKETSVISVEKKIRGRVKNQMEKTQREYYLNEQLKAIQKELGEIDEGKDEIANISKAITKAKMPKIAQEKCFSELKKLKSMSPMSAEATVVRNYLDWMTELPWSEKTKINTDLISAQKTLDEDHYGLDKVKERIIEFLAVQKRIQKMKGPILCLVGPPGVGKTSLGKSIAKATNRKFIRISLGGIRDEAEIRGHRRTYIGSLPGKII

SEQ ID NO: 169887 - protein, 308 aa, Unknown
  Bacterial polypetide isolated from the Sargasso Sea
SISSKDRIDLKKALKILDEDHYGLEKVKQRIIEYLAVRTLKQKKDPNGTVRGPILCFGGPPGVGKTSLGKSIARAMGREFVRLSLGGVRDEAEIRGHRRTYIGALPGRVIQSIKKSGKNNPIFMLDEIDKLGSDFRGDPSSALLEVLDPEQNHSFSDHYLEVDFDLSGVMFIATANYQDAIPPALRDRMEIIDFSGYIVDEKIEIAKRHLVPKQIEENGLSKDNVSFDNTSLKELISSYTREAGVRNLEREIANVLRKAAREVVEDETKKIKINKKKVGEYLGAARFYSELAERTTKPGVVTGLAWTA

SEQ ID NO: 169888 - protein, 244 aa, Unknown
  Bacterial polypetide isolated from the Sargasso Sea
VCRKTVKKLETTRLKKISLNDKSLQDLLGIAKFRSNEIEKKNLIGITNGLAWTEVGGEILSVEVILSIGKGKLTITGKLGEVMKESIQAATSYVKSKSISLGINPKDFENYDIHIHVPEGATPKDGPSAGIAIFNSLVSSLTNNKVKREVAMTGEITLRGRVLPIGGLKEKIYAASRAGIKKVLIPHENYREISEFDKEVIKSIKIIPISDAFAILEHTLTKPIISLNLPESQLKNNQNTTSTH

SEQ ID NO: 169889 - protein, 289 aa, Unknown
  Bacterial polypetide isolated from the Sargasso Sea
DKVDIDLSKALKTLDEDHFGLEKVKERIIEFLAVQKRMEKIKGPILCLVGPPGVGKTSLGKSIAKATNRQFIRMSLGGVRDEAEIRGHRRTYIGSLPGKIIQMMKKAGTKNPLFLLDEVDKIGNDYRGDPSSALLEALDPEQNTTFNDHYLEVDYDLSDVMFVTTANTLNILPPLLDRMEVIRIPGYTEDEKINIANKYLLPKQIKDNGVKEGELNLEEGTIKEIIRSYTRESGVRNLEREISKVTRKVVKKVVNGEQNKVEVSEKNVSDFLGIKKFKFGELEPKNKIG

SEQ ID NO: 169890 - protein, 292 aa, Unknown
  Bacterial polypetide isolated from the Sargasso Sea
SLDQAHKILDEDHYGLKTVKERIIEYLAVQKRVKKLKGPILCLVGPPGVGKTSLGASIARATGRKFVRMSLGGVRDEAEIRGHRRTYIGAMPGKIMQNLNKAGVRNPLFLLDEIDKMSMDFRGDPSSALLEVLDPEQNTTFNDHYMEVDFDLSDVMFICTANTLNIPPPLLDRMEVIRIEGYTEDEKMNIAEKYLVNKQTEANGLKDSEIKITNSAILSIIRHYTRESGVRNLDREIAKIARKVVKSLIMKSKDETVHVRPGSLEKYLGVKKFKYGIAEKENQIGQVTGLAG

SEQ ID NO: 169891 - protein, 322 aa, Unknown
  Bacterial polypetide isolated from the Sargasso Sea
MMINFIMCAYEHQKDFNYKDEDLLPLALTAVRRLEKLTSVNKKISSETINNIKQLKDPSKIVDNIASNLNSSISEKQQIFETMDVKKRLNAVIKSMESETSIIGVEKRIRGRVKTQMEKTQREYYLNEQLKAIQKELGEIEDGKDETTNLKKLIQKAKMPKEVEKKCMSELKKLKNMSPMSAEATVVRNYLDWMTDLPWFKKDNVDIDLNKGLKILDEDHFGLEKVKERIIEFLAVQKRMDKIKGPILCLVGPPGVGKTSLGKSIAKATNRQFIRMSLGGVRDEAEIRGHRRTYIGSLPGKIIQMMKKAGTKNPLFLLDEVD

SEQ ID NO: 169892 - protein, 259 aa, Unknown
  Bacterial polypetide isolated from the Sargasso Sea
ILNKKEINDGTNNLRNLKNASQISHNISSNLSLQIFEKQELLEITDLKKRLEKIHSFIEKETSVLSVEKKIRGRVKNQMEKTQREYYLNEQLKAIQKELGEIDEGKDELSSLSKAITEAKMPKLAKDKCLSELKKLKTMSPMSAEATVVRNYLDWMTELPWSQKSKINSDLNNAQKILDEDHYGLEKVKERIIEFLAVQKRIQKMKGPILCLVGPPGVGKTSLGKSIAKATNRKFIRISLGGIRDEAEIRGHRRTYIGS

SEQ ID NO: 169893 - protein, 290 aa, Unknown
  Bacterial polypetide isolated from the Sargasso Sea
VDDPKKNDIFNYGCESSILQLLKLPDGTVKVLVEGITRVKINEFQDNNEYLSCGYEKLSDVLSKDEDLMTLALNSIKKLEKLTSINKKISNETINNIKLLKDPSKISDNIASHLNATISEKQQVFETLDLKKRLNLINKIMDNETSIIGVEKRIRGRVKTQMEKTQREYYLNEQLKAIQKELGEIEDGKDETSSLNKAILRSKMPKDVEKKCMSELKKLKNMSPMSAEATVVRNYLDWMIDIPWFKKDKVDINLNNALKILDEDHFGLEKVKERIIEFLAVQKRMNKIRG

SEQ ID NO: 169894 - protein, 194 aa, Unknown
  Bacterial polypetide isolated from the Sargasso Sea
DESTSLNKSILKAKMPKEVEKKCLQELKKLKNMSPMSAEATVVRNYLDWMTELPWHKKSAVDIDLKKALEILDKDHFGLEKVKERIIEFLAVQKRMEKIKGPILCLVGPPGVGKTSLGKSIAKATNREFVRMSVGGMRDEAEIRGHRRTYIGSLPGKIIQMMKKAGTKNPLILLDEIDKIGNDYRGDPSSALLE

SEQ ID NO: 169895 - protein, 244 aa, Unknown
  Bacterial polypetide isolated from the Sargasso Sea
MQTPLNIPPALLDRMEIIRIPGYTENEKNQIAKRYLVPKQIKNNGLKNSEINFNSTLVKQIIRYYTREAGVRGLEKEISKICRKVVKDLETRTKRKILLDKKSIQNYLGVEKYRNNEIEKKNLIGVTNGLAWTEVGGEILSIEVLLSIGKGKLTITGKLGDVMKESIQAASSYVRSQALRLGINPLDFDKYDIHVHVPEGATPKDGPSAGIAIFNSLVSSLTGIKIKKDIAMTGEITLRGRVFL

SEQ ID NO: 169896 - protein, 57 aa, Unknown
  Bacterial polypetide isolated from the Sargasso Sea
LILLDEIDKLGSDWRGDPSSALLEVLDPEQNNKFNDHYLELDYDLSDVMFVCTANTP

SEQ ID NO: 169897 - protein, 288 aa, Unknown
  Bacterial polypetide isolated from the Sargasso Sea
DVLDKDHFGLENVKERIIEFLAVQKRMEKIKGPILCLVGPPGVGKTSLGKSIAKATNREFVRMSVGGMRDEAEIRGHRRTYIGSLPGKIIQMMKKAGTKNPLILLDEIDKIGNDYRGDPSSALLEALDPEQNTSFNDHYLEVDYDLSDVMFVTTANTLNILPPLLDRMEVIRLAGYTEDEKISIANKFLLPKQIKDNGVKEKEMKLEKDIIKEIIRSYTKESGVRNLEREISKLARKVVKKVIAGEEKEVEINNKNLSDFLGVPKHKFGELEQDNRVGIVTGLAWTEY

SEQ ID NO: 169898 - protein, 78 aa, Unknown
  Bacterial polypetide isolated from the Sargasso Sea
NRKFVRMSLGGVRDEAEIRGHRRTYVGSLPGKIIQNMAKAGTKNPLILLDEIDKMAMDFRGDPASALLEVLDPEQNDT

SEQ ID NO: 169899 - protein, 310 aa, Unknown
  Bacterial polypetide isolated from the Sargasso Sea
SDVMFVCTANTLNIPAPLLDRMEIIRIPGYTEKEKNQIAQKYLIPKQQKNHGIKNSEIRLNSKLINQVIRNYTREAGVRNLEKEISKIFRKAVKIIETTKKKKILLNNKNIQNFLGVFKFRSNEIEKRNLVGITNGLAWTEVGGEILSIEVLLSLGKGRLTITGKLGEVMKESIQAATTYVKSKSLSLGINPRDFDKYDIHVHVPEGATPKDGPSAGIAIFNSLVSSLTNNKIRKDVAMTGEITLRGRVLPIGGLKEKIYAASRAGIKKVLIPEENHREIIEFDKDILKNIKIIPVSEAISILEHTLTNL

SEQ ID NO: 169900 - protein, 303 aa, Unknown
  Bacterial polypetide isolated from the Sargasso Sea
YIGSLPGKLLQKLSKVGVKNPLFLLDEIDKMSMDNRGDPASALLEVLDPEQNHSFNDHYLEIDYDLSEVMFVCTSNSMNIPAPLLDRMEVIRIPGYTEDEKANIAERYLVPKQTNNNGLQGDEIEFNQESIFDLIRFYTKEAGVRGLEREIAKICRKVVKEHTLSKRTKLKKKLSREDLEKYSGVQKYDFGKAEDQNKVGQVKGLAWTQVGGELLDIEAIAMDGKGKTIKTGSLGDVMQESIQAALTVVRSRAKSLGLNSNFHEKLDLHIHVPEGATPKDGPSAGIGMCTALVSVLYSIPVKA

SEQ ID NO: 169901 - protein, 271 aa, Unknown
  Bacterial polypetide isolated from the Sargasso Sea
EVDFDLSKVMFIATANYQDPIPPALKDRMEVIDFSGYIEDEKLQIAKRHLIPKQLKENALSTKDVSLDDASIKELMSSYTREAGVRNLEREIANVFRKVARDKIEKNTKKIRVTKKKISEYLGAPRFYSDIAERTTKPGVVTGLAWTAAGGDILFVEASQMKGKGALTLTGQLGDVMKESATAAMTYVRSNSDLLGFSSDFNEKTDIHVHVPAGAIPKDGPSAGVGMFTSIVSLLSNKPVKSKLAMTGEITLRGNVLPIGGVKEKVTAAHR

SEQ ID NO: 169902 - protein, 227 aa, Unknown
  Bacterial polypetide isolated from the Sargasso Sea
VKSLIMKSKDETVHVRPGSLEKYLGVKKFKYGIAEKDNQVGQVTGLAWTQVGGELLTIESTAIAGKGKLINTGQLGDVMKESIQAATTVVRSRAKALGIKEDFHQKKDMHIHVPEGATPKDGPSAGIGMCTALISSLTDIPVKANVAMTGEITLRGEVLPIGGLKEKLLAAHRGGIEIVIIPEENKKDLTEIPKNIKEKLDIVPVQWIDQVLEIAKERMPEIKIQGS

SEQ ID NO: 169903 - protein, 289 aa, Unknown
  Bacterial polypetide isolated from the Sargasso Sea
VFMYGCEGNILQLLKLPDGTVKVLVEGIKRVKILDFKDNEKFITCDYTHHNDVSPEDEDLFPLAATALRRLEKLTSINKKISNETINTIKQLKDPSQIADNIASQITATISEKQQIFETVDVKKRLNAIIKIMENETSIIGVEKRIRGRVKTQMEKTQREYYLNEQLKAIQKELGEIEDGKDETTSLNKAITKAKMPKEVEKKCLQELKKLKNMSPMSAEATVVRNYLDWMTELPWHKKSEVDIDLKKALDILDKDHFGLEKVKERIIEFLAVQKRMEKIKGPILCLVG

SEQ ID NO: 169904 - protein, 296 aa, Unknown
  Bacterial polypetide isolated from the Sargasso Sea
EGKDELTSLSKAIANAKMPKLAKEKCLSELKKLKSMSPMSAEATVVRNYLDWMTELPWSEKSKINTDLKNAQKILDEDHYGLEKVKERIIEFLAVQKRIQKMKGPILCLVGPPGVGKTSLGKSIAKATNRKFIRISLGGIRDEAEIRGHRRTYIGSLPGKIIQMMKKAGTKNPLFLLDEIDKVGNDYRGDPSSALLEALDPEQNKEFNDHYLEVDYDLSDVMFVTTANTLNILPPLLDRMEVIRLSGYTEDEKVKISQKFLIPKQSVNNGLKKEEWNIDEKVNRKIIRDYTRESGV

SEQ ID NO: 169905 - protein, 293 aa, Unknown
  Bacterial polypetide isolated from the Sargasso Sea
NEVMKKDKKIILVTQKNSEIDDPKKTDIFMYGCECNILQLLKLPDGTVKVLVEGNKRVKILNFIDNEKFITCDFSHYNDVIIKNEDLFPLAATALRRLEKLTSINKKISSEAINSIKELKNPSQIADNIASHITATISEKQQIFETVDVKKRLNTIIKIMENETSIIGVEKRIRGRVKTQMEKTQREYYLNEQLKAIQKELGEIEDGKDENANLNKAIAKAKMPKEVEKKCLQELKKLKNMSPMSAEATVVRNYLDWMTELPWHKKSEVDIDLTKALNILDKDHFGLEKIKER

SEQ ID NO: 169906 - protein, 215 aa, Unknown
  Bacterial polypetide isolated from the Sargasso Sea
FARMSLGGVRDEAEIRGHRRTYVGAMPGKIIQSLRKVKSKNPLLLLDEVDKMTRGVMGDPSSALLEVLDPEQNHTFMDHYLEVEFDLSDVLFFCTANVAQDIPPALKDRMEVINLSGYTELEKVYILKRHLLPKQIEENGLNSSQLGFQNKSFDIIIQQYTREAGVRNLEREVGKICRKIATKLVMDEPQKKISITPKRVREYLGVPKYKHGKVE

SEQ ID NO: 169907 - protein, 178 aa, Unknown
  Bacterial polypetide isolated from the Sargasso Sea
KMQITGKLGEVMQESVKAAKSYIRSKSLDYGIIPPVFEKKDFHIHVPEGAIPKDGPSAGVAMVTSIISAITEIPVNKDVAMTGEITLRGIVLPIGGLKEKLLAAHRAGIKKVLIPNENQKDLIEIPEIIKKSIEIKPVKNVDEVLKIALTKNLKRVEWVEVEQISKKNNQKTTTTRKH

SEQ ID NO: 169908 - protein, 240 aa, Unknown
  Bacterial polypetide isolated from the Sargasso Sea
SILDADHYGLEEVKERILEYLAVQKRVKKLKGPVLCLVGPPGVGKTSLAESIATATNRKFVRMALGGVRDEAEIRGHRRTYIGSMPGRLIQKMTKVGVRNPLFLLDEIDKMGQDMRGDPASALLEVLDPEQNHNFNDHYLEVDYDLSDVMFLCTANSMNIPGPLLDRMEVIRLPGYTEDEKVNIAIKYLAPKQIQANGLKKGELEFDESAIRDIIRYYTREAGVRSLERQIAKVCRKVVK

SEQ ID NO: 169909 - protein, 303 aa, Unknown
  Bacterial polypetide isolated from the Sargasso Sea
EKQELLELKSILARLEKVYAHMEGEIGVLQVEKRIRNRVKRQMEKTQREYYLNEQMKAIQKELGDNEDGSDELTDIAEKIKKTKLTKEARDKANAELKKLKNMSQMSAEATVVRNYLDWLLVIPWKKKSKIKKDLTLAQSVLDRDHHGLEKVKERIVEYLAVQQRTGKVKGPILCLVGPPGVGKTSLGKSIAESTGRNFVRMSLGGVRDEAEIRGHRRTYIGSLPGKIIHSMKKAKTSNPLFLLDEIDKLGNDYRGDPSSALLEVLDPEQNNSFQDHYLEVDYDLSDVMFVTTANTLRMPQPL

SEQ ID NO: 169910 - protein, 286 aa, Unknown
  Bacterial polypetide isolated from the Sargasso Sea
PLLPLRDIVVFPSMVIPLFVGRDKSISALNEVMKKDKKIILVTQKNSEIDDPKKTDVFMYGCEGSILQLLKLPDGTVKVLVEGIKRVKILDFKDNEKFIICDYTPYNDSVDKDEDLYPLAATAIRRLEKLTSINKKISNETINSIKQLKEPSQIADNIASHITATISEKQQIFETIDVKKRLNAIIKIMENETSIIGVEKRIRGRVKTQMEKTQREYYLNEQLKAIQKELGEIEDGKDENTSLNKSILKAKMPKEVEKKCLQELKKLKNMSPMSAEATVVRNILIG

SEQ ID NO: 169911 - protein, 317 aa, Unknown
  Bacterial polypetide isolated from the Sargasso Sea
RATGRKFVRMSLGGVRDEAEIRGHRRTYIGSLPGKVLQMMKKAGSSNPLFLLDEIDKLGADYRGDPSSALLEVLDPEQNNSFNDHYLEVDYDLSDTMFITTANTLRMPPALLDRMEIIRIAGYTEDEKVEIVKQHLAPQMLEKHGLKSGELILDDSAITGLIRYYTREAGVRSLERELANLARKTVKKIVAGDIGSLTINEDNLHEFAGVRKFKFGEIDNDDQVGIVTGLAWTEVGGDILPIESVIMPGKGRMTITGKLGDVMKESIQAAKSYVRSRCIEFGIKPTIFPIRDIHIHVPEGAIPKRWPIRWPRNGYIH

SEQ ID NO: 169912 - protein, 313 aa, Unknown
  Bacterial polypetide isolated from the Sargasso Sea
EDQNALKELDIFALGLVKKYERLLVLSKKDFNDGTNNIKNLKDASQIANNISSNLSIQIFEKQELLEILDLKKRLEKIYAFIEKETSVLSVEKKIRGRVKNQMEKTQREYYLNEQLKAIQKELGEIDEGKDELTNLSKAITNAKMPKLAKEKCLSELKKLKSMSPMSAEATVVRNYLDWMTELPWSNKSKINTDLNNAQKILDEDHYGLEKVKERIIEFLAVQKRIQKMKGPILCLVGPPGVGKTSLGKSIAKATNRKFIRISLGGIRDEAEIRGHRRTYIGSLPGKIIQMMKKAGTKNPLFLLDEIDKVEMI

SEQ ID NO: 169913 - protein, 272 aa, Unknown
  Bacterial polypetide isolated from the Sargasso Sea
HLIKKQMDNCKLKDSEFSIDEEALKIIIQSYTREAGVRNLERQLAKLTRKIVTLIEKKEAKSFNITKENVKDILGVPIYHRHEIEKDNLVGITTGLAWTEVGGELLSIESVKVRGKGKVTATGKLGDVMKESVQAAEFFIRSKALSYGLNPIDLEKNDIHVHVPEGATPKDGPSAGVAMVTSIVSALTDIKIKSNVGMTGEITLRGRVLPIGGLKEKLLAAKRGGLKTVLIPIDNKKDLVEIPNNIKKQLNIIPVDSIDQGIENALVHHLQK

SEQ ID NO: 169914 - protein, 270 aa, Unknown
  Bacterial polypetide isolated from the Sargasso Sea
TQKEYYLNEQMKAIQKELGDNDEVDDITDIENKLNKLKLSSEAREKCKSEIKKLKNMSPMSAEATVIRNYLDWVLNIPWNNPSTISKNIKKAKSILESDHYGLEKVKDRILEYLAVQKRINKIKGPILCLVGPPGVGKTSLGKSIANSTGRNFVRMSLGGVRDEAEIRGHRKTYIGSMPGRFLQAMKKSKSSNPLILLDEIDKLGSDWRGDPSSALLEVLDPEQNNKFNDHYLELDYDLSDVMFVCTANTLNIPAALLDRMEIIRIPGYT

SEQ ID NO: 169915 - protein, 282 aa, Unknown
  Bacterial polypetide isolated from the Sargasso Sea
DEAEIRGHRRTYIGSLPGKIIQMMKKAGTKNPLILLDEIDKVGNDYRGDPSSALLEALDPEQNTTFNDHYLEVDYDLSDVMFVTTANTLNILPPLLDRMEVIRIPGYTEDEKINIANKFLLPKTIKENGVKTGEMDLSDGTIKEVIRNYTKESGVRNLEREISKITRKVVKKVVNSEETKVKINEENLVDFLGVKKFKFGELESEDKVGIVTGLAWTEFGGEILKIETVNMPGKGRMQITGKLGDVMQESVKAAKSYVRSKSLDFGIIPPIFEKKDFHIHVP

SEQ ID NO: 169916 - protein, 291 aa, Unknown
  Bacterial polypetide isolated from the Sargasso Sea
TLDEDHYGLEKVKERIIEFLAVQKRMDKIKGPILCLIGPPGVGKTSLGKSIAKATNRQFVRMSLGGVRDEAEIRGHRRTYIGSLPGKIIQLMKKAGTKNPLILLDEIDKVGNDYRGDPSSALLEALDPEQNKTFNDHYLEVDYDLSDVMFVTTANTLNILPPLLDRMEVIRIPGYTEDEKINIANKYLLPKQIKENGVKNEELELENGTIREIIRSYTRESGVRNLEREISKVARKVVKKVVNNEEKKVKVNNKNVHDFLGVKKFKYGEVESEDRVGIVTGLAWTEFGGEI

SEQ ID NO: 169917 - protein, 283 aa, Unknown
  Bacterial polypetide isolated from the Sargasso Sea
ADVIAVNLNINLSQKQEILEIISLEKRLDKIYGYLLSEIDSLQVEKKIKGRVKRQMEKTQKEYYLNEQMKAIQKELGDNDDLDDISEIEKKIDEIYLTDEAKEKCKSELKKLKTMSPMSAEATVIRNYLDWVLSIPWNIPTSISKNIKKAKSILEADHYGLDKVKERILEYLAVQKRINKIKGPILCLVGPPGVGKTSLGKSIATATGRSFVRMSLGGVRDEAEIRGHRKTYIGSMPGRFIQSMKKSKSSNPLILLDEIDKLGSDWRGDPSSALLEVLDPEQN

SEQ ID NO: 169918 - protein, 277 aa, Unknown
  Bacterial polypetide isolated from the Sargasso Sea
IEHLAVLKLRNDMRSPILCLYGPPGVGKTSLGKSVAEALGREYVRISLGGMRDEAEIRGHRKTYIGALPGRILQSLKKAGTSNPVFVLDEIDKLSTSFQGDPASALLEVLDPEQNVDFYDNFLELGYDLSKVMFIATANSLAPIHPALRDRMEMINVSGYTLEEKTEIAQKFLLPKQLEEHGMNTKHLKLRKTVLKKIVEGYTRESGVRGLEKQVAKTVRFAAKSLAMEEDYNKNPNISDLISILGPNKVHLDLYENNHVAGVVTGLAWTAVGGDIL

SEQ ID NO: 169919 - protein, 289 aa, Unknown
  Bacterial polypetide isolated from the Sargasso Sea
MDVKISLPLLPLRDIVVFPSMVIPLFVGRDKSISALNEVMKKEKKIILVTQKNSEIDDPKKTDVFMYGCEGNILQLLKLPDGTVKVLVEGIKRVKILDFKDNEKFITCEYTSYNDLIDEKEDLYPLAATSIRRLEKLTSINKKVSNETINSIKQLKDPSQIADNIASHITATISEKQQIFETADVKKRLNSIIKIMENETSIIGVEKRIRGRVKTQMEKTQREYYLNEQLKAIQKELGEIEDGKDENTSLNKAILKSKMPKEVEKKCLQELKKLKNMSPMSAEATVVRN

SEQ ID NO: 169920 - protein, 277 aa, Unknown
  Bacterial polypetide isolated from the Sargasso Sea
SLGGVRDEAEIRGHRRTYIGSLPGKIIQMMKKAGTKNPLILLDEIDKVGNDYRGDPSSALLEALDPEQNTTFNDHYLEVDYDLSDVMFVTTANTLNILQPLLDRMEVIRIPGYTEDEKINIANKYLLPKQIKENGVKANELDLEDGTIKEIIRSYTRESGVRNLEREISKVSRKVVKKVVNGEKEKVNVNKNNLSDFLGVKKFKYGEVEAQDRVGIVTGLAWTEFGGEILKIETVNMPGKGRMQITGKLGDVMQESVKAAKSFVRSKSLDYGIIPPV

SEQ ID NO: 169921 - protein, 299 aa, Unknown
  Bacterial polypetide isolated from the Sargasso Sea
GCLSKVLQLLKLPDGTVKVLVEGEKRVKIINHEEKNENYLTCEVEVVEDQNITKDLDQLAIGLVKKFERLQVLSKKDLGEGSNNLKNLKDPSLIANNISANLSIQIFEKQELLEIFDLKKKLEKIHAFIEKETSVLSVEKKIRGRVKNQMEKTQREYYLNEQLKAIQKELGEIDEGKDELTSLSKAITEAKMPKLAKEKCLSELKKLKSMSPMSAEATVVRNYLDWMTELPWTNKSKINTDLNNAQKILDEDHYGLEKVKERIIEFLAVQKRIQKMKGPILCLVGPPGVGKTSLGNQLL

SEQ ID NO: 169922 - protein, 198 aa, Unknown
  Bacterial polypetide isolated from the Sargasso Sea
GQKWRAKYLKIETVNMPGKGKMQSTGKLGEVMQESIKAAKSYVRSKSIDFGIIPPLFEKKDFHIHVPEGATPKDGPSAGIAMVTSIISSITGVPVNKDIAMTGEVTLRGNVLQIGGLKEKLLAAHRAGIKKVIIPIDNKKDLVEIPENIKKNMEIVCVKNVEDVLKNALTKELKPVKWAEIDQATNKNKEKSEVTSTH

SEQ ID NO: 169923 - protein, 306 aa, Unknown
  Bacterial polypetide isolated from the Sargasso Sea
RLKCQNKQKKNVYLELKKLKSMSPMSAEATVVRNYLDWMTELPWSNKSKINTDLNNAQKILDEDHYGLEKVKERIIEFLAVQKRIQKMKGPILCLVGPPGVGKTSLGKSIAKATNRKFIRISLGGIRDEAEIRGHRRTYIGSLPGKIIQMMKKAGTKNPLFLLDEIDKVGNDYRGDPSSALLEALDPEQNKEFNDHYLEVDYDLSDVMFVTTANTLNILPPLLDRMEVIKLSGYTEDEKLNISQKFLIPNQSKNNGLKREEWNIDEEIIRKIIRHYTRESGVRNLEREISKIARKLVKKIDSKEKV

SEQ ID NO: 169924 - protein, 302 aa, Unknown
  Bacterial polypetide isolated from the Sargasso Sea
KVDIDLNNAMKTLDEDHYGLEKVKERIIEFLAVQKRMDKIKGPILCLIGPPGVGKTSLGKSIAKATNRQFVRMSLGGVRDEAEIRGHRRTYIGSLPGKIIQMMKKAGTKNPLILLDEVDKVGNDYRGDPSSALLEALDPEQNTTFNDHYLEVDYDLSDVMFVTTANTLNILPPLLDRMEVIRIPGYTEDEKINIANKYLLPKQIKENGVKKEELDLIDGTIKEIIRSYTRESGVRNLEREISKVARKVVKKVVSGEEKRVVVNNNNVHDFLGVKKFKYGEVESEDKVGKGTGLAWTELEEKF

SEQ ID NO: 169925 - protein, 291 aa, Unknown
  Bacterial polypetide isolated from the Sargasso Sea
MKRLSLKKSILKAKMPKEVEKKCMSELKKLKNMSPMSAEATVVRNYLDWMIDLPWFKKDKVDIDLNKALKILEEDHFGLEKVKERIIEFLAVQKRMDKIKGPILCLVGPPGVGKTSLGKSIAKATNRQFVRMSLGGVRDEAEVRGHRRTYIGSLPGKIIQMMKKAGTKNPLFLLDEIDKVGNDYRGDPSSALLEALDPEQNTTFNDHYLEVDYDLSDVMFVTTANTLNILPPLLDRMEVIRIPGYTEDEKINIANKYLLPKQIKDNGVKEGEMKLADDTIKEIIRSYTRES

SEQ ID NO: 169926 - protein, 203 aa, Unknown
  Bacterial polypetide isolated from the Sargasso Sea
ESGVRNLEREIANVLRKVARDLVEKTAKKIRVTSAKVIEYLGAPRFYSELAERTTKPGVVTGLAWTAAGGDILFVESSKMKGKGGLTLTGQLGDVMKESATAALTYVRSHTDILGIPDDFHEKTDIHVHVPAGAIPKDGPSAGVSMFTSIVSLMTGKPVKDKVAMTGEITLRGNVLPIGGVKEKVTAAHRSGIKHIILPDHNK

SEQ ID NO: 169927 - protein, 304 aa, Unknown
  Bacterial polypetide isolated from the Sargasso Sea
INFNKEFITASIREINQKTKKNTKIRALQKLIIEQFVEFQKINKKVSLDVINNVKTLNDPDKIVDIIVSNISISLSQKQEILEIIKTEDRLNKVYGYLVSEIDSFQVEKKIKGRVKRQMEKTQKEYYLNEQMKAIQKELGDNEDLDEIAELEKKLNQYNLSKEAKEKCASEIKKLKNMSPMSAEATVIRNYLDWVMSIPWNNPDQISQNINKASTILENDHYGLDKVKERILEYLAVQKRTNKLKGPILCLVGPPGVGKTSLGKSIANSTGRSFVRMSLGGVRDEAEIRGHRKTYIGSMPGRFI

SEQ ID NO: 169928 - protein, 302 aa, Unknown
  Bacterial polypetide isolated from the Sargasso Sea
MPLRDIVIFPSTVVPLFVGRKKSIKALEEVMKTDKSIVLVAQKNSEVDDPQEKDIYSFGCLSKILQLLKLPDGTVKVLVEGVQRVKIKSIKKEEKKYLNCEVEILSSTEDSQESKNLAATLIKKFERLSNLSKKEVVDFAKNLKSLKKTSDIADNISSNLNIQIFEKQNLLEMIELNKRLEKIYEIIEKETSVINVEKKIRGRVKNQMEKTQREYYLNEQLKAIQKELGEIEDGKDEVSNLSNAILKAKMTKEAQSKCLAELKKLKSMSPMSAEATVVRNYLDWMIDLPWSNKSKIIKDLNA

SEQ ID NO: 169929 - protein, 274 aa, Unknown
  Bacterial polypetide isolated from the Sargasso Sea
KVDINLNNALKTLNDDHYGLEKVKERIIEFLAVQKRMDKIKGPILCLVGPPGVGKTSLGKSIAKATNRQFVRMSLGGVRDEAEVRGHRRTYIGSLPGKIIQMMKKAGTKNPLFLLDEVDKIGNDYRGDPSSALLEALDPEQNTTFNDHYLEVDYDLSDVMFVTTANTLNILPPLLDRMEVIRIPGYTEDEKINIANKYLLPKQIKDNGIRDGEMSLKDGTIKEIIRNYTRESGVRNLEREISKVTRKVVKKIVNEEEKNVEVNEENLSNFLGVK

SEQ ID NO: 169930 - protein, 257 aa, Unknown
  Bacterial polypetide isolated from the Sargasso Sea
MRITFGLIKVKDRIIEYLAVRNLKQKKDPKGVLRGPILCFGGPPGVGKTSLGKSIARSMGREFVRLSLGGVRDEAEIRGHRRTYIGALPGRIIQSIKKAGTNNPVFMLDEIDKLGSDFRGDPSSALLEVLDPEQNHSFSDHYLEVDFDLSNVMFIATANYQDAIPPALRDRMEILDFTGYIEDEKVQIAKRHILPKQIEENGLTKDEVFFDIHSIKELIRSYTREAGVRNLEREVANVLRKVARDLVEENNSKIKIT

SEQ ID NO: 169931 - protein, 258 aa, Unknown
  Bacterial polypetide isolated from the Sargasso Sea
LIPKNITSHGLKKSEWKINDSALKDVIKFYTKEAGVRNLERELTSLIRKAVRELSTSKKNKISLSPKNIEKYAGIKKFKKNELEDKDLVGITTGLAWTEVGGELLLIEAVSVNGKGRIISTGKLGEVMKESVKAAESYVKSRSDDFGINSNFFNTKDIHVHVPEGATPKDGPSAGIAMCTSIVSVMTGIPVKRNVAMTGEITLRGRVLPIGGLKEKLIAASRSNIKIVLIPNDNKKDITEIPKKLIKGLKIITVSNLD

SEQ ID NO: 169932 - protein, 231 aa, Unknown
  Bacterial polypetide isolated from the Sargasso Sea
YLEVDYDLSDVMFVTTANTLNILPPLLDRLEVIRIPGYTEDEKINIASNYLIPKQIKDNGLKEAELNLDQGVLKDVIRSYTKEAGVRNLEREISKLARKTVKKILTDNSGSHKIDLKNLPDYLGVKKFKYGMIESDNRVGVVTGLAWTEFGGEILKIESAMMPGKGKMQITGKLGDVMQESVKAAKSYVRSKSLEFGIIPPVFEKKDFHIHVPEGATPKDGPSAGIAMVTS

SEQ ID NO: 169933 - protein, 210 aa, Unknown
  Bacterial polypetide isolated from the Sargasso Sea
SIAKATGREFVRVSLGGIRDESEIRGHRRTYIGSMPGKIIQGMKKVGKSNPLFLLDEIDKMGFDFRGDPAAALLEALDSEQNNKFNDHYLEVDYDLSDVMFVTTANTLNIPPALLDRLEIIRLPGYVEDEKVEIAKKHLIPKNTLNHGIKKAEWKINDKALKELIKFYTKEAGVRNLEREITNLIRKAIRKLTTSNKKSISITPTNLEKF

SEQ ID NO: 169934 - protein, 280 aa, Unknown
  Bacterial polypetide isolated from the Sargasso Sea
EAIYEKIQSELEILQVEKKIRNRVKKQMEKAQKEYYLTEQMKAIQKELGDKDDFKSEILEFEDSLKKKVMPDDIRTRIEKEIKKLKGMSSMSAEATVVRNYIDWLVNLPWDSEVSEDEISIDNAQKVLDEDHFGLEKPKERITEYLAVRALTTKQKGPIMCLVGPPGVGKTSLAKSVANAMGRKFVRISLGGVRDEAEIRGHRRTYIGALPGKIIQGMKKAGTKNPVFLLDEIDKIGADFRGDPASALLEALDPEQNSTFNDHYIEVDYDLSQVLFITTA

SEQ ID NO: 169935 - protein, 288 aa, Unknown
  Bacterial polypetide isolated from the Sargasso Sea
GLEKIKERIIVFLAVQKRMEKIKGPILCLIGPPGVGKTSLGKSIAKATNRQFIRMSLGGVRDEAEVRGHRRTYIGSLPGKIIQMMKKAGTKNPLFLLDEIDKIGNDYRGDPSSALLEALDPEQNTTFNDHYLEVDYDLSDVMFVTTANTLNILPPLLDRMEVIRIPGYTEDEKINIADKYLLPKQIKDNGIKDGEMNLKDGTIKEIIRNYTRESGVRNLEREISKVTRKVVKKVVNDEEKSVEVNDKNISDFLGVKKFKFGELETENKIGIVIGLAWTEFGGEILKIE

SEQ ID NO: 169936 - protein, 203 aa, Unknown
  Bacterial polypetide isolated from the Sargasso Sea
SIIGVEKRIRGRVKTQMEKTQREYYLNEQLKAIQKELGEIEDGKDETTNLKKSIQKAKMPKEVEKKCMSELKKLKNMSPMSAEATVVRNYLDWMIDLPWFKKDDVDIDLNKGLKILDEDHFGLEKVKERIIEFLAVQKRMDKIKGPILCLVGPPGVGKTSLGKSIAKATNRQFIRMSLGGVRDEAEIRGHRRTYIGSLPGKII

SEQ ID NO: 169937 - protein, 296 aa, Unknown
  Bacterial polypetide isolated from the Sargasso Sea
MFVTTANTLNILPPLLDRMEVIRIPGYTEDEKINIANKFLLPKTIKENGVKTGEMDLSDGTMKDVIRNYTKESGVRNLERELSKITRKVVKKIVNAEETKVRIDEKNLIDFLGVKKFKFGELENEDKVGIVTGLAWTEFGGEILKIETVIMPGKGKMQITGKLGDVMQESVKAAKSYVRSKSLDFGIIPPIFEKKDFHIHVPEGATPKDGPSAGIAMVTSIVSSITKIPVRRDIAMTGEVTITGQVLPIGGLKEKLLAAHRAGIKEVLIPKDNEKDLTDIPKKVKEDIKLTTVEIV

SEQ ID NO: 169938 - protein, 306 aa, Unknown
  Bacterial polypetide isolated from the Sargasso Sea
ELAKFKHMAPSSAEASVVRTYLDCLVDVPWKKKSKVKSDIKASMKILEEDHYGLEEVKERIVEYLAVQKRVKSMKAPVLCLVGPPGVGKTSLGESIARATNRKFVRMSLGGVRDESEIRGHRRTYIGSMPGKIIQKLSKVGVKNPLFLLDEIDKIGMDHRGDPASALLEVLDPEQNNTFSDHYLEVDYDLSEVMFVCTANSLNIPTPLLDRMEIIRIPGYIEDEKINIAEKYLLPKQMTRNGLKDNEIKFNKDVILSLIRYYTREAGVRGLERQIARILRKVVKQRLIEDKSKTRATAISTKNLEK

SEQ ID NO: 169939 - protein, 280 aa, Unknown
  Bacterial polypetide isolated from the Sargasso Sea
EMIDVKKRLEKIYEIMKKETSVITMEKKIRGRVKNQMEKTQREYYLNEQLKAIQKELGEIEEGKDEVTNLSKAIVKAKMSKEAQSKCMAELKKLKAMSPMSAEATVVRNYLDWMVDLPWTNKSKIIKDLNSAQKILDEDHYGLEKVKERIIEFLAVQKRIEKLKGPILCLVGPPGVGKTSLGKSIARATGRKFVRISLGGIRDEAEIRGHRRTYIGSLPGKIIQMMKKAGTKNPLFLLDEIDKVGSDYRGDPSSALLEALDPEQNKQFNDHYLEVDYDLS

SEQ ID NO: 169940 - protein, 302 aa, Unknown
  Bacterial polypetide isolated from the Sargasso Sea
ILLDEIDKLGSDWRGDPSSALLEVLDPEQNDKFNDHYLELDYNLSDAMFVCTANTLNIPHALLDRMEIIRIPGYTEKEKNNIAQKYLIPKQIKNHILKRSELKFTIKIINQIIRNYTREAGVRNLEKEISKVCRKTVKLLETTNKNSVNLNEEMLRTFLGISKFRSSEIEKKNLIGVTNGLAWTEVGGEILSIEVILSIGKGRLTITGKLGEVMKESVQAAISYVRSHSLDLGIHPFDFDKFDIHVHVPEGATPKDGPSAGIAIFNSLVSSLTANKVRKDVAMTGEITLRGRVLPIGGLKEK

SEQ ID NO: 169941 - protein, 205 aa, Unknown
  Bacterial polypetide isolated from the Sargasso Sea
IIKAREILDADHHGLAKVKDRIIEFLAVQQRTKSVKGPILCLVGPPGVGKTSLGESIARATGRKYVRMALGGIRDEAEIRGHRKTYIGSMPGKIVQSLKKAKTNNPLFMLDEVDKLGADWRGDPSSALLEVLDPAQNSTFQDHYMELDLDLSNVLFITTANTLNMPQPLLDRMEIIRLSGYTEDEKLEIAKCHLMGRQIKNHGLK

SEQ ID NO: 169942 - protein, 293 aa, Unknown
  Bacterial polypetide isolated from the Sargasso Sea
MKSDKSIVLVTQKNSEIDDPVSKDLFQYGCLSKVLQLLKLPDGTVKVLVEGEKRVKILKHINDNTNYLNCEVEIIEDKNVSKDLDQLALGLVKKFEKLQILNKKDLNENGNSFKNLKNPSQIANNISANLNIQILEKQELLELADLKIRLEKIHSYIEKETSVITVEKKIRGRVKNQMEKTQREYYLNEQLKAIQKELGEIDEGKDEMSSLSKAITDAKMPKLAKEKCMSELKKLKSMSPMSAEATVVRNYLDWMTELPWSNKSKINTDLSNAQKILDEDHYGLEKVKDRIIE

SEQ ID NO: 169943 - protein, 199 aa, Unknown
  Bacterial polypetide isolated from the Sargasso Sea
AWTEVGGEILKIESAVMPGKGKMQITGKLGDVMQESVKAAKSYIRSKSLEYGIIPPVFDKKDFHIHVPEGATPKDGPSAGIGMVTSIISAITEIPVDKKVAMTGEITLRGIVLPIGGLKEKLLAAHRAGIKKVLIPMENKKDLVEVPKTILETMEIIPVKNVDEVLKVALIKPLKRVEWVEVDQIAEKNKTKKEELSTH

SEQ ID NO: 169944 - protein, 289 aa, Unknown
  Bacterial polypetide isolated from the Sargasso Sea
KMRGPILCLVGPPGVGKTSLGKSIAKATNRKFIRISLGGIRDEAEIRGHRRTYIGSLPGKIIQMMKKAGTKNPLFLLDEIDKVGNDYRGDPSSALLEALDPEQNKEFNDHYLEVDYDLSDVMFVTTANTLNILPPLLDRMEVIRLSGYTEDEKVNISQKFLIPNQSKNNGLKKDEWNINEEINRKIIRNYTRESGVRNLEREISKIARKLVKKIDNNESINNPIDEKDLKELLGVQKFNYGEIEEENRVGVVTGLAWTEVGGEILKIETVIMPGKGKMQITGKLGDVMQ

SEQ ID NO: 169945 - protein, 314 aa, Unknown
  Bacterial polypetide isolated from the Sargasso Sea
LYPGKIIQMMKKAGTKNPLFLLDEVDKIGNDYRGDPSSALLEALDPEQNTAFNDHYLEVDYDLSDVMFVTTANTLNILPPLLDRMEVIRIPGYTEDEKINIANRYLLPKQVKENGVKEGELNLEDGTIKEIIRSYTRESGVRNLEREISKVTRKVVKKVVSGEAEKVLVNDKNIPDFLGIKKFKYGEVEEKDKTGIVIGLAWTEVGGEILKIETVNMPGKGRMQITGKLGDVMQESVKAAKSFVRSKSLEYGIIPPFFEKKDFHIHVPEGATPKDGPSAGIAMVTSIVSSITNIPVNREIAMTGEVTITGQVLQ

SEQ ID NO: 169946 - protein, 258 aa, Unknown
  Bacterial polypetide isolated from the Sargasso Sea
KEISKICRKIVKIIETSNKKTVVLNDELVAKFLGHSRFRTSEIEKNNLIGVTNGLAWTEVGGEILSIEAILSIGKGRLTITGKLGDVMKESVQAAISYVRSHSIDLGIHPFDFDKFDIHVHVPEGATPKDGPSAGIAIFNSIVSSMTSNKVKRDVAMTGEITLRGRVLPIGGLKEKVYAASRAGIKKVLIPEENSSEIKEFDKEVLKSIKIIPISEAKAILEHTLLKPINPLNITESDILEAQKSSQIENNIKENLTH

SEQ ID NO: 169947 - protein, 259 aa, Unknown
  Bacterial polypetide isolated from the Sargasso Sea
EDGKDETTSLKKSILKAKMPKEVEKKCMSELKKLKNMSPMSAEATVVRNYLDWMIDLPWFKKDKVDIDLNKALKILEEDHFGLEKVKERIIEFLAVQKRMDKIKGPILCLVGPPGVGKTSLGKSIAKATNRQFVRMSLGGVRDEAEVRGHRRTYIGSLPGKIIQMMKKAGTKNPLFLLDEIDKVGNDYRGDPSSALLEALDPEQNTTFNDHYLEVDYDLSDVMFVTTANTLNILPPLLDRMEVIRIPGYTEDEKINIAN

SEQ ID NO: 169948 - protein, 244 aa, Unknown
  Bacterial polypetide isolated from the Sargasso Sea
QNTTFNDHYLEVDYDLSDVMFVTTANTLNILPPLLDRMEVIRLAGYTEDEKINIANKYLLPKQIKDNGVKDKEMNLSDDIIKEVIRGYTKESGVRNLEREISKIARKVVKKIVAGEEKEVNVNNKNLSDFLGVPKFNFGELENDNKVGIVVGLAWTEYGGEILKIETVTMPGKGRMQITGKLGDVMQESVKAAKSFVRSKCLEYGIIPPIFEKKDFHIHVPEGATPKDGPSAGVGMVTSIVSSI

SEQ ID NO: 169949 - protein, 251 aa, Unknown
  Bacterial polypetide isolated from the Sargasso Sea
FAESVLNEDHYGLEKVKERILEYLAVQQRIKKMKGPILCLVGAPGVGKTSLGKSIARATGRKFVRMSLGGVRDEAEIRGHRRTYIGSLPGKVLQMMKKAGSSNPLFLLDEIDKLGADYRGDPSSALLEVLDPEQNNSFNDHYLEVDYDLSDTMFITTANTLRMPPALLDRMEIIRIAGYTEDEKVEIVKQHLAPQMLEKHGLKSGELILDDSAITGLIRYYTREAGVRSLERELANLARKKVKKIVAGDIG

SEQ ID NO: 169950 - protein, 291 aa, Unknown
  Bacterial polypetide isolated from the Sargasso Sea
MPKEASKKCLSELKKLKSMSPMSAEATVVRNYLDWMVELPWVNKDKKLDSINIQEAKKILDKDHYGLDKVKERILEYLAVQKRVGKIKGAILCLVGPPGVGKTSLGKSIARATGRKFVRISLGGIRDEAEIRGHRRTYIGSLPGKIIQQMKKAGAKNPLFLLDEIDKVGSDYRGDPSSALLEALDPEQNVTFNDHYLEVDYDLSDVMFVTTANTLNILPPLLDRLEVIRIPGYTEDEKVNIANNYLIPKQIKDNGLNEGELNLNNDVLQDVIRSYTKEAGVRNLEREISKL

SEQ ID NO: 169951 - protein, 287 aa, Unknown
  Bacterial polypetide isolated from the Sargasso Sea
MPEDAEKVALKELDRLTKIPTQSPEYTVARTYLDWLTDLPWSSSSEDSIDVKESKKILDEDHYGLEKVKERIIEYLAVRALKMKKEPNSAIRGPILCFAGPPGVGKTSLGKSIAKSMGREFVRISLGGVRDEAEIRGHRRTYIGALPGRIIQSLKKAGTNNPVFMLDEIDKLGMDFRGDPSSALLEVLDPEQNGTFADHYLEVDFDLSKVMFIATANYQDPIPPALKDRMEVIDFSGYIEDEKLQIAKKHLIPKQLKENALTTSDVTLDDASIKELMSSYTREAGVR

SEQ ID NO: 169952 - protein, 317 aa, Unknown
  Bacterial polypetide isolated from the Sargasso Sea
RGDPASAMLEVLDPEQNSTFTDHYLEVEYDLSNVMFITTANSYNMPAPLLDRMEIIPLEGYTEDEKIEIAKRHLIDKAIKNHGLRKGEFELTDSALTGIVRYYTREAGVRNLEREISKLSRKSVTKIVKNEEKTISITIDNLEDFLGVKKFRFGLAEQDDQIGVVTGLAWTSVGGDLLHIEALKLPGKGRMKTTGKLGDVMKESIDAANSYVRSISAEVGIKPPQFDKTDIHVHVPEGATPKDGPSAGLAMVTSIVSVLTGIPVKKDLAMTGEVTLRGNALPIGGLKEKLLAALRGGIKQYLFQKKMRRTLQIYQKM

SEQ ID NO: 169953 - protein, 294 aa, Unknown
  Bacterial polypetide isolated from the Sargasso Sea
EFSKFKLMSPMSAEASVVRSYLDWVSNLPWKKKTKIKSNIKNALSVLDNDHYGLEEIKERILEYLAVQKRVKKLKAPVLCLVGPPGVGKTSLGQSIANATNRKFIRMSLGGVRDEAEIRGHRRTYIGSMPGKIIQKISKADSKNPLFLLDEIDKMGMDFRGDPASALLEVLDPEQNSTFSDHYLEVDFDLSEVMFVCTANSLNIPGPLLDRMEIIRIPGYIEDEKLNIAKQYLIPKQLERNGLDSNEVNFDDKAILDLIRYYTREAGVRGLERQISKVLRKSVKEIELSSKKLH

SEQ ID NO: 169954 - protein, 309 aa, Unknown
  Bacterial polypetide isolated from the Sargasso Sea
PDGTLKVLVEGKKRVKINFLPQTKKINYLICNYSVLPNKGISKVDSTKINILHTVFEDYINLNKKTNNEIINIISDIKDPSKLCDTIISNLSLAIDEKQKFLELNDLSSRIDKLISKLEIEIDTLEIDKKVRNRVKSQMEKTQKEYYLNEQLKAIQKELGNDDIEKDEFQEIKEKIGKVKLSKDALEKVNSEFKKFKNMSPMSAESGVIRSYIDCILNLPWKKVSKINYDLSLAKQILDEDHYGLKKVKERILEFLVVQKRSKSLKGPILCLVGPPGVGKTSLGKSIAKATKRTYLRMALGGVRDEAEV

SEQ ID NO: 169955 - protein, 236 aa, Unknown
  Bacterial polypetide isolated from the Sargasso Sea
DETVHIRPGSLDKYLGVQKFKYGIAEKDNQIGQVTGLAWTQVGGELLTIESTAIPGKGKLINTGQLGDVMKESIQAATTVVRSRSKALGIKQDFHQKMDMHIHVPEGATPKDGPSAGIGMCTALISSLTDIPVKANVAMTGEITLRGEVLPIGGLKEKLLAAHRGGIEVVIIPEENKKDLTEIPKNIKDKLEIIPVQWIDQVLEIALERMPEIKLEGSKSSQSSKSKSSSEKNLPH

SEQ ID NO: 169956 - protein, 302 aa, Unknown
  Bacterial polypetide isolated from the Sargasso Sea
AIQKELGDGEDGSNEYSEIEKKINEVKLSKEAKEKALNEFKKLKSMSPMSAEASVIRNYLEWILDIPWEKFSKEVIDIKGSEKILNDDHYGLEKVKERILEFLAVKKRSKKASGTILCFVGPPGVGKTSLGKSIARATGREFAKISLGGIRDEAEIRGHRRTYIGSMPGRFIQAMKKTKTSNPIILLDEIDKVGSDWRGDPSSALLEVLDPEQNNQFNDHYLEVDYDLSNVMFICTGNTYNIPGPLLDRLEVIEVSGYTEKEKVEIAKKYLIPRKMNKNILKNNEYKLDKSSITEIVRHYTR

SEQ ID NO: 169957 - protein, 300 aa, Unknown
  Bacterial polypetide isolated from the Sargasso Sea
IEEHILGSMPGKIVQALKKAKTTNPLILLDEIDKMGQDFRGDPASAMLEVLDPEQNSTFTDHYLEVEYDLSNVMFITTANSYNMPAPLLDRMEIIPLSGYTEDEKIEIAKRHLIDKAIKNHGLRKGEFELTDSALTGIVRYYTREAGVRNLEREISKLSRKSVTKIVKNEQKHIKVTMENLEDFLGVKKFKFGLAEQDDQIGVVTGLAWTSVGGDLLHIEALKLPGKGRMKTTGKLGDVMKESIDAANSYVRSISAEVGIKPPKFDKTDIHVHVPEGATPKDGPSAGLAMVTSIVSVLTG

SEQ ID NO: 169958 - protein, 286 aa, Unknown
  Bacterial polypetide isolated from the Sargasso Sea
NKKISSETITNIKELKDPAKISDNIASHLNSTISEKQQIFETVDVKKRLNGVIKIMENETSIIGVEKRIRGRVKTQMEKTQREYYLNEQLKAIQKELGEIEDGKDETSNLNKAIQKAKMPKEVQKKCMSELKKLKNMSPMSAEATVVRNYLDWMIDIPWYKKDKVDIDLNKALKTLDEDHYGLEKVKERIIEFLAVQKRMEKIKGPILCLIGPPGVGKTSLGKSIAKATNRQFVRMSLGGVRDEAEIRGHRRTYIGSLPGKIIQMMKKAGTKNPLILLDEVDKVWK

SEQ ID NO: 169959 - protein, 281 aa, Unknown
  Bacterial polypetide isolated from the Sargasso Sea
QLLKLPDGTVKVLVEGIKRVRIVDFKDDEKFITCTYEHQKDIVNKDEDLLPLALTAVRRLEKLTSVNKKISSETISNIKQLKDPSKIVDNIVSNLNASISEKQQIFETLDVKKRLNAAIKMMESETSIIGVEKRIRGRVKTQMEKTQREYYLNEQLKAIQKELGEIEDGKDETTNLKKSIQKAKMPKEVEKKCMSELKKLKNMSPMSAEATVVRNYLDWMIDLPWFKKDNVDIDLNKGLKILDEDHFGLEKVKERIIEFLAVQKRMEKIKGPILCLVGPPG

SEQ ID NO: 169960 - protein, 289 aa, Unknown
  Bacterial polypetide isolated from the Sargasso Sea
MIKTIFGLEKVKERIIEFLAVQKRMEKIKGPILCLVGPPGVGKTSLGKSIAKATNREFVRMSVGGMRDEAEIRGHRRTYIGSLPGKIIQMMKKAGTKNPLILLDEIDKIGNDYRGDPSSALLEALDPEQNTTFNDHYLEVDYDLSDVMFVTTANTLNILPPLLDRMEVIRLAGYTEDEKISIANKYLLPKQIKDNGVKEKEMKLDDEIIKEVIRGYTKESGVRNLEREISKLARKVVKKIVAGEEKEVEINKKNLSDFLGVPKFKFGELETENRVGIVTGLAWTEYGGE

SEQ ID NO: 169961 - protein, 223 aa, Unknown
  Bacterial polypetide isolated from the Sargasso Sea
KDLLGVQKFNYGEIEEENRVGVVTGLAWTEVGGEILKIESAVMPGKGKMQITGKLGDVMQESVKAAKSYIRSKSLDYGIIPPIFDKKDFHIHVPEGATPKDGPSAGIGMVTSIISAITEIPVNKNVAMTGEITLRGLVLPIGGLKEKLLAAHRAGIKKVLIPTENKKDLVEVPKTILDSIEVIPVKNVDEVLKVALIKPLKRVEWVEVDQISSKEKKEELSTH

SEQ ID NO: 169962 - protein, 236 aa, Unknown
  Bacterial polypetide isolated from the Sargasso Sea
MPLALTAVRRLEKLTTVNKKISNETIQNIKQLKDPSKIADNIGSHLNSTISEKQQIFETFDVKKRLNAVIKIMENETSIIGVEKRIRGRVKTQMEKTQREYYLNEQLKAIQKELGEIEDGKDETSNLNKAILKAKMPKDVQKKCMSELKKLKNMSPMSAEATVVRNYLDWMIDIPWYKKDKVDIDLNKAAKTLDEDHFGLDKVKERIIEFLAVQKRMEKIKGPILCLVGPPGVGKT

SEQ ID NO: 169963 - protein, 302 aa, Unknown
  Bacterial polypetide isolated from the Sargasso Sea
KGNKKIVLVTQKNSEVDDPKRNDIFAYGCESNILQLLKLPDGTVKVLVEGIKRVKIIDIKDDEKFISCTFEYQKEPFIKEEDLLPLALTAVRRLEKLTSINKKISTDTINNIKQLKDSSKIADNIASHLNCTISEKQQIFETLDTRKRLNSIIKIMENETSIIGVEKRIRGRVKTQMEKTQREYYLNEQLKAIQKELGEIEDGKDETTNLKKSIQKAKMPKEVEKKCLAELKKLKNMSPMSAEATVVRNYLDWMIDLPWYKKDKVDINLNKALKTLDDDHYGLEKVKERIIEFLAVQKEWKN

SEQ ID NO: 169964 - protein, 287 aa, Unknown
  Bacterial polypetide isolated from the Sargasso Sea
EVEFDLFDVLFLCTANVKQNIPPALKDRMEVINLSGYTELEKEHIALKHLIPKQIDENGLNLKKIQFQKTSITKMVRSYTREAGVRNLEREIAKTCRKVATHLIKTNNSQKIIVTPKRLQDFLGVPRYKHTIAEEQNEIGSTCGLAWTESGGDMLVTEVNIMKGTGKLQLTGKLGDVMKESAQAAVSYVRTNANQLGIFSSVFEKTDIHIHVPSGAVPKDGPSAGITITNSLVSAFNSIPVKKDVAMTGEITLRGKVLPIGGLKEKLLAAKRGFIRTVVIPYSNKKN

SEQ ID NO: 169965 - protein, 305 aa, Unknown
  Bacterial polypetide isolated from the Sargasso Sea
LEEKIENAKMTEEASKVARKEIDRLSKIPPQSPEYSVSRTYLDWLLDLPWSKTTKDRVNIKKAKSILDNDHYGLDDVKERIIEYLAVRKLKEKKTKDGKVKGPILCFVGPPGVGKTSLGKSIAKSMGREFVRISLGGVRDEAEIRGHRRTYIGALPGRIIQSLKKAGTNNPLFMLDEIDKVGSDFRGDPSSALLEVLDPEQNFSFSDHYLEVPFDLSNVMFIATANLKDPIVPALRDRMEILDFSGYIEDEKIQIAKKYLIPKQIEENALSAKDIKFSETGIKELIRSYTREAGVRNLEREISNV

SEQ ID NO: 169966 - protein, 315 aa, Unknown
  Bacterial polypetide isolated from the Sargasso Sea
NETINTIKQLKDPSQIADNIASHISASISEKQQIFETNDVKKRLNTIIKIMENETSIIGVEKRIRGRVKTQMEKTQREYYLNEQLKAIQKELGEIEEGKDETTSINKAITKAKMPRDVEKKCLQELKKLKNMSPMSAEATVVRNYLDWMTELPWHKKSEVDIDLAKAQNTLDKDHFGLEKIKERIVEFLAVQKRMEKIKGPILCLVGPPGVGKTSLGKSIAKATNREFVRMSVGGMRDEAEIRGHRRTYIGSLPGKIIQMMKKAGTKNPLILLDEIDKIGNDYRGDPSSALLEALDPEQNTTFNDHYLEVDYDLS

SEQ ID NO: 169967 - protein, 280 aa, Unknown
  Bacterial polypetide isolated from the Sargasso Sea
ALQLSEKQNLLELSSLKNRVEHLMALIESEIDLFQVEKRIRGRVKKQMEKSQREYYLNEQMKAIQKEMGDLEDVPNEADELRQKIDNAGMPKDAKDKALAELHKLKMMSPMSSEASVVRTYLDWMVSVPWKKRSKVRLDLRKAEEILESDHYGLEEVKERILEYLAVHKRVKKLKGPILCLVGPPGVGKTSLGESIARATNRKFIRMALGGVRDEAEIRGHRRTYIGSLPGKLLQKLSKVGVKNPLFLLDEIDKMSMDNRGDPASALLEVLDPEQNHVST

SEQ ID NO: 169968 - protein, 158 aa, Unknown
  Bacterial polypetide isolated from the Sargasso Sea
EKIKGPILCLVGPPGVGKTSLGKSIAKATNRQFIRMSLGGVRDEAEIRGHRRTYIGSLPGKIIQMMKKAGTKNPLFLLDEVDKIGNDYRGDPSSALLEALDPEQNTAFNDHYLEVDYDLSDVMFVTTANTLNILPPLLDRMEVIRIPGYTEDEKINMQ

SEQ ID NO: 169969 - protein, 196 aa, Unknown
  Bacterial polypetide isolated from the Sargasso Sea
IIGVEKRIRGRVKTQMEKTQREYYLNEQLKAIQKELGEIEDGKDESASLNKAILKAKMPKDVEKKCLQELKKLKNMSPMSAEATVVRNYLDWMVDLPWHKKSEVDIDLSKASSILDKDHFGLEKVKERIIEFLAVQKRMEKIKGPILCLVGPPGVGKTSLGKSIAKATNREFVRMSVGGMRDEAEIRGHRRTYIGS

SEQ ID NO: 169970 - protein, 303 aa, Unknown
  Bacterial polypetide isolated from the Sargasso Sea
REKIILVTQKNSEVDDPSKNDVFSYACESNILQLLKLPDGTVKVLVEGINRVKITDYSDKKDFITCSYEKVSDLINKDEDLIPTAMSAVKKLEKLTSINKKISSETINNIKILKDPSKIADNIASHLNASISEKQQIFETQDVKKRLNLIIKIMENETSIIGVEKRIRGRVKTQMEKTQREYYLNEQLKAIQKELGEIEDGKDETSNLNKAILKAKMPKDVEKKCLSELKKLKNMSPMSAEATVVRNYLDWMIDLPWFKKDKTEIDLNKAQEVLDEDHFGLEKVKERIIEFLAVQKRMNKLKG

SEQ ID NO: 169971 - protein, 291 aa, Unknown
  Bacterial polypetide isolated from the Sargasso Sea
MPPLLDRLEVIRIPGYTEDEKINIAKNYLIPKQIKDNGLEDGEFNLSTEVLKDVIRSYTKEAGVRNLEREISKLGRKTVKKILTDEDKNNKISTENLPDYLGVKKFKYGEMESDNKVGVVTGLAWTEFGGEILKIESAIMPGKGKMQITGKLGDVMQESVKAAKSYVRSKSLEFGIIPPIFEKKDFHIHVPEGATPKDGPSAGIAMVTSIISSITGIAVDRNIAMTGEVTLRGHVLPIGGLKEKLLAAHRAGIAKVVIPDDNKKDLAEIPKNILQNLEIKTVKSVDEVLKI

SEQ ID NO: 169972 - protein, 544 aa, Unknown
  Bacterial polypetide isolated from the Sargasso Sea
SVGLSSEAKEKVMTEFNKFKMMSPMSAEATVVRNYIDTVIGLPWTKKTEVNSDIGHAGQILDDDHHGLEKVKERILEYLAVTKRVDKLRGPILCLVGPPGVGKTSLGQSIAKATNRKFIKMSLGGVRDEAEIRGHRRTYIGSMPGKVIQNLAKAKQKNPLFLLDEIDKMAMDFRGDPSSALLEVLDPEQNFAFNDHYLEVDFDLSDVMFIATANSMDSIPAPLLDRMEIIRLPGYTEDEKTDIAKKYLISKQYEQNGLKKKELLINTASIRDIIRYYTREAGVRGLDRAISKVCRKVVKSILMKNNSSSPTKITPSNLSDYLGVKPYSHGVIDKKDMIGQVNGLAWTSVGGELLRIECALMSGKGKVEQTGSLGDVMLESIKAAITVVRTRAVSLGIDTEFHQNKDIHIHVPEGATPKDGPSAGISMALAVASSLSNIPVRSDVAMTGEITLRGEVLEIGGLKEKLLAALRGGIKEVIIPKDNEKDLVEIPDNVKKSLKIHPVKFVDEVFAIALKNKPVKSKPVKKTASEDNKKNKTSPKILPH

SEQ ID NO: 169973 - protein, 410 aa, Unknown
  Bacterial polypetide isolated from the Sargasso Sea
LLPLRDIVIFPSTVVPLFVGRKKSIKALEEVMKSDKSIVLVAQKNSEVDDPKEQDIYSYGCLSKILQLLKLPDGTVKVLVEGLERVKIKSIKSEEKKYLNCEIEIISTVGDTDQSKALASSLIKKFEKLSNLSKKDLGDFTKNLKSLSKTSDISDNISSNLNVSIFEKQKLLEIFDITKRLERIYEIIEKETSVISMEKKIRGRVKNQMEKTQREYYLNEQLKAIQKELGEIEEGKDEVSNLSSAILKAKMTKEAQAKCLSELKKLKSMSPMSAEATVVRNYLDWMIDLPWSNKSKIIKDLKSAQQILDEDHYGLDKVKERIIEFLAVQKRIEKLKGPILCLVGPPGVGKTSLGKSIARATGRKFVRISLGGVRDEAEIRGHRRTYIGSLPGKIIQMMKKAGTKNPLFLL

SEQ ID NO: 169974 - protein, 688 aa, Unknown
  Bacterial polypetide isolated from the Sargasso Sea
MTLEREAHIELPVLPLRDVVVYPHMVIPLFVGREKSIRCLETAMAQDKQIILVAQRDAELDEPTKDDIFDVGTVASILQLLKLPDGTVKVLVEGGRRARITRYTQEADFFVAKAEYLESEPLEDKEEEVLVRSAIGQFEGYIKLNKKIPPEVLTSLSGIDEAARLADTMAAHMPLKLEDKQSVLEMTNIGERLEYLMAMMESEIDLLQVEKRIRTRVKKQMEKSQREYYLNEQMKAIQKELGDLDEGHDEFEVLNRKIEEANMPSDAKEKAVAELNKLRMMSPMSAEATVVRSYVDWMTSVPWSQRSKIKRDLAKAQEVLDTDHYGLEKVKDRILEYLAVQSRVRQLKGPILCLVGPPGVGKTSLGQSIAKATGRKYVRVALGGVRDEAEIRGHRRTYIGSMPGKIIQKMAKVGVKNPLFLLDEIDKMSSDMRGDPASALLEVLDPEQNATFNDHYLEVDYDLSDVMFVATSNSMNIPGPLLDRMEVIRLSGYTEDEKLNIAKQHLLTKQIERNGLKANEIHIEDSAIVGIIRYYTREAGVRALERELSKICRKVVKMILLDKSIKSVTVTADNLKSFLGVQRFDYGKAESNNQIGQVTGLAWTEVGGDLLTIEATSVPGKGKLTYTGSLGDVMQESIQAAMTVVRARAEQLGINGDFYEKRDIHVHVPEGATPKDGPSAGAAMCTAL

SEQ ID NO: 169975 - protein, 288 aa, Unknown
  Bacterial polypetide isolated from the Sargasso Sea
LNKNEAKFNTTIINQIIRNYTREAGVRNLEKEISKTCRKIVKIIETSSKQMVKLDNKKINNFLGVPKFRFNEIENKNLIGITNGLAWTEVGGEILSIEVLLSLGKGKLTITGKLGEVMKESIQAATSYVRSQCINLGIHPNDFDKYDIHVHVPEGATPKDGPSAGIAIFNSLVSSLTSNKVRKDVAMTGEITLRGRVLPIGGLKEKIYAAVRAGIKTVLIPNENKGEIVEFDKDLLKSIKIIPVFEATSILKHTLLKPVVPLNLTESEVLESQKRQFSQDDFKENITH

SEQ ID NO: 169976 - protein, 236 aa, Unknown
  Bacterial polypetide isolated from the Sargasso Sea
KKVNNPINEKDLKDLLGVQKFNYGEIEEENRVGVVTGLAWTEVGGEILKIESAVMPGKGKMQITGKLGDVMQESVKAAKSYIRSKSLDYGIIPPIFDKKDFHIHVPEGATPKDGPSAGIGMVTSIISAITEIPVDKNVAMTGEITLRGLVLPIGGLKEKLLAAHRAGIKKVLIPSENKKDLIEVPKTVLESVEIITVKSVDEVLKVALTKPLKRVEWVDVDQLSKKEKLKKELSTH

SEQ ID NO: 169977 - protein, 500 aa, Unknown
  Bacterial polypetide isolated from the Sargasso Sea
RIRNRVKRQMEKTQRDYYLNEQMKAIQKELGDSEDGKSELDEINDLIKKSKLPKHVLEKTQSEIKKLKNMSPMSAEATVIRNYLDWILAVPWSKKSKLKNNLSDAQNILDNDHFGIEKVKERIIEYLAVQKRTGKIKGPLLCLVGPPGVGKTSLGKSIANATGRKFVRMSLGGVRDEAEIRGHRRTYIGSMPGRIIQALKKAGTNNPLILLDEVDKLGADWRGDPSSALLEVLDPEQNNTFQDHYLEVDCDLSNVMFVTTANSLNMPKPLLDRMEIIRLSGYTELEKLEIAKHHLLPKVIKEHGLNKSEFSLSDKELLEVIRSYTREAGVRGLEREISKLSRKLITEILTKNKKKIKVDLTAINNFLGVPKFKHSEIEDKDLVGITTGLAWTEVGGELLTIESALSPGKGKISSTGKLGEVMKESIQAAEAFVKSRANLFGISFKDIEKSDIHLHVPEGATPKDGPSAGVAMITSIISSLTGNPVKHLVAMTGEMTLRGR

SEQ ID NO: 169978 - protein, 378 aa, Unknown
  Bacterial polypetide isolated from the Sargasso Sea
VGRDKSISALNEVMKNDKKIILVTQKNSEVDDPKKTDVFTYGCEGNILQLLKLPDGTVKVLVEGNKRVKILDFKDSDKYITCDFSYQNDVLTKDEDLLPLAITAVRRLEKLTSVNKKIANETINNIKQLKEPSKIADNIASHLSTTISEKQQLFETVDVKKRLNAVIKIMENEASIIGVEKRIRGRVKTQMEKTQREYYLNEQLKAIQKELGEIEDGKDETSNLNKQILKAKMPKEVQKKCMTELKKLKNMSPMSAEATVVRNYLDWMIDIPWHKKSHVDINLNKALKTLDEDHYGLEKVKERIIEFLAVQKRMDKIKGPILCLIGPPGVGKTSLGKSIAKATNREFVRMSLGGVRDEAEIRGHRRTYIGSLPGKLYR

SEQ ID NO: 169979 - protein, 274 aa, Unknown
  Bacterial polypetide isolated from the Sargasso Sea
LGNDIIKEVIRSYTKESGVRNLEREISKIARKVVKKVVAGEEKEVNIDSKNLPDFLGVPKFKSGELESENRVGIVTGLAWTEYGGEILKIETVTMPGKGRMQITGKLGDVMQESVKAAKSFVRSKCLEYGIIPPLFEKKDFHIHVPEGATPKDGPSAGIGMVTSIVSSITNIPVKRDVAMTGEVTLTGQVLPIGGLKEKLLAAHRAGIKEVLIPRENEKDLVDMPKKIIDEIKITPVEFADEVLKIALTKELKKTEWVEVDMSKKDDKSQASIQ

SEQ ID NO: 169980 - protein, 387 aa, Unknown
  Bacterial polypetide isolated from the Sargasso Sea
YYLNEQMKAIQKELGDGSETQDELVELEEKISKIKLSKEAKDKALAELKKLKSMSPMSAEATVVRNYLDWILSIPWGKQSRVKKDLNRAQKILDDDHCGLEKVKERIVEYLAIQQRSKKIKGPILCLVGPPGVGKTSLGKSIANATGREFIRIALGGVHDESEIRGHRRTYIGSMPGKIIQSMKKAKTNNPLILLDEVDKMGRDFRGDPASAMLEVLDPEQNSTFTDHYLEVEYDLSNVMFITTANTYNMPRPLLDRMEIISLAGYTEIEKRDIATEHLISKQMKEHGLKVSEFSINDNGLLEIIRRYTREAGVRNLEREIAKLCRKSLTKIIKGEAKKVSVNLKNIEEFLGVKKFKFGLAEEENQIGVTTGLAWTETGGDLLSIEA

SEQ ID NO: 169981 - protein, 433 aa, Unknown
  Bacterial polypetide isolated from the Sargasso Sea
MEVKHSSPLLPLRDIVVFPSMVIPLFVGRDKSINALNEVMKGNKKIVLVTQKNSEVDDPKKTDVFTNGCESSILQLLKLPDGTVKVLVEGVKRVKIVDFKDEKDFILCSFEYNNDIVAPQEDLLPLGLTAIRRLEKLTSINKKISSETITNIKNLKDASKIADNIASHLNCTISEKQQLFETLDVKKRLNNVIKIMENETSIIGVEKRIRGRVKTQMEKTQREYYLNEQLKAIQKELGEIEDGKDETSNLNKAILKAKMPKEVQKKCMSELKKLKNMSPMSAEATVVRNYLDWMIDIPWFKKDKVDIDLNKALKQLDEDHYGLEKVKERIVEFLAVQKRMEKLKGPILCLVGPPGVGKTSLGKSIAKATNRQFVRMSLGGVRDEAEIRGHRRTYIGSLPGKIIQMMKKAGTKNPLILLDEIDKVGNDYRGDPS

SEQ ID NO: 169982 - protein, 289 aa, Unknown
  Bacterial polypetide isolated from the Sargasso Sea
MIAENKKPLLPLRDIVIFPSVVVPLFVGRKKSIRALEEVMKTDKSIVLVTQKNSEVDDPQEKDIYSFGCLSKILQLLKLPDGTVKVLVEGQKRAKIKEISDENKKFLNCNIETIENDKETEENKLYALNLIKKFEKLSSLSKKDSLDFVKTLKSLTDSNQIADNISSNLNISINDKQFLLEITNLKKRLEKIYEILEKETSVISMEKRIRGRVKNQMEKTQREYYLNEQLKAIQKELGEIEEGKDEISNLSKAIMKAKMSKDAQIKCLAELRKLKTMSPMSAEATVVRN

SEQ ID NO: 169983 - protein, 328 aa, Unknown
  Bacterial polypetide isolated from the Sargasso Sea
ANTLNILPPLLDRMEVIRIPGYTEDEKINIANKYLLPKQIKDNGIKEGEMNLQEGTIKEIIRNYTRESGVRNLEREISKVTRKVVKKVVNKEEKNVDVNSKNISDFLGVKKFKFGELESENKIGIVIGLAWTEFGGEILKIETVNMPGKGRMQITGKLGDVMQESVKAAKSFVRSKSLEYGIIPPIFEKKDFHIHVPEGATPKDGPSAGIAMVTSIVSSITNIPVNKEIAMTGEVTVTGHVLPIGGLKEKLLAAHRAGVKKVLIPKENEKDLVDVPKKVREDIKIIPVESADEVLKIALTKELKRVEWSEVEKISEAKKNEKSQASIQ

SEQ ID NO: 169984 - protein, 554 aa, Unknown
  Bacterial polypetide isolated from the Sargasso Sea
GKDETSNLNKAILKAKMPKEVQKKCMSELKKLRNMSPMSAEATVVRNYLDWMIDLPWYKKDKVDIDLNKALKVLDEDHFGLEKVKERIIEFLAVQKRMEKLKGPILCLVGPPGVGKTSLGKSIAKATNRQFVRMSLGGIRDEAEVRGHRRTYIGSLPGKIIQMMKKAGTKNPLFLLDEIDKVGNDYRGDPSSALLEALDPEQNTTFNDHYLEVDYDLSDVMFVTTANTLNILPPLLDRMEVIRIPGYTEDEKINIANKFLLPKTIKENGVKTGEMDLSDGTIKEVIRNYTKESGVRNLEREISKITRKVVKKIVNAEETKVKVNEKNLQDFLGVKKYKFGELENEDKVGIVTGLAWTEFGGEILKIETVNMPGKGRMQITGKLGDVMQESVKAAKSYVRSKSLDFGIIPPLFEKKDFHIHVPEGATPKDGPSAGIAMVTSIISSITKVPVRRDIAMTGEVTITGQVLPIGGLKEKLLAAHRAGIKEVIIPKDNEKDLTDIPKKVKEDIKITSLDVVDDVIKIALTKELKRVEWVDVEKLSDSKKTINLKLAFNN

SEQ ID NO: 169985 - protein, 382 aa, Unknown
  Bacterial polypetide isolated from the Sargasso Sea
MPGRIIQSIRKSGTSNPVFVLDEVDKISSGSQGDPSSALLELLDPEQNNSFHDNFLEVGYDLSKVMFIATANSLSTMHPALLDRMELINVSGYTSEEKVSIASKFLVKKQLTEHGLKPTDFKLSSKVLKDIISGYTRESGVRNLEKQIAKLIRNRAKNIVSNSKLNNSKDQNFLKDVLGPKKFFRDKYESNNVAGIVTGLAWTSVGGEILFIESSISEGKGNLSITGNLGKIMKESAIIALEFIKSNQKELGIEKDLDFSKYNIHIHVPEGATPKDGPSAGITILTSLVSLFTQKRVKKNIAMTGEITLRGKVLPVGGIKEKILAAKRANIKEIILSSYNKKDIQEINPKYLKGLKFIYVDSMKDVISNSIINRKVTNPKLI

SEQ ID NO: 169986 - protein, 801 aa, Unknown
  Bacterial polypetide isolated from the Sargasso Sea
MKIEKVPVLPLRDVVVYPNMVVPLFVGRDKSIKSLEDAMNDNNKTILLVTQKSPDIDDPNESELYQVGCLASILQLLKLPDGTMKVLVEGLSRANILDVTDHDSSLTASYEIIDKKKSISNTHEDALSRALEDTFSQYVKMNKKIPPEVLSSIAGIEDLSKLSDSIAAHMTMSLKEKQDVLEITDTKKRVEYLMKTMNSELDVLQVEKKIRGRVKQQMEKSQREYYLNEQMKAIQKELGEIGDEPNDFDAIQKRIDTAGLSSEAKEKITSEFNKFKMMSPMSAEATVVRNYIDTVLSLPWKDKSEVNSDIAHAQKVLDQDHHGLLKVKERILEYLAVNKRVQKLKGPILCLVGPPGVGKTSLGMSIAKSTNRKFIKMSLGGVRDEAEIRGHRKTYIGSMPGKVIQNLSKVKTKNPLFLLDEIDKMAMDFRGDPSSALLEVLDPEQNFAFNDHYLEVDFDLSDVMFIATANSMESIPAPLLDRMEIIRLPGYTEDEKVDIAKKYLLQKQFKQNGLKTKELSISIPTLRDIIRFYTREAGVRGLDRSISKICRKVIKSLTLGNSKSKNFKITPLNLSNYLGVKQFNFGSVEKKDMIGQVNGLAWTSTGGELLRIECALMSGKGKITQTGKLGDVMQESIKAAITVVRTRSSSLGIDSEFYQNKDLHIHVPEGATPKDGPSAGITMALAVASSLSGVPVKSDVAMTGEITLRGQVLEIGGLKEKLLAALRGGIKEVIIPKDNEKDLTEIPENVKKGLKIHPVKFVDEVFAIALKNKVTKSKNVSKKSGLENKKAKSSGTKRLPH

SEQ ID NO: 169987 - protein, 445 aa, Unknown
  Bacterial polypetide isolated from the Sargasso Sea
MNNTTLPVLPLRDIVVFPSMVAPLFVGRVQSVNALNHAMTSDKKIFLLAQKNSEIDNPKKSDLYEWGTIAKVLQLLKLPDGTIKVLVEGITRARLNTLNLSNDFLTAKINKIDIKLKKNNNLKALVKIVIDQFQDYSKVNKKIPSDIVNNLISISDPNKIADVVSINLNINMEQKQELLEMHDLEKRLNKIHVYLVSEIDSFQMEKKIKGRVKRQMEKTQKEYYLNEQMKAIQKELGDNDDSDDIAEIEKKITSVKLSKDANEKCKSELKKLKNMSPMSAEATVIRNYLDWILSIPWNSKSEISKNIKKSKKILEEDHYGLDKVKDRILEYLAVQKRTEKLKGPILCLVGPPGVGKTSLGKSIATATGRNFVRMSLGGIRDEAEIRGHRKTYIGSMPGRFIQSMKKAKTSNPLILLDEIDKLGSDWRGDPSSALLEVLDPEQNDK

SEQ ID NO: 169988 - protein, 531 aa, Unknown
  Bacterial polypetide isolated from the Sargasso Sea
ADNIISHINASISEKQQIFEILDVKKRLNSVIKIMENEASIIGVEKRIRGRVKTQMEKTQREYYLNEQLKAIQKELGEIEDGKDETTSLKKSILKAKMPKEVEKKCMSELKKLKNMSPMSAEATVVRNYLDWMIDLPWFKKDKVDIDLNKALKILEEDHFGLEKVKERIIEFLAVQKRMDKIKGPILCLVGPPGVGKTSLGKSIAKATNRQFVRMSLGGVRDEAEVRGHRRTYIGSLPGKIIQMMKKAGTKNPLFLLDEIDKVGNDYRGDPSSALLEALDPEQNTTFNDHYLEVDYDLSDVMFVTTANTLNILPPLLDRMEVIRIPGYTEDEKINIANKYLLPKQIKDNGVKEGEMKLADDTIKEIIRSYTRESGVRNLEREISKVTRKVVKKVVNNEEKSVEVNEKNIPDFLGIKKFKFGELEAKDKVGIVIGLAWTEFGGEILKVETVNMPGKGRMQITGKLGDVMQESVKAAKSYVRSKCLEFGVTPPLFEKKDFHIHVPEGATPKDGPSAGIAMVTSIVSSITKVPV

SEQ ID NO: 169989 - protein, 409 aa, Unknown
  Bacterial polypetide isolated from the Sargasso Sea
LLKLPDGTVKVLVEGIKRVKIVDFKDEQEFISCSFEFNNDVLSSQDDLIALGLTAIRRLEKLTSINKKISSETITNIKNLKDASKIADNIASHLNCTISEKQQLFETLDVKKRLNSVIKIMENETSIIGVEKRIRGRVKTQMEKTQREYYLNEQLKAIQKELGEIEDGKDETSNLNKSILKAKMPREVQKKCMSELKKLKNMSPMSAEATVVRNYLDWMIDIPWFKKDKVDIDLNKALKQLDEDHYGLEKVKERIIEFLAVQKRMDKLKGPILCLVGPPGVGKTSLGKSIAKATNRQFVRMSLGGVRDEAEIRGHRRTYIGSLPGKIIQMMKKAGTKNPLILLDEIDKVGNDYRGDPSSALLEALDPEQNTTFNDHYLEVDYDLSDVMFVTTANTLNILQPLLDRMEVI

SEQ ID NO: 169990 - protein, 451 aa, Unknown
  Bacterial polypetide isolated from the Sargasso Sea
NILQLLKLPDGTVKVLVEGIKRVKIVDFIDDEKFITCTYEHQKDILNKDEDLLPLALTAVRRLEKLTSVNKKISTETINNIKQIKDPSKIADNIVSNLNATISEKQQIFETLDVKKRLNAAIKMMESETSIIGVEKRIRGRVKTQMEKTQREYYLNEQLKAIQKELGEIEDGKDETTNLKKSIQKAKMPKEVEKKCMSELKKLKNMSPMSAEATVVRNYLDWMIDLPWFKKDNVDIDLNKGLKILDEDHFGLDKVKERIIEFLAVQKRMDKIKGPILCLVGPPGVGKTSLGKSIAKATNRQFIRMSLGGVRDEAEIRGHRRTYIGSLPGKIIQMMKKAGTKNPLFLLDEVDKIGNDYRGDPSSALLEALDPEQNTAFNDHYLEVDYDLSDVMFVTTANTLNILPPLLDRMEVIRIPGYTEDEKINIANKYLLPKQVKENGVKEGELDIADG

SEQ ID NO: 169991 - protein, 480 aa, Unknown
  Bacterial polypetide isolated from the Sargasso Sea
VERNSRKECRDRLGRTQKEYYLNEQVKAIQKELGHGEDGKAEMEEYAEKIEEVKLSVEAKEMAEKELKKLKMMPSMSSEANVVRNYLDWLLCMPWDEKTEDNLDLEKAEKVLDARHYGLEKVKERIIEYLAVAQQVGKMKGPIICLVGPPGVGKTSLARSVAEALGRKFAHVSLGGVRDEAEIRGHRRTYIGAMPGKVIQSLRKVKYKNPLLLFDEIDKMTYGVMGDPAAALLEVLDPEQNHTFMDHYLEVEFNISDVLFFCTANVAHNIPPALKDRMEVITLTGYTELEKDHIARKHLLPKQMDENGLTVKKIQFQQKAILDIIRSYTREAGVRNLEREIGKTCRKVATQLVKKTKLNKVVVTSSRVEKFLGVPRYKHAKAEEQNEIGTTCGLAWTQAGGELLVTEVNLMKGTGKLQLTGKLGDVMKESAQAALSFVRTNANRLGIFSSIFEKTDIHIHVPAGAVPKDGPSAGVTIATS

SEQ ID NO: 169992 - protein, 435 aa, Unknown
  Bacterial polypetide isolated from the Sargasso Sea
MEVKVTQPLLPLRDIVVFPSMVIPLFVGRDKSITALNEVMKGDKKIVLVTQKNSEVDDPKKNDVFSYGCESNILQLLKLPDGTVKVLVEGIKRVKLVDFKDDEKFISCTFEYQKDILVKDEDLLPLALTAVRRLEKLTSINKKVSTETINNIKQLKDPSKIADNIASHLNATISEKQQIFETLDVKKRLNGVIKIMENETSIIGVEKRIRGRVKTQMEKTQREYYLNEQLKAIQKELGEIEDGKDETTSLKKSIQKAKMPKEVEKKCMAELKKLKNMSPMSAEATVVRNYLDWMIDIPWFKKDKVDIDLNKALKILDEDHFGLEKVKERIIEFLAVQKRMDKIKGPILCLVGPPGVGKTSLGKSIAKATNRQFVRMSLGGVRDEAEVRGHRRTYIGSLPGKIIQMMKKAGTKNPLFLLDEIDKIGNDYRGDPSSA

SEQ ID NO: 169993 - protein, 335 aa, Unknown
  Bacterial polypetide isolated from the Sargasso Sea
DLSDVMFVTTANTLNIIPPLLDRMEVIRLPGYTEDEKISIANNFLLPKQIKDNGVKNNEMKIDIDIIQEVIRSYTKESGVRNLEREISKLARKVVKKVVSNEQKEVQINKKNLPDFLGVAKYKFGELERNNRVGIVTGLAWTEYGGEILKIETVTMPGKGRMQITGKLGDVMQESVKAAKSFVRSKCLEYGIIPPLFEKKDFHIHVPEGATPKDGPSAGIGMVTSIVSSLTNIPVRRDVAMTGEVTITGQVLPIGGLKEKLLAAHRAGIKEAIIPKENEKDLVDMPKKIVDEIKITSVEYADQVLKIALTKELKPTEWVEVDLSKKEDKSQASIQ

SEQ ID NO: 169994 - protein, 376 aa, Unknown
  Bacterial polypetide isolated from the Sargasso Sea
FVRMSLGGVRDEAEIRGHRKTYIGSMPGRFLQAMKKSKTSNPLILLDEIDKLGSDWRGDPSSALLEVLDPEQNNKFNDHYLELDYDLSDVMFVCTANTLNIPPALLDRMEIIRIPGYTENEKNQIAKRYLVPKQIKNNGLKNSEINFNSTLIKQIIRYYTREAGVRGLEKEISKICRKVVKDLETRIKRKILLDKKSIQNYLGVEKYRNNEIEKKNLIGVSNGLAWTEVGGEILSIEVLLSIGKGKLTITGKLGDVMKESIQAASSYVRSQALSLGINPLDFDKYDIHVHVPEGATPKDGPSAGIAIFNSLVSSLTGIKIKKDIAMTGEITLRGRVLPIGGLKEKLYAASRAGIKTVLIPEENKKDLSEIDKDITS

SEQ ID NO: 169995 - protein, 703 aa, Unknown
  Bacterial polypetide isolated from the Sargasso Sea
MNDIKDKDVPLLPLRDVVIFPSVVTPLFVGREKSITALQAAMAGEKQIMLVAQKSAQKDDPELNDLYPIGTLSTILQLIKLPDGTLKVLVEGNQRASIESLKSEEGFDSVKVKNLEEEAESEDTNHYLLTLKKQFQEYVKLTKKATPEVLNTVNAIDSVSRLTDTLVGHLSIDIEQKQTILETQSLSERANKILEHLDSQLDLSKVEKKIRGRVKNQMEKSQKEYYLNEQMKALKKELGEMDEAEEADALESRIMEAGMTKEAQEKALSELQKYKMMSPMSAEASVVRSYIDWMLNIPWKKKSKIRTDLTKASSVLEEDHYGLEEVKERILEYLAVQKRVKKLKGPVLCLVGPPGVGKTSLGESIARATNRKFVRMSLGGVRDEAEIRGHRRTYIGSMPGRIIQKLSKSEVKNPLFLLDEIDKMGMDFRGDPASALLEVLDPEQNHTFNDHYLEVDYDLSDIMFVCTANSLNIPSALLDRMEIITLPGYTEDEKVNIASKYLIEKQKKNNGLKENELSITKQSIKDLIRYFTREAGVRALEREIAKICRKVVKKNAETNKQKNISIRPNNLEDYCGVRKFEYGEAEEKDRIGQVTGLAWTQVGGELLTIEASCFAGKGKIIKTGSLGDVMQESIQAALSVVRSRSETLGIDPKFYEDQDIHIHVPEGATPKDGPSAGAAMCTAVTSVLSQIPVRSDVPDRRNY

SEQ ID NO: 169996 - protein, 291 aa, Unknown
  Bacterial polypetide isolated from the Sargasso Sea
LLPKQIKDNGVKDKEMNLQDNIIQEIIRSYTKESGVRNLEREISKVARKVVKKVVSGEEKEVKIDKENLSDFLGVPKFKSGELETENRVGIVTGLAWTEYGGEILKIETATMPGKGRMQITGKLGDVMQESVKAAKSFVRSKCLEYGIIPPLFEKKDFHIHVPEGATPKDGPSAGIGMVTSIVSSITNIPVKRDVAMTGEVTLTGQVLPIGGLKEKLIAAHRAGIKEVLIPKENEKDLVDMPKKIIDEIKITPVEYADEVLKIALTKELKKTEWVEVDISKKDDKSQASIQ

SEQ ID NO: 169997 - protein, 391 aa, Unknown
  Bacterial polypetide isolated from the Sargasso Sea
MIKNQIPVLPLRDIVVFPNMVAPLFVGREQSVNALNHVMTVDKKIFLLSQKNSKIDNPNKENLYAVGTIAKIIQLLKLPDGTLKVLVEGIQRAKANKINFNKEFITASITEINQKTKKNSNIRALQKLTTEQFVEFQKINKKVSLDVINNVRTFNDPDKIVDVIISNISISLSKKQEILEITNTEDRLNKVYGYLVSEIDSFQVEKKIKGRVKRQMEKTQKEYYLNEQMKAIQRELGENEDLDEIAELEKKVNNYNLSKEAKEKCTAEIKKLKNMSPMSAEATVIRNYLDWVMSIPWNNPDQISKNINKASTILENDHYGLEKVKERILEYLAVQKRTNKLKGPILCLVGPPGVGKTSLGKSIANSTGRSFVRMSLGGVRDEAEIRGHRRT

SEQ ID NO: 169998 - protein, 290 aa, Unknown
  Bacterial polypetide isolated from the Sargasso Sea
LLKNILIPKQLEENALSTKDVSLDDASIKELMSSYTREAGVRNLEREIANVFRKVARDKIEKKARKIRVTKKKISEYLGAPRFYSDIAERTTKPGVVTGLAWTAAGGDILFIEASQMKGKGNLTLTGQLGDVMKESATAAMTFVRSNSEILGLNSDFNEKTDIHVHVPAGAIPKDGPSAGVGMFTSIVSLLSGKPVKSKLAMTGEITLRGNVLPIGGVKEKVTAAHRSGIKTIILPDHNRKDLEDIPDHIKKDLDFHFAKEMMDVIKVAVPRLNLKPTRKKTTPKNKKVA

SEQ ID NO: 169999 - protein, 410 aa, Unknown
  Bacterial polypetide isolated from the Sargasso Sea
DEAEIRGHRRTYIGSLPGKIIQMMKKAGTSNPLFLLDEIDKVGSDYRGDPSSALLEALDPEQNKTFNDHYLEVDYDLSDVLFVTTANTLNILPPLLDRMEIIRLPGYTEDEKINISQKFLIPKQSEDNGLKKEEWEITENVNKKIIRDYTRESGVRNLEREISKIARKMVKKIDSKEKVNKTISEGDLSKYLGIKKFNFGEIEKENQIGVVTGLAWTEVGGEILKIESVNMPGKGKMQITGKLGEVMQESVKAAKSYVRSKSLEYGIIPPFFEKKDFHIHVPEGATPKDGPSAGIAIVTSIISSITGVPVSKDVAMTGEVTLKGNVLQIGGLKEKLLAAHRAGIKTALIPFENKKDLVEIPEVIKKSINIIPVSTVDEVLKHALTKTLKPVKWAEIDQASSKKDEVTSRH

SEQ ID NO: 170000 - protein, 807 aa, Unknown
  Bacterial polypetide isolated from the Sargasso Sea
MSGTQLLPPERITLPLLPLRDVVVFPHMVIPLFVGRPKSIKALEAAMEGGKHIMLVAQKTAAKDEPTEKDMYEVGCIANILQMLKLPDGTVKVLVEGLQRAKALSIEEQETQFSCDVMPLEPDHADSAETEALRRAIVSQFDQYVKLNKKIPPEILTSLSGIDEAGRLADMIAERLPLKLDQKQHILEMFPVIERLEHLLAQLEAEIDILQVEKRIRGRVKRQMEKSQREYYLNEQVKAIQKELGEGEEGADLEELEKRINAARMPKEAKKKADAELKKLKLMSPMSAEATVVRNYIDTLIGLPWRKKSKVNNDLSNAEQVLDEDHFGLEKVKERILEYLAVQQRVDKVKAPILCLVGPPGVGKTSLGQSIARATNRKFVRMALGGVRDEAEIRGHRRTYIGSMPGKILQSLTKVGVRNPLFLLDEVDKMGMDFRGDPSSALLEVLDPEQNHTFADHYIEVDFDLSDVMFVATSNSLNIPPPLLDRMEVIRLSGYTEDEKVSIAQRYLLPKQKKNNGLKEGEIEVTEQAIRDIIRYYTREAGVRSLEREVSKICRKVVKMLLLKKASGAIKVDGENLDTFLGVRKYDFGLAAKENQVGQVTGLAWTEVGGDLLTIEAAVMPGKGNVIRTGSLGDVMKESVEAARSVVRSRSRRLGIKDEAFEKQDIHIHVPEGATPKDGPSAGGAMTTALVSVLTGIPVRADVAMTGEITLRGEVLPIGGLKEKLLAAHRGGIKLVLIPEENVKDLAEIPDNVKNAIEIVPVRWIDKVLELALERSPTPLPPEEEAKAAAPVADAAKDAGSTEFVKH

SEQ ID NO: 170001 - protein, 275 aa, Unknown
  Bacterial polypetide isolated from the Sargasso Sea
KIKYWRKIILVPRNKEKNGLKDDEINFSDNSILKIIRNYTREAGVRSLDREINKVCRKKVKDLSLGGKATKLIDNRVVRNILGPEKFKYGQHDDQNSLGQVNGLAWTSVGGELLQIEAALTAGKGRIIKTGSLGDVMQESIQAALTVAKNIFQKTKIKKDLFETHDIHIHVPEGATPKDGPSAGITMCTAITSLALGKKVKANLAMTGEITLAGKVLKIGGLKEKLIAAKRSGITNVIIPKENTGDLEEMETNILRDLNIIPVTNIDEVLKEALI

SEQ ID NO: 170002 - protein, 362 aa, Unknown
  Bacterial polypetide isolated from the Sargasso Sea
AAQKELGDISDEKNELDELQKKIEETKLSKEALEKVSSEFSKLRQMSPMSAEATVVRTYIETLLEVPWNKTTKINVDLNKAKEILDEDHYGLKEVKERILEYLAVQKRVKKMKAPVLCFVGPPGVGKTSLGESIARSVNREFTRLSLGGVRDEAEIRGHRKTYIGSMPGKIIQKLSKGKVKNPLFLLDEIDKIGMDHRGDPSSALLEVLDPEQNNKFNDHYLEVDYDLSEVMFICTANSLNIPPALLDRMEIIRLPGYIEDEKLNIAKNYLVPRNKEKNGLKEDEITFSDNSILKIIRNYTREAGVRNLDREINKVCRKKVKDLSLGGKATKLIDNRVVRNILGPEKFKYGEHDDQNSLGQV

SEQ ID NO: 170003 - protein, 784 aa, Unknown
  Bacterial polypetide isolated from the Sargasso Sea
MPLRNTVLFPQQVIPIYIGREKSLKLISDLESENRKYIIVVAQEDGSIEDPKPEDLYAYGTLATVLKVFAMPDNSKSAIVQGISRVKILDYIEKEPYFRAAVSTISDDPLVDELELVSISDKLRNSFSDLIKVAPNLTEEHTGMLSNIQKPNRLVDRAISLMTLSNQEKQDILEETNVKKRIEKAISIINREIQRIKLGDEIQTEVHDEIAKTQREYYLREQMKAIQKELGEDEGTVELNELEDRIKAAKMPEESELVAMKELDRLSRIPTQSPEYNVSRTYIEWIADLPWSKSSKDRIDVKEALKILDEDHYGLDKVKERIIEYLAVRNLKQKRNPDGNVRGPILCFGGPPGVGKTSLGKSIARAMGREFIRLSLGGVRDEAEIRGHRRTYIGALPGRIIQNIKKAGTNNPVFMLDEVDKLGSDFRGDPSSALLEVLDPEQNHSFNDHYLELDFDLSKVMFIATANNYGNIPPALRDRMEILEFSGYIQDEKVQIAKRHLIPKQIKENGLKNSEITLDLNSIKELISAYTREAGVRQLERQIANVLRKVARDIVESKKKQIKVTKTKVHELLGASRFHSELAERATEPGVVTGLAWTAAGGDILFIESTRMQGKGKLTLTGQLGDVMKESATAGLTFVRAHANTFGIDPNFNEETDIHVHVPAGAIPKDGPSAGVSMVTSLVSLMTKTPVKGKVAMTGEITLRGNVLPIGGVKEKVTAAHRAGIKEIVLPELNRKDLEDVPEHVSKDLTFHFAKEIWDVLKVALPNITKKRRKKPAVSNNKKT

SEQ ID NO: 170004 - protein, 732 aa, Unknown
  Bacterial polypetide isolated from the Sargasso Sea
CRQRKSVKALEVVMSEDKEILLSSQIDATDDDPSSEGIYKVGVLANVLQLLKLPDGTVKVLVEGNKRVKISDFSKNDEFFEAYAEELSEDEGDTETIKALQKTIASEFEKYAKIKKNIPEEALASVANAEDPRQLVDLIAGHLGIEVEEKQKLLENLVISERLEKAYSHMQSEVSVLQVEKKIKTRVKSQMERTQREYYLNEQMKAIQKELGDGEDGQNEIAELEAKVKSIKLSKEAKEKAEAEIKKLKSMSPMSAEATVVRNYLDWLLCLPWGAKSRVKKDLNRAQKILDDDHYSLEKVKERIVEYLAVQQRSKKVKGPIMCLVGPPGVGKTSLGKSVAKATGREFIRISLGGVRDESEIRGHRRTYIGSMPGKIIQALKKAKTTNPLILLDEIDKMGQDFRGDPASAMLEVLDPEQNSTFVDHYLEVEYDLSNVMFLTTANSYNMPEPLLDRMEIVPLAGYTEDEKREIALRHLLEKSLKNNGLKASEFSLSDDALTAIIQFYTREAGVRNLEREIARLARKVVTRIVKKESQTVTITEENLSDYLGVRKFKYGLAELQDQIGVVTGLAYTSAGGDLLQIEALKLPGKGRMKTTGKLGDVMKESIDAASSYVRSISPKIGVKPTRFDKLDIHVHVPEGATPKDGPSAGLAMVTSIVSVLSGIPVKKDLAMTGEVTLRGNALPIGGLKEKLLAALRGGIKTVLIPLDNEKDLAEIPENVKEGLNIVAVSHV

SEQ ID NO: 170005 - protein, 340 aa, Unknown
  Bacterial polypetide isolated from the Sargasso Sea
LEVDYDLSDVMFVTTANTLNILPPLLDRMEVIRLAGYTEDEKISIANKYLLPKQIKDNGVKEKEMKLDNDIIKEVIRGYTKESGVRNLEREISKLARKVVKKIVSGEEEEVKINSKNLSDFLGVAKFKFGELESENRVGIVTGLAWTEYGGEILKIETVTMPGKGRMQITGKLGDVMQESVKAAKSFVRSKCLEYGIIPPIFEKKDFHIHVPEGATPKDGPSAGIGMVTSIVSSITNIPVRRDVAMTGEVTLTGQVLPIGGLKEKLLAAHRAGIKEVLIPKENEKDLVDMPKKIIDDIKITPVEYADQVIKLALTKELKPTEWVEVDISKKEDKSQASIQ

SEQ ID NO: 170006 - protein, 706 aa, Unknown
  Bacterial polypetide isolated from the Sargasso Sea
MTDEFEKNVNEDLIDESETYPVMPLRNTVLFPQQVIPIYIGRDKSLKLINELSSKTKHVVVVAQEDGSIEDPEPSDMYSYGTLAVVLKVFDMPDNSKSAIVQGIDRVKILDYKEKDPYYRAVVQRVSNKSSKDSVELDALANNLRQVFAELIQIAPNLSEEHTGMLSNIQKPARLADRAVSLLTVSNPEKQDILEELDVKTRVDKAIKVLSKEIQRIKLGEEIQTEVHDEITKSQREYYLREQMKAIKRELGEDESQVELNEIEDAIKKAKMPEDAEKVALKELDRLTKIPTQSPEYTVARTYLDWLTDLPWSISSEDSIDVKESKKILDEDHYGLEKVKERIIEYLAVRALKMKKEPNGAIRGPILCFAGPPGVGKTSLGRSIAKSMGREFVRISLGGVRDEAEIRGHRRTYIGALPGRIIQSLKKAGTNNPVFMLDEIDKLGMDFRGDPSSALLEVLDPEQNGTFADHYLEVDYDLSKVMFIATANYRDPIPPALKDRMEVIDFSGYIEDEKLQIAKKHLIPKQLEENALSTKDVSLDDASIKELMSSYTREAGVRNLEREIANVFRKVARDKIEKKARKIRVTKKKISEYLGAPRFYSDIAERTTKPGVVTGLAWTAAGGDILFIEASQMKGKGNLTLTGQLGDVMKESATAAMTFVRSNSEILGLNSDFNEKTDIHVHVPAGAIPKDGPSAGVGMFTSIVSL

SEQ ID NO: 170007 - protein, 421 aa, Unknown
  Bacterial polypetide isolated from the Sargasso Sea
EVKDRILEHVAVLSLVREMRGPILCLVGPPGVGKTSLGSSIAQALDREFVSVSLGGVRDEAEIRGHRRTYVGALPGRIIQGMRRSGTRNPVFLLDEIDKMARDFHGDPGSALLEVLDPTQNKSFTDHYLELEYDLSDVLFIATANTLQDIPGPLRDRMEVIRLPGYLDTEKREIAKRFLWPRQKTQHGLKERPIVFSDEAIHEIIGRYTREAGVRELNRRLSRIARKLARAVADGAIPSEVLEKNDLRDLLGPPTYQAIDRDDDKDRIGIANGLAWTSVGGEVMDVEVAIVAGSGTLRLTGTLGDVMKESAQAAVTYARSRASVLGLDPQFHKKFDIHIHIPEGATPKDGPSAGITIAAALISALTDIPTQGDIAMTGEITLRGRVIGVGGVKEKAVAALRSGMTRVVLPAANESDLETLP

SEQ ID NO: 170008 - protein, 528 aa, Unknown
  Bacterial polypetide isolated from the Sargasso Sea
MPLKNTVLFPQQVIPIYVGREKSLKLIEDLPSDNKYLVVVAQQDGSIEDPKEDDLYSYGTLALVLKTFDMPDNSKSAIVQGVDRVKILKFNQGESYFMADIERIQESISTPDVQIEALAKNLKNSFTELIKISPNLNEEHAGMLANIDRPSRLADRATSLLSVSNSEKQEVLEELDIRKRVENAINLLQKEIQRIKLGEEIQSEVQDEISKTQREYYLREQMKTIQKELGEDSQTVELDELKKKIEDVKMSDEANKVANKELDRLGRISPQSPEYSVARTYLEWLTELPWSKSSKDNLNVKEAQKTLDQDHYGLPKVKERVLEYLAVRSLKKKVTKEETVRGPILCFTGPPGVGKTSLGKSIAKSMGREFVRISLGGVRDEAEIRGHRRTYIGALPGRIIQSLKKAKTNNPVFMLDEIDKLGSDFRGDPSSAMLEVLDPEQNHAFSDHYLEVDFDLSKVMFISTANYPDNIPPALYDRMEMIDFRGYIDDEKVQIAKRHLIPKQIKENGLTTKQVKFNDTGIKEIISS

SEQ ID NO: 170009 - protein, 369 aa, Unknown
  Bacterial polypetide isolated from the Sargasso Sea
MIENNIPVLPLRDIVVFPHMVVPLFVGRDKSVKALEKVMAGDKRIMLITQKSASVDDPKKDDLFDFGTIANVLQLLKLPDGTVKVLVEGFQRASINMFTDNEDFLVSNIDLIDENNDSSDKKLRALSKSITDLFDKYVNLNKKIPPEVLGTINEIDDLAKLSDTIASHLSIKLSDKQEILEAIDLTERFEKIMNFIQAELDVMQVEKKIRGRVKNQMEKTQREYYLNEQMKAIQKELGEGDDGKDDIQEYEEKIENTKLSKEAKEKCYSEIKKLKSMSPMSAESSVIRNYLDWILTIPWGKKTKVKKDIKFAESVLNEDHYGLEKVKERILEYLAVQQRIKKMKGPILCLVGAPGVGKTSLGKSIARAT

SEQ ID NO: 170010 - protein, 537 aa, Unknown
  Bacterial polypetide isolated from the Sargasso Sea
KITDLFNFGCEASILQLLKLPDGTVKVLVEGLKRVKIVDFKDEEKFINCLYEYHNDILQENENLAPLSSIALRRLEKLNSINKKISSETINNIKQLKDPSKIGDNIASHLNCTISEKQQIFETNDVKKRLNGIIKIMENETSIIGVEKRIRGRVKTQMEKTQREYYLNEQLKAIQKELGEIEDGKDETANLNKSILKAKMPKEVQKKCMSELKKLRNMSPMSAEATVVRNYLDWMIDLPWYKKDKVDIDLNKALKTLDEDHYGLEKVKERIIEFLAVQKRMEKIKGPILCLIGPPGVGKTSLGKSIAKATNRQFVRMSLGGVRDEAEIRGHRRTYIGSLPGKIIQMMKKAGTKNPLILLDEIDKVGNDYRGDPSSALLEALDPEQNSTFNDHYLEVDYDLSDVMFVTTANTLNILPPLLDRMEIIRIPGYTEDEKINIANKYLLPKQLKENGVKKEELEFSNLTIKEIIRHYTRESGVRNLEREISKVARKTVKQIVNKEKEKVQVDDKNISEFLGVKKFKYGEVENEDRVGIVTGL

SEQ ID NO: 170011 - protein, 534 aa, Unknown
  Bacterial polypetide isolated from the Sargasso Sea
EVEKKCMAELKKLKNMSPMSAEATVVRNYLDWMIDIPWFKKDKVDINLNNALKTLNDDHYGLEKVKERIIEFLAVQKRMEKIKGPILCLIGPPGVGKTSLGKSIAKATNRQFVRMSLGGVRDEAEVRGHRRTYIGSLPGKIIQMMKKAGTKNPLFLLDEVDKIGNDYRGDPSSALLEALDPEQNTTFNDHYLEVDYDLSDVMFVTTANTLNILPPLLDRMEVIRIPGYTEDEKINIANKYLLPKQIKDNGIREGEMNLKDGTIKEIIRNYTRESGVRNLEREISKVTRKVVKKVVNEEEKNVEVNEENLSKFLGVKKFKFGELEQENKVGIVIGLAWTEFGGEILKIETVNMPGKGRMQITGKLGDVMQESVKAAKSFVRSKSLEYGIIPPTFEKKDFHIHVPEGATPKDGPSAGIAMVTSIVSSITNIPVNGELAMTGEVTVTGQVLPIGGLKEKLLAAHTAGVRKVLIPKENEKDLIDVPKKVREDIKIIPVQNADEVIKIALTKEPKPIEWTEVEKLSETKKDDKSQASIQ

SEQ ID NO: 170012 - protein, 445 aa, Unknown
  Bacterial polypetide isolated from the Sargasso Sea
MSEVKSDLPLIPLRDVVVFPGIVTTLFVGRPKSIEALNVAMSSNKKLVLVSQKDASLEDPKISDIYKFASISNLLQLIKLPDGTMKVLVEGHKRCSIEKVIEKDSYTVARVIEEIDSPLKERESANLVRLIKAKFEDYISTTKRIPPEIVSTVDSLDDLSRLIDTITGHLPIENSKKQEVLETFELKDRAEKVLTFIESQLDVVDVEKKVRDRVKKQMEKSQREYYLNEQIKAAQKELGEIGEEGDELENLEKKIHEVGMTKEALKKAKTELAKFKHMAPSSAEASVVRTYLDCLVDVPWKKKSKIRSDIKESMEILEEDHYGLEEVKERIVEYLAVQKRVKSMKAPVLCLVGPPGVGKTSLGESIARATNRKFVRMSLGGVRDESEIRGHRRTYIGSMPGRIIQKLSKVGVKNPLFLLDEIDKIGMDHRGDPSSALLEVLIQSR

SEQ ID NO: 170013 - protein, 447 aa, Unknown
  Bacterial polypetide isolated from the Sargasso Sea
MNLERSERIEIPVLPLRDVVVYPHMVIPLFVGREKSIRCLEAAMEQDKKVLLVAQKDASTDEPTVEEIFSVGTVANILQMLKLPDGTVKVLVEGGQRARLERMIDDRDFFVGEAQYIASKAIEEKDQDVLVRSAIGQFEGYIKLNKKIPPEVLTSISAIDDAARLADTMAAHMPLKLEDKQKVLEIASVSERIEFLMAMMESEIDLLQVEKRIRSRVKKQMEKSQREYYLNEQMKAIQKELGELEDSPDEFEALNRKIEEAGMPEDAREKAQAELAKLKMMSPMSAEATVVRSYVDWMVQVPWKARSKVKKDLGKAQEVLDADHYGLEKVKDRILEYLAVQARVNKLKGPILCLVGPPGVGKTSLGQSIAKATGRKYVRMALGGVRDEAEIRGHRRTYIGSMPGKLIQKMAKVGVKNPLFLLDEIDKMSSDMRGDPASALLEVLDPE

SEQ ID NO: 170014 - protein, 441 aa, Unknown
  Bacterial polypetide isolated from the Sargasso Sea
NATISEKQQIFESSDVKKRLNAIIKIMENETSIIGVEKRIRGRVKTQMEKTQREYYLNEQLKAIQKELGEIEDGKDENTSLNKSILKSKMPKEVEKKCLQELKKLKNMSPMSAEATVVRNYLDWMIDLPWYKKSQTTIDLVKALDVLDKDHYGLEKVKERIVEFLAVQKRMEKIKGPILCLVGPPGVGKTSLGKSIAKATNREFVRMSVGGMRDEAEIRGHRRTYIGSLPGKIIQMMKKAGTKNPLILLDEIDKIGNDYRGDPSSALLEALDPEQNTTFNDHYLEVDYDLSDVMFVTTANTLNILPPLLDRMEVIRLAGYTEDEKISIANKFLLPKQIKDNGVKEKEMNLDEDIIKEIIRSYTKESGVRNLEREISKLARKVVKKVVSGEQKEVGINKKNLSDFLGVAKYKFGELETDNKVGIVTGLAWTEYGGEILKIET

SEQ ID NO: 170015 - protein, 424 aa, Unknown
  Bacterial polypetide isolated from the Sargasso Sea
MEKTQREYYLNEQLKAIQKELGEIEDGKDETSNLNKSILKAKMPKEVQKKCMAELKKLKNMSPMSAEATVVRNYLDWMIDIPWHKKDDVNIDLNKAIKTLDEDHFGLEKVKERIIEFLAVQKRMLKLKGPILCLVGPPGVGKTSLGKSIARATNRQFIRMSLGGVRDEAEIRGHRRTYIGSLPGKIIQMMKKAGTKNPLFLLDEIDKVGNDYRGDPSSALLEALDPEQNTTFNDHYLEVDYDLSDVMFVTTANTLNILPPLLDRMEVIRIPGYTEDEKINIANKYLLPKQIKDNGIKEGEMNLKDGTIKEIIRNYTRESGVRNLEREISKVTRKVVKKVVNDEEKSVEVNDKNISDFLGVKKFKFGELESENKVGIVIGLAWTEFGGEILKVETVNMPGKGRMQITGKLGDVMQESVKAAKSFC

SEQ ID NO: 170016 - protein, 493 aa, Unknown
  Bacterial polypetide isolated from the Sargasso Sea
MNVKHDLPLLPLRDIVVFPNMVIPLFVGRDKSITALNEVMKDNKKIVLVTQKNSEVDDPKKTDVFMYGCESTILQLLKLPDGTVKVLVEGLKRVKIVDFKDDEKFIKCSYEHENDIIDSSEDLMPLTMIAVKRLEKLNYINKKISSETINNIKQLKEPAKIADNISSHLNATISEKQQLFETFDVKKRLNSIIKIIENEASIIGVEKRIRGRVKTQMEKTQREYYLNEQLKAIQKELGEIEDGKDETSNLNKAILKAKMPKEVQKKCLSELKKLKNMSPMSAEATVVRNYLDWMVDLPWFKKDKVDIDLNKALKQLDKDHFGLEKVKERIIEFLAVQKRMDKIKGPILCLVGPPGVGKTSLGKSIAKATNRQFVRMSLGGVRDEAEIRGHRRTYIGSLPGKIIQMMKKAGSKNPLILLDEIDKVGNDYRGDPSSALLEALDPEQNTTFNDHYLEVDYDLSDVMFVTTANTLNILPPLLDRMEVIRIPGYTEDE

SEQ ID NO: 170017 - protein, 390 aa, Unknown
  Bacterial polypetide isolated from the Sargasso Sea
KIIDFKDDEKFITCTYEHQKDVLTKDEDLLPLALTAVRRLEKLTSVNKKISSETISNIKQLKDPSKIVDNIVSNLNASISEKQQIFETLDVKKRLNAAIKMMESETSIIGVEKRIRGRVKTQMEKTQREYYLNEQLKAIQKELGEIEDGKDETTNLKKSIQKAKMPKEVEKKCMSELKKLKNMSPMSAEATVVRNYLDWMIDLPWFKKDNVDIDLNKGLKILDEDHFGLEKVKERIIEFLAVQKRMEKIKGPILCLVGPPGVGKTSLGKSIAKATNRQFIRMSLGGVRDEAEIRGHRRTYIGSLPGKIIQMMKKAGTKNPLFLLDEVDKIGNDYRGDPSSALLEALDPEQNTAFNDHYLEVDYDLSDVMFVTTANTLNILPPLLDRMEVI

SEQ ID NO: 170018 - protein, 458 aa, Unknown
  Bacterial polypetide isolated from the Sargasso Sea
KLGEEIQTEVHDEISKSQREYYLREQMKAIKRELGEDESQVELKEIEEAIKKAKMPEEAEKVALKEMDRLSKIPSQSPEYTVSRTYLDWLTELPWSKKSEDTIDVTDAKKILDDDHYGLEKVKERILEYLAVRALKMKKDPNGAIRGPILCFAGPPGVGKTSLGRSIARSMGREFVRISLGGVRDEAEIRGHRRTYIGALPGRIIQSLKKAGTNNPVFMLDEIDKLGMDFRGDPSSALLEVLDPEQNSTFADHYLEVDFDLSNVMFIATANYQDPIPPALKDRMEIIDFSGYILDEKVQIAKKHLIPKQMEENALTTKDVTLDDIGVKELINSYTREAGVRNLEREIANVFRKVARDKIEKKSKKVRVSKKKVTEYLGAPRFYSDIAERTTKPGVVTGLAWTAAGGDILFIEASKMKGKGSLTLTGQLGDVMKESATAAMTYVRSHTDILDLANDFNE

SEQ ID NO: 170019 - protein, 756 aa, Unknown
  Bacterial polypetide isolated from the Sargasso Sea
DQELLFLSQKNSEVDDPSETDLYKIGTKGKILQLLKLPDGTVKVLVEGIARCKVKNIKFSSDFVNAEIEELPKNETISDTIKALGRSVVSKYETYANINNKTSSEVLTSVKDIVNEDKLADTVASQIAINIQEKQKILEEVDLEKRLNMILSYIEGELSVLQVEKKIRRRVKNQMEKTQKEYYLNEQMKAIQKELEDGEGGASEDIAELNEKINKTKLSKEAKEKALNELKKLKQMSPMSAEATVVRNYLDWLLDIPWGKKKRIKKDINKSQEILDRDHYGLEKVKDRITEYLAVQNRSSKVKGPILCLVGPPGVGKTSLGKSIASATGREFIRMSLGGVRDEAEIRGHRRTYIGSMPGRIIQALKKVKTSNPIFLLDEIDKLGQDFRGDPASALLEVLDPEQNNAFNDHYLEVDYDLSQVMFVTTANTMNIPGPLLDRMEIIRIAGYTEEEKLEIAKRHLIEKVKENNALTDKEFKISDDVIRSVIQNYTREAGVRNLERELNSLGRKAVKEISQNKSDSLNVSSDNISDYLGVKKFRYGKKENDDLIGVVTGLAWTQVGGDILNVEAVMVPGQGKIRTTGKLGDVMKESIDAASSFVRSRAVNYGIEPPIFQRKDIHVHVPEGATPKDGPSAGVAMIIAIISVMAGIPVKNDVAMTGEMSLRGRVLPIGGLKEKLLAALRSGIKTVLVPSDNDRELSEVPDNIKDKLDIKLVSTIDEALELALVRKPDAIDWDEDAWLAEQRKISENNPNFTAH

SEQ ID NO: 170020 - protein, 377 aa, Unknown
  Bacterial polypetide isolated from the Sargasso Sea
LEKSLDKIYGYLIAEIDSMQIEKKIKGRVKRQMEKTQKEYYLNEQMKAIQKELGDSEEVDEIAEIENKLKKLKLSSEAREKCKSEIKKLKSMSPMSAEATVIRNYLDWVVNIPWNNPSIISKNIKKAKSILESDHYGLEKVKDRILEYLAVQKRINKIKGPILCLVGPPGVGKTSLGKSIANSTGRNFVRMSLGGVRDEAEIRGHRKTYIGSMPGRFLQAMKKSKTSNPLILLDEIDKLGSDWRGDPSSALLEVLDPEQNNKFNDHYLELDYDLSDVMFVCTANTLNIPPALLDRMEIIRIPGYTENEKNQIAKRYLVPKQIKNNGLKNSEINFNSTLIKQIIRNYTREAGVRGLEKEISKLCRKVVKDLETRTKRK

SEQ ID NO: 170021 - protein, 484 aa, Unknown
  Bacterial polypetide isolated from the Sargasso Sea
MEKTQKEYYLNEQMKAIQKELGENEDLDEIAELERKLNHYKLSNEARDKCTSEIKKLKNMSPMSAEATVIRNYLDWVMSIPWNNPEKISKNINKASIILENDHYGLDKVKERILEYLAVQKRTNKLKGPILCLVGPPGVGKTSLGKSIANSTGRSFVRMSLGGVRDEAEIRGHRKTYIGSMPGRFIQAMKKSKSSNPLILLDEIDKLGSDWRGDPSSALLEVLDPEQNSKFNDHYLELDYDLSDVMFVCTANTLNIPPALLDRMEVIRIPGYTEKEKNQIAKRYLVPKQIKNHGIKKTEISFNSKVLSSIIRNYTKEAGVRNLEKEISKVCRKTVKKLETSKLKKLILNDRVLQDLLGIPRFRTSEIEKKNLVGVTNGLAWTEVGGEILSIEVILSIGKGKLTITGKLGEVMRESIQAATSYVKSKSVSLGINPKDFENYDIHIHVPEGATPKDGPSAGIAIFNSLVSSLTNNKIKRDVAMTGE

SEQ ID NO: 170022 - protein, 554 aa, Unknown
  Bacterial polypetide isolated from the Sargasso Sea
MSGHTPLPATPLDLPLLPLRDVVVFPHMVIPLFVGRPKSIKALEMAMEADRRIMLVAQKAAAKDEPSVADMFDVGCVSTILQMLKLPDGTVKVLVEGQQRALVTSIEDAESHFMATVTPVEATPDANKPSEIEALRRAVMQQFDQYVKLNKKIPPEILTSISSIDDPGRLADTIAAHLPLKLENKQVVLDLSDVKARLENLFEQLDREVDILNVDKKIRGRVKRQMEKNQRDFYLNEQVKAIQKELGEGDEGADIEEIEKKIKLAKMPAEARKKAEAELKKLKLMSPMSAEATVVRNYIDVLTALPWSKKTKIKHDLVNAEGVLNEDHYGLDKVKDRILEYLAVQQRVDKVKAPILCLVGPPGVGKTSLGQSIAKATGRKYVRMALGGMRDEAEIRGHRRTYIGALPGKVLQSLSKVGTRNPLFLLDEIDKLGTDFRGDPSSALLEVLDPEQNHTFGDHYVEVDFDLSDVMFVATSNSMNIPPALLDRMEVIRLSGYTEDEKTSIAMKYLLPKQLKNNGVKDEELLITEPAVRDMVRYYTREAGRALAGARAVQ

SEQ ID NO: 170023 - protein, 801 aa, Unknown
  Bacterial polypetide isolated from the Sargasso Sea
MTEDTKSNNLPVLPLRNIVVFPSMVVPLFVGRDKSINALEQVMDSDQELLFLSQKNSEVDDPSENDLYKIGTKGKILQLLKLPDGTVKVLVEGITRCKVKKIKFSEDFINAEIEELPKIEIISDTIRALGRSVVSKYETYANINNKTSSEVLTSVKDIENEDKLADTVASQIAINIQEKQKILEEVDLEKRLNMILSYIEGELSVLQVEKKIRRRVKNQMEKTQKEYYLNEQMKAIQKELEDGEGGASEDIAELNEKINNTKLSKEAKEKALNELKKLKQMSPMSAEATVVRNYLDWLLDIPWGKKKRIKKDINKSQEILDKDHYGLEKVKDRITEYLAVQNRSSKVKGPILCLVGPPGVGKTSLGKSIASATGREFIRMSLGGVRDEAEIRGHRRTYIGSMPGRIIQALKKVKTSNPIFLLDEIDKLGQDFRGDPASALLEVLDPEQNNAFNDHYLEVDYDLSQIMFVTTANTMNIPGPLLDRMEIIRIAGYTEEEKLEIAKRHLLEKVKENNALTDKEFKISDDVIRSVIQNYTREAGVRNLERELNSLGRKAVKEISQNKSDSLNVSSDNISDYLGVKKFRYGKKENDDLIGVVTGLAWTQVGGDILNVEAVMVPGQGKIRTTGKLGDVMKESIDAASSFVRSRAVNYGIEPPIFQRKDIHVHVPEGATPKDGPSAGVAMIIAIISVMAGIPVKNDVAMTGEMSLRGRVLPIGGLKEKLLAALRSGIKTVLVPSENDRELSEVPDNIKDKLDIKLVSTIDEALELALVRKPDAIDWDEDAWLAEQRKISENDRNITAH

SEQ ID NO: 170024 - protein, 485 aa, Unknown
  Bacterial polypetide isolated from the Sargasso Sea
KALKILEEDHFGLEKVKERIIEFLAVQKRMDKIKGPILCLVGPPGVGKTSLGKSIAKATNRQFVRMSLGGVRDEAEVRGHRRTYIGSLPGKIIQMMKKAGTKNPLFLLDEIDKVGNDYRGDPSSALLEALDPEQNTTFNDHYLEVDYDLSDVMFVTTANTLNILPPLLDRMEVIRIPGYTEDEKINIANKYLLPKQIKDNGVKEGEMKLADLTIKEIIRSYTRESGVRNLEREISKVTRKVVKKVVNNEEKSVEVNEKNIPDFLGIKKFKFGELEAKDKVGIVIGLAWTEFGGEILKVETVNMPGKGRMQITGKLGDVMQESVKAAKSYVRSKCLEFGVTPPLFEKKDFHIHVPEGATPKDGPSAGIAMVTSIVSSITKVPVKREIAMTGEVTITGQVLPIGGLKEKLLAAHRAGVKKVLIPKENEKDLVDVPKKVKDDIEIVPVETADEVIKIALTKELKPTEWTEVDKLTETKKDDKSQASIQ

SEQ ID NO: 170025 - protein, 410 aa, Unknown
  Bacterial polypetide isolated from the Sargasso Sea
FNVKKRLDSVIKVMENEASIIGVEKRIRGRVKNQMEKTQREYYLNEQLKAIQKELGEIEDGKDESTNLKKSILKAKMPKEVEKKCMSELRKLKNMSPMSAEATVVRNYLDWMIDLPWYKKDKVNIDLNNAIKTLDEDHFGLQKVKERIIEFLAVQKRMEKIKGPILCLIGPPGVGKTSLGKSIAKATNRQFVRMSLGGVRDEAEIRGHRRTYIGSLPGKIIQLMKKAGTKNPLILLDEIDKVGNDYRGDPSSALLEALDPEQNTTFNDHYLEVDYDLSDVMFVTTANTLNILPPLLDRMEVIRIPGYTEDEKINIANKYLLPKQIKENGVKDSELDLKDGTIKEIIRSYTRESGVRNLEREISKITRKVVKKVVNSEETKVPVNPDNINDFLGVKKFKYGEVETENKVES

SEQ ID NO: 170026 - protein, 486 aa, Unknown
  Bacterial polypetide isolated from the Sargasso Sea
MVKVTKDYPIIPLRDVVVFPGIVTTLFVGRSKSIEALNSAMASDKKLVLVAQKDASNEDPTFKDIYHFGTVSNLLQLIKLPDGTMKVLVEGAKRCKIDKISESKGLTKAAVTEIDDDIIKVSDSMNLVRFIKTKFNDYVSSTKKIPPEILSTIDAIDDLSKLIDNIVNHLNIDTSQKQEILEIFDLQKRSESILTFIESQLDVIDVEKRIRSRVKKQMEKSQREYYLNEKIKAAQKELGEMGEEGDEFEVLKNKIEDSGMSKEAMKKAKSEFSKFKMMSPTSAEASVVRSYLECLIDVPWKKRGKVKSDIKAALETLNDDHYGLEEVKDRILEYLAVQKRVKNLKAPVLCLVGPPGVGKTSLGESIARATNRKFIRMSLGGVRDEAEIRGHRRTYIGSMPGKIIQKLTKVGVKNPLFLLDEVDKIGMDHRGDPASALLEVLDPEQNTSFSDHYLEVDYDLSEVMFVCTANSLNIPGPLLDRMEIIR

SEQ ID NO: 170027 - protein, 778 aa, Unknown
  Bacterial polypetide isolated from the Sargasso Sea
MPLRNTVLFPQQVIPIYIGRDRSLKLINDLDPKKRYIVVVAQEDGSIEDPKPEDLYAYGTLAQVLKVFDMPDNSKSAIVQGISRVKVLEYTKHEPYFTAAVQSVDDQPITDQLEVDALTTNLRQAFEDLMKVAPNLTEEHSGMLKNIQKPNRLTDRAISVITISNQEKQEILEELDIKMRMEKALNLISREIQRIKLGEEIQSEVHDEITKTQREYYLREQMKAIKKELGEDEGTVELKELEDKIKAANMPEESEKVAMKELDRLSRIPTQSPEYNVSRTYIDWLVDLPWSDSTEDRIDLKEAMKILDEDHYGLEKVKERIIEYLAVRNLKQQKDPDGTVRGPILCFGGPPGVGKTSLGKSIARSMGREFVRLSLGGVRDEAEIRGHRRTYIGALPGRVIQSIKKAGKNNPVFMLDEIDKLGSDFRGDPSSALLEVLDPEQNHSFSDHYLEVDFDLSNVMFIATANYQDAIPPALRDRMEILDFSGYIEDEKIQIAKRHILPKQIEENGLTKDQVTFDAGSIKELVRSYTREAGVRNLEREVANVLRKVARDLVESDIEKIKVNRKKVGEYLGAPRFHSELAERTTKPGVVTGLAWTAAGGDILFVESTLMNGKGKLTLTGQLGDVMKESATAALTFVRANANDFDIDPEFNENSDIHVHVPAGAIPKDGPSAGVSMVTSLVSLLKGIPVKEKVAMTGEITLRGNVLPIGGVKEKVTAAHRSGIKEIILPDHNRKDLEDVPEHVAKDLTFHFAKEIKDVLKVAIPGIFKTIKKSNNSH

SEQ ID NO: 170028 - protein, 376 aa, Unknown
  Bacterial polypetide isolated from the Sargasso Sea
QEILEKVNVIERAEFLSSLLEAQIELIEVEQRIRGRVRKQMEKSQKEYFLNEQIKAAQKELGDISDEKNELDELQKKIEETKLSKEALEKVSSEFSKLRQMSPMSAEATVVRTYIETLLEVPWNKTTKINVDLNKAKEILDEDHYGLKEVKERILEYLAVQKRVKKMKAPVLCFVGPPGVGKTSLGESIARSVNREFTRLSLGGVRDEAEIRGHRKTYIGSMPGKIIQKLSKGKVKNPLFLLDEIDKIGMDHRGDPSSALLEVLDPEQNNKFNDHYLEVDYDLSEVMFICTANSLNIPPALLDRMEIIRLPGYIEDEKLNIAKNYLVPRNKEKNGLKEDEITFSDNSILKIIRNYTREAGVRNLDREINKVCRKKV

SEQ ID NO: 170029 - protein, 573 aa, Unknown
  Bacterial polypetide isolated from the Sargasso Sea
MQLLKLPDGTVKVLVEGIKRVKIIDFKDDEKFISCSFEYLKELIAKEEDLLPLALTAVRRLEKLTSINKKITSETIGNIKQLKDPSKIADNIASHLNCTISEKQQIFETLDIKKRLNSIIKIMENETSIIGVEKRIRGRVKNQMEKTQREYYLNEQLKAIQKELGEIEDGKDETTNLKKSIQKAKMPKEVEKKCMAELKKLKNMSPMSAEATVVRNYLDWMIDIPWFKKDKVDINLNNALKTLNDDHYGLEKVKERIIEFLAVQKRMEKIKGPILCLVGPPGVGKTSLGKSIAKATNRQFVRMSLGGVRDEAEVRGHRRTYIGSLPGKIIQMMKKAGTKNPLFLLDEVDKIGNDYRGDPSSALLEALDPEQNTTFNDHYLEVDYDLSDVMFVTTANTLNILPPLLDRMEVIRIPGYTEDEKISIANKYLLPKQIKDNGIRDGEMNLKDGTIKEIIRNYTRESGVRNLEREISKVTRKVVKKVVNEEEKNVEVNEENLPKFLGVKKFKFGELEQENRVGIVIGLAWTEFGGEILKVETVNMPGKGRMQITGKLGDVMQESVKAAKSFVRSNKFR

SEQ ID NO: 170030 - protein, 563 aa, Unknown
  Bacterial polypetide isolated from the Sargasso Sea
EEIDKPLKESELKNIVRLIKAKFEDYISVTKRIPPEIVSTVDSLDELSRLIDTITGHLPIDTLRKQEILETSDLKDRSEKVLTFIESQLDVVDVEKKVRDRVKKQMEKSQREYYLNEQIKAAQKELGEIGEDGDELENLEKKIHEVGMTKEALKKAKTELAKFKHMAPSSAEAAVVRTYLDCLVDVPWKKKSKIKTDIKASMDILEKDHYGLEEVKERIVEYLAVQKRVKSMKAPVLCLVGPPGVGKTSLGESIARATNRKFVRMSLGGVRDESEIRGHRRTYIGSMPGKIIQKLSKVGVKNPLFLLDEIDKIGMDHRGDPASALLEVLDPEQNNTFSDHYLEVDYDLSEVMFVCTANSLNIPTPLLDRMEIIRIPGYIEDEKINIANKYLLPKQMERNGINENEIKINKNVILSLIRYYTREAGVRGLERQIAKILRKVVKERLVNEAKSDKDKATSITQKNLEKYSGVKKFKYGVAEKDNAIGQVTGLAWTEVGGELLTIEASHIEGKGRVIKTGSLGDVMQESIQAALTVVRSRAESLGIKPNFYEKYDVHIHVPEGAIP

SEQ ID NO: 170031 - protein, 422 aa, Unknown
  Bacterial polypetide isolated from the Sargasso Sea
IDFKDNEKFITCDFTPHNDVIDGDEDLYPLAVTAIRRMEKLTSINKKVSSETINTIKQLKDPSQIADNIASHITATISEKQQIFETIDVKKRLNAIIKIMENETSIIGVEKRIRGRVKTQMEKTQREYYLNEQLKAIQKELGEIEDGKDENTSLNKAILKSKMPKDVEKKCLQELKKLKNMSPMSAEATVVRNYLDWMIDLPWHKKSDVVIDLKKALEVLDKDHFGLEKVKERIIEFLAVQKRMDKIKGPILCLVGPPGVGKTSLGKSIAKATNREFVRMSVGGMRDEAEIRGHRRTYIGSLPGKIIQMMKKAGTKNPLILLDEIDKVGNDYRGDPSSALLEALDPEQNTTFNDHYLEVDYDLSDVMFVTTANTLNILPPLLDRMEVIRLAGYTEDEKINICNKYLSPKQIKDNGVKEKEMN

SEQ ID NO: 170032 - protein, 517 aa, Unknown
  Bacterial polypetide isolated from the Sargasso Sea
IDDPSRLADTITAHMSLKMDEKQKMLETFDTKERLEKIINLIEAELDVLSVEKKIRGRVKNQMEKSQREYYLNEQMKAIQKELGEMEDVPNEIDELEEKVHKVGMPKDVKSKAISDINKLKMMSPMSAEATVLRNYIDVLVGVPWKKKSKVTSDLSFAEKVLEDDHYGLDKVKERILEYLAVQQRVKKLKGPILCLVGPPGVGKTSLGRSIAKATGRKFTRMSLGGVRDEAEIRGHRRTYIGSLPGKIIQNLSKVGVKNPLFLLDEIDKMAMDFRGDPASALLEVLDAEQNDTFSDHYLEVDFDLSDVMFVATANTMNIPGPLLDRMEVIRIPGYTEDEKINIAKNYLSPKQLEFNGLKEDEIKFEQKSFKDIIRYYTREAGVRNLEREISKIYRKVVKKLLLGKKSKKIEINPTNLDEFLGVRKFKHGETEKNNTVGLVNGLAWTEVGGELLTVEAAVVPGKGKYILTGQLGDVMQESIRAAMTVVRDRTEALNILSDFYETKDIHVHLPEGATPK

SEQ ID NO: 170033 - protein, 344 aa, Unknown
  Bacterial polypetide isolated from the Sargasso Sea
YLEVDYDLSDVMFVTTANTLNILPPLLDRMEVIRLPGYTEDEKVNISQKYLIPKQSKNNGLKSNEWNIGENVNRKIIRNYTREAGVRNLEREISKIARKTVKRIDANEKVNNPIKESDVSDYLGVEKFNYGEIEEQNRIGVVTGLAWTEVGGEILKIESVIMPGKGKMQITGKLGEVMQESVKAAKAFIRSKSLDYGIIPPVFEKKDFHIHVPEGATPKDGPSAGIAMVTSIISAILEIPVNKDVGMTGEITLRGIVLPIGGLKEKLLAAHRVGVKKVLIPHENKKDLTEIPEVIKKNIEIIPVKNVDQVLKHALTKPLKRVDWVEVEQLSDKDKSKSEVSSRH

SEQ ID NO: 170034 - protein, 328 aa, Unknown
  Bacterial polypetide isolated from the Sargasso Sea
MAKDTKSNNLPVLPLRNIVVFPNMVVPLFVGRDKSINALEQVMDKDQELLFLSQKNSDVDDPSETDLYEIGTKGKILQLLKLPDGTVKVLVEGIARCKVKNIKFSSDFINAEIEELPKNETISDTIKALGRSVVSKYETYANINNKTSSEVLTSVKDIENEDKLADTVASQIAINIQEKQKILEEVDLEKRLNMILSYIEGELSVLQVEKKIRRRVKNQMEKTQKEYYLNEQMKAIQKELEDGEGGASEDIAELNEKINKTKLSKEAKEKALNELKKLKQMSPMSAEATVVRNYLDWLLDIPWGKKKRIKKDINKSQEILDKDHYGLE

SEQ ID NO: 170035 - protein, 459 aa, Unknown
  Bacterial polypetide isolated from the Sargasso Sea
GGIARCKVKNIKFSSDFVNAEIEELPKNEKISDTIKALGRSVVSKYETYANINNKTSSEVLTSVKDIENEDKLADTVASQIAINIQEKQKILEEVDLEKRLNMILSYIEGELSVLQVEKKIRRRVKNQMEKTQKEYYLNEQMKAIQKELEDGEGGASEDIAELNEKINKTKLSKEAKEKALNELKKLKQMSPMSAEATVVRNYLDWLLDIPWGKKKRIKKDINKSQEILDRDHYGLEKVKDRITEYLAVQNRSSKVKGPILCLVGPPGVGKTSLGKSIASATGREFIRMSLGGVRDEAEIRGHRRTYIGSMPGRIIQALKKVKTSNPIFLLDEIDKLGQDFRGDPASALLEVLDPEQNNAFNDHYLEVDYDLSQVMFVTTANTMNIPGPLLDRMEIIRIAGYTEEEKLEIAKRHLIEKVKENNALTDKEFKISDDVIRSVIQNYTREAGVRNLERELNS

SEQ ID NO: 170036 - protein, 532 aa, Unknown
  Bacterial polypetide isolated from the Sargasso Sea
LKTIQEELGGSSNHQDIDEMKLKSNSKKWNKEVGNHFNKELIKLQRMNTQAAEYSIQRNYLDLMLDLPWNEYSKDNFSLNNAQKTLNKDHYGLDDVKRRIIEQIAVMKLRGDMNSPILCFYGPPGVGKTSLGKSIAESLGREYVRISLGGLRDEAEIRGHRKTYIGAMPGRIIQNLKRVKTSNPVFVLDEIDKLSIGNQGDPSSAMLEVLDPEQNSSFYDNFLELGFDLSKVLFIATANNLATIQPALLDRMEIINISGYSIEEKVQIAKKHLINKQISNHGLNNHKFKISDNALKNIINGYTRESGVRKLDKNIAKVCRWIAKSIVKNEKFKEIIQAEDIKEILGVSNQPRIYENNDYAGVVTGLAWTQFGGEILFVESTISKGKGNLSLTGNLGKVMKESATISLEYIKSNAKLLNIKESIFNGYNFHLHVPEGATPKDGPSAGVTMITSLVSLLSQRKVKSKLAMTGEITLRGKVLPVGGIKEKILAAKRAKINSIILPADNKKNVDEIDKKYLKGLNFFYVENILEVL

SEQ ID NO: 170037 - protein, 430 aa, Unknown
  Bacterial polypetide isolated from the Sargasso Sea
KIRGRVKNQMEKTQREYYLNEQLKAIQKELGEIDEGKDELGNLSKAIHEAKMPKLAKEKCLSELKKLKSMSPMSAEATVVRNYLDWMTELPWSNKSKINTDLNNAQKILDEDHYGLEKVKERIIEFLAVQKRIQKMKGPILCLVGPPGVGKTSLGKSIAKATNRKFIRISLGGIRDEAEIRGHRRTYIGSLPGKIIQMMKKAGTKNPLFLLDEIDKVGTDYRGDPSSALLEALDPEQNKEFNDHYLEVDYDLSDVMFVTTANTLNILPPLLDRMEVIRLSGYTEDEKVNISQKFLIPNQSSNNGLKKDEWKIEENIIRKIVRHYTRESGVRNLEREISKIARKLVKKIDNKEKVNTPINEKDLKELLGVQKFNYGEIEEENRIGVVTGLAWTEVGGEILKIESVIMPGKGKMQITGKLGDVMQESIKAAK

SEQ ID NO: 170038 - protein, 206 aa, Unknown
  Bacterial polypetide isolated from the Sargasso Sea
STKIDNRAIRNILGSEPYKFGQFDEQNQKGQVNGLAWTSVGGELLKIEAALIAGKGRIIKTGSLGDVMQESIQAALTVAKNIANKEKIKKDFFETHDLHIHVPEGATPKDGPSAGITMCTAIASVVLSKDIKANLAMTGEITLAGRVLKIGGLKEKLIAAKRSGITNVLIPKENLGDTEEIEANVLKNLNIIPVENIEEVLAEALI

SEQ ID NO: 170039 - protein, 592 aa, Unknown
  Bacterial polypetide isolated from the Sargasso Sea
LPDGTVKVLVEGLKRVKIVDFRDDEKFITCSYEHNHDVIPNDEDLMPLAITAVRRLEKLTTINKKISSETISNIKELKDPAKIVDNIASHLNSTISEKQQIFETIDVKKRLNSVIKVMENETSIIGVEKRIRGRVKTQMEKTQREYYLNEQLKAIQKELGEIEDGKDETSNLNKAIQKAKMPKEVQKKCMSELKKLKNMSPMSAEATVVRNYLDWMIDIPWFKKDKVDIDLNKALKQLDEDHYGLEKVKERIIEFLAVQKRMDKIKGPILCLIGPPGVGKTSLGKSIAKATNRQFVRMSLGGVRDEAEIRGHRRTYIGSLPGKIIQMMKKAGTKNPLILLDEIDKVGNDYRGDPSSALLEALDPEQNTTFNDHYLEVDYDLSDVMFVTTANTLNILPPLLDRMEVIRIPGYTEDEKINIANKYLLPKQIKENGVKNEELDLVDGTIKEIIRSYTRESGVRNLEREISKVARKVVKKVVSGEEKKVIVNDANVHDFLGVKKFKYGEVESEDKIGIVTGLAWTEFGGEILKIETVHMPGKGRMQITGKLGDVMQESVKAAKSFVRSKSLEYGIIPPVFEKKDFHIHVPEGATPK

SEQ ID NO: 170040 - protein, 665 aa, Unknown
  Bacterial polypetide isolated from the Sargasso Sea
LRRLEKLTSINKKISSETINNIKEIKDPSKVADNIASHLNTTISEKQQIFETFDVKKRLNAIIKIMENETSIIGVEKRIRGRVKTQMEKTQREYYLNEQLKAIQKELGEIEEGKDETSNLNKAILKAKMPKEVQKKCMSELKKLKNMSPMSAEATVVRNYLDWMIDIPWFKKDDVNIDLKKAIKTLDEDHYGLEKIKERIIEFLAVQKRMEKIKGPILCLVGPPGVGKTSLGKSIAKATNRQFIRMSLGGVRDEAEIRGHRRTYIGSLPGKIIQMMKKAGTKNPLFLLDEIDKVGNDYRGDPSSALLEALDPEQNTTFNDHYLEVDYDLSDVMFVTTANTLNILPPLLDRMEVIRIPGYTEDEKINIANKYLLPKQIKDNGVKEGELDLLDGTIKEIIRSYTKESGVRNLEREISKITRKVVKKVVSGEDKKVTVNDQNISNFLGVKKFKFGELENVNKVGITTGLAWTEYGGEILKIETVNMPGKGRMQITGKLGDVMQESVKAAKSYVRSKSLDFGIIPPIFEKKDFHIHVPEGATPKDGPSAGIAMVTSIVSSITEIPVRRDIAMTGEVTITGQVLPIGGLKEKLLAAHRAGIKEVLIPKDNEKDLVDIPKKVKEDIKLTAVEIVDDVLKIALTKELKRTEWVEVDKLSDGKKDDKSQASIQ

SEQ ID NO: 170041 - protein, 412 aa, Unknown
  Bacterial polypetide isolated from the Sargasso Sea
LYGCESNILQLLKLPDGTVKVLVEGTKRLKINEFSDDEKFISCTYEYLKEENSSGEDLMPLALNAIKKLEKLTTINKKVSSEIIDNIKELKDPSKIVDNIASHLNSSISEKQQIFETLDIKKRLNTVIKIMENEASIIGVEKRIRGRVKTQMEKTQREYYLNEQLKAIQKELGEIEDGKDETSNLSKAIQKARMPKDVQKKCVSELKKLKNMSPMSAEATVVRNYLDWMVDLPWYKKDKVDIDLNNALKVLEKDHFGLEKVKERIIEFLAVQKRMDKLKGPILCLVGPPGVGKTSLGKSIAKSTNRQFVRMSLGGVRDEAEIRGHRRTYIGSLPGKIIQMMKKAGTKNPLILLDEIDKVGNDYRGDPSSALLEALDPEQNTSFNDHYLEVDYDLSDVMFVTTANTLNILPPL

SEQ ID NO: 170042 - protein, 223 aa, Unknown
  Bacterial polypetide isolated from the Sargasso Sea
KHSEIEDRDLVGITTGLAWTEVGGELLTIESALSPGKGKISSTGKLGEVMKESIQAAEAFVKSRANLFGISFEDIEKSDIHLHVPEGATPKDGPSAGVAMITSIISSLTGNPVKHLVAMTGEMTLRGRVLPIGGLKEKLLAASRGGIKTVVIPKENEKDLSEIPNNIKDCLDIKPISVVDEALEIALVNPLIPIKDNLKDNQNSPDDSINIQSSVSKNEITAH

SEQ ID NO: 170043 - protein, 407 aa, Unknown
  Bacterial polypetide isolated from the Sargasso Sea
KKILEEDHYGLDKVKDRILEYLAVQKRTEKLKGPILCLVGPPGVGKTSLGKSIATATGRNFVRMSLGGIRDEAEIRGHRKTYIGSMPGRFIQSMKKAKTSNPLILLDEIDKLGSDWRGDPSSALLEVLDPEQNDKFNDHYLELDYNLSDVMFVCTANTLNIPPALLDRMEIIRIPGYTDKEKNKIAQKYLIPKQIKNHYLKNSEVRFTNKIINQIIRNYTREAGVRNLEKEISKVCRKTVKLLETSTNKLVKLSDERLRDFLGISRYRSSEIEKKNLIGITNGLAWTEIGGEILSIEVILSIGKGKLTITGKLGDVMRESVQAAISYVKSHSLNLGIHPFDFDKFDIHVHVPEGATPKDGPSAGIAIFNSLVSSLTSNKVRKDIAMTGEITLRGRVLPIGGLKEKIY

SEQ ID NO: 170044 - protein, 367 aa, Unknown
  Bacterial polypetide isolated from the Sargasso Sea
VAHKDGSIEDPKQEDLYSYGTLALVLKVFDMPDNSKSAIVQGVDRVKILKYNDENTYFTADVERIPEAKSGTPDVEVEALAKGLKNSFTELIKISPNLNEEHAGMLSNIDRPSRLADRATSLLSVSNSEKQEVLEELDIKKRVENAINLLQREIQRIKLGEEIQTEVQDEISKTQREYYLREQMKTIQKELGEDNQTVELDELKAKIADAKMSAEAEKVANKELDRLSRISPQSPEYSVARTYLEWLTDLPWSKSSKDNLNIESAHKTLDEDHYGLDKVKERVLEYLAVRSLKKKVTKSDAVKGPILCFTGPPGVGKTSLGKSIAKSMGREFVRISLGGVRDEAEIRGHRRTYIGALPGRIIQSLKK

SEQ ID NO: 170045 - protein, 808 aa, Unknown
  Bacterial polypetide isolated from the Sargasso Sea
MSGTQLLPPERITLPLLPLRDVVVFPHMVIPLFVGRPKSIKALEAAMEGGKHIMLVAQKTAAKDEPTEKDMYEVGCVANILQMLKLPDGTVKVLVEGLQRAKTLSIEEQETQFSCEVMPLEPDHADSAETEALRRAIVSQFDQYVKLNKKIPPEILTSLSGIDEAGRLADTIAAHLPLKLDQKQHILEMFPVIERLEHLLAQLEAEIDILQVEKRIRGRVKRQMEKSQREYYLNEQVKAIQKELGEGEEGADLEELEKRITAARMPKEAKKKADAELKKLKLMSPMSAEATVVRNYIDTLIGLPWRKKSKVNNDLSNAERVLDEDHFGLEKVKERILEYLAVQQRVDKVKAPILCLVGPPGVGKTSLGQSIARATNRKFVRMALGGVRDEAEIRGHRRTYIGSMPGKILQSLTKVGVRNPLFLLDEVDKMGQDFRGDPSSALLEVLDPEQNHTFADHYVEVDFDLSDVMFVATSNSLNIPPPLLDRMEVIRLSGYTEDEKVSIAQRYLLPKQKKNNGLKDGEVDVTEAAIRDIIRYYTREAGVRSLEREISKICRKVVKMLLLKKAEGAVKVDGGNIDTFLGVRKYDFGLAAKENQVGQVTGLAWTEVGGDLLTIEAAVMPGKGNVIRTGSLGDVMKESVEAARSVVRSRSRRLGVKDEAFEKQDIHIHVPEGATPKDGPSAGIAMTTALVSVLTGIPVRADVAMTGEITLRGEVLPIGGLKEKLLAAHRGGIKLVLIPEENVKDLTEIPDNVKNAIEIVPVRWIDKVLELALERVPQALPEEEVKPAAPVAAGEPGKDAGTTEVVKH

SEQ ID NO: 170046 - protein, 480 aa, Unknown
  Bacterial polypetide isolated from the Sargasso Sea
LNILDKDHFGLEKVKERIIEFLAVQKRMEKIKGPILCLVGPPGVGKTSLGKSIAKATNREFVRMSVGGMRDEAEIRGHRRTYIGSLPGKIIQMMKKAGTKNPLILLDEIDKIGNDYRGDPSSALLEALDPEQNTTFNDHYLEVDYDLSDVMFVTTANTLNILPPLLDRMEVIRLAGYTEDEKISIANKYLLPKQIKDNGVKEKEMKLDDDIIKEVIRGYTKESGVRNLEREISKLARKVVKKIVAGEEKEVQIDNKNLSDFLGVAKFKFGELESENRVGIVTGLAWTEYGGEILKMKTVTMPGKGRMQITGKLGDVMQESVKAAKSFVRSKCLEYGIIPPLFEKKDFHIHVPEGATPKDGPSAGIGMVTSIVSSITNIPVRRDVAMTGEVTLTGQVLPIGGLKEKLLAAHRAGIKEVLIPKENEKDLVDMPKKIIDDIKITPVEYADQVIKIALTKELKPTEWVEVDLAKKDDKSQASIQ

SEQ ID NO: 170047 - protein, 255 aa, Unknown
  Bacterial polypetide isolated from the Sargasso Sea
NDELIFSDNSILKIIRNYTREAGVRSLDRELNKICRKKVKEISLGSKTSKNIDNRVVRNILGPELFDFGQLENQNSLGQVNGLAWTSVGGELLKIEAALTKGKGRVTKTGSLGDVMQESIQAALTVVKNISNEAKIKNDFFEKHDLHIHVPEGATPKDGPSAGITMCTAISSVVLNKKVKGNLAMTGEITLGGKVLKIGGLKEKLIAAKRSGITNVIIPKENVGDLEKVEKNILKNLKIIPVKKIEEVLEKALVK

SEQ ID NO: 170048 - protein, 315 aa, Unknown
  Bacterial polypetide isolated from the Sargasso Sea
MELKVNLPLLPLRDIVVFPSMVIPLFVGRDKSITSLNEAMKQDKKIILVTQKNSEVDDPKKNDIFTYGCESNILQLLKLPDGTVKVLVEGNRRVKIVDFKDDDKFITCSFEHFADQIDKNDDLLPLATTAVRRLEKLTSINKKISSETINSIKELKDPSKIADNIASHLNTTISEKQQMFETADVKKRLNIVIKIMENETSIIGVEKRIRGRVKTQMEKTQREYYLNEQLKAIQKELGEIEDGKDETSNLNKAILKSKMPKEVQKKCLSELKKLKNMSPMSAEATVVRNYLDWMIDIPWYKKDKVDIDLNKALKI

SEQ ID NO: 170049 - protein, 296 aa, Unknown
  Bacterial polypetide isolated from the Sargasso Sea
IANKYLLPKQIKDNGVKEKEMKLDDDIIKEVIRGYTKESGVRNLEREISKLARKVVKKIVAGEEKEVQINNKNLSDFLGVAKFKFGELESENRVGIVTGLAWTEYGGEILKIETVTMPGKGRMQITGKLGDVMQESVKAAKSFVRSKCLEYGIIPPLFEKKDFHIHVPEGATPKDGPSAGIGMVTSIVSSITNIPVRRDVAMTGEVTLTGQVLPIGGLKEKLLAAHRAGIKEVLIPKENEKDLVDMPKKIIDDIKITPIEYADQVIKIALTKELKPTEWVEVDLAKKDDKSQASIQ

SEQ ID NO: 170050 - protein, 256 aa, Unknown
  Bacterial polypetide isolated from the Sargasso Sea
MNINKIPVLPLRDIVVFPHMVVPLFVGRDKSVKALESVMKGDKKIMLITQKSASVDDPKKNDLFDFGTVANVLQLLKLPDGTVKVLVEGLNRASINVFFENEEFLQADVDQIIETIDSSDKQLRAMSKSTTDEFDKYVNLNKKIPPEVLGTINEIDELGKLSDTIASHLSIKLSDKQQILESVDLYERFEKILSFIQSELDVLQVEKKIRGRVKNQMEKTQREYYLNEQMKAIQKELGENEDGKDDISEYEEKIEK

SEQ ID NO: 170051 - protein, 358 aa, Unknown
  Bacterial polypetide isolated from the Sargasso Sea
MKAIQKELGDLDNANSEFDELEEKIKKSGMTKEADEKASSELKKLQMMSPMSAEATVVRNFLDVLLSAPWKKKTKAKVSLDQAHKILDEDHYGLKTVKERIIEYLAVQKRVKKLKGPILCLVGPPGVGKTSLGASIARATGRKFVRMSLGGVRDEAEIRGHRRTYIGAMPGKIMQNLNKAGVRNPLFLLDEIDKMSMDFRGDPSSALLEVLDPEQNTTFNDHYMEVDFDLSDVMFICTANTLNIPPPLLDRMEVIRIEGYTEDEKMNIAEKYLVNKQTEANGLKDSEIKITNSAILSIIRHYTREAGVRNLDREIAKIARKVVKSLIMKSKDEKVHIRPGSLEKYLGVKKFKYGIAEK

SEQ ID NO: 170052 - protein, 211 aa, Unknown
  Bacterial polypetide isolated from the Sargasso Sea
EKDNQIGQVTGLAWTQVGGELLTIESTAIPGKGKLINTGQLGDVMKESIQAATTVVRSRSKALGIKEDFHQKMDMHIHVPEGATPKDGPSAGIGMCTALISSLTDIPVKANVAMTGEITLRGEVLPIGGLKEKLLAAHRGGIEVVIIPEENKKDLSEIPKNIKDKLEIIPVQWIDQVLEIALERMPEIKLEGSKSRQSAKSKPSSEKNLPH

SEQ ID NO: 170053 - protein, 452 aa, Unknown
  Bacterial polypetide isolated from the Sargasso Sea
MSSETKKPLLPLRDIVIFPSIVVPLFVGRKKSIKALEEVMKTDKSVVLVTQKNSEVDDPTEKDIYSYGCLSKVLQLLKLPDGTVKVLVEGLARVKILEIEDDTKKYLSCKTKIIEAEKENEEHKTFASNLIKKFEKLSTLNKKDVSDFTKGLKSLKNANQLADNICSNLNIQIFEKQTLLETIDLKKRLEKIYELIEKETSVISMEKRIRGRVKNQMEKTQREYYLNEQLKAIQKELGEIEDGKDEISSLNKAIAKAKMPKEAQTKCLAELKKLKGMSPMSAEATVVRNYLDWMVDLPWNNKSKIISDLNTAQKVLDEDHYGLAKVKERIIEYLAVQKRIEKLKGPILCLVGPPGVGKTSLGKSIAKATGRKFVRISLGGIRDEAEIRGHRRTYIGSLPGKIIQMMKKAGTSNPLFLLDEIDKVGSDYRGDPSSALLEALDPEQNKTLTIII

SEQ ID NO: 170054 - protein, 792 aa, Unknown
  Bacterial polypetide isolated from the Sargasso Sea
MDKPLLPLRDVVVYPHMVIPLFVGREKSKLALEEAMSDDKKILLSSQKRSDIDDPSIKDVNTVGTLANILQLVTLPDGTVKLLVEGVSRVDLLDIRSDEYFKADYCPLDEFGDESDKDIQALRRTMISQVESYVRITKKVPAEVVNTLASIKESGRLVDTIVAHMSLKLDEKQKILEQINIKERLEYVIGLIEVEIDMIEVEQKVRGRVKDQMEKSQKEYYLNEQMKAIQKELGDLDNANNEFDELEEKIKKSGMTKEADEKASSELKKLQMMSPMSAEATVVRNFLDVLVSAPWKKKTKAKVSLDQAHEILDEDHYGLKTVKERIIEYLAVQKRVKKLKGPILCLVGPPGVGKTSLGASIARATGRKFVRMSLGGVRDEAEIRGHRRTYIGAMPGKIMQNLNKVGVRNPLFLLDEIDKMSMDFRGDPSSALLEVLDPEQNTTFNDHYMEVDFDLSDVMFICTANTLNIPPPLLDRMEVIRIEGYTEDEKMNIAEKYLVKKQTEANGLKDSEIKITNSAILSIIRHYTREAGVRNLDREIAKIARKVVKSLVMKSKDETVHVRPGSLDKYLGVQKFKYGIAEKDNQIGQVTGLAWTQVGGELLTIESTAIPGKGKLINTGQLGDVMKESIQAATTVVRSRSKALGIKEDFHQKMDMHIHVPEGATPKDGPSAGIGMCTALISSLTDIPVKANVAMTGEITLRGEVLPIGGLKEKLLAAHRGGIEVVIIPEENKKDLTEIPKNIKDKLEIIPVQWIDQVLEIALERMPEIKLEGSKSRQSAKSKPTSEKNLPH

SEQ ID NO: 170055 - protein, 540 aa, Unknown
  Bacterial polypetide isolated from the Sargasso Sea
MDIKVTLPLLPLRDIVVFPSMVIPLFVGRDKSITALNEVMKGDKKIVLVTQKNSEVDDPKKNDVFTYGCESNILQLLKLPDGTVKVLVEGTKRVKIVDFKDDEKFIKCSFEYQKDIISKEDDLLPLSLTAIKRLEKLTTVNKKISSETINNIKQLKDPSKIADNIISHINASISEKQQIFETLDVKKRLNSVIKIMENEASIIGVEKRIRGRVKNQMEKTQREYYLYEQLKAIQKELGEIEDGKDESTNLRKSILKAKMPKEVEKKCMSELRKLKNMSPMSAEATVVRNYLDWMIDLPWFKKDKVDIDLNNAIKTLDDDHFGLQKVKERIIEFLAVQKRMDKIKGPLLCLIGPPGVGKTSLGKSIAKATNRQFVRMSLGGVRDEAEIRGHRRTYIGSLPGKIIQMMKKAGTKNPLILLDEIDKVGNDYRGDPSSALLEALDPEQNTTFNDHYLEVDYDLSDVMFVTTANTLNILPPLLDRMEVIRIPGYTEDEKINIANKYLLPKQFKENGVKNSELNLKDGTMRKIIRSYTRESGVRNL

SEQ ID NO: 170056 - protein, 513 aa, Unknown
  Bacterial polypetide isolated from the Sargasso Sea
LQLLKLPDGTVKVLVEGLKRVKILDFKDDDKFISCTYEYNNDTIPKDEDLMPLAMTAVRRLEKLTSINKKISSDTITNIKELKDPTKIVDNIASHLNATILEKQQIFETTDVKKRLNGIIKIMENEASIIGVEKRIRGRVKTQMEKTQREYYLNEQLKAIQKELGEIEDGKDETSNLNKAIQKAKMPKDVQKKCMSELKKLKNMSPMSAEATVVRNYLDWMIDIPWFKKDKVDIDLTKALKTLDEDHYGLEKVKERIIEFLAVQKRMEKIKGPILCLIGPPGVGKTSLGKSIAKATNRQFVRMSLGGVRDEAEIRGHRRTYIGSLPGKIIQMMKKAGTKNPLVLLDEIDKVGNDYRGDPSSALLEALDPEQNTNFNDHYLEVDYDLSDVMFVTTANTLNILPPLLDRMEVIRIPGYTEDEKINIADKYLLPKQIKENGVKKEELELENGTIKEIIRSYTRESGVRNLEREISKVARKVVKKVVSGEEKKVNVSDKNISDFLGVKKFKYGEVEP

SEQ ID NO: 170057 - protein, 416 aa, Unknown
  Bacterial polypetide isolated from the Sargasso Sea
NLLESLLGGVRDEAEIRGHRRTYIGALPGRIIQSLKKAGTNNPVFMLDEIDKLGMDFRGDPSSALLEVLDPEQNNTFADHYLEVDFDLSNVMFIATANYQDPIPPALKDRMEIIDFSGYILDEKVQIAKKHLIPKQMEENALTTKDVSLDEVGVKELINSYTREAGVRNLEREIANVFRKVARDKIEKNSKKVRVSKKKVTEYLGAPRFYSDIAERTTKPGVVTGLAWTAAGGDILFIEASKMKGKGALTLTGQLGDVMKESATAAMTYVRSHTDILDLANDFNEKTDIHVHVPAGAIPKDGPSAGVGMFTSIVSLLTGKPVKSKVAMTGEITLRGNVLPIGGVKEKVTAAHRSGIKTIILPDHNRKDLEDIPDHIKKDLDFHFAKEMMDVIDVAIPGINGKKKPKKSSSRIKKAV

SEQ ID NO: 170058 - protein, 183 aa, Unknown
  Bacterial polypetide isolated from the Sargasso Sea
MSGKGKITQTGQLGDVMQESIKAAITVVKTRCHDLGIDVEQFDNKDIHIHVPEGATPKDGPSAGITMALAVASTLSSIPIKSDIAMTGEITLRGEVLEIGGLKEKLLAALRAGIKEVIIPKDNEKDLREIPKNITDKLRIHPIKFVDELFTIALKTKPVKLKPRQKKPLDDKDTNNNITKNLQ

SEQ ID NO: 170059 - protein, 427 aa, Unknown
  Bacterial polypetide isolated from the Sargasso Sea
MEKVKERIIEFLAVQKRMDKIKGPILCLVGPPGVGKTSLGKSIAKATNREFVRMSVGGMRDEAEIRGHRRTYIGSLPGKIIQMMKKAGTKNPLILLDEIDKIGNDYRGDPSSALLEALDPEQNTSFNDHYLEVDYDLSDVMFVTTANTLNILPPLLDRMEVIRLPGYTEDEKISIADKYLLPKQIKDNGVKEDEMKLENDIIKEIIRSYTKESGVRNLEREISKLARKVVKKVVSGEQKKVEISKKNLSDFLGVAKHKFGELETDNRVGIVIGLAWTEYGGEILKIETVTMPGKGRMQITGKLGDVMQESVKAGKSFVRSKCLEYGIIPPLFEKKDFHIHVPEGATPKDGPSAGIGMVTSIVSSLTNIPVRRDVAMTGEVTITGQVLPIGGLKEKLLAAHRAGIKEVIIPKENEKDLVDMPKKIIDE

SEQ ID NO: 170060 - protein, 532 aa, Unknown
  Bacterial polypetide isolated from the Sargasso Sea
MREEIIYPGSTTPFFVGRKSSMEALDKALSGDRQIIVVAQRVSSVEEPKDEDLYEVGVLGRILQVMRLPNGTVKALFEGQHRARVLESMLRDKDYSARIEVMDAKESEKDLEKLTDLSTKARVLAREYFKKKKSKTREEVLKNIEDTEPHSLADRLASMMEIERELKQKLLEEIKPIVRLETLIGIMEEEKKISKLESQLKKQVKEQMSSSQKEDYLEDQLKSIQKELGQMDDPKGEMDELARKVKEAKMPNEVRESAEKEVKKLKMMSPLSAEANVIRNYLEWLVAMPWDVTTEDNFDLKRAQKILDEDHYGLEKVKERIIEYLAVASLKKSLKGPILCLTGPPGVGKTSLAQSIAGALDRKFVRISLGGVRDEAEIRGHRRTYIGALPGKIIQSIRKAKSRNPVLLIDEIDKLYQSALSDPSAAMLEVLDPEQNNTFMDHYLEAEWDLSSVLFICTANTTQSISSPLLDRMEQIPLSGYTELEKQEIANRFLIPRQAKDHGLKENWIRFKKDALQEVIIGYTREAGVRNL

SEQ ID NO: 170061 - protein, 340 aa, Unknown
  Bacterial polypetide isolated from the Sargasso Sea
IDTSKKQEILETINLKDRAEKVLTFLESQLDVVDVEKKVRDRVKKQMEKSQREYYLNEQIKAAQKELGEIGEEGDELENLEKKIHEVGMSKEALKKAKSELAKFKHMAPSSAEASVVRTYLDCLVDIPWKKKSKVKSDIKASMEILEEDHYGLEEVKERIVEYLAVQKRVKSMKAPVLCLVGPPGVGKTSLGESIARATNRKFVRMSLGGVRDESEIRGHRRTYIGSMPGKIIQKLSKVGVKNPLFLLDEIDKIGMDHRGDPASALLEVLDPEQNNTFSDHYLEVDYDLSEVMFVCTANSLNIPTPLLDRMEIIRIPGYIEDEKINIAEKYLLPKQMTRN

SEQ ID NO: 170062 - protein, 565 aa, Unknown
  Bacterial polypetide isolated from the Sargasso Sea
MEKSQREYYLNEQMKAIQKELGDLDEGHDEFEVLNRKIEEANMPSDAKEKAVAELNKLRMMSPMSAEATVVRSYVDWMTSVPWSQRSKIKRDLAKAQEVLDTDHYGLEKVKDRILEYLAVQSRVRQLKGPILCLVGPPGVGKTSLGQSIAKATGRKYVRVALGGVRDEAEIRGHRRTYIGSMPGKVIQKMAKVGVKNPLFLLDEIDKMSSDMRGDPASALLEVLDPEQNATFNDHYLEVDYDLSDVMFVATSNSMNIPGPLLDRMEVIRLSGYTEDEKLNIAKQHLLTKQIERNGLKANEIHIEDSAIVGIIRYYTREAGVRALERELSKICRKVVKMILLDKSIKSVTVTADNLKSFLGVQRFDYGKAESNNQIGQVTGLAWTEVGGDLLTIEATSVPGKGKLTYTGSLGDVMQESIQAAMTVVRARAEQLGINGDFYEKRDIHVHVPEGATPKDGPSAGAAMCTALVSSLTGNPVRADVAMTGEITLRGEVLPIGGLKEKLLAAHRGGIKLVLIPKENERDLEEIPANVIADLEIRPVRWVDEVLKLALERPVEGFEVVKNLA

SEQ ID NO: 170063 - protein, 792 aa, Unknown
  Bacterial polypetide isolated from the Sargasso Sea
MDVKISLPLLPLRDIVVFPSMVIPLFVGRDKSISALNEVMKKEKKIILVTQKNSEIDDPSKTDVFMYGCEGNILQLLKLPDGTVKVLVEGIKRVKILDFKDNEKFITCDYTYFNDVLSKDEDLFPLAATALRRLEKLTSINKKISNETINTIKQLKDPSQIADNIASHIAASISEKQQIFETNDVKKRLNAIIKIMENETSIIGVEKRIRGRVKTQMEKTQREYYLNEQLKAIQKELGEIEDGKDETTSINKAITKAKMPKDVEKKCLQELKKLKNMSPMSAEATVVRNYLDWMTELPWYKKSEVDIDLAKAQNTLDKDHFGLEKIKERIVEFLAVQKRMEKIKGPILCLVGPPGVGKTSLGKSIAKATNREFVRMSVGGMRDEAEIRGHRRTYIGSLPGKIIQMMKKAGTKNPLILLDEIDKIGNDYRGDPSSALLEALDPEQNTTFNDHYLEVDYDLSDVMFVTTANTLNILPPLLDRMEVIRLAGYTEDEKINIANKYLLPKQVKDNGVKDKEMNLSDDVIKEVIRGYTKESGVRNLEREISKIARKVVKKIVAGEEKEVNVNNKNLSDFLGVAKFNFGELETDDKVGIVVGLAWTEYGGEILKIETVTMPGKGRMQITGKLGDVMQESVKAAKSFVRSKCLEYGIIPPLFEKKDFHIHVPEGATPKDGPSAGVGMVTSIVSSITNIPVRKDLAMTGEVTLTGQVLQIGGLKEKLLAAHRAGIKEVLIPKENEKDLVDMPKKIMDDIKITPVEHADQVIKIALTKELKPTEWVEVDITKKDDKSQASIQ

SEQ ID NO: 170064 - protein, 375 aa, Unknown
  Bacterial polypetide isolated from the Sargasso Sea
DSRGDPASALLEVLDPEQNNTFSDHYLEVDFDLSEIMFVCTANSLNIPGPLLDRMEIIRLPGYIEDEKLNIAKQYLIPKQLERNGLDISEVKLSDKSILDIVRYYTREAGVRGLERQIAKIFRKSVKERVLSNSKKSKSSINITPKNLEKYCGVAKFKYGEADVEDIVGKVAGLAWTEVGGELLTIESSYVPGKGQVIKTGSLGDVMQESIQAALTVVRSRSKNLGIPSNFYEKYDVHIHVPDGATPKDGPSAGVGMCTALISVFTGIPVRSDTAMTGEITLHGQVTKIGGLKEKLLAAKRAGIKRVIIPQDNAADLREIPSQITHALEIMPVRWVDEAISLALTSEPKPSKKRASAKNIAKPKTSSSRSTNRKP

SEQ ID NO: 170065 - protein, 427 aa, Unknown
  Bacterial polypetide isolated from the Sargasso Sea
QMEKTQKEYYLNEQMKAIQKELGDPDSTDELGEYAEKINSIKLSKEAKEKAEGELKKLKTMSPMSAEATVVRNYLDWIISVPWKKRGRVKKDLNEAQSILDKDHYGLEKIKERIIEFLAVQNRSKKMKGPILCLVGPPGVGKTSLGKSLAKATGREFLRISLGGVRDESEIRGHRRTYIGAMPGKIIQSMKKVKTVNPLILLDEIDKMGHDFRGDPASAMLEVLDPEQNSAFSDHYLEVEYDLSSVMFVTTANNYNMPRPLLDRMEIISLSGYTEQEKVEIAKLHLLDKQMEAHGLKKEEFSVKDEALVEVVRYYTREAGVRNMERELAKLCRKSLTKILKGEFNSIEINSSNIEEFLGVKRFKYGIAEEQNQIGVTTGLAWTEMGGDLLHIEALSLPGKGKMKATGKLGDVMKESIDAASSYVRSK

SEQ ID NO: 170066 - protein, 310 aa, Unknown
  Bacterial polypetide isolated from the Sargasso Sea
FWDILEDEKLNISQKFLIHNQSKNNGLKKEEWTIDENIIRKIIRHYTRESGVRNLEREISKIARKLVKKIDNKEKVNNPINEKDLKDLLGVQKFNYGEIEEENRVGVVTGLAWTEVGGEILKIESAIMPGKGKMQITGKLGDVMQESVKAAKSYIRSKSLDFGIIPPIFDKKDFHIHVPEGATPKDGPSAGVGMVTSIISAITEIPVNKDVAMTGEITLRGLVLPIGGLKEKLLAAHRAGIKKVLIPEENKKDLVEVPKTILNNIEIIAVKNVDEVLKVALIKPLKRVEWVEVDQMSKKGKDKKEELSTH

SEQ ID NO: 170067 - protein, 511 aa, Unknown
  Bacterial polypetide isolated from the Sargasso Sea
PPEVLGTINEIDDLAKLSDTIASHLSIKLSDKQEILEAIDLTERFEKIMNFIQAELDVMQVEKKIRGRVKNQMEKTQREYYLNEQMKAIQKELGEGDDGKDDIQEYEEKIENTKLSKEAKEKCYSEIKKLKSMSPMSAESSVIRNYLDWILTIPWGKKTKVKKDIKFAESVLNEDHYGLEKVKERILEYLAVQQRIKKMKGPILCLVGAPGVGKTSLGKSIARATGRKFVRMSLGGVRDEAEIRGHRRTYIGSLPGKVLQMMKKAGSSNPLFLLDEIDKLGADYRGDPSSALLEVLDPEQNNSFNDHYLEVDYDLSDTMFITTANTLRMPPALLDRMEIIRIAGYTEDEKVEIVKQHLAPQMLEKHGLKSGELILDDSAITGLIRYYTREAGVRSLERELANLARKTVKKIVAGDIGSLTINEDNLHEFAGVRKFKFGEIDNDDQVGIVTGLAWTEVGGDILPIESVIMPGKGRMTITGKLGDVMKESIQAAKSYVRSRCIEFGIKPSIFP

SEQ ID NO: 170068 - protein, 392 aa, Unknown
  Bacterial polypetide isolated from the Sargasso Sea
MDVKITQPLLPLRDIVVFPSMVIPLFVGRDKSITALNEVMKNDKKIVLVTQKNSEVDDPKKNDVFSYGCESNILQLLKLPDGTVKVLVEGVKRVKIVEFKDDEKFITCAFEYQKDLINKDEDLMPLALTAVRRLEKLTSINKKISSETINSIKELKEASKIVDNIASNLNATISEKQQIFETLDVKKRLNSVIKIMENETSIIGVEKRIRGRVKTQMEKTQREYYLNEQLKAIQKELGEIEDGKDETTNLKKSIQKAKMPKEVEKKCMSELKKLKNMSPMSAEATVVRNYLDWMIDLPWFKKDKVDIDLNKALKTLDEDHFGLEKVKERIIEFLAVQKRMEKIKGPILCLVGPPGVGKTSLGKSIAKATNRQFIRMSLGGVRDEAEIRGHRR

SEQ ID NO: 170069 - protein, 649 aa, Unknown
  Bacterial polypetide isolated from the Sargasso Sea
MKDLDKTKNNNSIDIKKQDITSIPGISLRDVVVFPSMVIPLFVGREKSITALNIAMDSSKEIILIAQKKADQDDPTIVDLYRVGTVAKILQLLKLPDGTVKVLVEGIKRIKIKEIRDENCFYVIPEINVENEFNERELDILSRALVSQFEQYIKLNKKIPSEILNTVSNIDDNEKLCYTIAAHIQVKINIKQKILEIGDPKLKSEFILEVLQGEIDVLEVEKQVRSKVKSQMEKSQREYYLNEQMKAIQNELDGGSGSAKDDFAKLEDDIKNASMSKEANEKATSELSKLKLMSPMSAEATVSRNYLDWLVNLPWKKSSRISSDISKASNTLNEDHFGLDEVKERVIEYLAVQKRVKKPKGPILCLVGPPGVGKTSLGRSIARAANRKYIRMSLGGVRDEAEIRGHRRTYIGSMPGKIIQSLSKAKSNNPLFLLDEIDKMTMDFRGDPSSALLEVLDPEQNHSFSDHYLEVDYDLSSIMFVCTANTLDIPAPLLDRMEVIQLSGYTEDEKLNIAEKYLVPKQFNETGIKDNELSISRSALTEIIQRYTREAGVRSLERMISKICRKSLKLIITKPSKIKKRVSSKNLAKYLGAHKYNYESISKDNQIGQVNGLAWTRVGGEILTIESAVVKGKGKLIHTGKLGDVMTES

SEQ ID NO: 170070 - protein, 760 aa, Unknown
  Bacterial polypetide isolated from the Sargasso Sea
MPMIPLRDVVIFPNTVSTLFVGREKSIFSLEDALRSNKKIFLIAQNSPSNEEPTIKDLPSIGTISTLLQMIKLPDGTVKILVEGIQRAKLDDISTSEGYFAEIEKIEEMIEDSKYERDLLSTIKNQFTEFVSVSRKVSHEIINQVESMGNLSKAVDIISSNIHLSVKDKQEILEKVNVIERAEFLSSLLEAQIELIEVEQRIRGRVRKQMEKSQKEYFLNEQIKAAQKELGDISDEKNELDELQKKIEETKLSKEALEKVSSEFSKLRQMSPMSAEATVVRTYIETLLEVPWNKTTKINVDLNKAKEILDEDHYGLKEVKERILEYLAVQKRVKKMKAPVLCFVGPPGVGKTSLGESIARSVNREFTRLSLGGVRDEAEIRGHRKTYIGSMPGKIIQKLSKGKVKNPLFLLDEIDKIGMDHRGDPSSALLEVLDPEQNNKFNDHYLEVDYDLSEVMFICTANSLNIPPALLDRMEIIRLPGYIEDEKLNIAKNYLVPRNKEKNGLKEDEITFSDNSILKIIRNYTREAGVRNLDREINKVCRKKVKDLSLGGKATKLIDNRVVRNILGPEKFKYGEHDDQNSLGQVNGLAWTSVGGELLQIEAALTAGKGRIIKTGSLGDVMQESIQAALTVAKNIFQKTKIKKDLFEKHDIHIHVPEGATPKDGPSAGITMCTAITSLALGKKVKANLAMTGEITLAGKVLKIGGLKEKLIAAKRSGITNVIIPKENTGDLEEMETNILRDLNIIPVTNIDEVLKQALV

SEQ ID NO: 170071 - protein, 342 aa, Unknown
  Bacterial polypetide isolated from the Sargasso Sea
MLDPEQNSSFHDNFLEIGYDLSKVMFVATANNLSTMHPALLDRMELINVSGYTSEEKVSIANKFLIKKQLSEHGMNSSDFKISNKNIKEIISSYTRESGVRNLEKQIAKLIRNRAKNIVSNSKLNDYNDENYLKDVLGPQKFFRDKYENNNVAGVVTGLAWTSVGGEILFIESSLSEGKGNLSITGNLGKIMKESAVIALEYIKSNYQDLGINKEIDYSKYNIHIHVPEGATPKDGPSAGITILTSLVSLFTQKRVKKNIAMTGEITLRGKVLPVGGIKEKILAAKRANIKEIILSSYNKKDIEEIDQKYLKGLNFIYVNNMSDVISHSLTNRKVLNPKNIN

SEQ ID NO: 170072 - protein, 771 aa, Unknown
  Bacterial polypetide isolated from the Sargasso Sea
MKSEDIKLKIKMPMIPLRDVVIFPNTVSTLFVGREKSIFSLEDALRSNKKIFLIAQNSPSNEEPTIKDLPTIGTISTLLQMIKLPDGTVKILVEGIQRAKLDTVSTSEGYFAEIEKIEEMIEDSKYERDLLSTIKNQFTEFVSVSRKVSHEIINQVESMGNLSKAVDIISSNIHLSVKDKQEILEKVNVIERAEFLSSLLEAQIELIEVEQRIRGRVRKQMEKSQKEYFLNEQIKAAQKELGDISDEKNELDELQKKIEETKLSKEALEKVSSEFSKLRQMSPMSAEATVVRTFIETLLDVPWSKTTKINVDLNKAKEILDEDHYGLKEVKERILEYLAVQKRVKKMKAPVLCFVGPPGVGKTSLGESIARSVNREFTRLSLGGVRDEAEIRGHRKTYIGSMPGKIIQKLSKGKVKNPLFLLDEIDKIGMDHRGDPSSALLEVLDPEQNNKFNDHYLEVDYDLSEVMFICTANSLNIPPALLDRMEIIRLPGYIEDEKLNIAKNYLVPRNKQKNGLKENEITFSDNSILKIIRNYTREAGVRSLDREINKVCRKKVKDLSIGGKATKLIDNRVVRNILGPEKFKYGEHDDQNSLGQVNGLAWTSVGGELLQIEAALTAGKGRIIKTGSLGDVMQESIQAALTVAKNIFQKTKTKKDLLEKHDLHIHVPEGATPKDGPSAGITMCTAITSLALGKKVKANLAMTGEITLAGKVLKIGGLKEKLIAAKRSGITNVIIPKENTGDLEEMETNILRDLNIIPVTNITEVLKEALV

SEQ ID NO: 170073 - protein, 333 aa, Unknown
  Bacterial polypetide isolated from the Sargasso Sea
MPEEAEKVALKEMDRLSKIPSQSPEYTVSRTYLDWLTELPWSKKSEDTIDVTDAKKILDDDHYGLEKVKERILEYLAVRALKMKKDPNGAIRGPILCFAGPPGVGKTSLGRSIARSMGREFVRISLGGVRDEAEIRGHRRTYIGALPGRIIQSLKKAGTNNPVFMLDEIDKLGMDFRGDPSSALLEVLDPEQNSTFADHYLEVDFDLSNVMFIATANYQDPIPPALKDRMEIIDFSGYILDEKVQIAKKHLIPKQMEENALTTKDVTLDDIGVKELINSYTREAGVRNLEREIANVFRKVARDKIEKKSKKVRVSKKKVTEYLGAPRFYSDIA

SEQ ID NO: 170074 - protein, 291 aa, Unknown
  Bacterial polypetide isolated from the Sargasso Sea
FKDGELTIKDNAVTSLIRYYTREAGVRSLEREIANLARKAIKKIVAGEIKNLTINEENVNEYAGVKKYKYGEIDADDQVGIVTGLAWTEVGGDILPIEAVIMPGKGIMTITGKLGDVMKESIQAAKSYVRSRCIDFGIKPTIFPIRDIHIHVPEGAIPKDGPSAGLAMVTSIVSVLTGIPVRKDIAMTGEVTLRGKALGIGGLKEKLLAALRAGTKTVIIPKENEKDLEDIPDNVKEGLELIFVDNVDDVLKIALTKPLIPIEWDESESVSGGSEISEDDQDQDQDPLLTH

SEQ ID NO: 170075 - protein, 720 aa, Unknown
  Bacterial polypetide isolated from the Sargasso Sea
MNLPVLPLRNIVVFPNMVVPLFVGRDKSINALEQVMDKDQELLFLSQKNSEVDDPSEKDLFKIGTRGKILQLLKLPDGTVKVLVEGLARCKVKKIEFTSDYITADIEEFENIEVISDTIKALGRSVVSKYETYANINNKTSSEVLTSVKDIEDENKLADTVASQIAINIQEKQKILEETDLEKRLNMILSYIEGELSVLQVEKKIRRRVKNQMEKTQKEYYLNEQMKAIQKELEDGEGGASEDIAELTEKINKTKLSKEAKEKAHNELKKLKQMSPMSAEATVVRNYLDWLLDIPWGKKKRIKKDINKSQEILDKDHYGLEKVKDRITEYLAVQNRSSKVKGPILCLVGPPGVGKTSLGKSIAAATGREFIRMSLGGVRDEAEIRGHRRTYIGSMPGRIIQALKKVKTTNPIFLLDEIDKLGQDFRGDPASALLEVLDPEQNNAFNDHYLEVDYDLSQVMFVTTANTMNIPGPLLDRMEIIRIAGYTEEEKLEIAKRHLIEKVKSNNALTDKEFKISDEVIRSIIQNYTREAGVRNLERELNSLGRKAVKEISQNKSDSLNVSSDNISEYLGVKKFRYGKKENDDLVGVVTGLAWTEVGGDILNVEAVMVPGQGKIRTTGKLGDVMKESIDAASSFVRSRAVNYGIEPPIFQRKDIHVHVPEGATPKDGPSAGVAMIIAIISVMAGIPVKNDVAMTGEMSLRGRVLPIGGLKEKLLAALR

SEQ ID NO: 170076 - protein, 805 aa, Unknown
  Bacterial polypetide isolated from the Sargasso Sea
MVEDKENISLDIVTDKPLLPLRDVVVYPHMVIPLFVGREKSKLALEEAMGEDKKILLSSQKRSDIDDPSIKDINTVGTLANILQLVTLPDGTVKLLVEGVSRVDLLDIRSDQYFKADYCPLDEIGDESDKDIKALRRTMISQVESYVRMTKKVPAEVVNTLASIKESGRLVDTIVAHMSLKLDEKQKILEQINIKERLEYVIGLIEVEIDMIEVEQKVRGRVKDQMEKSQKEYYLNEQMKAIQKELGDLDNANSEFDELEEKIKKSGMTKEADEKASSELKKLQMMSPMSAEATVVRNFLDVLLSAPWKKKTKAKVSLDQAHKILDEDHYGLKTVKERIIEYLAVQKRVKKLKGPILCLVGPPGVGKTSLGASIARATGRKFVRMSLGGVRDEAEIRGHRRTYIGAMPGKIMQNLNKAGVRNPLFLLDEIDKMSMDFRGDPSSALLEVLDPEQNTTFNDHYMEVDFDLSDVMFICTANTLNIPPPLLDRMEVIRIEGYTEDEKMNIAEKYLVNKQTEANGLKDSEIKITNSAILSIIRHYTRESGVRNLDREIAKIARKVVKSLIMKSKDETVHVRPGSLEKYLGVKKFKYGIAEKDNQIGQVTGLAWTQVGGELLTIESTAIAGKGKLINTGQLGDVMKESIQAATTVVRSRAKALGIKEDFYQKKDMHIHVPEGATPKDGPSAGIGMCTALISSLTDIPVKANVAMTGEITLRGEVLPIGGLKEKLLAAHRGGIEVVIIPEENKKDLTEIPKNIKEKLDIVPVQWIDQVLEIALERMPEIKIQGSKGRQTSKSKPSSEKNLPH

SEQ ID NO: 170077 - protein, 795 aa, Unknown
  Bacterial polypetide isolated from the Sargasso Sea
MEVKLTQPLLPLRDIVVFPSMVIPLFVGRDKSITALNEVMKSDKKIILVTQKNSEVDDPKKNDVFSYGCESNILQLLKLPDGTVKVLVEGIKRVKIIDFKDDEKFITCTYEHQKDVLNKDEDLLPLALTAVKRLEKLTSVNKKISSETINNIKQLKDPSKIVDNIVSNLNASISEKQQIFETLDVKKRLNAAIKMMESETSIIGVEKRIRGRVKTQMEKTQREYYLNEQLKAIQKELGEIEDGKDETTNLKKSIQKAKMPKEVEKKCMSELKKLKNMSPMSAEATVVRNYLDWMIDLPWFKKNDVDIDLNKGLKILDEDHFGLEKVKERIIEFLAVQKRMEKIKGPILCLVGPPGVGKTSLGKSIAKATNRQFIRMSLGGVRDEAEIRGHRRTYIGSLPGKIIQMMKKAGTKNPLFLLDEVDKIGNDYRGDPSSALLEALDPEQNTAFNDHYLEVDYDLSDVMFVTTANTLNILPPLLDRMEVIRIPGYTEDEKINIANKYLLPKQLKENGVKEGELNLEDGTIKEIIRSYTRESGVRNLEREISKVTRKVVKKVVSGEVEKVQVSDKNIPDFLGIKKFKFGEVEDKNKTGIVIGLAWTEVGGEILKIETVNMPGKGRMQITGKLGDVMQESVKAAKSYVRSKSLEYGIIPPFFEKKDFHIHVPEGATPKDGPSAGIAMVTSIVSSITNIPVNREIAMTGEVTITGQVLQIGGLKEKLLAAHRAGVKKVLIPKENEKDLIDIPKKVREDIKIIPVETADEVLKIALTKELKPVEWSEVDKISEGKKDDKSQASIQ

SEQ ID NO: 170078 - protein, 405 aa, Unknown
  Bacterial polypetide isolated from the Sargasso Sea
NREFVRMSVGGMRDEAEILGHRRTYIGSLPGKIIQMMKKAGTKNPLILLDEIDKVGNDYRGDPSSALLEALDPEQNTTFNDHYLEVDYDLSDVMFVTTANTLNILPPLLDRMEVIRLAGYTEDEKINIANKYLLPKQIKDNGVKDKEMSLEDDIIKEVIRSYTRESGVRNLEREISKLARKVVKKVVSGEEKEVKIDKKNLSDFLGIPKHKSGELETENRVGIVIGLAWTEYGGEILKIETATMPGKGRMQITGKLGDVMQESVKAAKSFVRSKCLEYGIIPPLFEKKDFHIHVPEGATPKDGPSAGIGMVTSIVSSITNIPVKRDVAMTGEVTLTGQVLPIGGLKEKLIAAHRAGIKEVLIPKENEKDLVDMPKKIIDEVKITPVEFADDVLKIALTKELKKTE

SEQ ID NO: 170079 - protein, 383 aa, Unknown
  Bacterial polypetide isolated from the Sargasso Sea
MEVKHTSPLLPLRDIVVFPSMVIPLFVGRDKSITALNEVMKNNKKIILVTQKNSEVDDPKKNDVFFYGCESTILQLLKLPDGTVKVLVEGLKRVKIIDFKDDEKFITCSYEYNNDIISKDEDLMPLATTAIRRLEKLTSINKKVSSDIISNIKELKDPAKVADNIASHLNATISEKQQIFETTDVKKRLNGVIKIMENETSIIGVEKRIRGRVKTQMEKTQREYYLNEQLKAIQKELGEIEDGKDETSNLNKLIQKAKMPKEVQKKCMSELKKLKNMSPMSAEATVVRNYLDWMIDIPWFKKDKVDIDLNKALKQLDEDHYGLEKVKERIIEFLAVQKRMDKIKGPILCLIGPPGVGKTSLGKSIAKATNRQFVRMSLGGVRD

SEQ ID NO: 170080 - protein, 384 aa, Unknown
  Bacterial polypetide isolated from the Sargasso Sea
MSKTFLATIKNQFTEFVSVSRKVSHEIINQVQSMANLSKAVDVIASNIHLSVKDKQMILEKENPSERGEALSGLLEAQIELIEVEHRIRGRVKKQMEKSQKEYFLNEQIKAAQKELGDISDEKNELEEFQKKIEETKLSKEALEKINSEFSKLKQMSPMSAEATVVRTYIDTLLEVPWSKRTKINLDLTKAKEVLDQDHYGLKEVKERILEYLAVQKRVKKMKAPVLCFVGPPGVGKTSLGESIARSVNREFIRLSLGGVRDEAEIRGHRKTYIGSMPGKLIQKLSKTKVKNPLFLFDEIDKVGMDHRGDPSSALLEVLDPEQNNTFNDHYLEVDYDLSEVMFICTANSLNIPPALLDRMEIIRLPGYIEDEKLNIAKNYLVPR

SEQ ID NO: 170081 - protein, 328 aa, Unknown
  Bacterial polypetide isolated from the Sargasso Sea
MEVKHSSPLLPLRDIVVFPSMVIPLFVGRDKSINALNEVMKGNKKIVLVTQKNSEVDDPKKTDVFTNGCESSILQLLKLPDGTVKVLVEGIKRVKIVDFKDEKEFISCSFEFNNDVLSSQDDLLALGLTAIRRLEKLTSVNKKLSSETITNIKNLKDASKIADNIASHLNCTISEKQQLFETLDVKKRLNSVIKIMENETSIIGVEKRIRGRVKTQMEKTQREYYLNEQLKAIQKELGEIEDGKDETSNLNKSILKAKMPKEVQKKCMSELKKLKNMSPMSAEATVVRNYLDWMIDIPWSKKDKVDIDLNKALQQLDEDHYGLEKVKE

SEQ ID NO: 170082 - protein, 598 aa, Unknown
  Bacterial polypetide isolated from the Sargasso Sea
ITPKDEDLYPLAATAFRRLEKLTSINKKISNETINSIKQLKDPSQIADNIASHITATISEKQQIFETIDVKKRLNAIIKIMENETSIIGVEKRIRGRVKTQMEKTQREYYLNEQLKAIQKELGEIEDGKDENTSLNKAIIKARMPKEVEKKCLQELKKLKNMSPMSAEATVVRNYLDWMTELPWHKKSAVDIDLKKALEILDKDHFGLEKVKERIIEFLAVQKRMEKIKGPILCLVGPPGVGKTSLGKSIAKATNREFVRMSVGGMRDEAEIRGHRRTYIGSLPGKIIQMMKKAGTKNPLILLDEIDKIGNDYRGDPSSALLEALDPEQNTTFNDHYLEVDYDLSDVMFVTTANTLNILPPLLDRMEVIRLAGYTEDEKINIANKYLLPKQIKDNGVKEKEMSLQNDIIQEIIRSYTKESGVRNLEREISKVARKVVKKVVSGEEKEVKINKENLSDFLGVPKFKSGELETENRVGIVTGLAWTEYGGEILKIETATMPGKGRMQITGKLGDVMQESVKAAKSFVRSKCLEYGIIPPLFEKKDFHIHVPEGATPKDGPSAGIGMVTSIVSSITNIPVKRDVAMTGEVTLTGQVLPIGG

SEQ ID NO: 170083 - protein, 400 aa, Unknown
  Bacterial polypetide isolated from the Sargasso Sea
IEKEDEDPEIVALSKNVRNEFKRYLKEVKRHTEGIEKLAIDSEAPHRLADRIAPLLNMDLEKKQTLLEITEPRRRLEIVYERMLEESEFKKVERKLKERVQGQIGKTQKEYYLNEQIKAIQKELGQGEDGKAEQEEYEKRLEEIPLSQEAREIAEKELKKLKMMPPMSAEANVVRNYIDWLLDMPWGDKTEDRFDLDAAEKILNKGHYGLEKIKERIIEYLAVAQKVGSLKGPIICLVGPPGVGKTSLARSVADALGRNFARMSLGGVRDEAEIRGHRRTYVGAMPGKIIQSLRKVKSKNPLLLLDEVDKMTRGVMGDPSSALLEVLDPEQNHTFMDHYLEVEFDLSDVLFFCTANVAQDIPPALQDRMEVINLSGYTELEKVHILKRHLLPKQIEENGL

SEQ ID NO: 170084 - protein, 379 aa, Unknown
  Bacterial polypetide isolated from the Sargasso Sea
MLDEIDKVGSDYRGDPSSALLEALDPEQNKQFNDHYLEVDYDLSDVMFVTTANTLNILPPLLDRMEIIRIPGYTEDEKTNIAQKYLIPKQSKDNGLKDNEWKISENVIKKIIRDYTRESGVRNLEREISKIARKTVKKIDSSEKIEKELLEKDVNSFLGVKKYNYGEIESENKIGVSTGLAWTEVGGEILKIESVNMPGKGKMQITGKLGEVMQESVKAAKSFVRYKSVEFGIVPPLFEKKDFHIHVPEGATPKDGPSAGIAIVTSIISSITGIPVNKDVAMTGEVTLRGNVLQIGGLKEKLLAAHRAGIKKVLIPYDNQKDLIEIPETIRNSIEIVSVKTVEEVLKHALTKELKPVKWVEIDQVSNKNKEKSEVTSAH

SEQ ID NO: 170085 - protein, 795 aa, Unknown
  Bacterial polypetide isolated from the Sargasso Sea
MEVKLTQPLLPLRDIVVFPSMVIPLFVGRDKSITALNEVMKSDKKIILVTQKNSEVDDPKKNDVFSYGCESNILQLLKLPDGTVKVLVEGIKRVKIIDFKDDEKFITCTYEHLKDLINKDEDLLPLALTAVRRLEKLTAVNKKISSDTINNIKQLKEPSKIVDNIVSNLNSSISEKQQIFETLDVKKRLNAVIKMMESETSIIGVEKRIRGRVKTQMEKTQREYYLNEQLKAIQKELGEIEDGKDETTNLKKSIQKAKMPKDVEKKCMSELKKLKNMSPMSAEATVVRNYLDWMIDLPWFKKDNVDIDLNKALKILDEDHFGLDKVKERIIEFLAVQKRMEKIKGPILCLVGPPGVGKTSLGKSIAKATNRQFIRMSLGGVRDEAEIRGHRRTYIGSLPGKIIQMMKKAGTKNPLFLLDEVDKIGNDYRGDPSSALLEALDPEQNTAFNDHYLEVDYDLSDVMFVTTANTLNILPPLLDRMEVIRIPGYTEDEKINIANKYLLPKQLKDNGVKEGELDLKDGTIKEIIRSYTRESGVRNLEREISKVTRKVVKKVVSGEVEKVQVNDKNIPDFLGIKKFKFGEVENKDKTGIVIGLAWTEVGGEILKIETVNMPGKGRMQITGKLGDVMQESVKAAKSFVRSKSLEYGIIPPFFEKKDFHIHVPEGATPKDGPSAGIAMVTSIVSSITNIPVNREVAMTGEVTITGQVLQIGGLKEKLLAAHRAGVKKVLIPKENEKDLVDVPKKVREDIKIIPVETADEVLKIALLKELKPVEWTEVDKISEGKKDDKSQASIQ

SEQ ID NO: 170086 - protein, 411 aa, Unknown
  Bacterial polypetide isolated from the Sargasso Sea
MDIKVTLPLLPLRDIVVFPSMVIPLFVGRDKSITALNEVMKGDKKIVLVTQKNSEVDDPKKNDVFTYGCESNILQLLKLPDGTVKVLVEGTKRVKIVDFKDDEKFIKCSFEYQKDITSKDDDLLPLGLTAIKRLEKLTSVNKKISSETINNIKQLKDPSKIADNIISHINASISEKQQIFETLDVKKRLNSVVKIMENEASIIGVEKRIRGRVKTQMEKTQREYYLNEQLKAIQKELGEIEDGKDETTSLKKSILKAKMPKEVEKKCMSELKKLKNMSPMSAEATVVRNYLDWMIDLPWFKKDKVDIDLNKALKILEEDHFGLEKVKERIIEFLAVQKRMDKIKGPILCLVGPPGVGKTSLGKSIAKATNRQFVRMSLGGVRDEAEVRGHRRTYIGSLPGKIIQMMKKAGT

SEQ ID NO: 170087 - protein, 786 aa, Unknown
  Bacterial polypetide isolated from the Sargasso Sea
MPLRNTVLFPQQVIPIYIGREKSLKLIEDLGSGDKHIVVVAQEDGSIEDPKPEDLYAYGTLGVVLKVFDMPDNSKSAIVQGIERVKLLSFGEPNPYYKVVVEKVSDQPIKDDLEVEALSKNLRNTFTELIQVAPNLTEEHSGMLSNIQKPSRLADRAVSLLTVPNQEKQDVLEELDVKSRVEKTITLLTREIQRIKLGEEIQTEVHDEISKTQREYYLREQMKAIKRELGEDEETVDIKELEDRVKAAKLPEEAEKVAMKELERLSRIPTQSPEYSVSRTYIEWLADLPWSNSSEDQIDVKKAEKILDEDHYGLEKVKERILEYLAVRNLKQERNPDKVVRGPILCFSGPPGVGKTSLGKSIARAIGREFVRMSLGGVRDEAEIRGHRRTYIGALPGRVIQSMKKAGTNNPVFMLDEIDKLGSDFRGDPSSAMLEVLDPEQNDAFSDHYLEVDFDLSKVMFITTANYQDAIPPALRDRMEILDFSGYIEDEKIKIAQQHLIPKQIEENGLNKKEVSLDKAAISELVRSYTRESGVRNLEREIANVLRKVARDLVEKTIKKIRVTSKKVIEYLGAPRFYSEIAERTTKPGVVTGLAWTAAGGDILFIESSKMKGKGGLTLTGQLGDVMKESATAALTYVRSHTDILGIPDDFHEKTDIHVHVPAGAIPKDGPSAGVSMFTSIVSLMTGKPVKAKVAMTGEITLRGNVLPIGGVKEKVTAAHRSGIKHIILPDHNKKDLEDIPEHIKKDLNFYFAKEIMDVIDVAIPGLNGRKKRTPRKTTSKVKKVS

SEQ ID NO: 170088 - protein, 377 aa, Unknown
  Bacterial polypetide isolated from the Sargasso Sea
ILLDEIDKVGNDYRGDPSSALLEALDPEQNTTFNDHYLEVDYDLSDVMFVTTANTLNILPPLLDRMEVIRLAGYTEDEKINIANKYLLPKQIKDNGVKEKEMNLGNDIIKEVIRSYTKESGVRNLEREISKIARKVVKKVVSGEEKEVNITTKNLPDFLGVPKFKSGELEAENRVGIVTGLAWTEYGGEILKIETVTMPGKGRMQITGKLGDVMQESVKAAKSFVRSKCLEYGIIPPLFEKKDFHIHVPEGATPKDGPSAGIGMVTSIVSSITNIPVKRDVAMTGEVTLTGQVLPIGGLKEKLLAAHRAGIKEVLIPKENEKDLVDMPKKIIDEIKITPVEFADEVLKIALTKELKKTEWVEVDMSKKDDKSQASIQ

SEQ ID NO: 170089 - protein, 291 aa, Unknown
  Bacterial polypetide isolated from the Sargasso Sea
NKLKIMGVKEGELDIKDGTIKELIRSYTKESGVRNLEREISKIARKSVKKIVNNETSKVEVDEKNLKDFLGIKKFKFGELENENKVGIVTGLAWTEFGGEILKIETVNMPGKGKMSITGKLGDVMQESVKAAKSFVRSKSLEYGIIPPIFEKKDFHIHVPEGATPKDGPSAGVAMVTSIVSSITKIPVNREIAMTGEVTVTGQVLPIGGLKEKLLAAHRAGIKTVLIPKDNEKDLVEIPKKVKEDIKLIPVETADQVIKIALTKELKKVEWNDVENISKSKRDEKTQASIQ

SEQ ID NO: 170090 - protein, 700 aa, Unknown
  Bacterial polypetide isolated from the Sargasso Sea
RVKINDFIDNSKYITCKFENLNDEIENIDELTILATTALKRLEKLSSINKKISNETISSIKELKEPSKIADNIASHLNTSISEKQQIFETIDVKKRLNAVIKIMENETSIIGVEKRIRGRVKTQMEKTQREYYLNEQLKAIQKELGEIEDGKDETSNLNKAILKAKMPKEVQKKCMAELKKLRSMSPMSAEATVVRNYLDWMIDLPWYKKDKVDIDLNKALKTLDEDHFGLEKVKERIVEFLAVQKRMEKIKGPILCLVGPPGVGKTSLGKSIAKATNRQFVRMSLGGIRDEAEVRGHRRTYIGSLPGKIIQLMKKAGTKNPLILLDEIDKVGNDYRGDPSSALLEALDPEQNTNFNDHYLEVDYDLSDVMFVTTANTLNILPPLLDRMEVIRIPGYTEDEKINIANKYLLPKQIKENGVKNNELDLKDGTIKEIIRSYTRESGVRNLEREISKITRKVVKKVVNSEDTKVLVNPNNINDFLGVKKFKYGEVETENKVGIVTGLAWTEFGGEILKIETVNMPGKGRMQITGKLGDVMQESVKAAKSFVRSKSLEYGIIPPIFEKKDFHIHVPEGATPKDGPSAGIAMVTSIVSSVTNNPVNREIAMTGEVTITGQVLAIGGLKEKLLAAHRAGIKHVLIPKDNEKDLTDIPEKVKNDIKITPVKHADEVLKVALVKELKKIEWADVDLTKKEEKSQASIQ

SEQ ID NO: 170091 - protein, 498 aa, Unknown
  Bacterial polypetide isolated from the Sargasso Sea
MNFLGHKKSEVDIDLKKALDILDKDHFGLEKVKERIIEFLAVQKRMEKIKGPILCLVGPPGVGKTSLGKSIAKATNREFVRMSVGGMRDEAEIRGHRRTYIGSLPGKIIQMMKKAGTKNPLILLDEIDKIGNDYRGDPSSALLEALDPEQNTTFNDHYLEVDYDLSDVMFVTTANTLNILPPLLDRMEVIRLAGYTEDEKISIANKYLLPKQIKDNGVKEKEMKLDDDIIKEVIRGYTKESGVRNLEREISKLARKVVKKIVAGEEKEVGINNKNLSDFLGVPKFKFGELEAENRVGIVTGLAWTEYGGEILKIETVTMPGKGRMQITGKLGDVMQESVKAAKSFVRSKCLEYGIIPPIFEKKDFHIHVPEGATPKDGPSAGIGMVTSIVSSITSIPVRRDVAMTGEVTLTGQVLPIGGLKEKLLAAHRAGIKEVLIPKENEKDLVDMPKKIIDDIKITPVEYADQVIKIALTKELKPTEWVEVDISKKDDKSQASIQ

SEQ ID NO: 170092 - protein, 562 aa, Unknown
  Bacterial polypetide isolated from the Sargasso Sea
ASHLSIKLSDKQEILEAIDLTERFEKITNFIQAELDVMQVEKKIRGRVKNQMEKTQREYYLNEQMKAIQKELGESEDGKDDVQEYEEKIEKTKLSKEAREKCYSEIKKLKSMSPMSAESSVIRNYLDWILSIPWSKKTKVKKDIKYAESVLNEDHYGLEKVKERILEYLAVQQRIKKMKGPILCLVGAPGVGKTSLGKSIARATGRKFVRMSLGGVRDEAEIRGHRRTYIGSLPGKVLQMMKKAGSSNPLFLFDEIDKLGADYRGDPSSALLEVLDPEQNNTFNDHYLEVDYDLSDTMFITTANTLRMPPALLDRMEIIRIAGYTEDEKVEIVKQHLAPQMLEKHGLKEGELILNDSAIIGLIRYYTREAGVRSLERELANLARKTVKKIVAGDFTSLTVDKNNLQDFAGVRKFKFGEIDNDDQVGIVTGLAWTEVGGDILPIESVIMPGKGRMTITGKLGDVMKESIQAAKSYVRSRCIEFGIKPTIFPLRDIHIHVPEGAIPKDGPSAGLGMVTSIVSVLTGIPVRNDIAMTGEVTLRGKALGIGGLKEKLLAALRAGTK

SEQ ID NO: 170093 - protein, 530 aa, Unknown
  Bacterial polypetide isolated from the Sargasso Sea
DKCKNELKKLKNMSPMSAEATVIRNYLDWVLSIPWNTPSVISKNINKAKNILDSDHYSLEKVKERIIEYLAVQKRMNKIKGPILCLVGPPGVGKTSLGKSIATATGRNFVRMSLGGIRDEAEIRGHRKTYIGSMPGRFIQAMKKSKSSNPLILLDEIDKLGSDWRGDPSSALLEVLDPEQNNKFNDHYLELDYDLSDVMFVCTANTLNIPLPLMDRMEIIRIAGYTEKEKTEIAKRFIVPKQLIVHGLKKNEVSFTSKTINIIIRHYTREAGVRNLEKEVAKICRKTVKILETTKNSKIILDKKNINKFLGVEKFRNNEIDKKNLVGITNGLAWTEVGGEILSVEVLISIGKGKLTITGKLGDVMKESIQAAVSYVRSQSLSLGINPKVFDKTDIHVHVPEGATPKDGPSAGVAIFNSLVSSLTAIKVKKDVAMTGEITLRGRVLPIGGLKEKLYAAVRAGIKTVIIPEENKKDLNELDKEILKNIKIFPISEAKSILQHSLAKKIKPVNTSESETIKSIESSIQRDNLR

SEQ ID NO: 170094 - protein, 416 aa, Unknown
  Bacterial polypetide isolated from the Sargasso Sea
IKGPILCLVGPPGVGKTSLGKSIAKSTNRQFVRMSLGGVRDEAEIRGHRRTYIGSLPGKIIQMMKKAGTKNPLILLDEIDKVGNDYRGDPSSALLEALDPEQNTSFNDHYLEVDYDLSDVMFVTTANTLNILPPLLDRMEVIRIPGYTEDEKVNISNRFLLPKQIKENGVKDGELDIKEGTIKEIIRSYTRESGVRNLEREISKITRKAVKKVVNNETDKVEVNENNVSDYLGVKKFKYGEKDEEDRVGVVTGLAWTEFGGEILKIETVNMPGKGRMQITGKLGDVMQESVKAAKSFVRSKSLDFGVIPPTFEKKDFHIHVPEGATPKDGPSAGIAMVTSIVSSITDIPVNRQIAMTGEVTITGQVLQIGGLKEKLLAAHRAGINHVLIPKDNEKDLVDIPKKVKEDIKITPSKSC

SEQ ID NO: 170095 - protein, 584 aa, Unknown
  Bacterial polypetide isolated from the Sargasso Sea
IESQLDVVDVEKKVRDRVKKQMEKSQREYYLNEQIKAAQKELGEIGEEGDELENLEKKIHEVGMTKEALKKAKSELAKFKHMAPSSAEASVVRTYLDCLVDVPWKKKSKVKTDIKASMEILEEDHYGLEEVKERIVEYLAVQKRVKSMKAPVLCLVGPPGVGKTSLGESIARATNREFVRMSLGGVRDESEIRGHRRTYIGSMPGKIIQKLSKVGVKNPLFLLDEIDKIGMDHRGDPASALLEVLDPEQNNTFSDHYLEVDYDLSEVMFVCTANSLNIPTPLLDRMEIIRIPGYIEDEKINIAEKYLLPKQMNRNGLKDEEIKLNKNVILSLIRYYTREAGVRGLERQIARILRKVVKERLVENSTKQKPTSISSKNLEKYSGVKKFKYGVAEKDNAVGQVTGLAWTEVGGELLTIEASNIDGKGRVIKTGSLGDVMQESIQAALTVVRSRAESLGIQPNFYEKYDVHIHVPEGATPKDGPSAGGAMAISLISIFTGIPVRADTAMTGEITLRGQILKIGGLKEKLLAAKRGGIRNVIIPKENEPDLQEIPKQITKSLNIIPVEWIDEVISAALVEEPTPNTKK

SEQ ID NO: 170096 - protein, 459 aa, Unknown
  Bacterial polypetide isolated from the Sargasso Sea
KVKERIIEYLAVRNLKQKKDPSGTVRGPILCFGGPPGVGKTSLGKSIARAMGREFVRLSLGGVRDEAEIRGHRRTYIGALPGRVIQSIKKAGKNNPIFMLDEIDKLGSDFRGDPSSALLEVLDPEQNHSFSDHYLEVDFDLSNVMFIATANYQDAIPPALRDRMEILDFSGYIEDEKIQIAKRHILPKQIEENGLTKKEVSFDMPSLKELVRSYTREAGVRNLEREVANVIRKVARDLVESKNKSIKITKKKVGDYLGAPRFHSELAERSTKPGVVTGLAWTAAGGDILFVESTRMTGKGKLTLTGQLGDVMKESATAALTFVRANSDNLGIESDFNDKSDIHVHVPAGAIPKDGPSAGVSMVTSLVSLLTGVSVKEKVAMTGEITLRGNVLPIGGVKEKVTAAHRSGIKEVILPDHNKKDLEDVPPNVAKDMVFHFAKEIKDVLKVAVPDINSIVKKI

SEQ ID NO: 170097 - protein, 358 aa, Unknown
  Bacterial polypetide isolated from the Sargasso Sea
EALDPEQNTAFNDHYLEVDYDLSDVMFVTTANTLNILPPLLDRMEVIRIPGYTEDEKINIANKYLLPKQVKENGVKEGELNLEDGTIKEIIRSYTRESGVRNLEREISKVTRKVVKKVVSGEVDKVQVDDKNIPDFLGIKKFKFGEVEDKDKTGIVIGLAWTEVGGEILKIETVNMPGKGRMQITGKLGDVMQESVKAAKSYVRSKSLEYGIIPPFFEKKDFHIHVPEGATPKDGPSAGIAMVTSIVSSITNIPVNREIAMTGEVTITGQVLQIGGLKEKLLAAHRAGVKKVLIPKENEKDLVDIPKKVREDIKIIPVETADEVLKIALTKELKPVEWTEVDKISEGKKDDKSQASIQ

SEQ ID NO: 170098 - protein, 439 aa, Unknown
  Bacterial polypetide isolated from the Sargasso Sea
GDEIQTEVHDEIAKTQREYYLREQMKAIQKELGEDEGTVELKELEDRIKSAKMPEESELVAMKELDRLSRIPTQSPEYNVSRTYIEWIADLPWSKSSKDRIDIKEALKILDEDHYGLDKVKERIIEYLAVRNLKQKRNPDGNVRGPILCFGGPPGVGKTSLGKSISRAMGREFIRLSLGGVRDEAEIRGHRRTYIGALPGRIIQNIKKAGTNNPVFMLDEVDKLGSDFRGDPSSALLEVLDPEQNHSFNDHYLELDFDLSKVMFIATANNYGNIPPALRDRMEILEFSGYILDEKVQIAKRHLIPKQIKENGLKKTEVTLDANSIKELISAYTREAGVRQLERQIANVLRKVARDIVETKKKLIKVTKTKVHDLLGASRFHSELAERSTEPGVVTGLAWTAAGGDILFIESTKMQGKGKLTLTGQLGEVMKESATAGLT

SEQ ID NO: 170099 - protein, 394 aa, Unknown
  Bacterial polypetide isolated from the Sargasso Sea
MFVGRDKSITALNEVMKDNKKIILVTQKNSEVDDPKKNDIFSYGCESNILQLLKLPDGTVKVLVEGIKRVKIIEFKDDEKFISCSFEYQKEIIEKNEDLLPLALTAVRRLEKLTSINKKISTETINNIKQLKDPSKISDNIASHLNCTISEKQQLFENLDVKKRLNNIIKIMENETSIIGVEKRIRGRVKTQMEKTQREYYLNEQLKAIQKELGEIEDGKDETTNLKKSIQKSKMPKEVEKKCMAELKKLKNMSPMSAEATVVRNYLDWMTDIPWYKKDKVDINLNKALKTLDEDHYGLEKVKERIIEFLAVQKRMEKIKGPILCLVGPPGVGKTSLGKSIAKATNRQFIRMSLGGVRDEAEIRGHRRTYIGSLPGKIIQMMKKAGTKNPLFLL

SEQ ID NO: 170100 - protein, 338 aa, Unknown
  Bacterial polypetide isolated from the Sargasso Sea
VQKRVKSMKAPVLCLVGPPGVGKTSLGESIARATNRKFVRMSLGGVRDESEIRGHRRTYIGSMPGKIVQKLSKVGVKNPLFLLDEIDKIGMDHRGDPASALLEVLDPEQNNTFSDHYLEVDYDLSEVMFVCTANSLNIPTPLLDRMEIIRIPGYIEDEKVNIANKYLLPKQMSRNGVKDNEIKLNKEVILALIRYYTREAGVRGLERQIAKILRKVVKERLIAKKPNSKATSITARNLEKYSGVRKFKYGIAEKDNAVGQVTGLAWTEVGGELLTIEASNIDGKGRVIKTGSLGDVMQESIQAAMTVVRSRADSLGIKPNFYEKYDIHIHVPEGATPK

SEQ ID NO: 170101 - protein, 697 aa, Unknown
  Bacterial polypetide isolated from the Sargasso Sea
RRLFAVAQTENVDDPTPEYLYTIGTVVRIIQTHRVRGGVQLLVQGEGRAQAISYDEEGEAMLQAVLLEMETMEPRANQDPGFQALDQELRDRAAELGTRRGVPAEALNQLIQGVDESGPFADLVAFYLELETPDKQELLELLDDEERMRACLLAVERELARLDAQEDIQAKVQSELGERQREMLLREQLKAIQKELGEEEERDDVEEMRSRISELELSEEQRSEVDRELRRLERTSPQSAEYQVIRTFLEWVTELPWNERSEEEIDLETAEQILNDDHYGLEDVKDRVLEFLAVRKLALDRAAAKGKEAEDDAAEGGAVSAGRGPILLFVGPPGVGKTSIAQSIARSLGREYVRISLGGARDEADIRGHRRTYVGAMPGRIIQGMRQAKSKNPVFLLDEVDKLGVSFQGDPSSALLEVLDPAQNSTFVDNYLGIPFDLSEVLFVATANYRDRIPGPLLDRMERVDFSGYTEAEKLEIVKRYLLRRQREENSLTEDELHMRDEAILTIVQNYTREAGVRQLEREVGKFARKVARRIAGGKLKKIDASAADVREILGRPRVHPERMAEHDTLGVATGMFYTPMGGDIMFVEASVMPGEAGFVLTGQLGDVMKESGRAALSFSKANAKHLGIPEDSLNGREVHIHVPAGAIPKDGPSAGITMATALVSAVSGRKVRRDVAMTGELTLTGRVLPIGGVKEK

SEQ ID NO: 170102 - protein, 785 aa, Unknown
  Bacterial polypetide isolated from the Sargasso Sea
NIVVFPNMVVPLFVGRDKSINALEQVMDKDQELLFLSQKNSEVDDPSEKDLFKLGTRGKILQLLKLPDGTVKVLVEGLARCKVKKIEFTADYITADIEEFENSEVISDTIKALGRSVVSKYETYANINNKTSSEVLTSVKDIEDENKLADTVASQIAINIQEKQKILEEIDLEKRLNMILSYIEGELSVLQVEKKIRRRVKNQMEKTQKEYYLNEQMKAIQKELEDGEGGASEDIAELTEKINKTKLSKEAKEKAYNELKKLKQMSPMSAEATVVRNYLDWLLDIPWGKKKRIKKDINKSQEILDKDHYGLEKVKDRITEYLAVQNRSSKVKGPILCLVGPPGVGKTSLGKSIAAATGREFIRMSLGGVRDEAEIRGHRRTYIGSMPGRIIQALKKVKTTNPVFLLDEIDKLGQDFRGDPASALLEVLDPEQNNAFNDHYLEVDYDLSQVMFVTTANTMNIPGPLLDRMEIIRIAGYTEEEKLEIAKRHLIEKVKSNNALTNKEFKISDEVIRSVIQNYTREAGVRNLERELNSLGRKAVKEISQNKSDSLNVSSDNISEYLGVKKFRYGKKENDDLVGVVTGLAWTEVGGDILNVEAVMVPGQGKIRTTGKLGDVMKESIDAASSFVRSRAVNYGIEPPIFQRKDIHVHVPEGATPKDGPSAGVAMIIAIISVMAGIPVKNDVAMTGEMSLRGRVLPIGGLKEKLLAALRSGIKTVLIPSENDRELSEVPDNIKDKLDIKLVSTIDEALELALVRKPDAIDWDEDAWLAEQRNLSNNNPNLTAH

SEQ ID NO: 170103 - protein, 389 aa, Unknown
  Bacterial polypetide isolated from the Sargasso Sea
KKAGTKNPLFLLDEVDKIGNDYRGDPSSALLEALDPEQNTAFNDHYLEVDYDLSDVMFVTTANTLNILPPLLDRMEVIRIPGYTEDEKINIANKYLLPKQVKENGVKEGELNLEDGTVKEIIRSYTRESGVRNLEREISKVTRKVVKKVVSGEVEKVKVNDKNIPDFLGIKKFKFGEVEDKDKTGIVIGLAWTEVGGEILKIETVNMPGKGRMQITGKLGDVMQESVKAAKSYVRSKSLEYGIIPPFFEKKDFHIHVPEGATPKDGPSAGIAMVTSIVSSITNIPVNREIAMTGEVTITGQVLQIGGLKEKLLAAHRAGVKKVLIPKENEKDLADIPKKVREDIKIIPVETADEVLRIALTKELKPVEWTEVDKISEGKKDDKSQASIQ

SEQ ID NO: 170104 - protein, 472 aa, Unknown
  Bacterial polypetide isolated from the Sargasso Sea
VKERIVEYLAVQKRVKSMKAPVLCLVGPPGVGKTSLGESIARATNRKFVRMSLGGVRDESEIRGHRRTYIGSMPGKIIQKLSKVGVKNPLFLLDEIDKIGMDHRGDPASALLEVLDPEQNNTFSDHYLEVDYDLSEVMFVCTANSLNIPTPLLDRMEIIRIPGYIEDEKINIAEKYLLPKQMKRNGLKDEEIKLNKNVILSLIRYYTREAGVRGLERQIARILRKIVKERLVDSSTKQKPTSISSKNLEKYSGVKKFKYGVAEKDNAVGQVTGLAWTEVGGELLTIEASNIDGKGRVIKTGSLGDVMQESIQAALTVVRSRAESLGIQPNFYEKYDVHIHVPEGATPKDGPSAGGAMAISLISIFTGIPVRADTAMTGEITLRGQILKIGGLKEKLLAAKRGGIKNVIIPKENEPDLQEIPKQITKSLNIIPVEWIDEVISAALVEEPTPNNKKIKSQKSKTSRKSESKQAH

SEQ ID NO: 170105 - protein, 193 aa, Unknown
  Bacterial polypetide isolated from the Sargasso Sea
HIEALKLPGKGRMKTTGKLGDVMKESIDAANSYVRSISAEVGIKPPKFDKTDIHVHVPEGATPKDGPSAGLAMVTSIVSVLTGIPVRKDLAMTGEVTLRGNALAIGGLKEKLLAALRGGIKTVLIPEENEKDLVDIPDNVKSSLEIIAVKNVSEVLKIALTESPSPIEWDEAAEEAAAAKALEEQNQSQTIKH

SEQ ID NO: 170106 - protein, 438 aa, Unknown
  Bacterial polypetide isolated from the Sargasso Sea
QPTENSIFKTGVLANVLQLLKLPDGTVKVLVEGQTRVLITDFIENELFFEAKCEKIDETLGDEKANIALLKTVSQEFDRYAKVKKNIPDEAITTIAGTNDPAKLSDLVSGHLGIEIDQKQDLLETLSVSERLEKVFSLMQGEMGVLKVEKKIKTRVKSQMERTQREYYLNEQMKAIQKELGDGEDGQNEAAEIGELINNTKFTKEAREKADAELKKLKNMSPMSAEATVVRNYLDWLLSIPWGIKSRVKKDLYKAETVLDRDHYSLEKVKERIIEYLAVQKRSSKLKGPIMCLVGPPGVGKTSLGKSVAKATGREFIRISLGGVRDESEIRGHRRTYIGSMPGKIIQALKKAKTTNPLILLDEIDKMGQDFRGDPASAMLEVLDPEQNSTFTDHYLEVEYDLSNVMFITTANSYNMPAPLLDRMEIIPLAGYTEDEKN

SEQ ID NO: 170107 - protein, 151 aa, Unknown
  Bacterial polypetide isolated from the Sargasso Sea
MLTKKQKNLLLFINKKIRSTGVSPSYEEMKNSLNLKSKSGIHRLISALEERGFIKRLAHKARALEVVKLPENASAHDLFNSFTPSVIKGGLDKNSAKSTKISVLGSIAAGTPIEAIQQEVDKVNLPADFNKNDDHFGLKVKGDSMIEAGIN

SEQ ID NO: 170108 - protein, 233 aa, Unknown
  Bacterial polypetide isolated from the Sargasso Sea
MLTRKQLDLLNYINKHLNKDGIPPSFDEMKEALDLRSKSGIHRLITALEERGFIRRLAHRARAIEIVKLPDSLETNNKVTKISRVSTINPASNEDVNPRLISDSVHASELPVMGRIAAGVPIEAISQISHNVAVPRHMLRNGGDHYALEVKGDSMIEEGINDGDIVVIKETKTAVNGDIVVALVKDSEATLKRFFYRGNAIALEAANPAYETRILPSGDVKVQGRLVGLIRSY

SEQ ID NO: 170109 - protein, 205 aa, Unknown
  Bacterial polypetide isolated from the Sargasso Sea
MLTKKQKNLLIFINKKIRSSGISPSYEEMKNSLNLKSKSGIHRLISALEERGFVKRLAHKARALEVVKLPENASANDIFNTFTPSVIKGGLDKNDNKSTDVSVLGSIAAGTPIEAIQQEVDRVALPEDLQNNGEHYGLKVKGDSMIEAGIADGDTVIIKKVSNVDNGQIAVVLIDDQEATLKRVRKKGNTIALEAANRNYGTKIT

SEQ ID NO: 170110 - protein, 117 aa, Unknown
  Bacterial polypetide isolated from the Sargasso Sea
IAAGTPIEALRDSSRSFDVPPGMLGRGDHYALEIEGDSMIEAGILDGDVVLIKRTDTADNGEIVVALVEGHEATLKRLRRKGASIALEPANAAHETRIFGPDQVRVQGRLVGLVRKY

SEQ ID NO: 170111 - protein, 160 aa, Unknown
  Bacterial polypetide isolated from the Sargasso Sea
MLTKKQKNLLMFINKKLRSSGVSPSYEEMKQSLNLKSKSGIHRLISALEERGFIKRLPHKARALEVVKLPETASANDIYNSFSPSVIKGGLDENNTVNESPEIPVLGKIAAGTPIEAIQNEVSKIPLPANIEKNGEFFGLKVQGDSMIEAGIYEGDTGCI

SEQ ID NO: 170112 - protein, 188 aa, Unknown
  Bacterial polypetide isolated from the Sargasso Sea
KSKSGIHRLISALEERGFIKRLAHKARALEVVKLPETASANDIYNSFSPSVIKGGLDDEGMEKNEIPVLGKIAAGTPVEAIQNEVSRVPLPNNIEKNGEYFGLKVQGDSMIEAGISEGDTVIVKKTDTAENGKIVVALIDDHEAMLKRIRRKGKTIALESANKNYETKIFGPDRVKVQGVLVSLYRNF

SEQ ID NO: 170113 - protein, 235 aa, Unknown
  Bacterial polypetide isolated from the Sargasso Sea
MLTRKQQELLYFIHERMKETGIPPSFDEMKEALDLASKSGIHRLITALEERGFIRRLPNRARALEILRMPDSAIGQQPRRGFSPSVIEGSLGKKQEEPKAPASANDGGSAGIPVMGRIAAGVPISAIQENTHQITVPAEMLGAGEHYALEVQGDSMIEAGIFDGDTVIIRNIATASPGDIVVALVNDEEATLKRFRRKGASIALEAANPAYETRIFSANQVKVQGKLVGLIRRYH

SEQ ID NO: 170114 - protein, 205 aa, Unknown
  Bacterial polypetide isolated from the Sargasso Sea
MLTKKQKNLLLFINKKLRSSGVSPSYEEMKASLNLKSKSGIHRLISALEERGFIKRLAHKARALEVIKLPETASANDIYNSFSPSVIKGGLDDENLSSDDAEVPVLGKIAAGTPVEAIQNEVSRIPLPSNLEKNGDYFGLKVQGDSMIEAGIHEGDTVIIKRTDTADNGKIVVALIDEHEAMLKRIRKKGKVVALESANKNYETK

SEQ ID NO: 170115 - protein, 170 aa, Unknown
  Bacterial polypetide isolated from the Sargasso Sea
MLTKKQKNLLLFINKKLRSSGVSPSYEEMKHSLNLKSKSGIHRLISALEERGFIKRLAHKARALEVIKLPETASANDIYNSFSPSVIKGGLDESNSKNKNADIAVLGSIAAGTPIEAIQNEVTRIPLPNNIEKNGEFFGLKVQGDSMIEAGINDGDTVIIKKTDTADNGK

SEQ ID NO: 170116 - protein, 214 aa, Unknown
  Bacterial polypetide isolated from the Sargasso Sea
MLTKKQKNLLIFINKKIRSSGISPSYEEMKNSLNLKSKSGIHRLISALEERGFVKRLAHKARALEVIKLPENASANDIFNTFTPSVIKGGLDKNNNKSTDVSVLGSIAAGTPIEAIQQEVDRVALPEDLQNNGEHYGLKVKGDSMIEAGIADGDTVIIKKVSNVDNGQIAVVLIDDQEATLKRVRKKGNTIALEAANRNYGTKIYAANRIKIQG

SEQ ID NO: 170117 - protein, 153 aa, Unknown
  Bacterial polypetide isolated from the Sargasso Sea
MLTKKQKNLLLFINKKLRSSGVSPSYEEMKASLNLKSKSGIHRLISALEERGFIKRLAHKARALEVIKLPETASANDIYNHFSPSVIKGGLDSEKNLSSETEVPVLGKIAAGTPVEAIQNEVSRIPLPANLEKNGDYFGLKVQGDSMIEAGIN

SEQ ID NO: 170118 - protein, 188 aa, Unknown
  Bacterial polypetide isolated from the Sargasso Sea
MLTKKQKNLLLFINKKLRSTGVSPSYEEMKHSLNLKSKSGIHRLISALEERGFIKRLAHKARALEVIKLPETASANDIYNSFSPSVIKGGLDETNSLNDDKDIPVLGSIAAGTPIEAIQNEVTRIPLPENIEKNGEFFGLKVSGDSMIEAGINDGDTVIIKKTDTAENGKIVVALIDDHEAMLKRLRR

SEQ ID NO: 170119 - protein, 224 aa, Unknown
  Bacterial polypetide isolated from the Sargasso Sea
MLTKKQKNLLIFINKKIRSSGISPSYEEMKNSLNLKSKSGIHRLISALEERGFVKRLAHKARALEVVKLPENASANDIFNSFTPSIIKGGLDKSKSNSSKVSVLGSIAAGTPIEAIQHEVDKVALPEDLQKNGEYFGLKVKGDSMIEAGINDGDTVIIKKTSTADTGQIAVVLIDEQEATLKRIRKKGNTIALEAANKNYDTKIYASNRIKIQGRLISLYRNFH

SEQ ID NO: 170120 - protein, 211 aa, Unknown
  Bacterial polypetide isolated from the Sargasso Sea
MLTKKQKNLLLFINKKLRSSGVSPSYEEMKESLNLKSKSGIHRLISALEERGFIKRLAHKARALEVIKLPETASANDIYNSFSPSVIKGGLDETNSPNKDKDIPVLGSIAAGTPIEAIQNEVTRIQLPENIEKNGEFFGLKVNGDSMIEAGINDGDTVIIKKTDTAENGKIVVALIDDHEAMLKRLRRKGKTVALESANRNYETKIFGPDR

SEQ ID NO: 170121 - protein, 193 aa, Unknown
  Bacterial polypetide isolated from the Sargasso Sea
NLKSKSGIHRLISALEERGFIKRLAHKARALEVIKLPETASANDIYNSFSPSVIKGGLDDANENNNEGSEIPVLGSIAAGTPIEAIQNEVSRIPLPSNIEKNGEFFGLKVKGDSMIEAGINDGDTVIVKKTEIADNGKIVVALIDDNEAMLKRIRRKGKTVALESANRNYETKIFGPDRVKVQGILVSLYRNF

SEQ ID NO: 170122 - protein, 220 aa, Unknown
  Bacterial polypetide isolated from the Sargasso Sea
QKNLLLFINKKLRSSGVSPSYEEMKESLNLKSKSGIHRLISALEERGFIKRLAHKARALEVVKLPETASANDIYNSFSPSVIKGGLDEDNQNSDSKEVPVLGKIAAGTPIEAIQNEVSRVPLPSNIEKNGEYFGLKVEGDSMIEAGINEGDTVIVKKTNTADNGKIVVALIDDHEAMLKRIRRKGKTVALESANKNYETKIFGPDRVKVQGILVSLYRNF

SEQ ID NO: 170123 - protein, 220 aa, Unknown
  Bacterial polypetide isolated from the Sargasso Sea
KQKNLLIFINKKIRSSGISPSYEEMKNSLNLKSKSGIHRLISALEERGFVKRLAHKARALEVVKLPENASANDIFNTFTPSVIKGGLDKNNNKSTDVSVLGSIAAGTPIEAIQQEVDRVALPEDLQNNGEHYGLKVKGDSMIEAGIADGDTVIIKKVSNVDNGQIAVVLIDDQEATLKRVRKKGNTIALEAANRNYGTKIYAANRIKIQGKLVSLYRNFH

SEQ ID NO: 170124 - protein, 224 aa, Unknown
  Bacterial polypetide isolated from the Sargasso Sea
MLTKKQKNLLIFINKKIRSSGISPSYEEMKNSLNLKSKSGIHRLISALEERGFVKRLAHKARALEVVKLPENASANDIFNTFTPSVIKGGLDKNNNKSTDVSVLGSIAAGTPIEAIQQEVDRVALPEDLQNNGEHYGLKVKGDSMIEAGIADGDTVIIKKVSNIDNGQIAVVLIDDQEATLKRVRKKGNTIALEAANRNYGTKIYAANRIKIQGKLVSLYRNFH

SEQ ID NO: 170125 - protein, 225 aa, Unknown
  Bacterial polypetide isolated from the Sargasso Sea
MLTKKQKNLLLFINKKLRSSGVSPSYEEMKESLNLKSKSGIHRLISALEERGFIKRLAHKARALEVIKLPETASANDIYNNFSPSVIKGGLDEVKNLSTETEVSVLGKIAAGTPVEAIQNEVSRIPLPSNLEKNGDYFGLKVQGDSMIEAGINEGDTVIIKRTDTADNGKIVVALIDEHEAMLKRIRKKGKVVALESANKNYETKIFGPDRVKVQGVLVSLYRNF

SEQ ID NO: 170126 - protein, 195 aa, Unknown
  Bacterial polypetide isolated from the Sargasso Sea
ESLNLKSKSGIHRLISALEERGFIKRLAHKARALEVIKLPETASANDIYNSFSPSVIKGGLDAGKPISDEAEVPVLGKIAAGTPVEAIQNEVSRIPLPSNLEKNGDYFGLKVQGDSMIEAGINEGDTVIIKRTDSADNGKIVVALIDEHEAMLKRIRKKGKVIALESANKNYETKIFGPDRVKVQGVLVSLYRNF

SEQ ID NO: 170127 - protein, 191 aa, Unknown
  Bacterial polypetide isolated from the Sargasso Sea
MLTKKQKNLLLFINKKLRSSGVSPSYEEMKNSLNLRSKSGIHRLISALEERGFIKRLAHKARALEVIKLPETASANDLYNSFSPSVIKGGLDEDNLKNNDGSDIPVLGNIAAGTPIEAIQNEVSRIPLPSNIEKNGEYFGLKVSGDSMIEAGINDGDTVIVKKTDIADNGKIVVALIDDNEAMLKRIRRKG

SEQ ID NO: 170128 - protein, 206 aa, Unknown
  Bacterial polypetide isolated from the Sargasso Sea
MLTKKQKNLLMFINKKLRSSGVSPSYEEMKESLNLKSKSGIHRLISALEERGFIKRLAHKARALEVVKLPETASANDIYNSFSPSVIKGGLDEEGVETNEIPVLGKIAAGTPVEAIQNEVSRVPLPNNLEKNGEYFGLRVQGDSMIDAGISEGDTVIVKKTDTAENGKIVVALIDDHEAMLKRIRRKGKTIALESANKNYETKIFG

SEQ ID NO: 170129 - protein, 225 aa, Unknown
  Bacterial polypetide isolated from the Sargasso Sea
MLTKKQKNLLLFINKKLRSSGVSPSYEEMKASLNLKSKSGIHRLISALEERGFIKRLAHKARALEVIKLPETASANDIYNSFSPSVIKGGLDDENLSSDDAEVPVLGKIAAGTPVEAIQNEVSRIPLPSNLEKNGDYFGLKVQGDSMIEAGIHEGDTVIIKRTDTADNGKIVVALIDEHEAMLKRIRKKGKVVALESANKNYETKIFGPDRVKVQGVLVSLYRNF

SEQ ID NO: 170130 - protein, 198 aa, Unknown
  Bacterial polypetide isolated from the Sargasso Sea
EMKQSLNLKSKSGIHRLISALEERGFIKRLAHKARALEVIKLPETASANDIYNNFSPSVIKGGLDKDQINPEELELPVLGKIAAGTPVEAIQNEVARIPLPNNLEKNGDYFGLKVQGDSMIEAGIHEGDTVIIKRTDTADNGKIVVALIDEHEAMLKRIRKKGKVVALESANRNYETKIFGPDRVKVQGVLVSLYRNF

SEQ ID NO: 170131 - protein, 166 aa, Unknown
  Bacterial polypetide isolated from the Sargasso Sea
MLTKKQKNLLLFINKKLRSSGVSPSYEEMKESLNLKSKSGIHRLISALEERGFIKRLAHKARALEVIKLPETASANDIYNSFSPSVIRGGLDESSNRNNSDENEIPVLGKIAAGTPVEAIQNEVSRIPLPSNIEKNGEFFGLKVQGDSMIEAGINDGDTVIVKKVD

SEQ ID NO: 170132 - protein, 225 aa, Unknown
  Bacterial polypetide isolated from the Sargasso Sea
MLTKKQKNLLLFINKKLRSSGISPSYEEMKESLNLKSKSGIHRLISALEERGFIKRLAHKARALEVVKLPETASANDIYNSFSPSVIKGGLDETVNNENGSEIPVLGKIAAGTPVEAIQNEVARIPLPENIEKKGEYFGLKVQGDSMIEAGINDGDTVVIKKTDTADNGKIVVALIDDHEAMLKRIRRKGKTVALESANRNYETKIFGPDRVKVQGVLVSLYRSF

SEQ ID NO: 170133 - protein, 185 aa, Unknown
  Bacterial polypetide isolated from the Sargasso Sea
ALEERGFIKRLANRARAIEIVKIPNSPEFKSTTLSDMPSSTRPVVSANSPTAPIESVYANEIPVMGRIAAGVPVEAISEISHNVAVPGQILRGGGDHFALEVKGDSMINAGINDGDVVVIKETNRAMNGDIVVALIEDQEATLKRFFVRGEAIALEAANPAYETRTFPHEKIKVQGRLVGLLRTY

SEQ ID NO: 170134 - protein, 225 aa, Unknown
  Bacterial polypetide isolated from the Sargasso Sea
MLTKKQKNLLLFINKKLRSSGVSPSYEEMKQSLNLKSKSGIHRLISALEERGFIKRLAHKARALEVIKLPETASANDIYNSFSPSVIKGGLDEEQTTSDEVEVPVLGKIAAGTPVEAIQNEVSRIPLPNNLEKNGDYFGLKVQGDSMIDAGIHEGDTVIIKRTDTADNGKIVVALIDEHEAMLKRIRKKGKVVALESANRNYETKIFGPDRVKVQGVLVSLYRNF

SEQ ID NO: 170135 - protein, 196 aa, Unknown
  Bacterial polypetide isolated from the Sargasso Sea
MLTKKQKNLLLFINKKIRSTGVSPSYEEMKNSLNLKSKSGIHRLISALEERGFIKRLAHKARALEVLKLPETASANDIYNTFSPSVIKGGLDSDNTKKSVHEIPVLGRIAAGTPIEAIQNEVSRVTIPEELSKGGDHFGLKVSGDSMIEAGINDGDTVIVKKSSTANNGQIVVALIDDHEAMLKRIRKKGKVVALE

SEQ ID NO: 170136 - protein, 225 aa, Unknown
  Bacterial polypetide isolated from the Sargasso Sea
MLTKKQKNLLLFINKKLRSSGVSPSYEEMKQSLNLKSKSGIHRLISALEERGFIKRLAHKARALEVIKLPETASANDIYNSFSPSVIKGGLDEEQTNSDEIEVPVLGKIAAGTPVEAIQNEVSRIPLPNNLEKNGDYFGLKVQGDSMIDAGIHEGDTVIIKRTETADNGKIVVALIDEHEAMLKRIRKKGKVVALESANRNYETKIFGPDRVKVQGVLVSLYRNF

SEQ ID NO: 170137 - protein, 225 aa, Unknown
  Bacterial polypetide isolated from the Sargasso Sea
MLTKKQKNLLLFINKKLRNSGVSPSYEEMKQSLNLKSKSGIHRLISALEERGFIKRLAHKARALEVVKLPETASANDIYNSFSPSVIKGGLDEEINNSDDIEVPVLGKIAAGTPVEAIQNEISRIPLPNNLEKNGDYFGLKVQGDSMIEAGIHEGDTVIIKRTDTADNGKIVVALIDEHEAMLKRIRKKGKVVALESANRNYETKIFGPDRVKVQGVLVSLYRNF

SEQ ID NO: 170138 - protein, 212 aa, Unknown
  Bacterial polypetide isolated from the Sargasso Sea
MLTKKQKNLLLFINKKLRSSGVSPSYEEMKQSLNLKSKSGIHRLISALEERGFIKRLAHKARALEVIKLPETASANDIYNSFSPSVIKGGLDDEKPMSDDIEVPVLGKIAAGTPVEAIQNEVSRIALPNNLEKNGDYFGLKVQGDSMIEAGINEGDTVIIKRADTADNGKIVVALIDEHEAMLKRIRKKGKVVALESANKNYETKIFGPDRV

SEQ ID NO: 170139 - protein, 164 aa, Unknown
  Bacterial polypetide isolated from the Sargasso Sea
MLTKKQKNLLLFINKKIRSTGVSPSYEEMKNSLNLKSKSGIHRLISALEERGFIKRLAHKARALEVVKLPENASAHDLFNSFTPSVIKGGLDKNSGKSSKVSVLGSIAAGTPIEAIQQEVDKINLPADFGKDEDHFGLKVKGDSMIEAGINDGDTVIIKKSSNA

SEQ ID NO: 170140 - protein, 149 aa, Unknown
  Bacterial polypetide isolated from the Sargasso Sea
MADHTITDRQRAILEFIESTMRERGYPPAVREIGAAVGLNSPSTVHSHLAQLESAGYLRRDPTKPRAIEVCFDASSGAIAERRPTRHVPLVGEVAAGTDVLAQENVEELVPVPEDFTGDGELFMLKVRGDSMIEAGILDGDFVVVNRQN

SEQ ID NO: 170141 - protein, 199 aa, Unknown
  Bacterial polypetide isolated from the Sargasso Sea
MQNLTARQEEVLSLIRNYLEETGYPPTRADIAKHLGFKSANAAEEHLKALAKKGAIEIIPGTSRGIKLANEVEGIPIIGNVAAGNPILAEENIEDYCELSPSFFKPNADYFLRVRGDSMKDSGILDGDLLAVHKTADANNGDIVVARIDNEVTVKRLKKSGTKQFLSLLPENSDYSPIKIDLRENDFAIEGLAVGVIRN

SEQ ID NO: 170142 - protein, 180 aa, Unknown
  Bacterial polypetide isolated from the Sargasso Sea
MLTKKQKNLLLFINKKLRSSGISPSYEEMKGSLNLKSKSGIHRLISALEERGFIKRLAHKARALEVIKLPETASANDIYNSFSPSVIKGGLDDTNLKSNDGNDIPVLGNIAAGTPVEAIQNEVTRIPLPSNIEKNGEYFGLKVQGDSMIEAGINDGDTVIVKKTDVADNGKIVVALIDDH

SEQ ID NO: 170143 - protein, 191 aa, Unknown
  Bacterial polypetide isolated from the Sargasso Sea
LKSKSGIHRLISALEERGFIKRLAHKARALEVVKLPETASANDIYNSFSPSVIKGGLDEEINNSDEMEVPVLGKIAAGTPVEAIQNEVSRIPLPNNLEKNGDYFGLKVQGDSMIEAGIHEGDTVIIKRTDTADNGKIVVALIDEHEAMLKRIRKKGKVVALESANRNYETKIFGPDRVKVQGVLVSLYRNF

SEQ ID NO: 170144 - protein, 150 aa, Unknown
  Bacterial polypetide isolated from the Sargasso Sea
MLTKKQKNLLLFINKKLRSSGISPSYEEMKESLNLKSKSGIHRLISALEERGFIKRLAHKARALEVVKLPETASANDIYNSFSPSVIKGGLDEENNENEASNEIPVLGKIAAGTPVEAIQNEVSRVPLPTNLEKNGEYFGLKVQGDSMIE

SEQ ID NO: 170145 - protein, 224 aa, Unknown
  Bacterial polypetide isolated from the Sargasso Sea
MLTKKQKNLLIYINKKIRSSGISPSYEEMKNSLNLKSKSGIHRLISALEERGFVKRLAHKARALEVVKLPENASANDIFNSFTPSIIKGGLDKANKNSSKVSVLGSIAAGTPIEAIQQEVDKVALPEDLQKNGEHFGLKIKGDSMIEAGINDGDTVIIKKASNADNGQIAVVLIDDQEATLKRIRKKGNTIALESANKNYGTKIYAANRIKIQGKLISLYRNFH

SEQ ID NO: 170146 - protein, 198 aa, Unknown
  Bacterial polypetide isolated from the Sargasso Sea
YEEMKSSLNLKSKSGIHRLISALEERGFIKRLAHKARALEVVKLPETASANDIYNSFSPSVIKGGLDETSDNENEIPVLGKIAAGTPVEAIQNEVSRIPLPANIEKNGEFFGLKVQGDSMIEAGINNGDTVIVKKADTAENGKIVVALIDDHEAMLKRIRRKGKTIALESANKNYETKIFGPDRVKVQGVLVSLYRNF

SEQ ID NO: 170147 - protein, 183 aa, Unknown
  Bacterial polypetide isolated from the Sargasso Sea
MLTKKQKNLLLFINKKIRSSGISPSYEEMKNSLNLKSKSGIHRLISALEERGFVKRLAHKARALEVVKLPENASANDIFNTFTPSVIKGGLDKNNNKSTDVSVLGSIAAGTPIEAIQQEVDRVALPEDLQNNGEYYGLKVKGDSMIEAGIADGDTVIIKKVSNVDNGQIAVVLIDDQEATLKR

SEQ ID NO: 170148 - protein, 181 aa, Unknown
  Bacterial polypetide isolated from the Sargasso Sea
VPDTGYPPTRADIARELGFKSANSAEEHLRALARKGAIEMIAGASRGIRLTESSGLPIVGRVAAGSPVLATEHVEDYCELSPGFFSPQADYLLRVTGDSMRDVGILDGDLLAVHSTPTARDGQIVVARIEDEVTVKRLKRSGQHTLKLLPENEDFEPIAVDLRCTECTIEGISVGIIRKKV

SEQ ID NO: 170149 - protein, 209 aa, Unknown
  Bacterial polypetide isolated from the Sargasso Sea
MLTKKQKNLLIFINKKIRSSGISPSYEEMKNSLNLKSKSGIHRLISALEERGFVKRLAHKARALEVVKLPENASANDIFNTFTPSVIKGGLDKNNNKSTDVSVLGSIAAGTPIEAIQQEVDRVALPEDLQNNGEHYGLKVKGDSMIEAGIADGDTVIIKKVSNVDNGQIAVVLIDDQEATLKRVRKKGNTIALEAANRNYGTKIYAANR

SEQ ID NO: 170150 - protein, 225 aa, Unknown
  Bacterial polypetide isolated from the Sargasso Sea
MLTKKQKNLLLFINKKIRGTGVSPSYEEMKSSLNLKSKSGIHRLISALEERGFIKRLAHKARALEVVKLPETASANDIYNSFSPSVIRGGLSDVSKTKKNEISVLGSIAAGTPIEAIQNEVSRIPLPANIENNGEFFGLKVKGDSMIEAGISDGDTVIIKKADRAENGKIVVALIDDHEAMLKRIRIKGKTVALESANRNYETKIFGPDRVKVQGVLISLYRNFN

SEQ ID NO: 170151 - protein, 112 aa, Unknown
  Bacterial polypetide isolated from the Sargasso Sea
PIGADAEVHSRLQLDPATFAKTPDYLLRVQGDSMIEDGILDGDLVGVRRSAEALNGQIVVARLDGDVTIKRFERNGDRVRLLPRNPAYQPIVVGPEQDLAIEGVFCGLVRQG

SEQ ID NO: 170152 - protein, 194 aa, Unknown
  Bacterial polypetide isolated from the Sargasso Sea
SLKSKSGIHRLISALEERGFIKRLAHKARALEVIKLPETASAHDIYNNFSPSVIKGGLDEDNLNNSKENEIPVLGKIAAGTPVEAIQNEVSRIPLPANIEKDGEFFGLKVQGDSMIEAGINDGDTVIVKKANTADNGKIVVALIDDHEAMLKRIRRKGKTVALESANRNYETKIFGPDRVKVQGILVSLYRNFQ

SEQ ID NO: 170153 - protein, 232 aa, Unknown
  Bacterial polypetide isolated from the Sargasso Sea
MLTRKQHQLLTYIDNHLNANGVPPSYDEMKDALGLKSKSGIHRLVTALEERGFIRRLPHKARALEVLKKPQNMIDDPPAKGSFEPRIVDDNFEAIPTPQASNVNAKETVGLPFYGKIAAGTPIEALRDNSRSFEVPPDMLGRGDHYALEIEGDSMIEAGILDGDVVLVQRTDTADNGEIVVALIEGHEATLKRLRRRGASIALEPANATHETRIFGPDQVRVQGRLVGLVRT

SEQ ID NO: 170154 - protein, 215 aa, Unknown
  Bacterial polypetide isolated from the Sargasso Sea
LFINKKLRSSGVSPSYEEMKQSLNLKSKSGIHRLISALEERGFIKRLAHKARALEVIKLPETASANDIYNSFSPSVIKGGLDDEKSISDEAEVPVLGKIAAGTPVEAIQNEVSRIPLPNNLEKNGDYFGLKVQGDSMIEAGINEGDTVIIRRTDTADNGKIVVALIDEQEAMLKRIRKKGKVVALESANKNYETKIFGPDRVKVQGVLVSLYRNF

SEQ ID NO: 170155 - protein, 154 aa, Unknown
  Bacterial polypetide isolated from the Sargasso Sea
MLTKKQKNLLLFINKKLRSSGISPSYEEMKDSLNLKSKSGIHRLISALEERGFIKRLAHKARALEVVKLPETASANDIYNNFSPSVIKGGLDETNSKKSDNRDFPVLGNIAAGTPVEAIQNEVTRIPLPSNIEKNGEYFGLKVQGDSMIEAGIN

SEQ ID NO: 170156 - protein, 227 aa, Unknown
  Bacterial polypetide isolated from the Sargasso Sea
MLTKKQKNLLLFINKKLRSSGISPSYEEMKESLNLKSKSGIHRLISALEERGFIKRLAHKARALEVVKLPETASANDIYNSFSPSVIKGGLDTDNSNNNDGSEVPVLGNIAAGTPVEAIQNEVNRIPLPNNIEKNGEYFGLKVQGDSMIEAGINDGDTVIVKKTDTADNGKIVVALIDDHEAMLKRIRRKGKTVALESANRNYETKIFGPDRVKVQGILVSLYRNFQ

SEQ ID NO: 170157 - protein, 209 aa, Unknown
  Bacterial polypetide isolated from the Sargasso Sea
MLTFQQEKLLKFIIDYQKQNNVTPSFDEMKDGLDLKSKSGIHRIVSALEERGYIKKLNNRARAIEIIKNVNLIDTESGKNKNNIISIPILGKIAAGLPIEAISDNTNYIELPETLLKKGEYFILNVEGDSMIEAGIFDGDQVVIRKANDANNGEIVVALIDNNEATLKRIFKRGQQVALQPENSNYKTVIYGPDRIQNSGCIKALNRSY

SEQ ID NO: 170158 - protein, 194 aa, Unknown
  Bacterial polypetide isolated from the Sargasso Sea
MLTKKQKELLNYIQKFQSKNGVTPSYEEMKSALNLKSKSGIHRLILALEERGFVKRLAHKARALEIIKDGISNIKVSEKNKNNLVVGNFINNSNEDNHKLSTLPLLGKIAAGTPIEAIQQNDTSVDVPKEMMPIGESYALTVEGDSMINEGIHNGDTVLIKKTNIADNGEIVVALIDDSEATLKRIRKKGQSIA

SEQ ID NO: 170159 - protein, 225 aa, Unknown; identical to SEQ ID NO: 170137
  Bacterial polypetide isolated from the Sargasso Sea

SEQ ID NO: 170160 - protein, 155 aa, Unknown
  Bacterial polypetide isolated from the Sargasso Sea
MLTKKQKNLLLFINKKIRSTGVSPSYEEMKNSLNLKSKSGIHRLISALEERGFIKRLAHKARALEVIKLPETASANDIYNSFSPSVIKGGLDNSNNKKNISEVPVLGKIAAGTPIEAIQNEVSKVILPEEMSKKGELFGLRVSGDSMIEAGINDG

SEQ ID NO: 170161 - protein, 222 aa, Unknown
  Bacterial polypetide isolated from the Sargasso Sea
NKKTWLLFINKKLRSSGVSPSYEEMKQSLNLKSKSGIHRLISALEERGFIKRLAHKARALEVIKLPETASANDIYNSFSPSVIKGGLDETNLTNKDTDIPVLGSIAAGTPIEAIQNEVTRIPLPENIEKNGEFFGLKVSGDSMIEAGINDGDTVIIKKSDTAENGKIVVALIDDHEAMLKRLRRKGKTVALESANRNYETKIFGPDRVKVQGILVSLYRNFH

SEQ ID NO: 170162 - protein, 204 aa, Unknown
  Bacterial polypetide isolated from the Sargasso Sea
MRPLTPRQAEILDLIKNNIAETGMPPTRAEIAKRLGFKSANAAEEHLKALAKKGFIEIMPGTSRGIRLPHEEEQESGLPLIGQVAAGEPILAQEHVEQYYQVDPSMFKPAADFLLRVRGDSMKDIGILEGDLLAVHKMQQARNGQVVVARVEDDVTVKRFEKKGNVVYLHAENEAYNPIKVDLSCQSLTIEGLAVGVIRNGDWL

SEQ ID NO: 170163 - protein, 198 aa, Unknown
  Bacterial polypetide isolated from the Sargasso Sea
MLTKKQKNLLLFINKKLRSSGVSPSYEEMKESLNLKSKSGIHRLISALEERGFIKRLAHKARALEVIKLPETASANDIYNSFSPSVIKGGLDDEKPMSDDEEVPVLGKIAAGTPVEAIQNEVSRIPLPNNLEKNGDYFGLKVQGDSMIEAGINEGDTVIIKRTDTADNGKIVVALIDEHEAMLKRIRKKGKVVALESA

SEQ ID NO: 170164 - protein, 202 aa, Unknown
  Bacterial polypetide isolated from the Sargasso Sea
MLKLTPRQAEILAFIKRCLDDNGYPPTRAEIALELGFKSPNAAEEHLKALARKGAIEMTPGASRGIRIPGFEAKADESTLPIIGRVAAGAPILAQQHVEESCNINPTFFHPRADYLLRVHGMSMKDVGIFDGDLLAVHTTREARNGQIVVARIGDEVTVKRFKREGSKVWLLAENPEFAPIEVNLKDQDLVIEGLSVGVIRR

SEQ ID NO: 170165 - protein, 225 aa, Unknown
  Bacterial polypetide isolated from the Sargasso Sea
MLTKKQKNLLLFINKKLRSSGVSPSYEEMKESLNLKSKSGIHRLISALEERGFIKRLAHKARALEVIKLPETASANDIYNSFSPSVIKGGLDEEKPLSDDVEVPVLGKIAAGTPVEAIQNEVSRIPLPSNLEKNGDYFGLKVQGDSMIEAGINEGDTVIIKRTDTADNGKIVVALIDEHEAMLKRIRKKGKVVALESANKNYETKIFGPDRVKVQGVLVSLYRNF

SEQ ID NO: 170166 - protein, 156 aa, Unknown
  Bacterial polypetide isolated from the Sargasso Sea
MRPLTARQTEVLELIKSNMQETGMPPTRAEIARHLGFRSANAAEEHLKALARKGVIEILPGTSRGIKLTVPIEEEVVEEEGLPLIGRVAAGEPILAQEHVESHYKVDPALFQPHADFLLRVNGMSMKDIGILDGDLLAVHRTTDVHNGAVVVARVD

SEQ ID NO: 170167 - protein, 197 aa, Unknown
  Bacterial polypetide isolated from the Sargasso Sea
MLTKKQKNLLLFINKKLRSSGISPSYEEMKDSLNLKSKSGIHRLISALEERGFIKRLAHKARALEVVKLPETASANDIYNSFSPSVIKGGLDETNIKNDSGSDLPVLGNIAAGTPVEAIQNEVARIPLPSNIEKNGDYFGLKVQGDSMIEAGINDGDTVIVKKTDTADNGKIVVALIDDHEAMLKRIRRKGKTVALE

SEQ ID NO: 170168 - protein, 224 aa, Unknown
  Bacterial polypetide isolated from the Sargasso Sea
MLTKKQKNLLLFINKKLRSSGVSPSYEEMKASLNLKSKSGIHRLISALEERGFIKRLAHKARALEVIKLPETASANDIYNSFSPSVIKGGLDSEQEIGGVEIPVLGKIAAGTPVEAIQNEVSRIPLPENIEKKGEYFGLKVQGDSMIEAGINDGDTVVIKKTDTADNGKIVVALIDDHEAMLKRIRKKGKTVALESANKNYETKIFGPDRVKVQGVLVSLYRSF

SEQ ID NO: 170169 - protein, 225 aa, Unknown
  Bacterial polypetide isolated from the Sargasso Sea
MLTKKQKNLLLFINKKLRSSGVSPSYEEMKQSLNLKSKSGIHRLISALEERGFIKRLAHKARALEVIKLPETASANDIYNSFSPSVIKGGLDEEQTNSDEIEVPVLGKIAAGTPVEAIQNEVSRIPLPNNLEKNGDYFGLKVQGDSMIDAGIHEGDTVIIKRTDTADNGKIVVALIDEHEAMLKRIRKKGKVVALESANRNYETKIFGPDRVKVQGVLVSLYRNF

SEQ ID NO: 170170 - protein, 224 aa, Unknown
  Bacterial polypetide isolated from the Sargasso Sea
MLTKKQKNLLLFINKKLRSSGVSPSYEEMKTSLNLKSKSGIHRLISALEERGFIKRLAHKARALEVIKLPETASANDIYNSFSPSVIKGGLDEENLSPDDAEVPVLGKIAAGTPVEAIQNEVSRIPLPSNLEKNGDYFGLKVQGDSMIEAGIHEGDTVIIKRTDTADNGKIVVALIDEHEAMLKRIRKKGKVVALESANKNYETKIFGPDRVKVQGVLVSLYRN

SEQ ID NO: 170171 - protein, 165 aa, Unknown
  Bacterial polypetide isolated from the Sargasso Sea
MLTKKQKNLLIFINKKIRSSGISPSYEEMKNSLNLKSKSGIHRLISALEERGFVKRLAHKARALEVVKLPENASANDIFNTFTPSVIKGGLDKNDNKSTDVSVLGSIAAGTPIEAIQQEVDRVALPEDLQNNGEHYGLKVKGDSMIEAGIADGDTVIIKKVSNVD

SEQ ID NO: 170172 - protein, 224 aa, Unknown
  Bacterial polypetide isolated from the Sargasso Sea
MLTKKQKNLLIFINKKIRSSGISPSYEEMKNSLNLKSKSGIHRLISALEERGFVKRLAHKARALEVVKLPENASANDIFNSFTPSVIKGGLDKSKSNSSKVSVLGSIAAGTPIEAIQHEVDKVALPEDLQKNGEYFGLKVKGDSMIEAGINDGDTVIIKKTSTADTGQIAVVLIDEQEATLKRIRKKGNTIALEAANKNYDTKIYASNRIKIQGRLISLYRNFH

SEQ ID NO: 170173 - protein, 224 aa, Unknown
  Bacterial polypetide isolated from the Sargasso Sea
MLTKKQKNLLIFINKKIRSSGISPSYEEMKNSLNLKSKSGIHRLISALEERGFVKRLAHKARALEVVKLPENASANDIFNTFTPSVIKGGLDKNNNKSTDVSVLGSIAAGTPIEAIQQEVDRVALPEDLQNNGEHYGLKVKGDSMIEAGISDGDTVIIKKVSNVDNGQIAVVLIDDQEATLKRVRKKGNTIALEAANRNYGTKIYAANRIKIQGKLVSLYRNFH

SEQ ID NO: 170174 - protein, 132 aa, Unknown
  Bacterial polypetide isolated from the Sargasso Sea
LEESGLPLIGKVAAGEPILAQEHIESHYQVDPALFHPRADFLLRVQGMSMKNIGILDGDLLAVHKTQEVRNGQVVVARLDEDVTVKRFQRKGSQVWLLPENEELSPIEVDLSCQQLTIEGLAVGVIRNADWM

SEQ ID NO: 170175 - protein, 228 aa, Unknown
  Bacterial polypetide isolated from the Sargasso Sea
MLTKKQKNLLLFINKKLRSSGVSPSYEEMKESLNLKSKSGIHRLISALEERGFIKRLAHKARALEVIKLPETASANDIYNSFSPSVIKGGLDESSNRNNSNENEIPVLGKIAAGTPVEAIQNEVARIPLPSNIEKNGEFFGLKVQGDSMIEAGINDGDTVIVRKADTAENGKIVVALIDDHEAMLKRIRRKGKTVALESANRNYETKIFGPDRVKVQGILVSLYRNFS

SEQ ID NO: 170176 - protein, 162 aa, Unknown
  Bacterial polypetide isolated from the Sargasso Sea
MLTKKQKNLLLFINKKLRSTGVSPSYEEMKQSLNLKSKSGIHRLISALEERGFIKRLAHKARALEVVKLPETASANDIYNSFSPSVIRGGLDDDNNIDKNEIPVLGKIAAGTPIDAIQNEVSRIPLPSNIEKKGEFFGLKVQGDSMIEAGINEGDTVVIKKT

SEQ ID NO: 170177 - protein, 169 aa, Unknown
  Bacterial polypetide isolated from the Sargasso Sea
MLKLTPRQAEILAFIKRCLEDNGYPPTRAEIAQELGFKSPNAAEEHLKALARKGAIEMTPGASRGIRIPGFEAGAANEDAGLPVIGRVAAGAPILAQQHVEESCQINPAFFQPKADYLLRVRGMSMKDIGIFDGDLLAVHTTREARNGQIVVARIDDEVTVKRFKREGN

SEQ ID NO: 170178 - protein, 215 aa, Unknown
  Bacterial polypetide isolated from the Sargasso Sea
MTKLTARQQQVFDLIRRAIERSGFPPTRAEIAAELGFSSPNAAEEHLRALARKGVIELAAGASRGIRLLGIDDAPHQFTLPHAGLMQLSLPLVGRVAAGSPILAQEHISQHYACDPALFSSKPDYLLKVRGLSMRDAGILDGDLLAVQKRTEAKDGQIIVARLGDDVTVKRLMRRPGGLELIAENPDYENIFVKAGSAEFALEGIAVGLIRSGEL

SEQ ID NO: 170179 - protein, 208 aa, Unknown
  Bacterial polypetide isolated from the Sargasso Sea
MRPLTARQTEVLELIKTTMLETGMPPTRAEIARQLGFRSANAAEEHLKALARKGVIEILPGTSRGIKLNIPLDNDAQEEEGLPLIGRVAAGEPILAQEHVESHYKVDPALFQPHADFLLRVNGMSMKDIGILDGDLLAVHRTTDVHNGQVVVARVDEDVTVKRLEKRGREVLLHAENDEFAPIKVDLATEHFAIEGIAVGVIRNADWM

SEQ ID NO: 170180 - protein, 209 aa, Unknown
  Bacterial polypetide isolated from the Sargasso Sea
MLTFQQEKLLKFIIDYQKQNNVTPSFDEMKDGLDLKSKSGIHRIVSALEERGYIKKLNNRARAIEIIKKVHLIDTESGKNKNNIISIPILGKIAAGLPIEAISDNTNYIELPETLLKKGEYFILNVEGDSMIEAGIFDGDQVVIRKANDANNGEIVVALIDNNEATLKRIFKRGQQVALQPENSNYKTVIYGPDRIQIQGVLKHLIRSY

SEQ ID NO: 170181 - protein, 177 aa, Unknown
  Bacterial polypetide isolated from the Sargasso Sea
MLTKKQKNLLLFINKKLRSTGVSPSYEEMKESLSLKSKSGIHRLISALEERGFIKRLAHKARALEVIKLPETASANDIYNSFSPSVIRGGLDVENLNNSNDTEIPVLGKIAAGTPVEAIQNEVSRIPLPANIEKDGEFFGLKVQGDSMIEAGINDGDTKMVKKADTADNGKIVVALI

SEQ ID NO: 170182 - protein, 226 aa, Unknown
  Bacterial polypetide isolated from the Sargasso Sea
MLTKKQKNLLLFINKKLRSTGVSPSYEEMKHSLNLKSKSGIHRLISALEERGFIKRLAHKARALEVIKLPETASANDIYNSFSPSVIKGGLDETNSLNEDKDIPVLGSIAAGTPIEAIQNEVARIPLPENIEKNGEFFGLKVSGDSMIEAGINDGDTVIIKKTDTAENGKIVVALIDDHEAMLKRLRRKGKTVALESANRNYETKIFGPDRVKVQGILVSLYRNFH

SEQ ID NO: 170183 - protein, 206 aa, Unknown
  Bacterial polypetide isolated from the Sargasso Sea
MRPLTPRQAEILELIKRNIAETGMPPTRAEIATRLGFKSANAAEEHLKALAKKGCIEIMPGTSRGIRLPVEEEDNSESGLPLIGQVAAGEPILAQEHVEQYYQVDPSMFHPAADFLLRVRGDSMKNIGILEGDLLAVHKVQQARNGQVVVARVDDDVTVKRFEKKGNLVYLHAENEDYSPIKVDLSFQSLTIEGLAVGVIRNGDWL

SEQ ID NO: 170184 - protein, 226 aa, Unknown
  Bacterial polypetide isolated from the Sargasso Sea
MLTKKQKNLLLFINKKLRSSGVSPSYEEMKHSLNLKSKSGIHRLISALEERGFIKRLAHKARALEVIKLPETASANDIYNSFSPSVIKGGLDESNNIGKESEIPVLGTIAAGTPIEAIQNEVTRIPLPENIEKNGEYFGLKVNGDSMIEAGINDGDTVIIKKTDTAENGKIVVALIDDHEAMLKRLRRKGKTVALESANRNYETKIFGPDRVKVQGILVSLYRNFH

SEQ ID NO: 170185 - protein, 208 aa, Unknown
  Bacterial polypetide isolated from the Sargasso Sea
MRPLTARQTEVLELIKTTMQETGMPPTRAEIARQLGFRSANAAEEHLKALARKGVIEILPGTSRGIKLNIPLENDVPEEEGLPLIGRVAAGEPILAQEHVESHYKVDPALFQPQADFLLRVNGMSMKDIGILDGDLLAVHRTTDVHNGQVVVARVDEDVTVKRLEKRGREVLLHAENEEFAPIRVDLANEPFAIEGIAVGVIRNADWM

SEQ ID NO: 170186 - protein, 225 aa, Unknown
  Bacterial polypetide isolated from the Sargasso Sea
MLTKKQKNLLLFINKKLRNSGVSPSYEEMKQSLNLKSKSGIHRLISALEERGFIKRLAHKARALEVIKLPETASANDIYNSFSPSVIKGGLDEEQTDSDEVEVPVLGKIAAGTPVEAIQNEVSRIPLPNNLEKNGDYFGLKVQGDSMIDAGIHEGDTVIIKRTDTADNGKIVVALIDEHEAMLKRIRKKGKVVALESANRNYETKIFGPDRVKVQGVLVSLYRNF

SEQ ID NO: 170187 - protein, 215 aa, Unknown
  Bacterial polypetide isolated from the Sargasso Sea
FINKKLRGSGVSPSYEEMKDSLNLKSKSGIHRLISALEERGFIKRLAHKARALEVIKLPETASANDIYNSFSPSVIKGGLDENTNSTEGPEVPVLGKIAAGTPVEAIQNEVSRVPLPSNLEKNGSYFGLKVQGDSMIEAGINEGDTVIIKKTETAENGKIVVALIDDHEAMLKRIRKKGKTVALESANRNYETKIFGPDRVKVQGILVSLYRNFS

SEQ ID NO: 170188 - protein, 84 aa, Unknown
  Bacterial polypetide isolated from the Sargasso Sea
MSMRDAGIFDGDLLAVQKKSEAKDGQIIIARLGDDVTVKRLKRRPNGIELIAENPDYDNIFVETGSAEFALEGIAVGLIRPGEF

SEQ ID NO: 170189 - protein, 224 aa, Unknown
  Bacterial polypetide isolated from the Sargasso Sea
MLTKKQKNLLIFINKKIRSSGISPSYEEMKNSLNLKSKSGIHRLISALEERGFVKRLAHKARALEVVKLPENASANDIFNTFTPSVIKGGLDKDKTKSTDVSVLGSIAAGTPIEAIQQEVDRVALPEDLQNNGEHYGLKVKGDSMIEAGINDGDTVIVKKTSNVDSGQIAVVLIDDQEATLKRVRKKGNTIALEAANRNYGTKIYAANRIKIQGKLVSLYRNFH

SEQ ID NO: 170190 - protein, 227 aa, Unknown
  Bacterial polypetide isolated from the Sargasso Sea
MLTKKQKNLLLFINKKLRSSGVSPSYEEMKESLNLKSKSGIHRLISALEERGFIKRLAHKARALEVIKLPETASANDIYNSFSPSVIKGGLDESPNRNNSDENEIPVLGKIAAGTPVEAIQNEVSRIPLPSNIEKNGEFFGLKVQGDSMIEAGINDGDTVIVKKADTAENGKIVVALIDDHEAMLKRIRRKGKTVALESANRNYETKIFGPDRVKVQGILVSLYRNF

SEQ ID NO: 170191 - protein, 231 aa, Unknown
  Bacterial polypetide isolated from the Sargasso Sea
MLTKKQKNLLLYINKKLRSSGVSPSYEEMKHSLNLKSKSGIHRLISALEERGFIKRLAHKARALEVIKLPETASANDIYNSFSPSVIKGGLDEANQSSKDTDIPVLGSIAAGTPIEAIQNEVTRIPLPENIEKNGEFFGLKVSGDSMIEAGINDGDTVIIKKTDTAENGKIVVALIDDHEAMLKRLRRKGKTVALESANRNFETKIFGPDRVKVQGILVSLYRNFHLNSLN

SEQ ID NO: 170192 - protein, 225 aa, Unknown
  Bacterial polypetide isolated from the Sargasso Sea
MLTKKQKNLLLFINNKLRSSGVSPSYEEMKQSLNLKSKSGIHRLISALEERGFIKRLAHKARALEVIKLPETASANDIYNSFSPSVIKGGLDEEQTNSDEIEVPVLGKIAAGTPVEAIQNEVSRIPLPNNLEKNGDYFGLKVQGDSMIDAGIHEGDTVIIKRTDTADNGKIVVALIDEHEAMLKRIRKKGKVVALESANRNYETKIFGPDRVKVQGVLVSLYRNF

SEQ ID NO: 170193 - protein, 224 aa, Unknown
  Bacterial polypetide isolated from the Sargasso Sea
MLTKKQKNLLIFINKKIRSTGISPSYEEMKNSLNLKSKSGIHRLISALEERGFVKRLAHKARALEVIKLPENASANDIFNTFTPSVIKGGLDKNSNRSTDVSVLGSIAAGTPIEAIQQEVDRVALPEDLQNKGEHYGLKVKGDSMIEAGIADGDTVIVKKTSNVDSGQIAVVLIDDQEATLKRIRKKGNTIALEAANRNYGTKIYAANRVKIQGKLVSLYRNFH

SEQ ID NO: 170194 - protein, 228 aa, Unknown
  Bacterial polypetide isolated from the Sargasso Sea
MLTKKQKNLLLFINKKLRSSGVSPSYEEMKESLNLKSKSGIHRLISALEERGFIKRLAHKARALEVIKLPETASANDIYNSFSPSVIRGGLDESSNRDNSDQNEIPVLGKIAAGTPVEAIQNEVSRIPLPSNIEKNGEFFGLKVQGDSMIEAGINDGDTVIVKKADTAENGKIVVALIDDHEAMLKRIRRKGKTVALESANRNYETKIFGPDRVKVQGILVSLYRNFF

SEQ ID NO: 170195 - protein, 208 aa, Unknown
  Bacterial polypetide isolated from the Sargasso Sea
MRPLTPRQAEILQLLKDYQAASGMPPTRAEIATQLGFKSANAAEEHLKALAKKGFIEMMPGTSRGIRLVEDEAANDVEEEPGLPLIGKVAAGQPILAAEHIQQRYQLDASLFKPNADFLLKVQGMSMKDIGILDGDLLAVHKTTEARQGQIVVARVEDEVTVKRFRREGQMVYLHPENGDFDVIKVDLSQQHFAIEGLAVGVIRTSSW

SEQ ID NO: 170196 - protein, 223 aa, Unknown
  Bacterial polypetide isolated from the Sargasso Sea
MLTKKQKNLLIFINKKIRSSGVSPSYEEMKHSLNLKSKSGIHRLISALEERGFIKRLAHKARALEVIKLPETASANDIYNSFSPSVIKGGLDEDSNQDSDIPVLGKIAAGTPVEAIQNEVSRIPLPSNIEKNGEFFGLKVQGDSMIEAGINEGDTVIIKKTETADNGKIVVALIDDHEAMLKRIRRKGKTIALESANRNYETKIFGPDRVKVQGVLVSLYRNF

SEQ ID NO: 170197 - protein, 224 aa, Unknown
  Bacterial polypetide isolated from the Sargasso Sea
MLTKKQKNLLLFINKKIRSTGVSPSYEEMKNSLNLKSKSGIHRLISALEERGFIKRLAHKARALEVVKLPENASAHDLFNSFTPSVIKGGLDKNSGKSSKISVLGSIAAGTPIEAIQQEVDKVNLPADFNKNDDHFGLKVKGDSMIEAGINDGDTVIIKKSSNADNGQIAVVLIDNEEATLKRIRKKGNTIALESANKKYGTKIYAAKRIKIQGKLVSLYRNFN

SEQ ID NO: 170198 - protein, 225 aa, Unknown
  Bacterial polypetide isolated from the Sargasso Sea
MLTKKQKNLLLFINKKLRSSGVSPSYEEMKQSLNLKSKSGIHRLISALEERGFIKRLAHKARALEVIKLPETASANDIYNNFSPSVIKGGLDEELVNSDEVEVPVLGKIAAGTPVEAIQNEVARIPLPNNLEKNGDYFGLKVQGDSMIEAGIHEGDTVIIRRTDTADNGKIVVALIDEHEAMLKRIRKKGKVVALESANRNYETKIFGPDRVKVQGVLVSLYRNF

SEQ ID NO: 170199 - protein, 225 aa, Unknown
  Bacterial polypetide isolated from the Sargasso Sea
MLTKKQKNLLLFINKKLRSSGVSPSYEEMKDSLNLKSKSGIHRLISALEERGFIKRLAHKARALEVIKLPETASANDIYNNFSPSVIKGGLDESNKFTENGVPVLGDIAAGTPIEAIQNEVTRIPLPDNIEKKGEFFGLKVSGDSMIEAGINDGDTVIIKKTDTAENGKIVVALIDDHEAMLKRIRRKGKTIALESANRNYETKIFGPDRVKVQGVLVSLYRNFH

SEQ ID NO: 170200 - protein, 226 aa, Unknown
  Bacterial polypetide isolated from the Sargasso Sea
MLTKKQKNLLLFINKKLRSSGVSPSYEEMKQSLNLKSKSGIHRLISALEERGFIKRLAHKARALEVIKLPETASANDIYNSFSPSVIKGGLDDSNSSNKNTDIPVLGSIAAGTPIEAIQNEVTRIPLPENIEKNGEFFGLKVSGDSMIEAGINDGDTVVIKKTDTAENGKIVVALIDDHEAMLKRLRRKGKTVALESANRNYETKIFGPDRVKVQGILVSLYRNFH

SEQ ID NO: 170201 - protein, 161 aa, Unknown
  Bacterial polypetide isolated from the Sargasso Sea
MYKRTETDMIKLTPRQTEILAFIKRCLEDNGYPPTRAEIAQELGFKSPNAAEEHLKALARKGAIEMTPGASRGIRIPDFEPAASENGLPIIGRVAAGAPILAQQHVEESCQISPAFFHPRADYLLRVHGMSMKDVGIFDGDLLAVHTTREARNGQIVVLAS

SEQ ID NO: 170202 - protein, 225 aa, Unknown
  Bacterial polypetide isolated from the Sargasso Sea
MLTKKQKNLLLFINKKLRSSGVSPSYEEMKQSLNLKSKSGIHRLISALEERGFIKRLAHKARALEVIKLPETASANDIYNNFSPSVIKGGLDEERVNSDEVEVSVLGKIAAGTPVEAIQNEVARIPLPNNLEKNGDYFGLKVQGDSMIEAGIHEGDTVIIRRTDTADNGKIVVALIDEHEAMLKRIRKKGKVVALESANRNYETKIFGPDRVKVQGVLVSLYRNF

SEQ ID NO: 170203 - protein, 225 aa, Unknown
  Bacterial polypetide isolated from the Sargasso Sea
MLTKKQKNLLLFINKKIRGTGVSPSYEEMKSSLNLKSKSGIHRLISALEERGFIKRLAHKARALEVVKLPETASANDIYNSFSPSVIKGGLSDLSKTKKNEISVLGNIAAGTPIEAIQNEVSRIPLPSNIENNGEFFGLKVKGDSMIEAGINDGDTVIIKKAEKADNGKIVVALIDDHEAMLKRIRIKGKTVALESANRNYETKIFGPDRVKVQGVLISLYRNFN

SEQ ID NO: 170204 - protein, 225 aa, Unknown
  Bacterial polypetide isolated from the Sargasso Sea
MLTKKQKNLLLFINKKLRSSGVSPSYEEMKESLNLKSKSGIHRLISALEERGFIKRLAHKARALEVIKLPETASANDIYNNFSPSVIKGGLDEEKPLSDDAEVPVLGKIAAGTPVEAIQNEVSRIPLPNNLEKNGDYFGLKVQGDSMIEAGIHEGDTVIIKRTDTADNGKIVVALIDEHEAMLKRIRKKGKVVALESANKNYETKIFGPDRVKVQGVLVSLYRNF

SEQ ID NO: 170205 - protein, 223 aa, Unknown
  Bacterial polypetide isolated from the Sargasso Sea
MLTKKQKNLLMFINKKFRSSGVSPSYEEMKSSLNLKSKSGIHRLISALEERGFIKRLAHKARALEVVKLPETASANDIYNSFSPSVIKGGLDETTDNENEIPVLGKIAAGTPVEAIQNEVSRIPLPANIEKNGEFFGLKVQGDSMIEAGINNGDTVIVKKADTAENGKIVVALIDDHEAMLKRIRRKGKTIALESANKNYETKIFGPDRVKVQGVLVSLYRNF

SEQ ID NO: 170206 - protein, 225 aa, Unknown
  Bacterial polypetide isolated from the Sargasso Sea
MLTKKQKNLLLFINKKLRSSGVSPSYEEMKASLNLKSKSGIHRLISALEERGFIKRLAHKARALEVIKLPETASANDIYNSFSPSVIKGGLDEENLSSDDAEVPVLGKIAAGTPVEAIQNEVSRIPLPSNLEKNGDYFGLKVQGDSMIEAGIHEGDTVIIKRTDTADNGKIVVALIDEHEAMLKRIRKKGKVVALESANKNYETKIFGPDRVKVQGVLVSLYRNF

SEQ ID NO: 170207 - protein, 173 aa, Unknown
  Bacterial polypetide isolated from the Sargasso Sea
MLTKKQKNLLLFINKKLRSSGVSPSYEEMKDSLNLKSKSGIHRLISALEERGFIRKLPHKARALEVVKLPETASANDIYNSFSPSVIKGGLDETNTKQGNSEIPVLGSIAAGTPIEAIQNEVKRIPLPANIEKNGEYFGLQVKGDSMIEAGINEGDTVIVKRSDTAENGKIVV

SEQ ID NO: 170208 - protein, 206 aa, Unknown
  Bacterial polypetide isolated from the Sargasso Sea
MRPLTPRQAEILELIKRNIAETGMPPTRAEIATRLGFKSANAAEEHLKALAKKGCIEIMPGTSRGIRLPVEEEDNRETGLPLIGQVAAGEPILAQEHVEQYYQVDPSMFHPAADFLLRVKGDSMKNIGILEGDLLAVHKVQQARNGQVVVARVDDDVTVKRFEKKGNLVYLHAENEDYSPIKVDLSFQSLTIEGLAVGVIRNGDWL

SEQ ID NO: 170209 - protein, 227 aa, Unknown
  Bacterial polypetide isolated from the Sargasso Sea
MLTKKQKNLLLFINKKLRSTGVSPSYEEMKESLSLKSKSGIHRLISALEERGFIKRLAHKARALEVIKLPETASANDIYNSFSPSVIKGGLDEENLNNSNDTEIPVLGKIAAGTPVEAIQNEVSRIPLPANIEKDGEFFGLKVQGDSMIEAGINDGDTVIVKKADTADNGKIVVALIDDHEAMLKRIRRKGKTVALESANRNYETKIFGPDRVKVQGILVSLYRNFQ

SEQ ID NO: 170210 - protein, 178 aa, Unknown
  Bacterial polypetide isolated from the Sargasso Sea
MLTKKQKNLLLFINKKLRSSGVSPSYEEMKLSLNLKSKSGIHRLISALEERGFIKRLAHKARALEVIKLPETASANDIYNSFSPSVIRGGLDDSSAANKESEVPVLGNIAAGTPIEAIQNEVTRIPLPSNIEKNGEYFGLKVNGDSMIEAGINDGDTVIIKKTNTAENGKIVVALIDD

SEQ ID NO: 170211 - protein, 233 aa, Unknown
  Bacterial polypetide isolated from the Sargasso Sea
MYLICSMLTKKQKNLLLFINKKLRSTGVSPSYEEMKESLNLKSKSGIHRLISALEERGFIKRLAHKARALEVIKLPETASANDIYNSFSPSVIKGGLDEENLNNSNDTEIPVLGKIAAGTPVEAIQNEVSRIPLPANIEKDGEFFGLKVQGDSMIEAGINDGDTVIVKKADTADNGKIVVALIDDHEAMLKRIRRKGKTVALESANRNYETKIFGPDRVKVQGILVSLYRNFQ

SEQ ID NO: 170212 - protein, 46 aa, Unknown
  Bacterial polypetide isolated from the Sargasso Sea
MTIKIPEQLNTLIPMVVEQSSRGERAYDIYSRLLKEKNCICSWVNT

SEQ ID NO: 170213 - protein, 199 aa, Unknown
  Bacterial polypetide isolated from the Sargasso Sea
MEEHNSTLIPMVVEQTARGERAFDIYSRLLKERVIFLTGPINDQVSNLVVAQLLFLESENPKKDISIYINSPGGVISSGLAIYDTMQFVSPSISTLCIGQAASMGALLLAGGEKGKRFALPNSRIMIHQPLGGFQGQASDIEIHAQEILLMKKKVNEILSKHTGKNLKTVEKDTDRDNFLNAEEAKKYGIIDDILEERS

SEQ ID NO: 170214 - protein, 203 aa, Unknown
  Bacterial polypetide isolated from the Sargasso Sea
MTNKISEFMSTLVPMVVEQSSKGERAYDIYSRLLKERIIFLTGQINDNVASLVTAQLLFLEAEDPKKEIYLYINSPGGLVTAGLGIYDTMQYVKPDISTLCIGQAASMGSFLLSAGTKGKRFSLPNSRIMVHQPSAGFQGQATDIEIHANEVLSLKKRLNEIYSKHTGKTVEDIKLALERDNFMTADAAKSFGLIDEVVEKRS

SEQ ID NO: 170215 - protein, 119 aa, Unknown
  Bacterial polypetide isolated from the Sargasso Sea
GIYDTMQYVKPNISTLCIGQAASMGSFLLAAGSKGKRFSLPNSRIMVHQPSAGFQGQATDIEIHANEVLSLKKRLNEIYSKHTGKSVDEIKLALERDNFMTADAAKSFGLIDEVVEKRS

SEQ ID NO: 170216 - protein, 110 aa, Unknown
  Bacterial polypetide isolated from the Sargasso Sea
PSISTMCIGQAASMGALLLAGGDEKKRFALPNSRIMIHQPLGGFQGQASDFEIHAKEILHMKKIVNEILAKHTGQTIKKIEKDTDRDNFLDAKAAKTYGIIDNILEVRNS

SEQ ID NO: 170217 - protein, 202 aa, Unknown
  Bacterial polypetide isolated from the Sargasso Sea
MKDKIEEQMNNLIPMVVEQSNRGERAYDIYSRLLKERIIFLVGPVNDNVASLVIAQLLFLESENPKKEISFYINSPGGLVTSGLGVYDTMQYIKAPVSTLCIGQASSMGSFLLAAGEKGKRFSLPNSRIMVHQPSAGYQGQATDIEIHAKEILSLKKRLNKIYSKHTKKSEEDIKKALERDNFMTPNEAKDFGLIDQVVEKR

SEQ ID NO: 170218 - protein, 203 aa, Unknown
  Bacterial polypetide isolated from the Sargasso Sea
APAPLPTVVEQSGRGDRAFDIYSRLLRERIIFLGTGVDDAVADALVAQMLFLEAEDPEKDIQIYINSPGGSVTAGLAIYDTMQQVAPDVVTICYGLAASMGAFLLSGGCKGKRLALPNARIMIHQPLGGAQGQAVDIEIQAKEILFLKETLNGLMADHTGQPLDKIAEDTDRDYFLSPAEAVQYGLIDRVVDSSGDKGIVTEG

SEQ ID NO: 170219 - protein, 89 aa, Unknown
  Bacterial polypetide isolated from the Sargasso Sea
MGEKGKRFSLPNSRIMVHQPSAGFQGQATDIQIHAKEILSLKERLNKIYSKHTGKSVKEIATALERDKFMTAEEAKNFGLIDKVVEKRN

SEQ ID NO: 170220 - protein, 139 aa, Unknown
  Bacterial polypetide isolated from the Sargasso Sea
QIKDIFLYINSPGGSVTAGMAIYDTMQFIKPNVSTVCIGQAASMGAFLLAGGEKGKRFCLPNSRVMIHQPLGGFQGQASDIAIHAQEILGIKHKLNLMLSEHTGQPLEVIERDTDRDNFMSATQAVEYGLVDAVMTKRG

SEQ ID NO: 170221 - protein, 145 aa, Unknown
  Bacterial polypetide isolated from the Sargasso Sea
FLESENPKKEISLYINSPGGLVTAGLGIYDTMQYIKPDVSTLCIGQAASMGSFLLAAGEKGKRFSLPNSRIMVHQPSAGFQGQATDIEIHANEVLSLKKRLNQIYSKHTGKSEDEIKIALERDNFMTSENAKEFGLIDQVVEKRS

SEQ ID NO: 170222 - protein, 202 aa, Unknown
  Bacterial polypetide isolated from the Sargasso Sea
MNKINEHMNTLIPMVVEQSSRGERAYDIYSRLLKERIVFLTGPINDQVASLATAQLLFLESENPKKDIFFYINSPGGLVTAGLGIYDTMQFIKPDVSTLCIGQAASMGSFLLAAGKKGKRFSLPNARVMVHQPSAGFQGQATDIEIHANEVLSLKKRLNEIYSKHTGKSVEEIKSALERDNFMTPESAKDFGLIDKVVEKRD

SEQ ID NO: 170223 - protein, 110 aa, Unknown
  Bacterial polypetide isolated from the Sargasso Sea
MEPQNFNPKSLIPSVIETTSRGERAYDIFSLLLKERIIFLGTPVDDFVSNTIVAQLLYLSREDPEKDINLYINSPGGSVYAGLSIYDTMQMIPNDVCTFSVGLSASMGTI

SEQ ID NO: 170224 - protein, 119 aa, Unknown
  Bacterial polypetide isolated from the Sargasso Sea
AIYDTMQFVSPSISTLCIGQAASMGALLLAGGEKGKRFALPNSRIMIHQPLGGFQGQASDIEIHAQEILLMKKKVNEILSKHTGKNLKTVEKDTDRDNFLNAEEAKKYGIIDDILEERS

SEQ ID NO: 170225 - protein, 60 aa, Unknown
  Bacterial polypetide isolated from the Sargasso Sea
MSEKQNEQITNQLVPMVVEQTPRGERAYDIYSRLLKERVIFLTGPIEDYGANLVVAQMLF

SEQ ID NO: 170226 - protein, 170 aa, Unknown
  Bacterial polypetide isolated from the Sargasso Sea
AVGPIDDYIANLIVAQMLFLESENPKKDIYLYINSPGGSITSGLSIYDTMQFIKPDVSTICVGQAASMGALLLAGGAESKRFSLPNSRMMIHQPISGFQGQASDIDIHAKEVLKMKSLVNSILSKHTGKTEKQIAKDTDRDNFMDAEEALKYGLIDQILEERVEALESNG

SEQ ID NO: 170227 - protein, 105 aa, Unknown
  Bacterial polypetide isolated from the Sargasso Sea
VVTICFGVAASMGAFLLSGGAKGKRLALPNSRIMIHQPLGGAQGQAVEIEIQAKEILFLKKTLNSLLAEHTGQPLEKINEDTERDYFLSPSEAVEYGLIDKVIKK

SEQ ID NO: 170228 - protein, 94 aa, Unknown
  Bacterial polypetide isolated from the Sargasso Sea
MGAFLLSGGAKGKRLALPNSRIMIHQPLGGAQGQAVEIEIQAKEIIFLKKTLNSLLAEHTGQPLEKINEDTERDYFLSPSEAVEYGLIDKVIKK

SEQ ID NO: 170229 - protein, 136 aa, Unknown
  Bacterial polypetide isolated from the Sargasso Sea
MYINSPGGSVYDGLGIFDTMQHVKPDIHTVCVGLAASMGAFLLAAGTQGKRSSLRHSRIMIHQPLGGARGQASDIRIQADEILFLKERLNTELSERTGKDYDTIKEDTDRDFYMSPNEAVEYGLIDMVLDKKPIKV

SEQ ID NO: 170230 - protein, 69 aa, Unknown
  Bacterial polypetide isolated from the Sargasso Sea
MTTKIPEHLSTLIPMVVEQSSRGERAYDIYSRLLKERIVFVVGPINDAVASLVTAQLLFLESEDPKKEI

SEQ ID NO: 170231 - protein, 200 aa, Unknown
  Bacterial polypetide isolated from the Sargasso Sea
MSSLIPMVVEQSNKGERAYDIYSRLLKERIIFLTGQINDNVASLVTAQLLFLEAEDPKKEIFLYINSPGGLVTAGLGIYDTMQYVKPDISTLCIGQAASMGSFLLSAGTKGKRYSLPNSRIMVHQPSAGFQGQATDIEIHANEVLSLKKRLNEIYSKHTGKSVDEIKSALERDNFMTADTAKSFWPNRLCGRKKILEHHI

SEQ ID NO: 170232 - protein, 202 aa, Unknown
  Bacterial polypetide isolated from the Sargasso Sea
MHIDEKILNQLVPIVVEQTGRSERAFDIYSRLLKERIVFLGTPIEDSIASLIIAQLLFLEAEDSEKDIYLYINSPGGIITSGMGIYDTMNYIKPDIATICLGQAASMGAFLLAGGAKGKRSALPNSRIMIHQPMGGAEGQATDIKIQAEEILRMKKQLNTILAKNTGQTLKKIEADTERDNYLTSKEAKTYGLIDSILTKRK

SEQ ID NO: 170233 - protein, 162 aa, Unknown
  Bacterial polypetide isolated from the Sargasso Sea
FLGTGINDQVSDSLVAQLLFLEAEDPEKDIQIYINSPGGSVTAGMAIYDTMQQISPDVVTICFGVAASMGAFLLSGGAKGKRLALPNSRIMIHQPLGGAQGQAVEIEIQAKEILFLKKTLNSLLAEHTGQPLEKINEDTERDYFLSPSEAVEYGLIDKVIKK

SEQ ID NO: 170234 - protein, 121 aa, Unknown
  Bacterial polypetide isolated from the Sargasso Sea
RFRIYDTMQYIKPEVNTLCIGQAASMGSFLLGAGAKGKRFSLPNSRIMVHQPSAGFQGQATDIEIHANEVLSLKKRLNEIYSKHTGKSVDEIKTALERDNFMTPENAKDFGLIDKVVEKRE

SEQ ID NO: 170235 - protein, 203 aa, Unknown
  Bacterial polypetide isolated from the Sargasso Sea
MTNKISEHMNNLVPMVVEQSNKGERAYDIYSRLLKERIIFLTGQINDSVASLVTAQLLFLEAEDPKKEIYLYINSPGGLVTAGLGIYDTMQYIKPDISTLCIGQAASMGSFLLAAGTKGKRISLPNSRIMVHQPSAGFQGQATDIEIHANEVLSLKKRLNEIYSRHTGKSVEEIKSALERDNFMTADTAKSFGLIDEVVEKRT

SEQ ID NO: 170236 - protein, 174 aa, Unknown
  Bacterial polypetide isolated from the Sargasso Sea
MNNFDKNVGNALSALVPMVVEQTNRGERSYDIYSRLLKERIIFLIGPVDDNIASLVCAQLLFLEAENPSKDISMYINSPGGVVTSGLSIYDTMEYIKPDVCTVCFGQAASMGSLLLTAGSKNKRFCLPNSRIMTHQPSGGFQGQAADIEIHAKEIMNLRSRLNQIYVKHSGKKL

SEQ ID NO: 170237 - protein, 174 aa, Unknown
  Bacterial polypetide isolated from the Sargasso Sea
ERILFLGQEVNDGIANSLVAQMLYLDSDDNSKPIYLYINSPGGSVTAGLAIYDTIKYVKSDVVTICVGLAASMGAFLLAAGTKGKRVALPHSRIMIHQPLGGTSQRQASDIEIEAKEILRIKDMLNMSMADMTGQSFEKIEKDTDRDYFLSAEEAKNYGLIDRVITHPSEANQP

SEQ ID NO: 170238 - protein, 84 aa, Unknown
  Bacterial polypetide isolated from the Sargasso Sea
KRFSLPNSRIMVHQPSAGFQGQATDIEIHANEVLSLKKRLNEIYSKHTGKSVEEIKSALERDNFMTADVAQSFGLIDEVVEKRS

SEQ ID NO: 170239 - protein, 153 aa, Unknown
  Bacterial polypetide isolated from the Sargasso Sea
MPIGTPSVPYRLPGSQYERWVDIYTRLGVERILFLGQEVNDGIANSLVAQMLYLDSDDNTKPIYLYINSPGGSVTAGLAIYDTIKYVKSDVVTICVGLAASMGAFLLGAGTKGKRVALPHSRIMIHQPLGGTSQRQASDIEIEAREILRIKDM

SEQ ID NO: 170240 - protein, 138 aa, Unknown
  Bacterial polypetide isolated from the Sargasso Sea
KKEIYLYINSPGGLVTAGLGIYDTMQYVKPDISTLCIGQAASMGSFLLSAGTKGKRFSLPNSRIMVHQPSAGFQGQATDIEIHANEVLSLKKRLNEIYSKHTGKSVDEIKSALERDNFMTADAAKSFGLVDEVVEKRS

SEQ ID NO: 170241 - protein, 114 aa, Unknown
  Bacterial polypetide isolated from the Sargasso Sea
MSIKIPEQLNTLIPMVVEQSSRGERAYDIYSRLLKERIVFVVGPINDAVASLVTAQLLFLESEDPKKEIFLYINSPGGLVTAGLGIYDTMQYIKPEISTLCIGQAASMGSFLLA

SEQ ID NO: 170242 - protein, 94 aa, Unknown
  Bacterial polypetide isolated from the Sargasso Sea
MSRDFEEKMNNLIPMVVEQSSKGERAYDIYSRLLKERIVFLVGPVNDSVASLVTAQFLFLESENPNKEISFYINSPGGLVTSGLGIYDTMQYIN

SEQ ID NO: 170243 - protein, 122 aa, Unknown
  Bacterial polypetide isolated from the Sargasso Sea
AGLGIYDTMQYVKPDISTLCIGQAASMGSFLLAAGTKGKRFSLPNSRIMVHQPSAGFQGQATDIEIHANEVLSLKKRLNEIYSKHTGKSVDEIKSALERDNFMTADSAKSFGLIDQVVEKRS

SEQ ID NO: 170244 - protein, 189 aa, Unknown
  Bacterial polypetide isolated from the Sargasso Sea
MVVEQSSKGERAYDIYSRLLKERIIFLTGQINDNVASLVTAQLLFLEAEDPKKEIYLYINSPGGLVTAGLGIYDTMKYVKPDISTLCMGQAASMGSFLLAAGTKGKRFSLPNSRIMVHQPSAGFQGQATDIEIHANEVLSLKKRLNEIYSKHTGKSVEEIKSALERDNFMTADVAQSFGLIDEVVEKRS

SEQ ID NO: 170245 - protein, 160 aa, Unknown
  Bacterial polypetide isolated from the Sargasso Sea
SANRIVAQMLFLEAEDPEKDIYLYINSPGGSVYDGLGIFDTMQHIKPDVHTVCVGLAASMGAFLLCAGTKGKRSSLQHSRIMIHQPLGGARGQASDIRIQADEILYLKERLNQELSDRTGQPLDRIQQDTDRDFFMSPGEAVEYGLIDSVIDKRPVQAVE

SEQ ID NO: 170246 - protein, 204 aa, Unknown
  Bacterial polypetide isolated from the Sargasso Sea
MPEIQAAGGLLPMVIEQSARGERAYDIYSRLLKERVIFLVGPVEDYMANLICAQLLFLEAENPDKDIHLYINSPGGSVTAGMAIYDTMQFIKADVSTTCIGQACSMGAFLLAGGAKGKRFCLPNSRVMIHQPLGGFQGQASDIEIHAKEILFIRERLNELLAQHTGQSLETIERDTNRDNFMSASRAVEYGLVDAVHEKRQMPV

SEQ ID NO: 170247 - protein, 141 aa, Unknown
  Bacterial polypetide isolated from the Sargasso Sea
MNTLIPMVVEQSSRGERAYDIYSRLLKERIVFLVGPINDNVASLVTAQLLFLESENPKKEISLYINSPGGLVTAGLGIYDTMQYIKPDVSTLCIGQAASMGSFLLAAGEKGKRFSLPNSRIMVHQPSAGFQGQATDIEIHA

SEQ ID NO: 170248 - protein, 133 aa, Unknown
  Bacterial polypetide isolated from the Sargasso Sea
MNKIPEHLNTLIPMVVEQSSRGERAYDIYSRLLKERIVFVVGPINDNVASLVTAQLLFLESEDPKKEISLYINSPGGLVTAGLGIYDTMQYIKPHVSTLCIGQAASMGSFLLAAGAKGKRFSLPNSRIMVHQP

SEQ ID NO: 170249 - protein, 179 aa, Unknown
  Bacterial polypetide isolated from the Sargasso Sea
MNKIPEHLNTLIPMVVEQSSRGERAYDIYSRLLKERIVFVVGPINDNVASLVTAQLLFLESEDPKKEISLYINSPGGLVTAGLGIYDTMQYIKPDVSTLCIGQAASMGSFLLAAGTKGKRYSLPNSRIMVHQPSAGFQGQATDIEIHANEVLSLKKRLNEIYSKHTNKSVDEIKSALKE

SEQ ID NO: 170250 - protein, 195 aa, Unknown
  Bacterial polypetide isolated from the Sargasso Sea
MNTLIPMVVEQTNKGERAFDIYSRLLKERIVFLVGPVNDSVASLVTAQLLFLESENPKKEINFYINSPGGLVTSGLGIYDTMQYIKSPVSTLCIGQASSMGSFLLAAGEKGKRFSLPNSRIMVHQPSAGFQGQATDIQIHAKEILSLKERLNKIYSKHTGKSLKEISEALERDKFMTADEAKDFGLIDSVVEKRK

SEQ ID NO: 170251 - protein, 197 aa, Unknown
  Bacterial polypetide isolated from the Sargasso Sea
MFENNLVPMVVEQTSRGERAFDIFSRLLKDRIVFIVGGIDDYVANLVVAQLLFLESEDPKKDIYMYINSPGGVITSGLSILDTMNYLKCDVSTVCFGQAASMGAVLLANGADKKRFALPNSRVMIHQPLGGARGQASDIEIQAKEILTLKDKLNKILAEKTKQSLKKIQTDTERDFFMNAEEAVKYGIIDEVLKERK

SEQ ID NO: 170252 - protein, 205 aa, Unknown
  Bacterial polypetide isolated from the Sargasso Sea
MKKEPSNYVVPTVIENTNRGERAFDIYSRLLKDRIIFLGTPIDDGVANLIMAQLLHLESEDPEKDIYVYINSPGGSITSLFAIYDTMKYIKPDVATVCMGLAASAGAVILAGGTPGKRYSLPHARIMLHQPAGGAEGTSKDIEIQAKLITDMRHQINGLLAEFTKKDIDQISVDTDRDFWMTAQEALEYGIVDEVLTQRELVDKK

SEQ ID NO: 170253 - protein, 206 aa, Unknown
  Bacterial polypetide isolated from the Sargasso Sea
MKKNEILNNLVPMVVEQTSRGERAYDIYSRLLKERIIFMVGPVEDHSANLIVAQLLFLESENPTKDISLYINSPGGSVTAGMSIYDTMQFVKPDISTLCIGQASSMGAILLCGGAKKKRYALPNSRVMIHQPLGSFQGQATDFDIQAKEILGIRSRLNEILSKNTGQPIKKIQLDTERDNFMTSEEAKKYGLIDEILDSRPLDTKE

SEQ ID NO: 170254 - protein, 137 aa, Unknown
  Bacterial polypetide isolated from the Sargasso Sea
KEISFYINSPGGLVTSGLGIYDTMQYIKPPVSTLCIGQASSMGSFLLAAGEKGKRFSLPNSRIMVHQPSAGYEGQATDIEIHAKEILALKERLNKIYSKHTKKSESEIKKALERDNFMTPVEAKDFGLIDEVVEKRS

SEQ ID NO: 170255 - protein, 111 aa, Unknown
  Bacterial polypetide isolated from the Sargasso Sea
MSKIPEHLNTLIPMVVEQSSRGERAYDIYSRLLKERIVFVVGPINDAVASLVTAQLLFLESEDPKKEISLYINSPGGLVTAGLGIYDTMQYVKPDVSTLCIGQAASMGSFL

SEQ ID NO: 170256 - protein, 185 aa, Unknown
  Bacterial polypetide isolated from the Sargasso Sea
RGERAYDIYSRLLKERVIFLTGPVEDYGANLIVAQMLYLEAENPDKDIHLYINSPGGSVTAGLSIYDTMQFIKPDVSTLCIGQAASMGAVLLSGGAKGKRQALPNSRVMIHQVLGGFQGQASDIEIHTQEILSIKKKLNEILANHSGQKVDKIAKDSDRDNFMSPDQAVKYGLIDAVVDSRSVKK

SEQ ID NO: 170257 - protein, 199 aa, Unknown
  Bacterial polypetide isolated from the Sargasso Sea
MEEHNSTLIPMVVEQTARGERAFDIYSRLLKERVIFLTGPINDQISNLVVAQLLFLESENPKKDISIYINSPGGVISSGLAIYDTMQFVSPSISTLCIGQAASMGALLLAGGEKGKRFALPNSRIMIHQPLGGFQGQASDIEIHAQEILLMKKKVNEILSKHTGKSLKTVEKDTDRDNFLNAEESKKYGIIDEILEERN

SEQ ID NO: 170258 - protein, 124 aa, Unknown
  Bacterial polypetide isolated from the Sargasso Sea
MSSLIPMVVEQTNRGERSYDIFSRLLKERIIFLTGEVNDAVSSVICAQFLFLESEDPKKDIFLYVNSPGGVVSSGLAIYDTMQYIRPDVSTVCIGQAASMGSLLLTAGEKGKRYCLPHSRILTH

SEQ ID NO: 170259 - protein, 152 aa, Unknown
  Bacterial polypetide isolated from the Sargasso Sea
MSSLIPMVVEQSNKGERAYDIYSRLLKERIIFLTGQINDNVASLVTAQLLFLEAEDPKKEIFLYINSPGGLVTAGLGIYDTMQYVKPDISTLCIGQAASMGSFLLSAGTKGKRFSLPNSRIMVHQPSAGFQGQATDIEIHANEVLSLKKKIE

SEQ ID NO: 170260 - protein, 114 aa, Unknown
  Bacterial polypetide isolated from the Sargasso Sea
MQYIKPPVSTLCIGQASSMGSFLLAAGEKGKRFSLPNSRIMVHQPSAGYQGQATDIEIHAKEILALKERLNKIYSKHTNKSEDQIRKALERDKFMTPDEAKDFGLIDEVVVKRS

SEQ ID NO: 170261 - protein, 195 aa, Unknown
  Bacterial polypetide isolated from the Sargasso Sea
MNNLIPMVVEQSNKGERAYDIYSRLLKERIIFLTGQINDNVASLITAQLLFLEAEDSKKEIYLYINSPGGLVTAGLGIYDTMQYIKPDISTLCIGQAASMGSFLLAAGTKGKRFSLPNSRIMVHQPSAGYQGQATDIEIHANEVLSLKKRLNEIYSKHTNKSVEEIKSALERDNFMTADVAKSFGLIDEVVEKRI

SEQ ID NO: 170262 - protein, 110 aa, Unknown
  Bacterial polypetide isolated from the Sargasso Sea
QVAPDVVTICYGLAASMGAFLLSGGTKGKRLALPNARIMIHQPLGGAQGQAVDIEIQAKEILYLKETLNGLMASHTGQDLAKVAEDTDRDYFLSPDEAVAYGLIDRVVRD

SEQ ID NO: 170263 - protein, 203 aa, Unknown
  Bacterial polypetide isolated from the Sargasso Sea
MTTKIPEHLSTLIPMVVEQSSRGERAYDIYSRLLKERIVFVVGPINDAVASLVTAQLLFLESEDPKKEISLYINSPGGLVTAGLGIYDTMQYIKPEVSTLCIGQAASMGSFLLAAGSKGKRLSLPNSRIMVHQPSAGFQGQATDIEIHANEVMSLKKRLNEIYSKHTGKSVDQIKEALERDNFMTPDNAKDFGLIDKVVEKRD

SEQ ID NO: 170264 - protein, 96 aa, Unknown
  Bacterial polypetide isolated from the Sargasso Sea
MLLAGGAEGKRFCLPHARMMIHQPLGGFQGQASDIEIHAREILFIRERLNKVLADHTGQPLDVIARDTDRDRFMSGTEAVEYGLIDKVLESRTSAE

SEQ ID NO: 170265 - protein, 195 aa, Unknown
  Bacterial polypetide isolated from the Sargasso Sea
MVPMVIEQSARGERAYDIYSRLLKERVIFMVGQVEDYMANLIVAQLLFLEAENPEKDIHLYINSPGGSVTAGMSIYDTMQFIKPNVSTICIGQACSMGALLLAGGAAGKRYCLPHSRMMIHQPLGGFQGQASDIEIHAREILTIRERLNKVLAHHTGQPMDVIARDTDRDNFMSGEEAVKYGLIDQVLTQRQLAV

SEQ ID NO: 170266 - protein, 151 aa, Unknown
  Bacterial polypetide isolated from the Sargasso Sea
QLLFLEAEDPDKDIYMYINSPGGSVYDGLGIFDTMQHVKPDIHTVCVGLAASMGAFLLAAGTKGKRSSLRHSRIMIHQPLGGARGQASDIRIQADEILFLKERLNTELSERTGKDYDTIKEDTDRDFYMSPNEAVEYGLIDMVLDKKPIRV

SEQ ID NO: 170267 - protein, 197 aa, Unknown
  Bacterial polypetide isolated from the Sargasso Sea
MTIKISEHMNTLIPMVVEQSSRGERAYDIYSRLLKERIVFLVGPINDNVASLVTAQLLFLESENPKKEVFLYINSPGGLVTAGLGIYDTMQYIKPDVSTLCIGQAASMGSFLLAAGKQGKRFSLPNSRIMVHQPSAGFQGQATDIEIHANEVLSLKKRLNEIYSKHTGKNVDQIKDALERDNFMTPDNAKDFGLIDQ

SEQ ID NO: 170268 - protein, 170 aa, Unknown
  Bacterial polypetide isolated from the Sargasso Sea
IKRKIIFLTGPIDDNIASLICAQILFLESENPKKEISFYINSPGGIVWSGLAIYDTMQYISSKIMTICVGQAASAGSLLLTAGEKGMRFSLPNSRIMVHQPSGGYQGQVTDIEIQTNEIKKTKQKLNEIYSKHTGKKISEISTIMERDKYFSAKEAIEFGLIDKVVENRK

SEQ ID NO: 170269 - protein, 109 aa, Unknown
  Bacterial polypetide isolated from the Sargasso Sea
MVPMVVEQSARGERAYDIYSRLLKDRIVFLVGPVEDHMANLVVAQLLFLESENPDKDIHLYINSPGGSVSAGMSIYDTMQFIRPDVSTLSVGQAASMGAFLLAAGAAGK

SEQ ID NO: 170270 - protein, 202 aa, Unknown
  Bacterial polypetide isolated from the Sargasso Sea
MNIIPEHLNTLIPMVVEQSSRGERAYDIYSRLLKERIVFVVGPINDNVASLVTAQLLFLESEDPKKEISLYINSPGGLVTAGLGIYDTMQYIKPHVSTLCIGQAASMGSFLLGAGAKGKRFSLPNSRIMVHQPSAGFQGQATDIEIHANEVLSLKKRLNEIYSKHTNKSVDEIKSALERDNFMTPEHAKEFGLIDKVVVNRE

SEQ ID NO: 170271 - protein, 104 aa, Unknown
  Bacterial polypetide isolated from the Sargasso Sea
MTNKISENMSTLVPMVVEQSSKGERAYDIYSRLLKERIIFLTGQINDNVASLVTAQLLFLEAEDPKKEIYLYINSPGGLVTAGLGIYDTMQYVKPDISTLCIGQ

SEQ ID NO: 170272 - protein, 136 aa, Unknown
  Bacterial polypetide isolated from the Sargasso Sea
MPIGTPSVPYRLPGSQYERWVDIYTRLGVERILFLGQEVNDGIANSLVAQMLYLDSDDNSKPIYLYINSPGGSVTAGLAIYDTIKYVKSDVVTICVGLAASMGAFLLAAGTKGKRVALPHSRIMIHQPLGGTSQRQ

SEQ ID NO: 170273 - protein, 115 aa, Unknown
  Bacterial polypetide isolated from the Sargasso Sea
MTNKINEQMNTLVPMVVEQSNRGERAYDIYSRLLKERVVFVVGPINDNVASLVTAQLLFLESENPKKDISLYINSPGGLVTSGLGIYDTMQYIKPDVTTLCIGQAASMGSFLLAA

SEQ ID NO: 170274 - protein, 195 aa, Unknown
  Bacterial polypetide isolated from the Sargasso Sea
MIPLVLEESGGSERVFDIYSRLLRERIIFLGEQVTSETANRIVAQLLFLEAEDPEKDIYMYINSPGGSVYDGLGIFDTMQHVKPDIHTVCVGLAASMGAFLLAAGTKGKRSSLRHSRIMIHQPLGGARGQASDIRIQADEILFLKERLNTELSERTGKDYETVKEDTDRDFYMSPKEAVEYGLIDLVLDKKPIRG

SEQ ID NO: 170275 - protein, 204 aa, Unknown
  Bacterial polypetide isolated from the Sargasso Sea
MEKINSGLVPMVVEQTPRGERAFDIYSRLLKERIIFLSGPIDDYISNLVVAQLLFLESENPEKDISIYINSPGGVISSGLAIYDTMQFIAPEVSTLCIGQAASMGSLLLAGGEKGKRFALTNSRIMIHQPLGGFQGQASDFEIHAKEMLLVKQKVNEILSKHTGKTLKKVEQDTDRDNFLNAKEAKTYGIIDEILESRPSTNGK

SEQ ID NO: 170276 - protein, 197 aa, Unknown
  Bacterial polypetide isolated from the Sargasso Sea
MFDSFYTNSSLSKNNSETKSALIPMVIEQTARGERSFDIYSRLLKERIIFVVGPVDDNMSTLICAQLLFLESENPKKDISMYINSPGGIVTSGLAIYDTMQYIRPDVSTVCFGQAASMGSLLLTSGAKGKRYSLPNSRIMLHQPSGGFQGQATDIQIHAKEILDLKARLNEIYQKHTGKPLKEIEKALERDNFMKSN

SEQ ID NO: 170277 - protein, 200 aa, Unknown
  Bacterial polypetide isolated from the Sargasso Sea
MNKIPEHLNTLIPMVVEQSSRGERAYDIYSRLLKERVVFVVGPINDTVASLVTAQLLFLESEDPKKEISLYINSPGGLVTAGLGIYDTMQYIKPDVSTLCIGQAASMGSFLLAAGTKGKRLSLPNSRIMVHQPSAGFQGQATDIEIHANEVLSLKKRLNEIYSKHTNKSVEEIKLALERDNFMTPESAKNFGLIDKVVVN

SEQ ID NO: 170278 - protein, 200 aa, Unknown
  Bacterial polypetide isolated from the Sargasso Sea
MNKDQINQLVPMVVEQTGRFERAYDIYSRLLKERIVFLGTPIDDTISSLIIAQLLFLEAENSEKDIFLYINSPGGIITSGMGIYDTMNYIKPDVATICMGQAASMGAFLLSGGAKGKRSALPNARIMIHQPLGGAEGQASDIKIQADEILRLRTNLNRILAKNTKQTLKKIEKDTDRNFFMSSDEAKDYGIIDTILANRT

SEQ ID NO: 170279 - protein, 202 aa, Unknown
  Bacterial polypetide isolated from the Sargasso Sea
MTKIDEHMNNLIPMVVEQTSRGERAFDIYSRLLKERIVFVIGPINDHVASLVTAQLLFLESEDPKKDIFLYINSPGGLVTSGLGVYDTMQYIKPDVSTLCIGQAASMGSFLLAAGTKGKRFSLPNSRIMVHQPSAGFQGQATDIEIHANEVLSLKKRLNEIYSKHTGKSVDEIKSALERDNFMTPDAAKEFGLVDKVVSKRD

SEQ ID NO: 170280 - protein, 167 aa, Unknown
  Bacterial polypetide isolated from the Sargasso Sea
MNTLIPMVVEQTNKGERAFDIYSRLLKERIVFLVGPVNDSVASLVTAQLLFLESENPKKEINFYINSPGGLVTSGLGIYDTMQYIKSPVSTLCIGQASSMGSFLLAAGEKGKRFSLPHSRIMVHQPSAGFQGQATDIQIHAKEILSLKERLNQIYSKHTGKSVKEIS

SEQ ID NO: 170281 - protein, 92 aa, Unknown
  Bacterial polypetide isolated from the Sargasso Sea
LLAAGAKGKRFSLPNSRIMVHQPSAGFQGQATDIEIHANEVLSLKKRLNEIYSKHTGKAVDEIKSALERDNFMTPDNAKSFGLIDKVVEKRE

SEQ ID NO: 170282 - protein, 196 aa, Unknown
  Bacterial polypetide isolated from the Sargasso Sea
MKKSQIVPIVVEQTGRMERAYDIYSRLLKERIVFIGTPIDDTIASLTIAQLLFLEAEDPDKDISIYINSPGGSVTAGLGIMDTMDYIKPDIATICMGQASSMGAVLLAAGKQGKRSALPNSRIMIHQPWAGMQGTASDIQIHAQELLMMKDRLNSILSKKTGKTLKKIATDTDRDFFMNSEQAKSYGIVDSILKKR

SEQ ID NO: 170283 - protein, 66 aa, Unknown
  Bacterial polypetide isolated from the Sargasso Sea
FSGQATDIEIHANEVLSLKKRLNEIYSKHTGKTVDEIKSALERDNFMTPDNAKSFGLIDKVVEKRE

SEQ ID NO: 170284 - protein, 159 aa, Unknown
  Bacterial polypetide isolated from the Sargasso Sea
MNYSEEFKKYATKHHGVNSMYYDKIISSMTPYIIEERQLNVAQMDVFSRLMMDRIIFLGTAINDSVANIIQAQLLFLESTDKEKDIQIYINSPGGSVYAGLGIYDTMQFIGPNVATICTGIAASMSAVLLCAGEKGKRSGLTHSRVMIHQPLGEHKAKH

SEQ ID NO: 170285 - protein, 194 aa, Unknown
  Bacterial polypetide isolated from the Sargasso Sea
STLIPMVVEQTARGERAFDIYSRLLKERVIFLTGPINDQISNLVVAQLLFLESENPKKDISIYINSPGGVISSGLAIYDTMQFVSPSISTLCIGQAASMGALLLAGGEKGKRFALPNSRIMIHQPLGGFQGQASDIEIHAQEILLMKKKVNEILSKHTGKSLKTVEKDTDRDNFLNAEESKKYGIIDEILEERN

SEQ ID NO: 170286 - protein, 203 aa, Unknown
  Bacterial polypetide isolated from the Sargasso Sea
MIRKIDEQMNTLIPMVVEQTTKGERAYDIYSRLLKERIVFLVGGVNDSVASLVTAQLLFLESENPKKEIYFYINSPGGLVTSGFGIYDTMQYIKSPVSTLCIGQASSMGSFLLSAGEKGKRFSLPNSRIMVHQPSAGFQGQATDIQIHAKEILSLKERLNKIYSKHTGKSVKEIASALERDKFMTPEEAKDFGLIDSVVEKRK

SEQ ID NO: 170287 - protein, 193 aa, Unknown
  Bacterial polypetide isolated from the Sargasso Sea
VVEQTGKGERAYDIYSRLLKERIIFLVGPVHDGLASLISAQLLFLESEDPEKEIYLYINSPGGVVSDGLAIYDTMQFIQCPVSTLCFGQAASMGSFLLAAGEKGKRFALPNSRIMVHQPSAGFQGQATDIEIHAKEIASTKSKLNSLYSKHTGQDVKAIEEALERDNFMDPESAKKFGIIDEIQEKRVPKIEK

SEQ ID NO: 170288 - protein, 71 aa, Unknown
  Bacterial polypetide isolated from the Sargasso Sea
MSRKIEDQMSTLVPMVVEQTNRGERAYDIYSRLLRERIVFLVGAVNDNVASLVTAQLLFLESENPKKEIFF

SEQ ID NO: 170289 - protein, 87 aa, Unknown
  Bacterial polypetide isolated from the Sargasso Sea
KKGKRFSLPNSRIMVHQPSAGFQGQATDIEIHANEVLSLKKRLNEIYSKHTGKSVDEIKEALERDNFMTPQNAKEFGLIDQVVEKRA

SEQ ID NO: 170290 - protein, 85 aa, Unknown
  Bacterial polypetide isolated from the Sargasso Sea
MPIGTPSVPYRLPGSQYERWVDIYTRLGVERILFLGQEVNDGIANSLVAQMLYLDSDDNSKPIYLYINSPGGSVTAGLAIYDTIK

SEQ ID NO: 170291 - protein, 118 aa, Unknown
  Bacterial polypetide isolated from the Sargasso Sea
MTNIHSALIPMVIEQTPRGERSFDIYSRLLKERVIFLSGPIDDYISNLVVAQLLFLESENPEKDISIYINSPGGSISAGLAIYDTMQFVTPSISTLCIGQAASMGALVLAGGDKKKRF

SEQ ID NO: 170292 - protein, 153 aa, Unknown
  Bacterial polypetide isolated from the Sargasso Sea
SLVTAQLSFLESENPKKEIFFYINSPGGLVTSGLGIYDTMQYIKSPVSTLCIGQASSMGSFLLAAGEKGKRFSLPNSRIMVHQPSAGFQGQATDIQIHAKEILLLKERLNKIYSKHTGKSVKEISQALERDNFMTADQAKEFGLIDSVVEKRK

SEQ ID NO: 170293 - protein, 98 aa, Unknown
  Bacterial polypetide isolated from the Sargasso Sea
LLAAGEKGKRYALPNCRIMVHQPSAGFKGQATDIEIHAKEVLSMKANLNKLYSKHTGQPVEAVEGALERDNFMSPDEALNFGIIDEIHEKRVPSKSEK

SEQ ID NO: 170294 - protein, 128 aa, Unknown
  Bacterial polypetide isolated from the Sargasso Sea
MTTKLSEHMSNLVPMVVEQSSKGERAYDIYSRLLKERIIFLTGQINDNVASLVTAQLLFLEAEDPKKEIYLYINSPGGLVTAGLGIYDTMQYVKPDISTLCIGQAASMGSFLLAAGTKGKRFSLPNSR

SEQ ID NO: 170295 - protein, 193 aa, Unknown
  Bacterial polypetide isolated from the Sargasso Sea
NLIPMVVEQSSRGERAYDIFSRLLKERIVFVVGPINDSVASLVTAQMLFLESENPKKDIFMYINSPGGLVTAGLGIYDTMQYIKPEISTLCIGQAASMGSFLLAAGTKGKRFSLPNSRIMVHQPSAGFQGQATDIEIHANEVLSLKKRLNEIYSRHTGKSVEDIKSALERDNFMTPDVAKDFGLIDKVVDKRE

SEQ ID NO: 170296 - protein, 152 aa, Unknown
  Bacterial polypetide isolated from the Sargasso Sea
MVTAQLLFLEAEDPKKEIFFYINSPGGLVTAGLGIYDTMQYVKPDISTLCIGQAASMGSFLLSAGTKGKRFSLPNSRIMVHQPSAGFQGQATDIEIHANEVLSLKKRLNEIYSKHTGKSVDEIKSALERDNFMTADTAKEFGLIDAVVEKRS

SEQ ID NO: 170297 - protein, 203 aa, Unknown
  Bacterial polypetide isolated from the Sargasso Sea
MSRDFEEKMNSLIPMVVEQTNKGERAYDIYSRLLKERIVFLVGPVNDAVASLVTAQLLFLESENPNKEISFYINSPGGLVTAGLGIYDTMQYINSPVSTLCIGQASSMGSFLLSAGEKGKRYSLPNSRIMVHQPSAGFQGQATDIQIHAKEILSLKERLNKIYSKHTGKSLNEISDALERDNFMTAEEAKKFGLIDSVVEKRK

SEQ ID NO: 170298 - protein, 111 aa, Unknown
  Bacterial polypetide isolated from the Sargasso Sea
DIHTVCVGLAASMGAFLLAAGTKGKRSSLRHSRIMIHQPLGGARGQASDIRIQADEILFLKERLNTELSERTGRDYDTIKEDTDRDFYMSPNEAVEYGLIDLVLDKKPIKV

SEQ ID NO: 170299 - protein, 107 aa, Unknown
  Bacterial polypetide isolated from the Sargasso Sea
MPIGTPSVPYRLPGSQMERWVDIYTRLGVERILFLGSEVNDGIANSLVAQMLYLDSEDSTKPIYLYINSPGGSVTAGLAIYDTIKYVKSDVVTICVGLAASMGAFRL

SEQ ID NO: 170300 - protein, 120 aa, Unknown
  Bacterial polypetide isolated from the Sargasso Sea
MDSNKIFNQLVPMVVEQTGRGERAFDIYSRLLKERIIFLVGPVNDGMASLVSAQLLFLESENPEKEISLYINSPGGVVSDGLAIYDTMQFIQSPVSTLCFGQAASMGSFLLAAGEKDKRF

SEQ ID NO: 170301 - protein, 195 aa, Unknown
  Bacterial polypetide isolated from the Sargasso Sea
MNNLIPMVVEQSSKGERAYDIYSRLLKERIVFLVGPVNDNVASLVTAQLLFLESENPKKEISFYINSPGGLVTSGLGIYDTMQYINSPVSTLCIGQASSMGSFLLSAGEKGKRFSLPNSRIMVHQPSAGFQGQATDIQIHAKEIQLLKTRLNSIYSKHTGKSVEEISKALERDNFMTPEEAKSFGLIDTVVEKRK

SEQ ID NO: 170302 - protein, 145 aa, Unknown
  Bacterial polypetide isolated from the Sargasso Sea
MTTKIPEYMNNLIPMVVEQSNRGERAYDIFSRLLKERIVFLVGPINDSVASLVTAQLLFLESENPKKEISLYINSPGGLVTAGLGIYDTMQYIKPEVSTLCIGQAASMGSFLLAAGTKGKRISLPNSRIMVHQPSAGFQGQATDM

SEQ ID NO: 170303 - protein, 60 aa, Unknown
  Bacterial polypetide isolated from the Sargasso Sea
MKDPIKNLTNNLIPMVVEQSSRGERAYDIYSRLLKERIIFLTGPIDDNIASLVCAQLLFL

SEQ ID NO: 170304 - protein, 203 aa, Unknown
  Bacterial polypetide isolated from the Sargasso Sea
MTNKIPEQLNTLILMVVEQSSRGERAYDIYSRLLKERIVFVVGPINDAVASLVTAQLLFLESEDPKKEIFLYINSPGGLVTAGLGIYDTMQYIKPEISTLCIGQAASMGSFLLAAGAKGKRFSLPNSRIMVHQPSAGFQGQATDIEIHANEVLSLKKRLNEIYSKHTGKSVEEIKTALERDNFMTPENAKSFGLIDKVVEKRE

SEQ ID NO: 170305 - protein, 128 aa, Unknown
  Bacterial polypetide isolated from the Sargasso Sea
MSNLIPMVVEQSNKGERAYDIYSRLLKERIIFLTGQINDNVASLVTAQLLFLEAEDPKKEIYLYINSPGGLVTAGLGIYDTMQYVKPEISTICIGQAASMGSFLLAAGSKGKRFSLPNSRIMVHQPSA

SEQ ID NO: 170306 - protein, 195 aa, Unknown
  Bacterial polypetide isolated from the Sargasso Sea
MSSLVPMVVEQSNKGERAYDIYSRLLKERIIFLTGQINDNVASLVTAQLLFLEAEDPKKEIYLYINSPGGLVTAGLGIYDTMQYIKPDISTLCIGQAASMGSFLLAAGTKGKRFSLPNSRIMVHQPSAGFQGQATDIEIHANEVLSLKKRLNEIYSKHTGKTVEEIKSALERDNFMTAETAKSFGLIDEVVEKRS

SEQ ID NO: 170307 - protein, 68 aa, Unknown
  Bacterial polypetide isolated from the Sargasso Sea
MTDKIPEHLNNLIPMVVEQSSRGERAYDIYSRLLKERIVFLVGPINDSVASLVTAQLLFLESQDPKKR

SEQ ID NO: 170308 - protein, 203 aa, Unknown; identical to SEQ ID NO: 170263
  Bacterial polypetide isolated from the Sargasso Sea

SEQ ID NO: 170309 - protein, 203 aa, Unknown
  Bacterial polypetide isolated from the Sargasso Sea
MTTKIPEYMNNLIPMVVEQSSKGERAYDIYSRLLKERIIFLVGPINDNVASLVTAQLLFLESENPKKEINLYINSPGGLVTAGLGIYDTMQYIKPEVSTLCIGQAASMGSFLLAAGEKGKRFSLPNSRIMVHQPSAGFQGQATDIEIHANEVLALKKRLNEIYSKHTGKSSDEIKQALERDNFMTPESAKEFGLIDKVVEKRS

SEQ ID NO: 170310 - protein, 120 aa, Unknown
  Bacterial polypetide isolated from the Sargasso Sea
MNTLIPMVVEQSSRGERAYDIYSRLLKERIVFLVGPINDNVASLVTAQLLFLESENPKKEISLYINSPGGLVTAGLGIYDTMQYIKPDVSTLCIGQAASMGSFLLAAGEKGKRFSLPNSR

SEQ ID NO: 170311 - protein, 84 aa, Unknown
  Bacterial polypetide isolated from the Sargasso Sea
CLPNSRVMIHQPLGGYQGQATDIEIHTREILKIRHTLNSILAHHTGQDLETIAKDTDRDNFMDPAQAKEYGLIDSILDKRVPNK

SEQ ID NO: 170312 - protein, 199 aa, Unknown
  Bacterial polypetide isolated from the Sargasso Sea
MTDIHSALIPMVIEQTPRGERSFDIYSRLLKERVIFLSGAIDDYISNLVVAQLLFLESENPEKDISIYINSPGGSISAGLAIYDTMQFITPSISTMCIGQAASMGALLLAGGDKKKRFALPNSRIMIHQPLGGFQGQASDFEIHAKEIIHMKKIVNEILAKHTGQSIKKIEKDTDRDNFLDASAAKIYGIVDKILEQRS

SEQ ID NO: 170313 - protein, 159 aa, Unknown
  Bacterial polypetide isolated from the Sargasso Sea
MKKEPSNYVVPTVIENTNRGERAFDIYSRLLKDRIIFLGTPIDDGVANLIMAQLLHLESEDPDKDIYVYINSPGGSITSLFAIYDTMKYIKPDVATVCMGLAASAGAVILAGGTPGKRYSLPHARIMLHQPAGGAEGTSKDIEIQAKLITDMRNQINGL

SEQ ID NO: 170314 - protein, 63 aa, Unknown
  Bacterial polypetide isolated from the Sargasso Sea
MALIPMVVEQNSRGERAYDIYSRLLKDRIIFLGTPIDDNVANVMIAQLLFLEAEDAESDIAFY

SEQ ID NO: 170315 - protein, 107 aa, Unknown
  Bacterial polypetide isolated from the Sargasso Sea
ISTLCIGQAASMGSFLLAAGTKGKRFSLPNSRIMVHQPSAGFQGQATDIEIHANEVLSLKKRLNEIYSKHTGKSVDEVKSALERDNFMTADVAKSFGLIDEVVEKRS

SEQ ID NO: 170316 - protein, 166 aa, Unknown
  Bacterial polypetide isolated from the Sargasso Sea
MTPPQPRPVIEAVSHHPIHSHWQNTSVPTVVEQSGRGERAFDIYSRLLRERIIFLGTGVDDAVADAIVAQLLFLEAEDPEKDIQIYVNSPGGSVTAGLAIYDTMQQVSPDVVTICYGLAASMGAFLLSGGAKGKRLALPNARIMIHQPLGGAQGQAVDIEIQAKEI

SEQ ID NO: 170317 - protein, 154 aa, Unknown
  Bacterial polypetide isolated from the Sargasso Sea
MSRNPFMQIPDIQAAGGLVPMVIEQSARGERAYDIYSRLLKERVIFMVGAGRRLHGQPDRRADAVPRGRKSRERHSPVHQLPGRLGDCRHVDLRHHAVHQAGCVDHLHRPGLFHGGSVVDRWHRGQALLPAAFADDDPPAAGRLPGSGFGYRDP

SEQ ID NO: 170318 - protein, 184 aa, Unknown
  Bacterial polypetide isolated from the Sargasso Sea
MNSLIPMVVEQTGKGERAYDIYSRLLKERIVFLVGPVNDNVASLVTAQLLFLESENPKKEINFYINSPGGLVTAGLGIYDTMQYINSPVSTLCIGQASSMGSFLLAAGEKGKRFSLPHSRIMVHQPSAGFQGQATDIQIHAKEILLLKERLNKIYSKHTGKSVDEIAKALERDNFMTADEAKKF

SEQ ID NO: 170319 - protein, 195 aa, Unknown
  Bacterial polypetide isolated from the Sargasso Sea
MSSLIPMVVEQSNKGERAYDIYSRLLKERIIFLTGQINDNLASLITAQLLFLEAEDPKKEIFLYINSPGGLVTAGLGIYDTMQYVKPDISTLCIGQAASMGSFLLSAGTKGKRFSLPNSRIMVHQPSAGFQGQATDIEIHANEVLSLKKRLNEIYSKHTGKSVEEIKTALERDNFMTADTAKSFGLIDSVVEKRS

SEQ ID NO: 170320 - protein, 203 aa, Unknown
  Bacterial polypetide isolated from the Sargasso Sea
MKEIENITNNLIPMVVEQSSRGERAYDIYSRLLKERIIFLTGAIDDNTASLICAQLLFLESENPNKEISFYINSPGGIVWSGLAIYDTMQYISPKIMTICIGQAASAGSLLLTAGSEGMRFSLPNSRIMVHQPSGGYQGQVTDIEIHTNEIKKTKEKLNQIYSKHTKKKIKEIETIMERDKYFSPEEAIQFGLIDKIVESRKS

SEQ ID NO: 170321 - protein, 165 aa, Unknown
  Bacterial polypetide isolated from the Sargasso Sea
IFLTGQINDNVASLVTAQLLFLEAEDPKKEIYLYINSPGGLVTAGLGIYDTMQYVKPDISTLCIGQAASMGSFLLAAGTKGKRFSLPNSRIMVHQPSAGYQGQATDIEIHAKEVLSLKKRLNEIYSKHTGKSVDEIKSALERDNFMTADVAQSFGLIDQVVEKRS

SEQ ID NO: 170322 - protein, 186 aa, Unknown
  Bacterial polypetide isolated from the Sargasso Sea
EQTSRGERAFDIFSRLLKDRIVFIVGGIDDYVANLVVAQLLFLESEDPKKDIYMYINSPGGVITSGLSILDTMNYLKCDVSTVCFGQAASMGAVLLANGADKKRFALPNSRVMIHQPLGGARGQASDIEIQAKEILTLKDKLNKILADKTKQSLKKIQTDTERDFFMNADEAVKYGIIDEVLKERK

SEQ ID NO: 170323 - protein, 187 aa, Unknown
  Bacterial polypetide isolated from the Sargasso Sea
MLTVNRGERAYDIYSRLLKERIVFVVGQITDNVASLVTAQLLFLESENPKKEIYLYINSPGGLVTAGLGIYDTMQYVKPEVSTLCIGQACSMGSFLLAAGEKGKRFSLPNSRIMVHQPSAGFQGQATDIEIHANEVLSLKKRLNEIYSKHTGLSVDEIKLALERDNFMTAENAKSFGLIDKVVDKRV

SEQ ID NO: 170324 - protein, 36 aa, Unknown
  Bacterial polypetide isolated from the Sargasso Sea
MANLVPMVVEQTSRGERAYDIFSRLLKERIIFLTGP

SEQ ID NO: 170325 - protein, 99 aa, Unknown
  Bacterial polypetide isolated from the Sargasso Sea
AASMGALLLAGVDKKKRFALPNSRIMIHQPLGGFQGQASDFEIHAKEILHMKKIVNEILSKHTGHTIKKIEKDTDRDNFLDATAAKSYGIVDSILEERG

SEQ ID NO: 170326 - protein, 183 aa, Unknown
  Bacterial polypetide isolated from the Sargasso Sea
NRGERAYDIYSRLLKERIVFLVGPVNDHVASLITAQLLFLESENPKKEISFYINSPGGLVTAGLGIYDTMQYIKPAVSTLCIGQASSMGSFLLAAGTKGKRYSLPNSRIMVHQPSAGYQGQATDIEIHAKEILSLKKRLNAIYSKHTKKNEEEIREALERDKFMSPQEAKDFGLIDSVVEKRS

SEQ ID NO: 170327 - protein, 142 aa, Unknown
  Bacterial polypetide isolated from the Sargasso Sea
MDLGKEFKDYAIKHHGINSMYYDKIVSSMTPYIIEERQLNVAQMDVFSRLMMDRIMFLGTAINDNVANIIQAQLLFLQSTDSTSDINMYINSPGGSVYAGLGIYDTMQFISPNVATICTGIAASMSAILLCAGEKGKRSVLT

SEQ ID NO: 170328 - protein, 203 aa, Unknown
  Bacterial polypetide isolated from the Sargasso Sea
MPIGTPSVPYRLPGSQYERWVDIYTRLGVERILFLGQEVNDGIANSLVAQMLYLDSDDNSKPIYLYINSPGGSVTAGLAIYDTIKYVKSDVVTICVGLAASMGAFLLAAGTKGKRVALPHSRIMIHQPLGGTSQRQASDIEIEAKEILRIKDMLNMSMADMTGQSFEKIEKDTDRDYFLSAEEAKNYGLIDRVITHPSEANQA

SEQ ID NO: 170329 - protein, 152 aa, Unknown
  Bacterial polypetide isolated from the Sargasso Sea
MPIGTPSVPYRLPGSQYERWVDIYTRLGVERILFLGQEVNDGIANSLVAQMLYLDSDDNSKPIYLYINSPGGSVTAGLAIYDTIKYVKSDVVTICVGLAASMGAFLLAAGTKGKRVALPHSRIMIHQPLGGTSQRQASDIEIEAKEILRIKD

SEQ ID NO: 170330 - protein, 36 aa, Unknown
  Bacterial polypetide isolated from the Sargasso Sea
MNKIPEHLNTLIPMVVEQSSRGERAYDIYSRLLKER

SEQ ID NO: 170331 - protein, 148 aa, Unknown
  Bacterial polypetide isolated from the Sargasso Sea
QILFLESENPKKEISFYINSPGGIVWSGLAIYDTMQYVSSKIMTICIGQAASAGSLLLTAGEKGMRFSLPNSRIMIHQPSGGMQGQVTDIEIQTNEIKKTKLKLNEIYSKHTGKKLSEISSIMERDKYFSADEAIKFGLIDKVVKDRK

SEQ ID NO: 170332 - protein, 193 aa, Unknown
  Bacterial polypetide isolated from the Sargasso Sea
PMVVEQTSRGERSYDIYSRLLKERIIFLVGPVDDNIASLVCAQLLFLEAENPKKDISMYINSPGGVVTSGLSIYDTMEYIRPDVSTVCIGQAASMGSLLLTAGAKNKRYCLPNARIMTHQPSGGFQGQASDIEIHAKEIINLRSRLNGIYVKHSGKKIAEIERLMDRDTFLSPEDAFKLGLIDEVVDKRPNAK

SEQ ID NO: 170333 - protein, 106 aa, Unknown
  Bacterial polypetide isolated from the Sargasso Sea
DVVTICFGVAASMGAFLLSGGAKGKRLALPNSRIMIHQPLGGAQGQAVEIEIQAKEILFLKKTLNSLLAEHTGQPLEKINEDTERDYFLSPSEAVEYGLIDKVIKK

SEQ ID NO: 170334 - protein, 108 aa, Unknown
  Bacterial polypetide isolated from the Sargasso Sea
MKDPLDNLTNNLIPMVVEQSSRGERAYDIYSRLLKERIIFLTGPIDDNIASLICAQILFLESENPKKEISFYINSPGGIVWSGLAIYDTMQYVSSKIMTYVLVKLLQL

SEQ ID NO: 170335 - protein, 111 aa, Unknown
  Bacterial polypetide isolated from the Sargasso Sea
DKEKDIQIYINSPGGSVYAGLGIYDTMQFIGPNVATICTGIAASMAAVLLCAGEKGKRSGLTHSRVMIHQPLGGAQGQASDIEITAREIGKLKKELYEIIASHTGQRYDKV

SEQ ID NO: 170336 - protein, 159 aa, Unknown
  Bacterial polypetide isolated from the Sargasso Sea
MTTNLSEHMSNLVPMVVEQSSKGERAYDIYSRLLKERIIFLTGQINDNVASLVTAQLLFLEAEDPKKEIYLYVNSPGGLVTAGLGIYDTMQYVKPDISTLCIGQAASMGSFLLAAGTKGKRFSLPNSRIMVHQPSAGFQGQATDIEIHANEVLSLKKRL

SEQ ID NO: 170337 - protein, 154 aa, Unknown
  Bacterial polypetide isolated from the Sargasso Sea
MNNLIPMVVEQSSRGERAYDIYSRLLKERIVFVVGPINDGVASLVTAQLLFLESEDPKKEISLYINSPGGLVTAGLGIYDTMQYIKPEVNTLCIGQAASMGSFLLSAGAKGKRFSLPNSRIMVHQPSAGFQGQATDIEIHANEVLSLKKRLNEI

SEQ ID NO: 170338 - protein, 76 aa, Unknown
  Bacterial polypetide isolated from the Sargasso Sea
MNNLIPMVVEQSSKGERAYDIYSRLLKERIVFLVGPVNDNVASLVTAQLLFLESENPKKEISFYINSPGGLVTSGL

SEQ ID NO: 170339 - protein, 166 aa, Unknown
  Bacterial polypetide isolated from the Sargasso Sea
IVFVVGPINDSVASVVTAQLLFLESENPKKDIYLYINSPGGLVTAGLGIYDTMQYIKPDVSTLCIGQAASMGSFLLAAGQKGKRFSLPNSRIMVHQPSAGFQGQATDIEIHANEVLSLKKRLNEIYSTNTGKSVDEIKKALERDNFMTPKNAKDFGLIDQVVEKRT

SEQ ID NO: 170340 - protein, 160 aa, Unknown
  Bacterial polypetide isolated from the Sargasso Sea
MTDMQSALIPMVIEQTPRGERSFDIYSRLLKERVIFLSGPIDDYISNLVVAQLLFLESENPEKDISIYINSPGGSISAGLAIYDTMQFVTPSISTLCIGQAASMGALLLAGGDKKKRFALPNSRIMIHQPLGGFQGQASDFEIHAKEILHMKKIVNEIYQ

SEQ ID NO: 170341 - protein, 200 aa, Unknown
  Bacterial polypetide isolated from the Sargasso Sea
MSSLVPIVIEQTSKGERSYDIFSRLLKDRIIMLEGPIGEHTASVLCAQLLFLESQAPGKDIVLYINSPGGLVTAGMAIYDTMQYVKSDIQTIVIGQACSMGSLLASAGTKGKRMMLPHSRHMIHQPLGGAKGQATDVQIQANELLRWKTELTKIYEKHTGQKLEKLKDDMERDKFMTSEESIAYGLADKIVHSREEDNKA

SEQ ID NO: 170342 - protein, 200 aa, Unknown
  Bacterial polypetide isolated from the Sargasso Sea
MPIGTPSVPYRLPGSQMERWVDIYTRLGVERILFLGSEVNDGIANSLVAQMLYLDSEDSSKPIYLYINSPGGSVTAGLAIYDTIQYVKSEVVTICVGLAASMGAFLLAAGTKGKRVALPHSRIMIHQPLGGTSRRQASDIEIEAREILRMKEMLNRSLADMSGQSFEKIEKDTDRDYFLSAEEAKEYGLIDRVISHPNEA

SEQ ID NO: 170343 - protein, 127 aa, Unknown
  Bacterial polypetide isolated from the Sargasso Sea
GLAIYDTMQFIQSPVSTLCFGQAASMGSFLLAAGEKGKRYALPNSRIMVHQPSAGFQGQATDIEIHAKEVLAMKANLNKIYAKHTGQPVEAIEEALERDNFMSPEEAQKFGIIDSIQEKRVEPKTEK

SEQ ID NO: 170344 - protein, 195 aa, Unknown
  Bacterial polypetide isolated from the Sargasso Sea
MNTLVPMVVEQSNRGERAYDIYSRLLKERVVFVVGPINDNVASLVTAQLLFLESENPKKDISLYINSPGGLVTSGLGIYDTMQYIKPDVTTLCIGQAASMGSFLLAAGAKGKRFSLPNSRIMVHQPSAGYQGQATDIEIHAKEVLSLKKRLNEIYSKHTNKSVDEIKSALERDNFMTPESAKSFGLIDKVVEKRE

SEQ ID NO: 170345 - protein, 201 aa, Unknown
  Bacterial polypetide isolated from the Sargasso Sea
RSYRYLTINLIPMVVEQSSRGERAYDIYSRLLKERIIFLTGPIDDNIASLICAQILFLESENPKKEISFYINSPGGIVWSGLAIYDTMQYVSSKIMTICVGQAASAGSLLLTAGDKDMRFSLPNSRIMVHQPSGGYQGQVTDIEIQTTEIKKTKERLNEIYAKHTGKKINEISSIMERDKYFSPKEAISFGLIDKIVENRK

SEQ ID NO: 170346 - protein, 120 aa, Unknown
  Bacterial polypetide isolated from the Sargasso Sea
YDTMQFVEPEVGTICMGLGASMGQFLLCAGAKGKRFALPHARILMHQPLGGVRGDATDIAIQAEQMAFTKQILQQRIAEHTGQSIETIETDSDRDRWFTAEEASDYGIIDKVIVRRGEMH

SEQ ID NO: 170347 - protein, 195 aa, Unknown
  Bacterial polypetide isolated from the Sargasso Sea
MIPLVLEESGGSERVFDIYSRLLRERIIFLGEQVTSETANRIVAQLLFLEAEDPEKDIYMYINSPGGSVYDGLGIFDTMQHVKPDIHTVCVGLAASMGAFLLAAGTKGKRSSLRHSRIMIHQPLGGARGQASDIRIQADEILFLKERLNTELSERTGKDYETIKEDTDRDFYMSPKEAVDYGLIDLVLDKKPVKT

SEQ ID NO: 170348 - protein, 150 aa, Unknown
  Bacterial polypetide isolated from the Sargasso Sea
MLYLEAENPDKDIHLFINSPGGSVTAGLSIYDTMQFIKPDVSTLCIGQAASMGAVLLSGGAKGKRQALPNSRVMIHQVLGGFQGQASDIEIHTQEILSIKKKLNEILANHSGQKVDKIAKDSDRDNFMSPDQAVKYGLIDAVVDSRSVKK

SEQ ID NO: 170349 - protein, 119 aa, Unknown
  Bacterial polypetide isolated from the Sargasso Sea
SILDTMNFIRPSVSTLFVGQAASMGAVLLSGGEKKKRFCLSNARVMIHQPLGSFQGQATDFDIQAKEILSIRSKLNQILSKNTGQTIKKIQADTERDNFMQPDDAKKYGLIDQILLSRE

SEQ ID NO: 170350 - protein, 95 aa, Unknown
  Bacterial polypetide isolated from the Sargasso Sea
MQDPIDTYMNTLVPMVVEQTARGERSYDIYSRLLKERIIFVSGPVHDGMATLLVAQLLFLEAENPKKDISMYINSPGGVVTSGLSIYDTMQYIRP

SEQ ID NO: 170351 - protein, 126 aa, Unknown
  Bacterial polypetide isolated from the Sargasso Sea
MDNIKSALVPMVVEQTSRGERAFDIYSRLLKERIIFVVGPVDDMMSTLVCAQLLFLESENPKKDISMYINSPGGIVTSGLAIYDTMQYIKPDISTVCFGQAASMGSLLLTSGAKGKRYSLPNSRIM

SEQ ID NO: 170352 - protein, 115 aa, Unknown
  Bacterial polypetide isolated from the Sargasso Sea
MSREFEEKMNSLIPMVVEQTGKGERAYDIYSRLLKERIVFLVGPVNDAVASLVTAQLLFLESENPNKEISFYINSPGGLVTAGLGIYDTMQYINSPVSTLCIGQASSMGSFLLSA

SEQ ID NO: 170353 - protein, 202 aa, Unknown
  Bacterial polypetide isolated from the Sargasso Sea
MNKIPEHLNTLIPMVVEQSSRGERAYDIYSRLLKERVVFVVGPINDNVASLVTAQLLFLESEDPKKEISLYINSPGGLVTAGLGIYDTMQYIKPDVSTLCIGQAASMGSFLLAAGTKGKRFSLPNSRIMVHQPSAGFQGQATDIEIHANEVLSLKKRLNEIYSKHTNKSVEVIKSALERDNFMTPDSAKEFGLIDKVVVNRE

SEQ ID NO: 170354 - protein, 74 aa, Unknown
  Bacterial polypetide isolated from the Sargasso Sea
MSRKIEEHMNNLIPMVVEQTTKGERAYDIYSRLLKERIVFLVGPVNDNVASLVTAQLLFLESENPKKKFIFILI

SEQ ID NO: 170355 - protein, 99 aa, Unknown
  Bacterial polypetide isolated from the Sargasso Sea
MTSKISEHMNNLIPMVVEQSNRGERAYDIYSRLLKERIVFLVGQINDNVASLVTAQLLFLESENPKKEVYLYINSPGGLVTAGMGIYDTMQYIKPEVST

SEQ ID NO: 170356 - protein, 115 aa, Unknown
  Bacterial polypetide isolated from the Sargasso Sea
MPIGTPSVPYRLPGSQMERWVDIYTRLGVERILFLGSEVNDGIANSLVAQMLYLDSEDSSKPIYLYINSPGGSVTAGLAIYDTIQYVKSDVVTICVGLAASMGAFLLAAGTKGKR

SEQ ID NO: 170357 - protein, 204 aa, Unknown
  Bacterial polypetide isolated from the Sargasso Sea
MSSLIPVVVEQTNRGERSYDIFSRLLKERIIFLTGEVNDAVSSVICAQFLFLESEDPKKDIFLYINSPGGVVSSGLAIYDTIQYIRPDVSTVCVGQAASMGSLLLASGTRGKRYCLPHSRIMTHQPSGGVQGQATDIEIHAKEIINLKKKLNLIYEKHTGQSLDVIEKMMERDYFMSADEAKKTGIVDKVVSERPDFEKNSKKK

SEQ ID NO: 170358 - protein, 151 aa, Unknown
  Bacterial polypetide isolated from the Sargasso Sea
LFLEAENPKKDISMYINSPGGVVTSGLSIYDTMQYIRPKISTLCVGQAASMGSLLLAAGQPEMRFSLPNSRIMVHQPSGGFQGQASDIELQAREILELKKRLNLIYVKHCGQKLDKVEASLDRDNFMTPDEALKWGLIDEIIDKRIEEVEE

SEQ ID NO: 170359 - protein, 121 aa, Unknown
  Bacterial polypetide isolated from the Sargasso Sea
MSNSQELQMSSLIPMVVEQTNRGERAFDIYSRLLKERIIFVIGPIDDAVSSVVCAQLLFLEADNPTKDISMYINSPGGIVTSGLAMYDTMEYIRPDISTVCIGQAASMGSLLLTAGAKGKR

SEQ ID NO: 170360 - protein, 195 aa, Unknown
  Bacterial polypetide isolated from the Sargasso Sea
MSNLVPMVVEQSSKGERAYDIYSRLLKERIIFLTGQINDNVASLVTAQLLFLEAEDPKKEIYLYINSPGGLVTAGLGIYDTMQYVKPDISTLCIGQAASMGSFLLAAGTKGKRFSLPNSRIMVHQPSAGFQGQATDIEIHANEVLSLKKRLNEIYSKHTGKSVDEIKSALERDNFMTADVAQSFGLIDEVVEKRS

SEQ ID NO: 170361 - protein, 164 aa, Unknown
  Bacterial polypetide isolated from the Sargasso Sea
FLVGPINDNVASLVTAQLLFLESEDPKKEISLYINSPGGLVTAGLGIYDTMQYIKPDVSTLCIGQAASMGSFLLAAGTKGKRFSLPNSRIMVHQPSAGFQGQATDIEIHANEVLSLKKRLNEIYSKHTNKSVDEIKSALERDNFMTPENAKDFGLIDKVVVNRL

SEQ ID NO: 170362 - protein, 82 aa, Unknown
  Bacterial polypetide isolated from the Sargasso Sea
MSNLIPMVVEQSSKGERAYDIYSRLLKERIIFLTGQINDNVASLVTAQLLFLEAEDPKKEIYLYINSPGGLVTAGLGIYDTM

SEQ ID NO: 170363 - protein, 95 aa, Unknown
  Bacterial polypetide isolated from the Sargasso Sea
MTDIHSALIPMVIEQTPRGERSFDIYSRLLKERVIFLSGPIDDYISNLVVAQLLFLESENPEKDISIYINSPGGSISAGLAIYDTMQFIKPSIST

SEQ ID NO: 170364 - protein, 136 aa, Unknown
  Bacterial polypetide isolated from the Sargasso Sea
EIYLYINSPGGLVTAGLGIYDTIQYIKPEVSTLCIGQACSMGSFLLASGQKGKRFSLPNSRIMVHQPSAGFQGQATDIEIHANEVLSLKKRLNEIYSKHTGKSVEEIKLALERDNFMTADNAKSFGLIDSVVDKRI

SEQ ID NO: 170365 - protein, 203 aa, Unknown
  Bacterial polypetide isolated from the Sargasso Sea
MTIKIPEQLNTLIPMVVEQSSRGERAYDIYSRLLKERIVFVVGPINDAVASLVTAQLLFLESEDPKKEISLYINSPGGLVTAGLGIYDTMQYIKPEISTLCIGQAASMGSFLLAAGTKGKRFSLPNSRIMVHQPSAGFQGQATDIEIHANEVLSLKKRLNEIYSKHTGKSVDEIKSALERDNFMTPDNAKLFGLIDKVVEKRE

SEQ ID NO: 170366 - protein, 189 aa, Unknown
  Bacterial polypetide isolated from the Sargasso Sea
MVVEQSSRGERAYDIYSRLLKERIVFVVGPINDAVASLVTAQLLFLESEDPKKEISLYINSPGGLVTAGLGIYDTMQYVKPEVTTLCIGQAASMGSFLLAAGAKGKRFSLPNSRIMVHQPSAGFQGQATDIEIHANEVLSLKKRLNEIYSKHTGKSVDDIKLALERDNFMTPENAKDFGLIDKVVVKRE

SEQ ID NO: 170367 - protein, 92 aa, Unknown
  Bacterial polypetide isolated from the Sargasso Sea
LLAAGQNGKRFSLPNSRIMVHQPSAGFQGQATDIEIHANEVLSLKKRLNEIYSKHTGKSVEEIKSALERDNFMTAQNAKSFGLIDEVVEKRS

SEQ ID NO: 170368 - protein, 182 aa, Unknown
  Bacterial polypetide isolated from the Sargasso Sea
SGRGERAFDIYSRLLRERIIFLGTGINDQVSDSLVAQLLFLEAEDPEKDIQIYINSPGGSVTAGMAIYDTMQQISPDVVTICFGVAASMGAFLLSGGAKGKRLALPNSRIMIHQPLGGAQGQAVEIEIQAKEILFLKKTLNSLLADHTGQPLDKINEDTERDYFLSPSEAVEYGLIDKVIKK

SEQ ID NO: 170369 - protein, 201 aa, Unknown
  Bacterial polypetide isolated from the Sargasso Sea
TKFPEHLNTLIPMVVEQSSRGERAYDIYSRLLKERIVFVVGPINDSIASLVTAQLLFLESEDPKKEISLYINSPGGLVTAGLGIYDTMQYIKPEVSTLCIGQAASMGSFLLAAGTKGKRFSLPNSRIMVHQPSAGFQGQATDIEIHANEVLSLKKRLNEIYAKHTNKSVDDIKTALERDNFMTPDNAKDFGLIDKVVSKRE

SEQ ID NO: 170370 - protein, 179 aa, Unknown
  Bacterial polypetide isolated from the Sargasso Sea
MSRKTEEQMNSLIPMVVEQTAKGERAFDIYSRLLKERIVFLVGPVNDNVASLVTAQLLFLESENPKKGINFYINSPGGLVTAGLGIYDTMQYINSPVSTLCIGQASSMGSFLLAAGEKGKRFSLPNSRIMVHQPSSGFQGQATDIQIHAKEILDLKNRLNKIYSKHTGKSVEEISNALE

SEQ ID NO: 170371 - protein, 186 aa, Unknown
  Bacterial polypetide isolated from the Sargasso Sea
MKDKISEQMNTLIPMVVEQSSKGERAYDIYSRLLKERIIFLVGPINDNVASLVTAQMLFLESENPKKEIYLYINSPGGLVTAGLGIYDTMQYIKPDVSTLCFGQAASMGSFLLSAGQKGKRFSLPNSRVMVHQPSAGYQGQATDIEIHANEVLALKKRLNEIYSKHTGKSVDEIKAALERDKFMTP

SEQ ID NO: 170372 - protein, 203 aa, Unknown; identical to SEQ ID NO: 170328
  Bacterial polypetide isolated from the Sargasso Sea

SEQ ID NO: 170373 - protein, 169 aa, Unknown
  Bacterial polypetide isolated from the Sargasso Sea
RIIFVSGPIHDALSTLIVAQLLFLESENPKKEISMYINSPGGVVTSGLSIYDTMRYIQPKISTLCVGQAASMGSLLLTAGDKGQRFTLPNSRIMLHQPSGGFQGQASDIALHAKEILLLKERLNLIYVEHTGQKLEEVEKALDRDNFMTAEEAKAWGIIDKIITSRGES

SEQ ID NO: 170374 - protein, 129 aa, Unknown
  Bacterial polypetide isolated from the Sargasso Sea
QLLYLEAENPKKEISMYINSPGGVVSSGLAIYDTMQYIKPEVSTLCIGQAASMGSLLLAAGEKNKRFALPNSRIMVHQPSGGFQGQASDIERHAKEIISLRSRLNEIYVNHTGKDLKTIEAALDRDTFM

SEQ ID NO: 170375 - protein, 105 aa, Unknown
  Bacterial polypetide isolated from the Sargasso Sea
AASMGSLLLMAGAAGKRHALPNSRIMTHQPSGGFQGQASDIEIHAREILDLRKRLNSIYEHHTGKSLKQVEKIMERDTFMTAEDAKSFGLIDEVVTKRPVPDKEL

SEQ ID NO: 170376 - protein, 117 aa, Unknown
  Bacterial polypetide isolated from the Sargasso Sea
MNNLIPMVVEQSSRGERAYDIYSRLLKERIVFVVGPINDTVASLVTAQLLFLESEDPKKEISLYINSPGGLVTAGLGIYDTMQYIKPEVNTLCIGQAASMGSFLLAAGAKGKRFSLP

SEQ ID NO: 170377 - protein, 105 aa, Unknown
  Bacterial polypetide isolated from the Sargasso Sea
VVTICFGVAASMGAFLLSGGSKGKRLALPNSRIMIHQPLGGAQGQAVEIEIQAKEILFLKKTLNSLLAEHTGQPLEKINEDTERDYFLSPSEAVEYGLIDKVIKK

SEQ ID NO: 170378 - protein, 196 aa, Unknown
  Bacterial polypetide isolated from the Sargasso Sea
HLSNLIPMVVEQSSRGERAYDIYSRLLKERIVFVVGPINDSVASVVTAQLLFLESEDPKKEISLYINSPGGLVTAGLGIYDTMQYIKPDVSTLCIGQAASMGSFLLAAGTKGKRLSLPNSRIMVHQPSAGFQGQATDIEIHAKEVLSLKERLNEIYSKHTNKSVDEIKQALERDNFMTPENAKDFGLIDKVVDKRD

SEQ ID NO: 170379 - protein, 67 aa, Unknown
  Bacterial polypetide isolated from the Sargasso Sea
MTIKIPEQLNTLIPMVVEQSSRGERAYDIYSRLLKERIVFVVGPINDAVASLVTAQLLFLESEDPKK

SEQ ID NO: 170380 - protein, 167 aa, Unknown
  Bacterial polypetide isolated from the Sargasso Sea
MVVEQTNRGERAYDIFSRLLKERIIFLNGPIDDGVASLVSSQLLFLESENPKKDISMYVNSPGGIVTSGLAIYDTMEYIRPDVSTVCMGQAASMGSLLLMAGAEGKRYALPNARIMTHQPSGGFQGQASDIEIHAREILDLRKRLNNIYERHTGESLKQVEKIMERD

SEQ ID NO: 170381 - protein, 240 aa, Unknown
  Bacterial polypetide isolated from the Sargasso Sea
MDVRAGQPTGPVVPRDSQGDPFGALLRNRIVFLGSQVDDFNADAVISQLLLLDQQDPTKEIKLFINSPGGSVTAGMGIYDAMQFCQAPVSTVCLGLAASMGAFLLASGEKGRRMSMPNARIMIHQPLGGAQGSAVDIEIQAKEIMHHKANLNKLMAFHTGQDVKQIDEDTDRDRYMSPLEAKQYGVIDVVIGGDDAGLKIDGSFTEKLKTKKDYVAWGDESQDGSSGSRFTGETEDAKLS

SEQ ID NO: 170382 - protein, 202 aa, Unknown
  Bacterial polypetide isolated from the Sargasso Sea
MKNTIEEQMNNLIPMVVEQSNRGERAYDIYSRLLKERIIFLVGPVNDNVASLVIAQLLFLESENPKKEISFYINSPGGLVTSGLGIYDTMQYIKAPVSTLCIGQASSMGSFLLAAGEKGKRFSLPNSRIMVHQPSAGYQGQATDIEIHAKEILSLKKRLNKIYAKHTKKSEEDIKVALERDNFMTPEEAKDFGLIDQVVEKR

SEQ ID NO: 170383 - protein, 126 aa, Unknown
  Bacterial polypetide isolated from the Sargasso Sea
MIRKIEEQMNNLIPMVVEQTTKGERAYDIYSRLLKERIVFLVGGVNDTVASLVTAQLLFLESENPKKEIYFYINSPGGLVTSGLGIYDTMQYIKSPVSTLCIGQASSMGSFLLAAGEKGKRFSLPN

SEQ ID NO: 170384 - protein, 59 aa, Unknown
  Bacterial polypetide isolated from the Sargasso Sea
MTNKIPEQLNTLIPMVVEQSSRGERAYDIYSRLLKERIVFVVGPIHDAVASLVTAQLLF

SEQ ID NO: 170385 - protein, 124 aa, Unknown
  Bacterial polypetide isolated from the Sargasso Sea
VTAGLGIYDTMQYINSPVSTLCIGQASSMGSFLLAAGEKGKRYSLPNSRIMVHQPSAGFQGQATDIQIHAKEILSLKERLNKIYSKHTGKSVDEISKALERDNFMTAEDAKKFGLIDSVVEKRK

SEQ ID NO: 170386 - protein, 135 aa, Unknown
  Bacterial polypetide isolated from the Sargasso Sea
SPGGVVSDGLAIYDTMQFIQSPVSTLCFGQAASMGSFLLAAGEKDKRFALPNSRIMVHQPSAGFQGQATDIEIHAKEVLAQKSNLNKIYSKHTGQPVEAIEEALERDNFMSPTDAQKFGIIDSIQEKRVAPKIEK

SEQ ID NO: 170387 - protein, 144 aa, Unknown
  Bacterial polypetide isolated from the Sargasso Sea
MSDKISEHMSNLIPMVVEQSSRGERAYDIFSRLLKERIIFVVGPINDNIASLVTAQMLFLESENPKKDIFMYINSPGGLVTAGLGIYDTMQYIKPEVSTLCIGQAASMGSFLLSAGCKGKRFSLPNSRIMVHQPSAGFQGQATD

SEQ ID NO: 170388 - protein, 92 aa, Unknown
  Bacterial polypetide isolated from the Sargasso Sea
LIICRNKGKRYSLPNSRIMVHQPSAGFQGQATDIEIHANEVLSLKKRLNEIYSKHTGKSVDEIKTALERDNFMTADTAKSFGLIDYVVEKRS

SEQ ID NO: 170389 - protein, 97 aa, Unknown
  Bacterial polypetide isolated from the Sargasso Sea
MSNLIPMVVEQSSRGERAYDIFSRLLKERIVFVVGPINDSVASLVTAQMLFLESENPKKDIFMYINSPGGLVTAGLGIYDTMQYIKPEISTLCIGQA

SEQ ID NO: 170390 - protein, 191 aa, Unknown
  Bacterial polypetide isolated from the Sargasso Sea
IPMVVEQTTKGERAFDIYSRLLKERIVFLVGGVNDNVASLVTAQLLFLESENPKKEIYFYINSPGGLVTSGLGIYDTMQYIKSPVSTLCIGQASSMGSFLLAAGEKGKRFSLPNSRIMVHQPSAGFQGQATDIQIHAKEILSLKERLNKIYSKHTGKSVKEISTALERDNFMTAEEAKEFGLIDKVVEKRN

SEQ ID NO: 170391 - protein, 152 aa, Unknown
  Bacterial polypetide isolated from the Sargasso Sea
MVTAQLLFLESENPKKEISFYINSPGGLVTSGLGIYDTMQYINSPVSTLCIGQASSMGSFLLSAGEKGKRYSLPNSRIMVHQPSAGFQGQATDIQIHAKEIQSLKNRLNQIYSKHTGKSVDEISKALERDNFMTPEEAKNFGLIDSVVEKRK

SEQ ID NO: 170392 - protein, 158 aa, Unknown
  Bacterial polypetide isolated from the Sargasso Sea
GANLIVAQMLYLEAENPDKDIHLYINSPGGSVTAGLSIYDTMQFIKPDVSTLCIGQAASMGAILLCGGAKGKRQALPNSRVMIHQVLGGFQGQASDIEIHTQEILSIKKKLNEILASHSGQKVDKIAKDSDRDNFMSPEQAVKYGLIDDVVDSRSVKK

SEQ ID NO: 170393 - protein, 195 aa, Unknown
  Bacterial polypetide isolated from the Sargasso Sea
MNSLIPMVVEQTSKGERAYDIYSRLLKERIVFLVGPVNDAVASLVTAQLLFLESENPNKEINFYINSPGGLVTAGLGIYDTMQYINSPVSTLCIGQASSMGSFLLAAGEKGKRYSLPNSRIMVHQPSAGFQGQATDIQIHAKEIMSLKERLNNIYSKHTGKSVSEISEALERDNFMTAEEAKNFGLIDSVVEKRK

SEQ ID NO: 170394 - protein, 156 aa, Unknown
  Bacterial polypetide isolated from the Sargasso Sea
TVASLVTAQLLFLESENPNKEISFYINSPGGLVTSGLGIYDTMQYINSPVSTLCIGQASSMGSFLLAAGEKGKRYSLPNSRIMVHQPSAGFQGQATDIQIHAQEIQSLKNRLNNIYSRHTGKTVDEISKALERDNFMTADEAKKFGLIDSVVEKRK

SEQ ID NO: 170395 - protein, 59 aa, Unknown
  Bacterial polypetide isolated from the Sargasso Sea
MVVEQTSKGERAYDIYSRLLKERIVFLVGPVNDAVASLVTAQLLFLESENPNKEIRFLY

SEQ ID NO: 170396 - protein, 119 aa, Unknown
  Bacterial polypetide isolated from the Sargasso Sea
MDKINSGLVPMVVEQTPRGERAFDIYSRLLKERIIFLSGPIDDYISNLVVAQLLFLESENPEKDISIYINSPGGVISSGLAIYDTMQFVVPEVSTLCIGQAASMGSLLLAGGQKGKRFA

SEQ ID NO: 170397 - protein, 202 aa, Unknown
  Bacterial polypetide isolated from the Sargasso Sea
MTKIDEHMNALIPMVVEQTSRGERAFDIYSRLLKERIVFVVGPINDHVASLVTAQLLFLESEDPKKDIFLYVNSPGGLVTSGLGIYDTMQYIKPDVSTLCIGQAASMGSFLLAAGTNGKRYSLPNSRIMVHQPSAGYQGQATDIEIHANEVMSLKKRLNEIYSKHTGKSVDEIKSALERDNFMTPDAAKDFGLVDKVVSKRE

SEQ ID NO: 170398 - protein, 208 aa, Unknown
  Bacterial polypetide isolated from the Sargasso Sea
MKDPIDVYMNNLVPMVVEQTSRGERAYDIFSRLLKERIIFLNGPVHDGMSSLVVAQLLHLEAENPTKDISMYINSPGGVVTSGLSIYDTMQYIKPKVSTLVIGQAASMGSLLLTAGEKGMRFSLPNSRVMVHQPSGGYEGQATDIMIHAEETLKLKKRLNEIYVHHTGQKYETVEAALERDNFMSPEDAKEWGLIDEIVTKRTSDDEK

SEQ ID NO: 170399 - protein, 111 aa, Unknown
  Bacterial polypetide isolated from the Sargasso Sea
MPIGTPSVPYRLPGSQYERWVDIYTRLGVERILFLGQEVNDGIANSLVAQMLYLDSDDNSKPIYLYINSPGGSVTAGLAIYDTIKYVKSDVVTICVGLAASMGAFLLAAGT

SEQ ID NO: 170400 - protein, 60 aa, Unknown
  Bacterial polypetide isolated from the Sargasso Sea
IHAREILTIRERLNKVLAHHTGQPMEVIARDTDRDNFMSGEDAVKYGLIDQVLTQRQLAV

SEQ ID NO: 170401 - protein, 131 aa, Unknown
  Bacterial polypetide isolated from the Sargasso Sea
LIVLGGLVTSGLGIYDTMQYIKSPVSTLCIGQASSMGSFLLAAGEKGKRFSLPHSRIMVHQPSAGFQGQATDIQIHAKEILSLKDRLNQIYSKHTGKSVKDISQALERDKFMTAEEAKEFGLIDSVVEKRK

SEQ ID NO: 170402 - protein, 153 aa, Unknown
  Bacterial polypetide isolated from the Sargasso Sea
NLVVAQLLYLEAENPDKDISLYINSPGGSVTAGLSIYDTMQFIKPDVSTLCIGQAASMGAVLLAGGAKGKRHALPNSRVLIHQVMGGFQGQASDIEIHAQEILSIKEKLNNILSKHTGQKVKKVAEDSDRDNFLSPEEAVEYGLIDSVMEERG

SEQ ID NO: 170403 - protein, 197 aa, Unknown
  Bacterial polypetide isolated from the Sargasso Sea
MFKNNLVPMVVEQTSRGERAFDIFSRLLKDRIIFIVGGIDDYVANLVVAQLLFLESEDPKKDIFMYINSPGGVITSGLSILDTMNYLKCDVSTVCFGQAASMGAVLLSCGAKGKRFALPNSRVMIHQPLGGARGQATDIEIQAKEILTLKEKLNKILSEKTNQSLKKIASDTERDYFMNAEEAVKYGLVDEVLTQRK

SEQ ID NO: 170404 - protein, 98 aa, Unknown
  Bacterial polypetide isolated from the Sargasso Sea
MSRKFDEQMNSLIPMVVEQTSKGERAYDIYSRLLKERIVFLVGPVNDAVASLVTAQLLFLESENPKKEISFYINSPGGLVTAGLGIYDTHANILIHPV

SEQ ID NO: 170405 - protein, 106 aa, Unknown
  Bacterial polypetide isolated from the Sargasso Sea
TTLCIGQAASMGSFLLAAGAKGKRYSLPNSRIMVHQPSAGFQGQATDIEIHANEVLSLKKRLNEIYSKHTGKSVEQIKSALERDNFMTPDNARDFGLIDKVVDKRE

SEQ ID NO: 170406 - protein, 82 aa, Unknown
  Bacterial polypetide isolated from the Sargasso Sea
MTKNNLFNSSLIPMVVEQSNRGERAYDIYSRLLKERIIFLTGPVTDDVASVIIAQLLFLGSENPKKDIFFYINSPGSLVTAG

SEQ ID NO: 170407 - protein, 203 aa, Unknown
  Bacterial polypetide isolated from the Sargasso Sea
MSRDIEEKMNNLIPMVVEQSSKGERAYDIYSRLLKERIVFLVGPVNDNVASLVTAQLLFLESENPNKEISFYINSPGGLVTSGLGIYDTMQYINSPVSTLCIGQASSMGSFLLSAGAKGKRYSLPNSRIMVHQPSAGFQGQATDIQIHAKEIQSLKNRLNTIYSKHTGKSVEEISKALERDNFMTPEEAKKFGLIDSVVEKRK

SEQ ID NO: 170408 - protein, 181 aa, Unknown
  Bacterial polypetide isolated from the Sargasso Sea
GERAYDIYSRLLKERIIFLTGQINDNVASLITAQLLFLEAEDPKKEIYLYINSPGGLVTAGLGIYDTMQYIKPEISTLCIGQAASMGSFLLASGAKGKRFSLPNSRIMVHQPSAGFQGQATDIEIHANEVLSLKKRLNEIYSKHTGKSVDEIKSALERDNFMTADVAKSFGLIDEVVEKRT

SEQ ID NO: 170409 - protein, 88 aa, Unknown
  Bacterial polypetide isolated from the Sargasso Sea
GKKGKRFSLPNSRIMVHQPSAGFQGQATDIEIHANEVLSLKKRLNEIYSKHTGKNVEQIKDALERDNFMTPDHAKDFGLIDQVVEKRI

SEQ ID NO: 170410 - protein, 154 aa, Unknown
  Bacterial polypetide isolated from the Sargasso Sea
MPIGTPSVPYRLPGSQMERWVDIYTRLGVERILFLGSEVNDGIANSLVAQMLYLDSEDSSKPIYLYINSPGGSVTAGLAIYDTIQYVKSEVVTICVGLAASMGAFLLAAGTKGKRVALPHSRIMIHQPLGGTSRRQASDIEIEAREILRMKEML

SEQ ID NO: 170411 - protein, 203 aa, Unknown
  Bacterial polypetide isolated from the Sargasso Sea
MKDKIEEHMNNLIPMVVEQSNRGERAYDIYSRLLKERIIFLVGPVNDTVSTLVTAQLLFLESENPKKEISFYINSPGGLVTSGLGIYDTMQYIKPPVSTLCIGQASSMGSFLLAAGEKGKRFSLPNSRIMVHQPSAGYQGQATDIEIHAKEILSLKERLNKIYSKHTKKSESEIKKALERDNFMTPNEAKDFGLIDEVVEKRS

SEQ ID NO: 170412 - protein, 98 aa, Unknown
  Bacterial polypetide isolated from the Sargasso Sea
MSLIPMVVEQNSRGERAYDIYSRLLKDRIIFLGSPVDDNVANVMIAQLLFLEAEDPESDISLYLNCPGGLVTSGMAIYDTIQYLKPDVQTICIGQATS

SEQ ID NO: 170413 - protein, 167 aa, Unknown
  Bacterial polypetide isolated from the Sargasso Sea
MSEIFQPQANALVPMVVEQTSRGERAYDIYSRLLKDRIIFVGSGINDQISNLIIAQLLFLEAEDPDKDIYMYINSPGGVIDAGLAIYDTMQYIKPQITTICVGLAASMAAVLLAAGEKGKRYSLPHSRIMIHQPLGGAQGQASDIEIQAREILRLRELLNGILARHT

SEQ ID NO: 170414 - protein, 202 aa, Unknown
  Bacterial polypetide isolated from the Sargasso Sea
MNKIPEHLSTLIPMVVEQSSRGERAYDIYSRLLKERIIFVVGPINDHVASLVTAQLLFLESEDPKKEISLYINSPGGLVTAGLGIYDTMQYVKPDISTLCIGQAASMGSFLLSAGSKGKRFSLPNSRIMVHQPSAGFQGQATDIEIHANEVLALKKRLNEIYSKHTNKSVDEIKTALERDNFMTPENAKEFGLIDKVVVNRE

SEQ ID NO: 170415 - protein, 156 aa, Unknown
  Bacterial polypetide isolated from the Sargasso Sea
SVASLVTAQLLFLESEDPKKEISLYINSPGGLVTAGLGIYDTMQYVKPDISTLCIGQAASMGSFLLSAGSKGKRFSLPNSRIMVHQPSAGFQGQATDIEIHANEVLALKKRLNEIYSKHTNKSVEEIKTALERDNFMTPENAKEFGLIDKVVVNRE

SEQ ID NO: 170416 - protein, 198 aa, Unknown
  Bacterial polypetide isolated from the Sargasso Sea
MSEHHSVSALSTGTPVGPAEIYNRLLNDRIVFLGTEVDDEIANILCAQMLFLEGQDREKDIWLYINSPGGSVTAGMAIYDTMQFVSCDVATVCMGLGASMGQFLLTAGAEDKRYCLPHARVMMHQPSGGVRGQASDIAIQAEQMAYIKRLMAERIALHSGQDVEQIQMDSERDRWFTAEEAKDYGLCDHVIVKRGEII

SEQ ID NO: 170417 - protein, 201 aa, Unknown
  Bacterial polypetide isolated from the Sargasso Sea
MNELVNALVPIVIEQTAKGERSFDIYSRLLKERVIFLTGQVEDHMANLIVAQLLFLESENPEKDIYIYINSPGGSVTAGMSIYDTMQYIKPNIATVCVGQACSMGAFLLSGGTKGKRYALPNARVMIHQPLGGFQGQATDFEIHAREILTIKEKLNRLMAEHCGKTYEQVCKDTERDNFLSAQQALEYGLIDAILTQRDAK

SEQ ID NO: 170418 - protein, 42 aa, Unknown
  Bacterial polypetide isolated from the Sargasso Sea
MKDPLENLTNNLIPMVVEQSSRGERAYDIYSRLLKERIIFLT

SEQ ID NO: 170419 - protein, 140 aa, Unknown
  Bacterial polypetide isolated from the Sargasso Sea
MSDKLEDKMSNLIPMVVEQSSRGERAYDIFSRLLKERIVFVVGPINDSVASLVTAQMLFLESENPKKDIFMYINSPGGLVTAGLGIYDTMQYIKPEISTLCIGQAASMGSFLLAAGTKGKRFSLPNSRIMVHQPSAGFQG

SEQ ID NO: 170420 - protein, 123 aa, Unknown
  Bacterial polypetide isolated from the Sargasso Sea
MVVEQTSRGERSYDIYSRLLKERIIFLVGPIDDNISSLVCAQLLFLEAENPKKDISMYINSPGGIVTSGLSIYDTMEYIKPDVSTVCIGQAASMGSLLLTAGAAKKRYCFCNARIMTHQPSGG

SEQ ID NO: 170421 - protein, 171 aa, Unknown
  Bacterial polypetide isolated from the Sargasso Sea
LLKERIVFVVGPINDAVASLVTAQLLFLESEDPKKEISLYINSPGGLVTAGLGIYDTMQYIKPEISTLCIGQAASMGSFLLAAGAKGKRFSLPNSRIMVHQPSAGFQGQATDIEIHANEVLSLKKRLNEIYSKHTGKSVDEIKSALERDNFMTPDNAKSFGLIDKVVEKRE

SEQ ID NO: 170422 - protein, 199 aa, Unknown
  Bacterial polypetide isolated from the Sargasso Sea
MSNINSALIPMVIEQTPRGERSFDIYSRLLKERVIFLSGAIDDYISNLVVAQLLFLESENPEKDISIYINSPGGSISAGLAIYDTMQFITPSISTMCIGQAASMGALLLAGGDKKKRFALPNSRIMIHQPLGGFQGQASDFEIHAKEIIHMKKIVNEILAKHTGQSIKQIEKDTDRDNFLDANAAKSYGIVDSILEKRK

SEQ ID NO: 170423 - protein, 196 aa, Unknown
  Bacterial polypetide isolated from the Sargasso Sea
MKDPIDNITNNLIPMVVEQSSRGERSYDIYSRLLKERIIFLTGPIDDNIASLICAQILFLESENPKKEISFYINSPGGIVWSGLAIYDTMQYVSSKIMTICIGQAASAGSLLLTAGEKGMRFSLPNSRIMVHQPSGGYQGQVTDIEIQTNEIKKTKLKLNEIYSKHTGKKISEISTIMERDKYFSAEEAIKFGSID

SEQ ID NO: 170424 - protein, 176 aa, Unknown
  Bacterial polypetide isolated from the Sargasso Sea
MIPLVLEESGGSERVFDIYSRLLRERIIFLGEQVTSETANRIVAQLLFLEAEDPEKDIYMYINSPGGSVYDGLGIFDTMQHVKPDIHTVCVGLAASMGAFLLAAGTKGKRSSLRHSRIMIHQPLGGARGQASDIRIQADEILFLKERLNTELSERTGKDYETVKEDTDRDFYMSPK

SEQ ID NO: 170425 - protein, 152 aa, Unknown
  Bacterial polypetide isolated from the Sargasso Sea
SQLLFLEAEDPDKDIYMYINSPGGSVYDGLGIFDTMQHVKPDIHTVCVGLAASMGAFLLAAGTKGKRSSLRHSRIMIHQPLGGARGQASDIRIQADEILFLKERLNTELSERTGKDFDTIKEDTDRDFYMSPNEAVEYGLIDLVLDKKPIKV

SEQ ID NO: 170426 - protein, 75 aa, Unknown
  Bacterial polypetide isolated from the Sargasso Sea
MIPIVIEESGRGERAFDIYSRLLRERIVFLGEPVTSDSANRIVAQLLFLEADDPDKDIFLYINSPGGSVYDGLGI

SEQ ID NO: 170427 - protein, 164 aa, Unknown
  Bacterial polypetide isolated from the Sargasso Sea
MKTFENEKLIEHSALIPMVVEQTNRGERSYDIYSRLLKERIIFLVGPINDNIASLACAQLLFLEAENPKKDISMYINSPGGVVTSGLSIYDTMEYVKPDICTVCFGQAASMGSLLLTAGAKSKRFCLPNSRIMTHQPSGGFQGQASDIEIHAKEIMNLRSGLNE

SEQ ID NO: 170428 - protein, 96 aa, Unknown
  Bacterial polypetide isolated from the Sargasso Sea
MGSFLLAAGTKGKRFSLPNSRIMVHQPSAGFQGQATDIEIHANEVLSLKKRLNEIYSKHTGKTVDEIKSALERDNFMTPDNAKSFGLIDKVVEKRE

SEQ ID NO: 170429 - protein, 100 aa, Unknown
  Bacterial polypetide isolated from the Sargasso Sea
MIQSKFLEQRKIFLWGEVSDRSARDLTEKLLFLESSDPGKEITFYINSPGGSITAGMAIFDTMQLISSPIKVVVTGMAASMGSILLCGATKGQRFLYPHS

SEQ ID NO: 170430 - protein, 203 aa, Unknown
  Bacterial polypetide isolated from the Sargasso Sea
MNTKISEHMNTLIPMVVEQSSKGERAYDIYSRLLKERIIFLTGPINDNVASLVTAQMLFLESENPKKEIYFYINSPGGLVTAGLGVYDTIQYIKPPVSTLCIGQAASMGSFLLASGEKGKRFSLPNSRIMVHQPSAGFQGQATDIEIHANEVLALKKRLNEIYSKHTGQSTEDIKKALERDNFMTPESAKEFGLIDEVVEKRI

SEQ ID NO: 170431 - protein, 134 aa, Unknown
  Bacterial polypetide isolated from the Sargasso Sea
YLYVNSPGGLVTAGLGIYDTMQYVKPDISTLCIGQAASMGSFLLAAGTKGKRFSLPNSRIMVHQPSAGFQGQATDIEIHANEVLSLKKRLNEIYSKHTGKSVDEVKSALERDNFMTADVAKSFGLIDEVVEKRS

SEQ ID NO: 170432 - protein, 184 aa, Unknown
  Bacterial polypetide isolated from the Sargasso Sea
MTLIPMVVEQNSRGERAYDIYSRLLKDRIVFLGTPIDDTVANVMIAQLLFLEAEDSESDISLYLNCPGGLVTSGMAIYDTIQYLKPDVQTICIGQATSMGAVLLAAGATGKRHALPHARIMLHQMLGGFSGQAEDIDIQAKEIIKMTDVLNNILARHTGQKIESIAEDTQRDYYFSSQEAKEYG

SEQ ID NO: 170433 - protein, 203 aa, Unknown
  Bacterial polypetide isolated from the Sargasso Sea
MKDPIDNLTNNLIPMVVEQSSRGERAYDIYSRLLKERIIFLTGPIDDNIASLICAQLLFLESENPKKEISFYINSPGGIVWSGLAMYDTMQYISSKIMTICIGQAASAGSLLLTAGADNMRYSLPNSRIMMHQPSGGYQGQVTDIEIQTKEIIKTKKRLNEIYAKHTRKDIKEVEEIMERDKYFSPQEAIKFGLIDKIVENRK

SEQ ID NO: 170434 - protein, 195 aa, Unknown
  Bacterial polypetide isolated from the Sargasso Sea
MSSLIPMVVEQSNKGERAYDIYSRLLKERIIFLTGQINDNVASLVTAQLLFLEAEDPKKEIFLYINSPGGLVTAGLGIYDTMQYVKPDISTLCIGQAASMGSFLLSAGTKGKRFSLPNSRIMVHQPSAGFQGQATDIEIHANEVLSLKKRLNEIYSKHTGKSVEEIKTALERDNFMTADTAKSFGLIDSVVEKRS

SEQ ID NO: 170435 - protein, 147 aa, Unknown
  Bacterial polypetide isolated from the Sargasso Sea
LLFLESEDPKKDIFLYINSPGGLVTSGLGIYDTMQYIKPDVSTLCIGQAASMGSFLLSAGTKGKRFSLPNSRIMVHQPSAGFQGQATDIEIHANEVLSLKKRLNEIYSKHTGKSVEEIKSALERDNFMTPETAKDFGLVDKVVSKRE

SEQ ID NO: 170436 - protein, 148 aa, Unknown
  Bacterial polypetide isolated from the Sargasso Sea
SENPEKEISLYINSPGGVVSDGLAIYDTMQFIQSPVSTLCFGQAASMGSFLLAAGEKGKRYALPNSRIMVHQPSAGFQGQATDIEIHAKEVLAMKANLNKIYAKHTGQPVEAIEEALERDNFMSPEEAQKFGIIDSIQEKRVEPKTEK

SEQ ID NO: 170437 - protein, 203 aa, Unknown
  Bacterial polypetide isolated from the Sargasso Sea
MPIGTPSVPYRLPGSQYERWVDIYTRLGVERILFLGQEVNDGIANSLVAQMLYLDSDDNSKPIYLYINSPGGSVTAGLAIYDTIKYVKSDVVTICVGLAASMGAFLLAAGTKGKRVALPHSRIMIHQPLGGTSQRQASDIEIEAKEILRIKDMLNMSMADMTGQSFEKIEKDTDRDYFLSAEEAKNYGLIDRVITHPSEANQS

SEQ ID NO: 170438 - protein, 145 aa, Unknown
  Bacterial polypetide isolated from the Sargasso Sea
FLESENPKKEIYFYINSPGGLVTSGLGIYDTMQYIKSPVSTLCIGQASSMGSFLLAAGEKGKRFSLPNSRIMVHQPSAGFQGQATDIQIHAKEILLLKERLNKIYSKHTGKSVKEISSALERDKFMTADEAKEFGLIDKVVDKRI

SEQ ID NO: 170439 - protein, 139 aa, Unknown
  Bacterial polypetide isolated from the Sargasso Sea
MTIKIQEQLSTLIPMVVEQSSRGERAYDIYSRLLKERIVFVVGPIHDAVASLVTAQLLFLESEDPKKEISLYINSPGGLVTAGLGIYDTMQYIKPEISTLCIGQAASMGSFLLAAGAKGKRFSLPNSRIMVHQPSAGFQ

SEQ ID NO: 170440 - protein, 165 aa, Unknown
  Bacterial polypetide isolated from the Sargasso Sea
MSNLVPMVVEQSSKGERAYDIYSRLLKERIIFLTGQINDNVASLVTAQLLFLEAEDPKKEIYLYINSPGGLVTAGLGIYDTMQYVKPDISTLCIGQAASMGSFLLAAGTKGKRFSLPNSRIMVHQPSAGFQGQATDIEIHANEVLSLKKRLNEIYSKHTGKSVEK

SEQ ID NO: 170441 - protein, 132 aa, Unknown
  Bacterial polypetide isolated from the Sargasso Sea
YINSPGGLVTAGLGIYDTMQYIKPEISTLCIGQAASMGSFLLAAGSKGKRFSLPNSRIMVHQPSAGFQGQATDIEIHANEVLSLKKRLNEIYSKHTGKTVDEIKSALERDNFMTPDNAKSFGLIDKVVEKRE

SEQ ID NO: 170442 - protein, 203 aa, Unknown
  Bacterial polypetide isolated from the Sargasso Sea
MKDPIDNLTNNLIPMVVEQSSRGERAYDIYSRLLKERIIFLTGPIDDNIASLICAQLLFLESENPKKEISFYINSPGGIVWSGLAMYDTMQYISSKIMTICIGQAASAGSLLLTAGADNMRYSLPNSRIMMHQPSGGYQGQVTDIEIQTKEIIKTKKRLNEIYAKHSGKDIKEVEEIMERDKYFSPQEAIKFGLIDKIVENRK

SEQ ID NO: 170443 - protein, 161 aa, Unknown
  Bacterial polypetide isolated from the Sargasso Sea
MKELPSNYVIPTVIENTNRGERAFDIYSRLLKDRIIFLGTPIDDGVANSIMAQLLHLESEDPDKDIFMYINSPGGSITSLFTIYDTMKYIKPDISTVCMGLAASAASVILAGGTPGKRYSLPNARIMLHQPSGGMEGTVADMERNFDLIVSMRTQLNGLLA

SEQ ID NO: 170444 - protein, 169 aa, Unknown
  Bacterial polypetide isolated from the Sargasso Sea
ERVIFITGAVEDHMANLIVAQLLFLEADNPDKDINLYINSPGGSVTAGMSIYDTMSYIKPDISTLCIGQASSMGAVLLTGGTKGKRFALPNSRIMIHQPLGGFQGQASDIEIHAKEVLKIRTKLNEVLSKHSGQKIETIEQDTERDNFMSGEEACDYGLIDKVISKRDK

SEQ ID NO: 170445 - protein, 147 aa, Unknown
  Bacterial polypetide isolated from the Sargasso Sea
LLFLESENPEKDISIYINSPGGSISAGLAIYDTMQFVKPSISTMCIGQAASMGALLLAGGDEKKRFALPNSRIMIHQPLGGFQGQASDFEIHAKEILHMKKIVNEILAKHTGQTIKKIEKDTDRDNFLDAKAAKTYGIVDKILDQRN

SEQ ID NO: 170446 - protein, 138 aa, Unknown
  Bacterial polypetide isolated from the Sargasso Sea
MNYKIPEELNTLIPMVVEQSSRGERAYDIYSRLLKERIVFVVGPINDNVASLVTAQLLFLESEDPKKEISLYINSPGGLVTSGLGIYDTMQYIKPDVSTLCIGQAASMGSFLLAAGTKGKRYSLPNSRIMVHQPSAGY

SEQ ID NO: 170447 - protein, 70 aa, Unknown
  Bacterial polypetide isolated from the Sargasso Sea
MSNLIPMVVEQSSKGERAYDIYSRLLKERIIFLTGQINDNVASLVTAQLLFLEAEDPKKKIYLYINSPGG

SEQ ID NO: 170448 - protein, 218 aa, Unknown
  Bacterial polypetide isolated from the Sargasso Sea
MDYSKEFKKYATKHHGVSSTYYDKIISSMTPYIIEERQLNVAQMDVFSRLMMDRIMFLGTAITDSVANVIQAQLLFLQSTDSSRDIQMYINSPGGGVYAGLGIYDTMQYIKPDVATICTGCAASMAAVLLCAGKKGKRSALKHSRVMIHQPLGGVSGQAADIEITAREILKLKDELYKIISKHSGQTFKKVNADSDRDYWMKADEAHKYGMVDEVLNK

SEQ ID NO: 170449 - protein, 46 aa, Unknown
  Bacterial polypetide isolated from the Sargasso Sea
MNNLIPMVVEQSSRGERAYDIYSRLLKERIVFVVGPINDNVASLVT

SEQ ID NO: 170450 - protein, 73 aa, Unknown
  Bacterial polypetide isolated from the Sargasso Sea
MNKIPEHLNTLIPMVVEQSSRGERAYDIYSRLLKERIVFVVGPINDAVASLVTAQLLFLESEDPKKEISLYIN

SEQ ID NO: 170451 - protein, 124 aa, Unknown
  Bacterial polypetide isolated from the Sargasso Sea
GSAGLGIYDTMQYIKPDVSTLCIGQAASMGSFLLAAGTKGKRFSLPNSRIMVHQPSAGYQGQATDIEIHAKEVLALKKRLNEIYSKHTNKSVSEINDALERDNFMTPESAKEFGLIDKVVAQRE

SEQ ID NO: 170452 - protein, 120 aa, Unknown
  Bacterial polypetide isolated from the Sargasso Sea
LTQCRHVKPDIHTVCVGLAASMGAFLLAAGTKGKRSSLRHSRIMIHQPLGGARGQASDIRIQADEILFLKERLNTELSERTGKDYDTIKEDTDRDFYMSPNEAVEYGLIDLVLDKKPVKV

SEQ ID NO: 170453 - protein, 114 aa, Unknown
  Bacterial polypetide isolated from the Sargasso Sea
MTKSKVNNLSTLIPMVVEQTSRGERSYDIYSRLLKERIIFLTGVIEDNVASLICAQLLFLESENPNKDISFYINSSGGAVTSGLAIYDTMQYIKPDITTVCIGQAASMGSLLLA

SEQ ID NO: 170454 - protein, 219 aa, Unknown
  Bacterial polypetide isolated from the Sargasso Sea
MNYSEEFKKYATKHHGVNSMYYDKIVSSMTPYIIEERQLNVAQMDVFSRLMMDRIIFLGTAINDSVANIIQAQLLFLESTDKEKDIQIYINSPGGSVYAGLGIYDTMQFIGPNVATICTGIAASMSAVLLCAGEKGKRSGLTHSRVMIHQPLGGAQGQASDIEITAREIVKLKKELYEIIANHTGQKYDKVYEDSDRDYWMKAPEAKKYGMIDEVLSKK

SEQ ID NO: 170455 - protein, 112 aa, Unknown
  Bacterial polypetide isolated from the Sargasso Sea
MFENNLVPMVVEQTSRGERAFDIFSRLLKDRIVFIVGGIDDYVANLVVAQLLFLESEDPKKDIYMYINSPGGVITSGLSILDTMNYLKCDVSHSLFWTSSKYGGCSSCKRCR

SEQ ID NO: 170456 - protein, 211 aa, Unknown
  Bacterial polypetide isolated from the Sargasso Sea
MNKIPEHLNTLIPMVVEQSSRGERAYDIYSRLLKERVVFVVGPINDNVASLITAQLLFLESEDPKKEISLYINSPGGLVTAGLGIYDTMQYIKPDVSTLCIGQAASMGSFLLAAGTKGKRFSLPNSRIMVHQPSAGFQGQATDIEIHANEVLSLKKRLNEIYSKHTNKTPDEIKTALERDNFMSPETAKEFGLIDKVVVKKRINYYNIVFP

SEQ ID NO: 170457 - protein, 203 aa, Unknown
  Bacterial polypetide isolated from the Sargasso Sea
MSIKISEHMNTLIPMVVEQSSRGERAYDIYSRLLKERIVFLVGPINDNVASLVTAQLLFLESENPKKEVFLYINSPGGLVTAGLGIYDTMQYIKPDVSTLCIGQAASMGSFLLAAGKKGKRFSLPNSRIMVHQPSAGFQGQATDIEIHANEVLSLKKRLNEIYSKHTGKNVDQIKEALERDNFMTPENAKEFGLIDQVVEKRI

SEQ ID NO: 170458 - protein, 84 aa, Unknown
  Bacterial polypetide isolated from the Sargasso Sea
MSNLIPMVVDQTSRGERSYDIYSRLLKERIVFVTGPIDDSVSSVVCAQLLFLESQDPKKDIFMYINSPGGVVTSGLAMYDTMQY

SEQ ID NO: 170459 - protein, 175 aa, Unknown
  Bacterial polypetide isolated from the Sargasso Sea
MKEFQSALIPMVVEQTPRGERSFDIYSRLLKERVIFLSGAIDDYISNLVVAQLLFLESENPEKDISIYINSPGGSISAGLAIYDTMQFITPSISTMCIGQAASMGALLLAGGDKKKRFALANSRIMIHQPLGGFQGQASDFEIHAKEILHMKKIVNEILAKHTGQTIKKIEKDTD

SEQ ID NO: 170460 - protein, 195 aa, Unknown
  Bacterial polypetide isolated from the Sargasso Sea
MNNLIPMVVEQTSKGERAYDIYSRLLKERIVFLVGPVNDNVASLVTAQLLFLESENPNKEISFYINSPGGLVTAGLGIYDTMQYINSPVSTLCIGQASSMGSFLLSAGEKGKRYSLPNSRIMVHQPSAGFQGQATDIQIHAKEILSLKERLNTIYSKHTGKSVDEIAKALERDNFMTADDAKKFGLIDTVVEKRK

SEQ ID NO: 170461 - protein, 153 aa, Unknown
  Bacterial polypetide isolated from the Sargasso Sea
MEEHNSTLIPMVVEQTARGERAFDIYSRLLKERVIFLTGPINDQVSNLVVAQLLFLESENPKKDISIYINSPGGVISSGLAIYDTMQFISPSISTLCIGQAASMGALLLAGGEKEKRFALPNSRIMIHQPLGGFQGQASDIEIHAQEILLRRK

SEQ ID NO: 170462 - protein, 168 aa, Unknown
  Bacterial polypetide isolated from the Sargasso Sea
MVVEQTSRGERSYDIYSRLLKERIIFLVGPVDDNLASLVCAQLLFLEAENPKKDISMYINSPGGVVTSGLSIYDTMEYIRPDVSTVCIGQAASMGSLLLTAGAKNKRYCLPNARIMTHQPSGGFQGQASDIEIHAKEIINLRSRLNGIYVKHSGKKIAEIETLMDRDT

SEQ ID NO: 170463 - protein, 213 aa, Unknown
  Bacterial polypetide isolated from the Sargasso Sea
MNYRPPRFEDFSPGFLKPENIVPMVVETSARGERAYDIYSLLLKERIVFLGTGIDDQVANSIVAQLLFLDREDPDRDISMYVHSPGGMVYAGLAIYDTMNLIRADVSTIAVGVTASMGTVLLAAGTKGKRFALPNATVHMHQALGGGSGQASDVQIQAQELMRNNQKIREILAKATDQPMDRIEQDTDRDFYMSAQEAQEYGLIDEVLSAQSG

SEQ ID NO: 170464 - protein, 88 aa, Unknown
  Bacterial polypetide isolated from the Sargasso Sea
MSSLIPMVVEQSNKGERAYDIYSRLLKERIIFLTGQINDNVASLITAQLLFLEAEDPKKEIFLYINSPGGLVTAGLGIYDTMAYVKPD

SEQ ID NO: 170465 - protein, 171 aa, Unknown
  Bacterial polypetide isolated from the Sargasso Sea
MLKERIIFLTGPIDDNVASLICAQILFLESENPKKEISFYINSPGGIVWSGLAIYDTMQYVSSKIMTICIGQAASAGSLLLTAGEKGMRFSLPNSRIMVHQPSGGYQGQVTDIEIQTNEIKKTKLKLNEIYSKHTGKKISEITTIMERDKYFSADEAIKFGLIDKVVKARK

SEQ ID NO: 170466 - protein, 181 aa, Unknown
  Bacterial polypetide isolated from the Sargasso Sea
YDIYSRLLKERIVFVTGPIEDYMASVITAQLLYLEAENPKKEISMYINSPGGVVSSGLAIYDTMQYIKPEVSTLCIGQAASMGSLLLAAGEKNKRFALPNSRIMVHQPSGGFQGQASDIERHAKEIISLRSRLNEIYVNHTGKDLKTIEAALDRDTFMTSDDAKKFGLIDKVVQKRDIEEK

SEQ ID NO: 170467 - protein, 169 aa, Unknown
  Bacterial polypetide isolated from the Sargasso Sea
MPIGTPSVPYRLPGSQYERWVDIYTRLGVERILFLGQEVNDGIANSLVAQMLYLDSDDNSKPIYLYINSPGGSVTAGLAIYDTIKYVKSDVVTICVGLAASMGAFLLAAGTKGKRVALPHSRIMIHQPLGGTSQRQASDIEIEAKEILRIKDMLNMSMADMTGQSFEKI

SEQ ID NO: 170468 - protein, 114 aa, Unknown
  Bacterial polypetide isolated from the Sargasso Sea
MQYIKPDVSTLCIGQAASMGSFLLAAGTKGKRLSLPNSRIMVHQPSAGFQGQATDIEIHANEVLSLKKRLNEIYSKHTNKSVDEIKSALERDNFMTPDNAKEFGLIDKVVVNRS

SEQ ID NO: 170469 - protein, 207 aa, Unknown
  Bacterial polypetide isolated from the Sargasso Sea
NNLYYDKIVKQITPTGMTPYIMEERQLNVSQLDVFSRLMMDRIIFLGTGVDDQIANIVQAQLLFLESTDASKDIQIYINSPGGSVYAGLGIYDTMQFIKPDVATICTGMAASMGAVLLCAGADGKRSALPHSRVMIHQPSGGAQGVASDMEINLREMLKLKDELYHIISKHSKQDFDKVYKDSERDYWMIAAEAKEYGMIDEVLERK

SEQ ID NO: 170470 - protein, 174 aa, Unknown
  Bacterial polypetide isolated from the Sargasso Sea
MDVFSRLMMDRIMFLGTSITDSVANVIQAQLLFLQSTDSSRDIQLYINSPGGGVYAGLGIYDTMQFIKPDVATICTGCAASMSAILLCAGKKGKRSALKHSRVMIHQPLGGVSGQAADIEITAREILKLKDELYKIISKHSGQSLKKVASDSDRDYWMKSEEALKYGMVDEVLN

SEQ ID NO: 170471 - protein, 136 aa, Unknown
  Bacterial polypetide isolated from the Sargasso Sea
MNQVPENIIPYVVERDPRGERTYDIYSLLLKERIVFLGTGINDQVANAIIAQLLFLDREDPDRDINLYINSPGGVITSGLAIYDTMQLIRPDVSTICVGMAASMGTVLLSGGADGKRFALPNSTIHMHQALGGAQG

SEQ ID NO: 170472 - protein, 161 aa, Unknown
  Bacterial polypetide isolated from the Sargasso Sea
MIEKIYNPVSSINEIGALVPMVVEQTSRGERSYDIYSRLLKERIIFLVGPVDDNLASLVCAQLLFLEAENPKKDISMYINSPGGVVTSGLSIYDTMEYIRPDVSTVCIGQAASMGSLLLTAGAKNKRYCLPNARIMTHQPSGGFQGQASDIEIHAKEIIIK

SEQ ID NO: 170473 - protein, 69 aa, Unknown
  Bacterial polypetide isolated from the Sargasso Sea
MKDPIDNLSNNLVPMVVEQSSRGERAYDIYSRLLKERIIFLTGPIDDNIASLVCAQLLFLESENPKKEI

SEQ ID NO: 170474 - protein, 40 aa, Unknown
  Bacterial polypetide isolated from the Sargasso Sea
MKDLPSNYVIPTVIENTNRGERAFDIYSRLLKDRIIFLGT

SEQ ID NO: 170475 - protein, 121 aa, Unknown
  Bacterial polypetide isolated from the Sargasso Sea
GLGIYDTMQYIKPGISTLCIGQAASMGSFLLAAGAKGKRFSLPNSRIMVHQPSAGFQGQATDIEIHANEVLSLKKRLNEIYSKHTGKSVDEIKSALERDNFMTPDNAKSFGLIDKVVEKRE

SEQ ID NO: 170476 - protein, 175 aa, Unknown
  Bacterial polypetide isolated from the Sargasso Sea
IYSRLLKERIIFLTGQINDNVASLVTAQLLFLEAEDPKKEIYLYINSPGGLVTAGLGIYDTMQYVKPDISTLCIGQAASMGSFLLSAGTKGKRFSLPNSRIMVHQPSAGFQGQATDIEIHANEVLSLKKRLNEIYSKHTGKSVDEIKSALERDNFMTADAAKSFGLVDEVVEKRS

SEQ ID NO: 170477 - protein, 142 aa, Unknown
  Bacterial polypetide isolated from the Sargasso Sea
PDKDIYMYINSPGGSVYDGLGIFDTMQHVKPDIHTVCVGLAASMGAFLLAAGTKGKRSSLRHSRIMIHQPLGGARGQASDIRIQADEILFLKERLNTELSERTGKDYETVREDTDRDFYMSPNEAVEYGLIDLVLDKKPIKV

SEQ ID NO: 170478 - protein, 43 aa, Unknown
  Bacterial polypetide isolated from the Sargasso Sea
MAIAHNNSSLNSISIPMVVEQSSRGERSYDIYSRLLKERIIFL

SEQ ID NO: 170479 - protein, 107 aa, Unknown
  Bacterial polypetide isolated from the Sargasso Sea
MKDPLDNFTNNLIPMVVEQSSRGERSYDIYSRLLKERIIFLTGPIDDNIASLICAQILFLESENPNKEISFYINSPGGIVWSGLAIYDTMQYVSSKIMTICVGQAAS

SEQ ID NO: 170480 - protein, 146 aa, Unknown
  Bacterial polypetide isolated from the Sargasso Sea
LFLEAEDPKKEIYLYINSPGGLVTAGLGIYDTMQYIKPEISTLCIGQAASMGSFLLSAGTKGKRFSLPNSRIMVHQPSAGFQGQATDIEIHANEVLSLKKRLNEIYSKHTGKSVDEIKTALERDNFMTAEGAKAFGLVDEVVEKRS

SEQ ID NO: 170481 - protein, 134 aa, Unknown
  Bacterial polypetide isolated from the Sargasso Sea
MNDIQQALIPMVIEQTPRGERSFDIYSRLLKERVIFLSGPIDDYISNLVVAQLLFLESENPEKDISIYINSPGGSISAGLAIYDTMQFVKPSISTMCIGQAASMGALLLAGGDEKKRFALPNSRIMIHQPLGGF

SEQ ID NO: 170482 - protein, 55 aa, Unknown
  Bacterial polypetide isolated from the Sargasso Sea
AREILKVKGRMNELMAHHTGQSLAQIENDTERDRFLSASEAVEYGLVDSILTHRN

SEQ ID NO: 170483 - protein, 79 aa, Unknown
  Bacterial polypetide isolated from the Sargasso Sea
PNSRIMVHQPSAGFQGQATDIEIHANEVLSLKKRLNEIYSKHTGKSVDEIKTALERDNFMTADSAKSFGLIDSVVEKRS

SEQ ID NO: 170484 - protein, 38 aa, Unknown
  Bacterial polypetide isolated from the Sargasso Sea
MSKSEIHALNLVPMVVEQTSRGERAYDIYSRLLKERVI

SEQ ID NO: 170485 - protein, 52 aa, Unknown
  Bacterial polypetide isolated from the Sargasso Sea
MVVEQSSRGERAYDIYSRLLKERIVFVVGPINDTIASLVTAQLLFLESEDPK

SEQ ID NO: 170486 - protein, 103 aa, Unknown
  Bacterial polypetide isolated from the Sargasso Sea
MSREFEEKMNSLIPMVVEQTSKGERAYDIYSRLLKERIVFLVGPVNDAVASLVTAQLLFLESENPKKEINFYINSPGGLVTAGLGIYDTMQYINSPVSTLCIG

SEQ ID NO: 170487 - protein, 56 aa, Unknown
  Bacterial polypetide isolated from the Sargasso Sea
MTSKLNEHMNNLIPMVVEQSSRGERAYDIYSRLLKERIVFVVGPINDNVASLVTAQ

SEQ ID NO: 170488 - protein, 97 aa, Unknown
  Bacterial polypetide isolated from the Sargasso Sea
MPIGTPSVPYRLPGSQYERWVDIYTRLGVERILFLGQEVNDGIANSLVAQMLYLDSDDNSKPIYLYINSPGGSVTAGLAIYDTIKYVKSDVVTICVG

SEQ ID NO: 170489 - protein, 197 aa, Unknown
  Bacterial polypetide isolated from the Sargasso Sea
MNIPTQASDDISRIAGQFNIYSQLLRNRIVMLWDQVDDEIAKEITAQLLYLEGEDSEKDIWLYINSPGGSVTAGMAIYDTMQLIKPDVSTLCLGLGASMGQFLLGAGAQGKRYSLKHARIMMHQPLGGIQGQASDIAIQAEQLSYIKKLMAELIAGHTGQTVEQVQADSDRDRWFTAEEAKEYGIVDHVITSRGEVD

SEQ ID NO: 170490 - protein, 93 aa, Unknown
  Bacterial polypetide isolated from the Sargasso Sea
MVVEQSTRGERAYDIYSRLLKERIVFVVGPINDSVASVVTAQLLFLESEDPKKEISLYINSPGGLVTAGLGIYDTMQYIKPDVSTLCIGQAAS

SEQ ID NO: 170491 - protein, 72 aa, Unknown
  Bacterial polypetide isolated from the Sargasso Sea
MKDPIDNLTNNLIPMVVEQSSRGERAYDIYSRLLKERIIFLTGPIDDNIASLICAPLLFLESENPKKEISFY

SEQ ID NO: 170492 - protein, 203 aa, Unknown
  Bacterial polypetide isolated from the Sargasso Sea
MTNKISEHMSTLVPMVVEQSSKGERAYDIYSRLLKERIIFLTGQINDNVASLVTAQLLFLEAEDPKKEIYLYINSPGGLVTAGLGIYDTMQYVKPDISTLCIGQAASMGSFLLSAGKKGKRFSLPNSRIMVHQPSAGFQGQATDIEIHANEVLSLKKRLNEIYSKHTGKSVDEIKSALERDNFMTADAAKSFGLIDEVVEKRS

SEQ ID NO: 170493 - protein, 156 aa, Unknown
  Bacterial polypetide isolated from the Sargasso Sea
NVATLVTAQLLFLESENPKKEISFYINSPGGLVTAGLGIYDTMQYIKPPVSTLCIGQASSMGSFLLAAGEKGKRFSLPNSRIMVHQPSAGYQGQATDIEIHAKEILALKERLNKIYSKHTKKSMEEIKKALERDNFMTPSEAKDFGLIDAVVEKRS

SEQ ID NO: 170494 - protein, 154 aa, Unknown
  Bacterial polypetide isolated from the Sargasso Sea
ASLITAQLLFLESENPKKEIFLYINSPGGLVTAGMGIYDTMQYIKSEVSTLCIGQACSMGSFLLAAGEKGKRFSLPNSRIMVHQPSAGFQGQATDIEIHANEVLSLKKRLNEIYSKHTGQSVDEIKLALERDNFMSPDNAKSFGLIDKVVDKRI

SEQ ID NO: 170495 - protein, 180 aa, Unknown
  Bacterial polypetide isolated from the Sargasso Sea
MSNLVPMVVEQSSKGERAYDIYSRLLKERIIFLTGQINDNVASLVTAQLLFLEAEDPKKEIYLYINSPGGLVTAGLGIYDTMQYVKPDISTLCIGQAASMGSFLLAAGTKGKRFSLPNSRIMVHQPSAGFQGQATDIEIHANEVLSLKKRLNEIYSKHTGKSVEEIKSALERDNFRQQMS

SEQ ID NO: 170496 - protein, 143 aa, Unknown
  Bacterial polypetide isolated from the Sargasso Sea
MESEDPKKEISLYINSPGGLVTAGLGIYDTMQYIKPDVSTLCIGQAASMGSFLLAAGTKGKRYSLPNSRIMVHQPSAGFQGQATDIEIHANEVLSLKKRLNEIYSKHTSKSVDEIKSALERDNFMTPDNAKDFGLIDKVVVNR

SEQ ID NO: 170497 - protein, 122 aa, Unknown
  Bacterial polypetide isolated from the Sargasso Sea
LGLGIYDTMQYINSPVSTLCIGQASSMGSFLLAAGEKGKRFSLPNSRIMVHQPSAGYQGQATDIQIHAKEILSLKDRLNKIYAKHTGKSIDEISSALERDNFMTPDEAKKFGLIDSVVDKRK

SEQ ID NO: 170498 - protein, 100 aa, Unknown
  Bacterial polypetide isolated from the Sargasso Sea
VSCSMGSFLLAAGTKGKRCSLPNSRIMVHQPSAGFQGQATDIEIHANEVLSLKNRLNELYSKHTGKGVDEIKSALERDNFMTPKNAKDFGLIDKVVEKRE

SEQ ID NO: 170499 - protein, 173 aa, Unknown
  Bacterial polypetide isolated from the Sargasso Sea
GVERILFLGGEVNDGVANALVAQMLYLDSDDSSKPIYLYINSPGGSVTAGLAIYDTIQYIKSDVVTICVGLAASMGAFLLAAGTKGKRVALPHSRIMIHQPLGGTAQRQASDIEIEAREILRMKDQLNNQLAEMSGQTIEKITKDTDRDYFLSAEDAKAYGLIDRVISHPNEA

SEQ ID NO: 170500 - protein, 184 aa, Unknown
  Bacterial polypetide isolated from the Sargasso Sea
QTPRGERAFDIYSRLLKERIIFVVGPIDDHMANLVVAQLLFLESENPTKEINLYVNSPGGSVTAGLSVYDTMQFIKPNISTLCIGQAASMGAILLAGGAKKKRFALPNSRVMIHQPLGSFQGQATDFDIQAKEILSIRSRLNEILSKHTGQTLKKIQNDTERDNFMTSSDALKYGIIDEILESR

SEQ ID NO: 170501 - protein, 125 aa, Unknown
  Bacterial polypetide isolated from the Sargasso Sea
YDTMQFIKPDVSTICVGQAASMGSLLLAGGKEGKRHCLPHSRIMIHQPSGGFQGQASDIDIHAKEVLKLRERLNQIMAKHTGQSVETIEKDSDRDKFMDGETAVEYGLIDTILEKRIEKAPSGSK

SEQ ID NO: 170502 - protein, 199 aa, Unknown
  Bacterial polypetide isolated from the Sargasso Sea
MNNITNNLVPMVVESTSRGERAFDIYSRLLKERIIFLTGPIDDNLSNLIVAQLLFLESEDPKADISLYINSPGGSVTAGLSILDTMNFIKPAVSTLCIGQAASMGAVLLSGGDKKKRFCLSNSRVMIHQPLGSFQGQATDFDIQAKEILSIRKRLNQILSNSTGQTIKKIESDTERDNFMSPEEAKKYGLIDDILQTRK

SEQ ID NO: 170503 - protein, 187 aa, Unknown
  Bacterial polypetide isolated from the Sargasso Sea
EQSSRGERAYDIYSRLLKERIIFLTGPIDDNIASLICAQLLFLESENPNKEISFYINSPGGIVWSGLAIYDTMQYISPKIMTICIGQAASAGSLLLTAGAEGMRFSLPNSRIMVHQPSGGYQGQVTDIEIQTNEIKKTKERLNQIYSKHTRKKIKEIESIMERDKYFSPDEAIKFGLIDKIVESRKA

SEQ ID NO: 170504 - protein, 203 aa, Unknown
  Bacterial polypetide isolated from the Sargasso Sea
MKDPIDNLTNNLIPMVVEQSSRGERAYDIYSRLLKERIIFLTGPIDDNIASLICAQLLFLESENPKKEISFYINSPGGIVWSGLAMYDTMQYISSKIMTICIGQAASAGSLLLTAGEDNMRYSLPNSRIMIHQPSGGFQGQVTDIEIQTKEIIKTKKRLNEIYAKHSGKDIKEVEEIMERDKFFSPQEAIKFGLIDKIVENRK

SEQ ID NO: 170505 - protein, 142 aa, Unknown
  Bacterial polypetide isolated from the Sargasso Sea
MKDMQSALIPMVIEQTPRGERSFDIYSRLLKERVIFLSGPIDDYISNLVVAQLLFLESENPEKDISIYINSPGGSISAGLAIYDTMQFIKPSISTLCIGQAASMGALLLAGGDKKKRFALPNSRIMIHQPLGGFQGQASDFE

SEQ ID NO: 170506 - protein, 203 aa, Unknown
  Bacterial polypetide isolated from the Sargasso Sea
MTTKISEHMNTLIPMVVEQSSKGERAYDIYSRLLKERIIFLTGPINDNVASLATAQMLFLESENSKKEIYLYINSPGGLVTAGLGVYDTMQYIKPPVSTLCIGQAASMGSFLLAAGEKGKRFSLPNSRIMVHQPSAGFQGQATDIEIHANEVLALKKRLNEIYAKHTGQSTEDIKKALERDNFMTPENAKEFGLIDQVVEKRI

SEQ ID NO: 170507 - protein, 200 aa, Unknown
  Bacterial polypetide isolated from the Sargasso Sea
MIPMVVEQTPRGERAFDIFSRLLKDNVIFAVGPIEDHMANLIIAQMLFLESENPSKDIYLYINSPGGSITSGLSIYDTMQFIKPDVSTICVGQAASMGAILLAGGAESKRFSLPNSRMMIHQPISGFQGQASDIDIHAKEVLKMKSLVNSILSKHTGKTEKQIAKDTDRDNFMDADSALKYGLIDQILNERTEALNQDGR

SEQ ID NO: 170508 - protein, 130 aa, Unknown
  Bacterial polypetide isolated from the Sargasso Sea
MTKIFNNLVPMVVESTSRGERAFDIYSRLLKERIIFLTGPIDDNLSNLVVAQLLFLESEDPKADISLYINSPGGSVTAGLSILDTMNFIRPSVSTLCVGQAASMGAVLLSGGEKKKRFCLSNARVMIHQP

SEQ ID NO: 170509 - protein, 171 aa, Unknown
  Bacterial polypetide isolated from the Sargasso Sea
MSRDFEEKMNSLIPMVVEQTSKGERAYDIYSRLLKERIVFLVGPVNDAVASLVTAQLLFLESENPNKEINFYINSPGGLVTAGLGIYDTMQYINSPVSTLCIGQASSMGSFLLAAGEKGKRYSLPNSRIMVHQPSAGFQGQATDIQIHAKEILSLKERLNNIYSKHTGKSV

SEQ ID NO: 170510 - protein, 196 aa, Unknown
  Bacterial polypetide isolated from the Sargasso Sea
IPIVIEESGRGERAFDIYSRLLRERIVFLGEPVTSDSANRIVAQLLFLEADDPEKDIFLYINSPGGSVYDGFGIFDTMQHVKPDIHTVCVGLAASMGAFLLCAGAKGKRSSLLHSRIMIHQPLGGARGQASDIRIQADEILFIKDKLNKELSERTGQPIERISEDTDRDFYMSPSEAVEYGIIDNVFNKRPINSVR

SEQ ID NO: 170511 - protein, 75 aa, Unknown
  Bacterial polypetide isolated from the Sargasso Sea
MAALVPIVIEQSNRGERSFDIFSRLLRERIIFVTGQVEDHMASLIVAQLLFLESENPKKDIWMYINSPGGVVTAG

SEQ ID NO: 170512 - protein, 195 aa, Unknown
  Bacterial polypetide isolated from the Sargasso Sea
MIPLVLEESGGSERVFDIYSRLLRERIIFLGEQVTSETANRIVAQLLFLEAEDPEKDIYMYINSPGGSVYDGLGIFDTMQHVKPDIHTVCVGLAASMGAFLLAAGTKGKRSSLRHSRIMIHQPLGGARGQASDIRIQADEILFLKERLNTELSERTGKDYETIKEDTDRDFYMSPKEAVEYGLIDLVLDKKPIKV

SEQ ID NO: 170513 - protein, 153 aa, Unknown
  Bacterial polypetide isolated from the Sargasso Sea
QLLFLEAENPSKDISMYINSPGGVVTSGLSIYDTMQYIRPKISTLCVGQAASMGSLLLAAGESGMRFSLPNSRIMVHQPSGGFQGQASDIELQAKEILELKKRLNLIYVKHCGQKLDKVEASLDRDNFMTPDEAKKWGLIDEIIEKRLEEKEE

SEQ ID NO: 170514 - protein, 203 aa, Unknown
  Bacterial polypetide isolated from the Sargasso Sea
MTNKIPEHLNNLIPMVVEQSSRGERAYDIYSRLLKERIVFVVGPINDTIASLVTAQLLFLESEDPKKEISLYINSPGGLVTAGLGIYDTMQYVKPEVTTLCIGQAASMGSFLLAAGAKGKRFSLPNSRIMVHQPSAGFQGQATDIEIHANEVLSLKKRLNEIYSKHTGKSVDEIKLALERDNFMTPENAKDFGLIDKIVDKRD

SEQ ID NO: 170515 - protein, 203 aa, Unknown
  Bacterial polypetide isolated from the Sargasso Sea
MSIKIPEQLNTLIPMVVEQSSRGERAYDIYSRLLKERIVFVVGPINDAVASLVTAQLLFLESEDPKKEISLYINSPGGLVTAGLGIYDTMQYIKPEISTLCIGQAASMGSFLLAAGTKGKRFSLPNSRIMVHQPSAGFQGQATDIEIHANEVLSLKKRLNEIYSKHTGKSVDEIKSALERDNFMTPDNAKSFGLIDKVVEKRE

SEQ ID NO: 170516 - protein, 99 aa, Unknown
  Bacterial polypetide isolated from the Sargasso Sea
MSREFEEKMNSLIPMVVEQTSKGERAYDIYSRLLKERIVFLVGPVNDAVASLVTAQLLFLESENPNKEINFYINSPGGLVTAGLGIYDTMQYINSPVST

SEQ ID NO: 170517 - protein, 205 aa, Unknown
  Bacterial polypetide isolated from the Sargasso Sea
MKKEPSNYVVPTVIENTNRGERAFDIYSRLLKDRIIFLGTPIDDGVANLIMAQLLHLESEDPDKDIYVYINSPGGSITSLFAIYDTMKYIKPDVATVCMGLAASAGAVILAGGTPGKRYSLPHARIMLHQPAGGAEGTSKDIEIQAKLITDMRNQINGLLADFTKKDIEQISVDTDRDFWMTAQEALEYGIVDEVLTQRELADKK

SEQ ID NO: 170518 - protein, 151 aa, Unknown
  Bacterial polypetide isolated from the Sargasso Sea
MPIGTPSVPYRLPGSQYERWVDIYTRLGVERILFLGQEVNDGIANSLVAQMLYLDSDDNSKPIYLYINSPGGSVTAGLAIYDTIKYVKSDVVTICVGLAASMGAFLLAAGTKGKRVALPHSRIMIHQPLGGTSQRQASDIEIEAQGNLRIK

SEQ ID NO: 170519 - protein, 196 aa, Unknown
  Bacterial polypetide isolated from the Sargasso Sea
MTSKIPEHLNTLIPMVVEQSSRGERAYDIYSRLLKERIVFIVGAINDSVASLVTAQLLFLESEDPKKEISLYINSPGGLVTSGLGIYDTIQYIKPQVTTLCIGQAASMGSFLLAAGAEGKRFSLPNSRIMVHQPSAGFQGQVTDIEIHANEVLALKKRLNEIYSKHTGKSVEEIKEALERDNFMTPRKCKRFWINR

SEQ ID NO: 170520 - protein, 189 aa, Unknown
  Bacterial polypetide isolated from the Sargasso Sea
MVVEQSSKGERAYDIYSRLLKERIIFLTGQINDNVASLVTAQLLFLEAENPKKEIYLYINSPGGLVTAGLGIYDTMQYIKPDISTLCIGQAASMGSFLLAAGTKGKRFSLPNSRIMVHQPSAGYQGQATDIEIHAKEVLSLKIRLNEIYSKHTGKSVDEIKSALERDNFMTADVAQSFGLIDEVVEKRS

SEQ ID NO: 170521 - protein, 95 aa, Unknown
  Bacterial polypetide isolated from the Sargasso Sea
GSFLLSAGSKGKRFSLPNSRIMVHQPSAGFQGQATDIEIHANEVLSLKKRLNEIYSKHTNKSVEEIKSALERDNFMTPENAKEFGLIDKVVVNRE

SEQ ID NO: 170522 - protein, 112 aa, Unknown
  Bacterial polypetide isolated from the Sargasso Sea
MCVGQAASMGSLLLAAGEQGMRLCLPNSRVMVHQPSGGFQGQASDIALHAQEILDLKKRLNMIYVKHTNQKISAVEKALDRDNFMTPEQSLEWGIIDKIIDQREPDVADKVE

SEQ ID NO: 170523 - protein, 168 aa, Unknown
  Bacterial polypetide isolated from the Sargasso Sea
MNIDEKVLNQLVPMVVEQTGRSERAFDIFSRLLKERIVFLGTPINDSMASLIIAQLLFLEAEDSEKDINLYINSPGGVITSGMGIYDTMQYIKPDVATICLGQAASMGAFLLAGGAKGKRSALPNSRIMIHQPMGGAEGQATDIEIQAEEILRMKKQLNSILAKNSGQ

SEQ ID NO: 170524 - protein, 208 aa, Unknown
  Bacterial polypetide isolated from the Sargasso Sea
MNNVGDPHMNTLIPMVVEQTARGERSYDIYSRLLKERIIFVSGPVHDAMATVLVAQLLFLEAENPKKDISMYINSPGGVVTAGLSIYDTMQYIRPKISTLCVGQAASMGSLLLAAGEPGMRFALPNSRIMVHQPSGGFQGQASDIELQAKEIVELKKRLNLIYVKHCDQKLEKVEQSLDRDNFMTPDDAVKWGLIDEIIEKRLESGED

SEQ ID NO: 170525 - protein, 203 aa, Unknown
  Bacterial polypetide isolated from the Sargasso Sea
MKDPIDNLTNNLIPMVVEQSSRGERAYDIYSRLLKERIIFLTGPIDDNIASLICAQLLFLESENPKKEISFYINSPGGIVWSGLAMYDTMQYISSKIMTICIGQAASAGSLLLTAGENDMRYSLPNSRIMMHQPSGGYQGQVTDIEIQTKEIIKTKKRLNEIYAKHSGKDIKEVAEIMERDKYFSPQEAIKFGLIDKIVENRK

SEQ ID NO: 170526 - protein, 177 aa, Unknown
  Bacterial polypetide isolated from the Sargasso Sea
YDIYSRLLKERIIFLTGQINDNVASLVTAQLLFLEAEDPKKEIYLYINSPGGLVTSGLGIYDTMQYIKPDVSTLCIGQAASMGSFLLSAGTKGKRFSLPNSRIMVHQPSAGFQGQATDIEIHANEVLSLKKRLNEIYSKHTGKSVEEIKTALERDNFMTAESAKSFGLVDEVVEKRS

SEQ ID NO: 170527 - protein, 135 aa, Unknown
  Bacterial polypetide isolated from the Sargasso Sea
MITKLTEHMSNLVPMVVEQSSKGERAYDIYSRLLKERIIFLTGQINDNVASVVTAQLLFLEAEDPKKEIYLYINSPGGLVTAGLGIYDTMQYVKPDISTLCIGQAASMGSFLLSAGTKGKRFSLPNSRIMFINHQ

SEQ ID NO: 170528 - protein, 126 aa, Unknown
  Bacterial polypetide isolated from the Sargasso Sea
MAIYDTIKYVKSDVVTICVGLAASMGAFLLAAGTKGKRVALPHSRIMIHQPLGGTSQRQASDIEIEAKEILRIKDMLNMSMADMTGQSFEKIEKDTDRDYFLSAEEAKNYGLIDRVITHPSEANQS

SEQ ID NO: 170529 - protein, 86 aa, Unknown
  Bacterial polypetide isolated from the Sargasso Sea
MNNLVPMVVEQSSKGERAYDIYSRLLKERIIFLTGQINDNVASLVTAQLLFLEAEDPKKEIYLYINSPGGLVTAGLGIYDTMQYVK

SEQ ID NO: 170530 - protein, 147 aa, Unknown
  Bacterial polypetide isolated from the Sargasso Sea
LRAEDPDKDIYMYINSPGGSVYDGLGIFDTMQHVKPDINTVCVGLAASMGAFLLAAGTKGKRSSLRHSRIMIHQPLGGARGQASDIRIQADEILFLKERLNTELSERTGKDYDTIKDDTDRDFYMSPKEAVEYGLIDLILDKKPINT

SEQ ID NO: 170531 - protein, 127 aa, Unknown
  Bacterial polypetide isolated from the Sargasso Sea
GGLVTSGLGIYDTMQYINSPVSTLCIGQASSMGSFLLSAGEKGKRYSLPNSRIMVHQPSAGFQGQATDIQIHAKEIQSLKTRLNSIYSKHTGKSVDEISKALERDNFMTPEEAKTFGLIDSVVEKRK

SEQ ID NO: 170532 - protein, 203 aa, Unknown; identical to SEQ ID NO: 170328
  Bacterial polypetide isolated from the Sargasso Sea

SEQ ID NO: 170533 - protein, 167 aa, Unknown
  Bacterial polypetide isolated from the Sargasso Sea
MKKTPNNQLIPMVVEQTGRFERAYDIYSRLLKERIVFLGTPIDDNVASLIISQLLFLEADDSEKDIYLYINSPGGIITSGMGIYDTMNYIKPDVATICLGQAASMGAFLLSGGTKGKRSALPNSRIMIHQPLGGAEGQASDIKILSDEILRLRANLNAILVKNTKAN

SEQ ID NO: 170534 - protein, 187 aa, Unknown
  Bacterial polypetide isolated from the Sargasso Sea
MNTGITDPLNALVPMVVEQTPKGERSYDIYSRLLKERIIFLTGQVEDNMANLILAQMLFLESENPDKDIFLYINSPGGSVTAGMAIYDTMNFIKPDVSTICVGQAASMGAFLLTAGAKGKRFCLPNSRVMIHQPLGGFQGQASDFEIHAKEILSIKDKLNRLMAEHTGQPLDVISKDTDRDNFMSAS

SEQ ID NO: 170535 - protein, 72 aa, Unknown
  Bacterial polypetide isolated from the Sargasso Sea
MSEKIFEQMNTLIPMVVEQSSRGERAYDIYSRLLKERIVFLVGPINDNVASLVTAQLLFLESENLKKKFLYT

SEQ ID NO: 170536 - protein, 203 aa, Unknown
  Bacterial polypetide isolated from the Sargasso Sea
MTTKISEHMNTLIPMVVEQSSKGERAYDIYSRLLKERIIFLVGPINDNVASLVTAQMLFLESENPKKEIYLYINSPGGLVTAGLGVYDTIQYIKPPVSTLCIGQAASMGSFLLAAGEKGKRFSLPNSRIMVHQPSAGFQGQATDIEIHANEVLSLKKRLNEIYSKHTGQSTEDIKKALERDNFMTPESAKDFGLIDEVVEKRN

SEQ ID NO: 170537 - protein, 74 aa, Unknown
  Bacterial polypetide isolated from the Sargasso Sea
MTDIHSALIPMVIEQTPRGERSFDIYSRLLKERVIFLSGPIDDYISNLVVAQLLFLESENPDKDISIYINSPGW

SEQ ID NO: 170538 - protein, 193 aa, Unknown
  Bacterial polypetide isolated from the Sargasso Sea
MALVPVVVESTSRGERSWDIYSRLLKDRIIIVGSPITDEMANVIVAQLLFLESEDAEKDIHFYLNCPGGVVTAGMAIYDTMQTIKPNVRTYCLGQCASMGAWLLAAGHPGKRYSLPNARIMIHQPLGGATGQATDIKIQAQEIVYLKNRMCSVLASHTGKKIEDIYADIDRDYYMSAVEAKEYGIVDQVVPPK

SEQ ID NO: 170539 - protein, 189 aa, Unknown
  Bacterial polypetide isolated from the Sargasso Sea
MVVEQTTKGERAFDIYSRLLKERIVFLVGPVNDNVASLVTAQLLFLESENPKKEIYFYINSPGGLVTSGLGIYDTMQYIKSPVSTLCIGQASSMGSFLLAAGEKGKRFSLPNSRIMVHQPSAGFQGQATDIQIHAKEILSLKERLNKIYSKHTGKSIKEIGNALERDKFMTAEEAKDFGLIDKVVEKRN

SEQ ID NO: 170540 - protein, 148 aa, Unknown
  Bacterial polypetide isolated from the Sargasso Sea
QLLFLESENPKKEIFFYINSPGGLVTSGLGIYDTMQYIKSPVSTLCIGQASSMGSFLLAAGEKGKRFSLPNSRIMVHQPSAGFQGQATDIQIHAKEILSLKERLNKIYSKHTGKSLKEISIALERDNFMTAEEAKNFGLIDSVVEKRK

SEQ ID NO: 170541 - protein, 65 aa, Unknown
  Bacterial polypetide isolated from the Sargasso Sea
QGQATDIEIHAFEVLSLKKRLNEIYSKHTGKSVDEIKSALERDNFMTPDNAKDFGLIDKVVEKRE

SEQ ID NO: 170542 - protein, 196 aa, Unknown
  Bacterial polypetide isolated from the Sargasso Sea
MNLVPIVIEQSGKGERSFDIFSRLLRERIIFLTGAINDETASLICAQLLFLESENPEEPINLYINSPGGLVTAGLAMYDTMQYIKCPVHTVCIGQAASAGSLILAAGKEGNRYALPHSKIMIHQPSGGFSGQASDIKIHAEEILKTKKRLNEIYQKHTKISIGEIEKAMERDRFFDPEEAQKFGLIDKVITTRIEK

SEQ ID NO: 170543 - protein, 188 aa, Unknown
  Bacterial polypetide isolated from the Sargasso Sea
MENKFTPQSNLIPMVVEQSNRGERAYDIYSRLLKERIVFVTGPIEDYMASVITAQLLYLEAENPKKEISMYINSPGGVVSSGLAIYDTMQYIKPEVSTLCIGQAASMGSLLLAAGEKNKRFALPNSRIMVHQPSGGFQGQASDIERHAKEIISLRSRLNEIYVNHTGKDLKTIESALDRDTFMTSDDA

SEQ ID NO: 170544 - protein, 203 aa, Unknown
  Bacterial polypetide isolated from the Sargasso Sea
MTTKIPEYMNNLIPMVVEQSSKGERAYDIYSRLLKERIIFLVGPINDNVASLVTAQLLFLESENPKKEINLYINSPGGLVTAGLGIYDTMQYIKPEVSTLCIGQAASMGSFLLAAGEKGKRFSLPNSRIMVHQPSAGFQGQATDIEIHANEVLSLKKRLNEIYSKHTGKSLDEIKQALERDNFMTPDSAKEFGLIDKVVEKRS

SEQ ID NO: 170545 - protein, 203 aa, Unknown; identical to SEQ ID NO: 170263
  Bacterial polypetide isolated from the Sargasso Sea

SEQ ID NO: 170546 - protein, 108 aa, Unknown
  Bacterial polypetide isolated from the Sargasso Sea
EVSTLCIGQAASMGSFLLSAGAKGKRFSLPNSRIMVLQPSAGFQGQATDIEIHANEVFSLKKRLNEIYSKHTGKSVDEIKLALERDNFMTPENAKEFGLIDKVVVKRE

SEQ ID NO: 170547 - protein, 156 aa, Unknown
  Bacterial polypetide isolated from the Sargasso Sea
MTNKISEHMNTLVPMVVEQSNKGERAYDIYSRLLKERIIFLTGQINDNVASLVTAQLLFLEAEDPKKEIYLYINSPGGLVTAGLGIYDTMQYVKPDISTLCIGQAASMGSFLLSAGTKGKRFSLPNSRIMVHQPSAGFQGQATDIEIHANEVLSLK

SEQ ID NO: 170548 - protein, 140 aa, Unknown
  Bacterial polypetide isolated from the Sargasso Sea
ILKKKIYLYINSPGGLVTAGLGIYDTMQYVKPEISTLCIGQAASMGSFLLAAGTKGKRFSLPNSRIMVHQPSAGFQGQATDIEIHANEVLSLKKRLNEIYSKHTGKSVEEIKSALERDNFMTAEIAKSFGLIDEVVEKRS

SEQ ID NO: 170549 - protein, 141 aa, Unknown
  Bacterial polypetide isolated from the Sargasso Sea
ENPNKEISFYINSPGGLVTSGLGIYDTMQYINSPVSTLCIGQASSMGSFLLSAGEKGKRYSLPNSRIMVHQPSAGFQGQATDIQIHAKEIQQLKTRLNTIYSKHTGKSVEEISKALERDNFMTPEEAKKFGLIDSVVEKRK

SEQ ID NO: 170550 - protein, 198 aa, Unknown
  Bacterial polypetide isolated from the Sargasso Sea
EEQMNSLIPMVVEQTSKGERAYDIYSRLLKERIVFLVGPVNDAVASLVTAQLLFLESENPNKEINFYINSPGGLVTAGLGIYDTMQYINSPVSTLCIGQASSMGSFLLASGQKGKRFSLPNSRIMVHQPSAGFQGQATDIQIHAKEILSLKERLNKIYSKHTGKTVDEISKALERDNFMTAEEAKNFGLIDTVVEKRK

SEQ ID NO: 170551 - protein, 97 aa, Unknown
  Bacterial polypetide isolated from the Sargasso Sea
MNTLIPMVVEQTTKGERAYDIYSRLLKERIVFLVGPVNDSVASLVTAQLLFLESENPKKEINFYINSPGGLVTSGLGIYDTMQYIKSPSFYTLYGQA

SEQ ID NO: 170552 - protein, 142 aa, Unknown
  Bacterial polypetide isolated from the Sargasso Sea
SEDPKKEISLYINSPGGLVTAGLGIYDTMQYVKPDISTLCIGQAASMGSFLLSAGTKGKRFSLPNSRIMVHQPSAGFQGQATDIEIHANEVLSLKKRLNEIYSKHTNKSVEEIKTSLERDNFMTPENAKDFGLIDKVVVSRE

SEQ ID NO: 170553 - protein, 191 aa, Unknown
  Bacterial polypetide isolated from the Sargasso Sea
MNNLIPMVVEQSSRGERAYDIYSRLLKERIVFVVGPINDSIASLVTAQLLFLESEDPKKEISLYINSPGGLVTAGLGIYDTMQYIKPEVTTLCIGQAASMGSFLLAAGAKGKRFSLPNSRIMVHQPSAGFQGQATDIEIHANEVLSLKKRLNEIYSKHTSKSVDEIKSALERDNFMTAENAKDFGLIDKVV

SEQ ID NO: 170554 - protein, 203 aa, Unknown
  Bacterial polypetide isolated from the Sargasso Sea
MKNRIEEHMNNLIPMVVEQSNRGERAYDIYSRLLKERIIFLVGPVNDNVSTLVTAQLLFLESENPKKEISFYINSPGGLVTSGLGIYDTMQYIKPAVSTLCIGQASSMGSFLLAAGEKGKRFSLPNSRIMVHQPSAGYQGQATDIEIHAKEILSLKDRLNKIYSKHTKKSESEIKKALERDNFMTPSEAKDFGLIDEVVEKRS

SEQ ID NO: 170555 - protein, 172 aa, Unknown
  Bacterial polypetide isolated from the Sargasso Sea
MIRKIEEQLNNLVPMVVEQTNKGERAYDIYSRLLKERIVFLVGGVNDTVASLVTAQLLFLESENPKKEIFFYINSPGGLVTSGLGIYDTMQYIKSPVSTLCIGQASSMGSFLLSAGEKGKRFSLPNSRIMVHQPSAGFQGQATDIQIHAKEILSLKERLNKIYSKHTGKSVK

SEQ ID NO: 170556 - protein, 184 aa, Unknown
  Bacterial polypetide isolated from the Sargasso Sea
QGRGERAYDIYSRLLKERIIFLVGPINDNVASLVTAQMLFLESENPKKEIYLYINSPGGLVTAGLGVYDTMQYIKPPVSTLCIGQAASMGSFLLAAGEKGKRFSLPNSRIMVHQPSAGFQGQATDIEIHANEVLALKKRLNEIYSKHTGQSTEDIKKALERDNFMTPESAKKFGLIDEVVEKRS

SEQ ID NO: 170557 - protein, 74 aa, Unknown
  Bacterial polypetide isolated from the Sargasso Sea
LLSGGAKGKRLALPNSRIMIHQPLGGAQGQAVEIEIQAKEILFLKKTLNSLLAEHTGQPLEKINEDTERDYFLS

SEQ ID NO: 170558 - protein, 48 aa, Unknown
  Bacterial polypetide isolated from the Sargasso Sea
MTNKLSEHLNTLIPMVVEQSSRGERAYDIYSRLLKERIIFVVGPINDS

SEQ ID NO: 170559 - protein, 94 aa, Unknown
  Bacterial polypetide isolated from the Sargasso Sea
MKTFNQLVPMVVEQTPRGERAFDIYSRLLKERVIFITGTVEDQMANLIVAQLLFLEAENPDKDINLYINSPGGSVTSGLSIYDTMTYIKPDIST

SEQ ID NO: 170560 - protein, 146 aa, Unknown
  Bacterial polypetide isolated from the Sargasso Sea
LFLEAEDPKKEIYLYVNSPGGLVTAGLGIYDTMQYVKPDISTLCIGQAASMGSFLLAAGTKGKRFSLPNSRIMVHQPSAGFQGQATDIEIHANEVLSLKKRLNEIYSKHTGKSVDEVKSALERDNFMTADVAKSFGLIDEVVEKRS

SEQ ID NO: 170561 - protein, 194 aa, Unknown
  Bacterial polypetide isolated from the Sargasso Sea
MIRKIEEHLNNLIPMVVEQTTKGERAYDIYSRLLKERIVFLVGAVNDSVASLVTAQLLFLESENPKKEIYFYINSPGGLVTSGLGIYDTMQYIKSPVSTLCIGQASSMGSFLLAAGEKGKRFSLPNSRIMVHQPSAGFQGQATDIQIHAKEILSLKERLNKIYSRHTGKSVKEISAALERDKFMTAEEAMDFGL

SEQ ID NO: 170562 - protein, 166 aa, Unknown
  Bacterial polypetide isolated from the Sargasso Sea
MSEFQSALIPMVVEQTPRGERSFDIYSRLLKERVIFLSGAIDDYISNLVVAQLLFLESENPEKDISIYINSPGGSISAGLAIYDTMQFVKPSISTMCIGQAASMGALLLAGGNKKKRFALPNSRIMIHQPLGGFQGQASDFEIHAKEILHMKKIVNEILAKHTGST

SEQ ID NO: 170563 - protein, 136 aa, Unknown
  Bacterial polypetide isolated from the Sargasso Sea
MSRELNEKLSSLIPMVVEQTSKGERAYDIYSRLLKERIVFLVGPVNDAVASLVTAQLLFLESENPNKEINFYINSPGGLVTAGLGIYDTMQYINSPVSTLCIGQASSMGSFLLSAGEKGKRYSLPNSRIMVHQPSA

SEQ ID NO: 170564 - protein, 123 aa, Unknown
  Bacterial polypetide isolated from the Sargasso Sea
MIRKIEEQLNNLIPMVVEQTNKGERAYDIYSRLLKERIVFLVGGVNDNVASLVTAQLLFLESENPKKEIYFYINSPGGLVTSGLGIYDTMQYIKSPVSTLCIGQASSMGSFLLAAGEKGKRFS

SEQ ID NO: 170565 - protein, 145 aa, Unknown
  Bacterial polypetide isolated from the Sargasso Sea
ILESEDPKKEISLYINSPGGLVTAGLGIYDTIQYIKPEISTLCIGQAASMGSFLLAAGTKGKRFSLPNSRIMVHQPSAGFQGQATDIEIHANEVLSLKKRLNEIYSKHTGKSVDEIKSALERDNFMTPDNAKSFGLIDKVVEKRE

SEQ ID NO: 170566 - protein, 116 aa, Unknown
  Bacterial polypetide isolated from the Sargasso Sea
MTTKLSEHMSNLVPMVVEQSSKGERAYDIYSRLLKERIIFLTGQINDNVASLVTAQLLFLEAEDPKKEIYLYINSPGGLVTAGLGIYDTMQYVKPDISTLCIGQAASMGSFLLAAG

SEQ ID NO: 170567 - protein, 201 aa, Unknown
  Bacterial polypetide isolated from the Sargasso Sea
MITSAGLVPMVIEQTARGERSFDIYSRLLKERVIFLVGPVEDHMANLVVAQLLFLESENPDKDIHLYINSPGGSVTAGMSIYDTMQFIKPDVSTLCIGQAASMGAFLLAGGAKGKRACLPNSRVMIHQPLGGYQGQATDIEIHTREILKIRHTLNSILAHHTGQDLETIARDTDRDNFMDPVQAKEYGLIDTVLDKRVSNN

SEQ ID NO: 170568 - protein, 196 aa, Unknown
  Bacterial polypetide isolated from the Sargasso Sea
MPLIPYVVEKSGREERAMDIYSRLLKDRIIFLGSQVNDEMANAIVAQMLFLQTDDPKSDIHLYINSPGGSVTAGLAIYDTMQFVSCDVATYCIGQAASMGALLLTAGTAGKRRALPNARIMIHQPLAGMEGTAEEIMIHANEFRNIKSKLNKILLKHTGQPLEKIEEDTDRDRFMSADEACEYHLIDEVIEQIPTG

SEQ ID NO: 170569 - protein, 155 aa, Unknown
  Bacterial polypetide isolated from the Sargasso Sea
LLYLQSENRRKDIHFYINSPGGSVTATMAIYDTMQILSCPVATYCVGLAASGGAVLLAGGASGKRFSLPHAKVMIHQPYGQVGGQVSDIEIQADEIIKTRAVLNEILASHTGQPIEQIAQDTDRDRYLTATEAKEYGLVDDILTKPPGEEDKDVD

SEQ ID NO: 170570 - protein, 147 aa, Unknown
  Bacterial polypetide isolated from the Sargasso Sea
MKKEPSNYVVPTVIENTNRGERAFDIYSRLLKDRIIFLGTPIDDGVANLIMAQLLHLESEDPEKDIYVYINSPGGSITSLFAIYDTMKYIKPDVATVCMGLAASAGAVILAGGTPGKRYSLPHARIMLHQPAGGAEGTSKDIEIQAK

SEQ ID NO: 170571 - protein, 199 aa, Unknown
  Bacterial polypetide isolated from the Sargasso Sea
MTDIQSALIPMVIEQTPRGERSFDIYSRLLKERVIFLSGPIDDYISNLVVAQLLFLESENPEKDISIYINSPGGSISAGLAIYDTMQFVTPSISTMCIGQAASMGALLLAGGDNKKRFALPNSRIMIHQPLGGFQGQASDFEIHAKEILHMKKIVNEILAKHTGQTIKKIEKDTDRDNFLDASAAKAYGIVDKILEQRS

SEQ ID NO: 170572 - protein, 146 aa, Unknown
  Bacterial polypetide isolated from the Sargasso Sea
LFLESENPEKDISIYINSPGGSISAGLAIYDTMQFISPSISTMCIGQAASMGALLLAGGDKNKRFALPNSRIMIHQPLGGFQGQASDFEIHAKEILHMKKIVNEILAKHTGQTIKKIEKDTDRDNFLDASAAKAYGIVDKILEQRS

SEQ ID NO: 170573 - protein, 195 aa, Unknown
  Bacterial polypetide isolated from the Sargasso Sea
MSSLIPMVVEQSNKGERAYDIYSRLLKERIIFLTGQINDNVASLITAQLLFLEAEDPKKEIFLYINSPGGLVTAGLGIYDTMQYVKPDISTLCIGQAASMGSFLLSAGTKGKRYSLPNSRIMVHQPSAGFQGQATDIEIHANEVLSLKKRLNEIYSKHTGKSVDEIKTALERDNFMTADAAKSFGLIDSVVEKRS

SEQ ID NO: 170574 - protein, 190 aa, Unknown
  Bacterial polypetide isolated from the Sargasso Sea
MVVEQSSRGERAYDIYSRLLKERIIFLTGPIDDNIASLICAQLLFLESENPKKEISFYINSPGGIVWSGLAIYDTMQYISSKIMTICIGQAASAGSLLLTAGSEGMRFSLPNSRIMVHQPSGGYQGQVTDIEIHTNEIKKTKERLNQIYSKHTKKKIKEIELIMERDKYFSPEEAIKFGLIDKIVESRKS

SEQ ID NO: 170575 - protein, 126 aa, Unknown
  Bacterial polypetide isolated from the Sargasso Sea
GLVTAGLGIYDPMQYINSPVSTLCIRQASSMGSFLLAAGAKGKRYSLPNSRIMVHQPSAGFQGQATDIQIHAKEILSLKERLNKIYSKHTGKNIDEISDALERDNFMTAEEAKKFGLIDTVVEKRK

SEQ ID NO: 170576 - protein, 138 aa, Unknown
  Bacterial polypetide isolated from the Sargasso Sea
MVVEQTPRGERAYDIYSRLLKERVIFLTGPVEDYGSNLIVAQMLYLEAENPDKDIHLYINSPGGSVTAGLSIYDTMQFIKPDVSTLCIGQAASMGAILLCGGAKGKRQALPNSRVMIHQVLGGFQGQASDIEIHTQEI

SEQ ID NO: 170577 - protein, 211 aa, Unknown
  Bacterial polypetide isolated from the Sargasso Sea
MEKNYNQVFSFNEIGALVPMVVEQTSRGERSYDIYSRLLKERIIFLVGPVDDNLASLVCAQLLFLEAENPKKDISMYINSPGGVVTSGLSIYDTMEYIRPDVSTLCIGQAASMGSLLLTAGAKNKRYCLPNARIMTHQPSGGFQGQASDIEIHAKEIINLRSRLNGIYVKHSGKKIAEIESLMDRDTFLSPEDALKIGLIDEVVEKRPNVK

SEQ ID NO: 170578 - protein, 121 aa, Unknown
  Bacterial polypetide isolated from the Sargasso Sea
MVPMVIETTGRGERAFDIYSRLLKERVVFMVGPVEDHMANLIVAQLLFLESENPDKDIHLYINSPGGAVNAGMAIYDTMQFVRPNISTVCMGQAASMGAVILGRRCSWAALLPAAWPNHDP

SEQ ID NO: 170579 - protein, 200 aa, Unknown
  Bacterial polypetide isolated from the Sargasso Sea
MPIGVPKVAYRLPGEATPQWVDLYNRLYRERVLFLGSGLDDELANQLNGIMLYLSAEDSSRSLFLYINSPGGSVTAGLSVFDIMNYVQASVTTIGIGFAASMASFILAGGERGSRIALPHCRVMIHQPQGGMEGQASEVVLEKEEIVRLRRLIGRLYVDLTGQPLSTIANDLDRDKYLSAREAREYGLVDLVATTETATV

SEQ ID NO: 170580 - protein, 200 aa, Unknown
  Bacterial polypetide isolated from the Sargasso Sea
MSKNDILNNLVPMVVEQTPRGERAFDIYSRLLKERIIFVVGPIDDHMANLVVAQLLFLESENPTKEINLYVNSPGGSVTAGLSVYDTMQFIKPSISTLCIGQAASMGAILLAGGSKKKRFALPNSRVMIHQPLGSFQGQATDFDIQAKEILNIRSRLNEILSKHTGQTLKKIQNDTERDNFMTSSDALKYGIIDEILESR

SEQ ID NO: 170581 - protein, 164 aa, Unknown
  Bacterial polypetide isolated from the Sargasso Sea
FVVGPINDAVASLVTAQLLFLESEDPKKEISLYINSPGGLVTAGLGIYDTMQYIKPEISTLCIGQAASMGSFLLAAGAKGKRFSLPNSRIMVHQPSAGFQGQATDIEIHANEVLSLKKRLNEIYSKHTGKSVDEIKSALERDNFMTPDNAKSFGLIDKVVEKRE

SEQ ID NO: 170582 - protein, 135 aa, Unknown
  Bacterial polypetide isolated from the Sargasso Sea
MTTKISEHMNNLIPMVVEQSSRGERAYDIYSRLLKERIVFVVGPINDNIASLVTAQLLFLESENPKKEIYLYINSPGGLVTAGLGIYDTMQYIKPDVSTLCIGQAASMGSFLLAAGQKGKRFSLPNSRIMVHQPS

SEQ ID NO: 170583 - protein, 225 aa, Unknown
  Bacterial polypetide isolated from the Sargasso Sea
MNTGVSTYVIFFIRTIYAQQGKGPSPLVVERFQSVASQLMNQRIIRLGGAVDDDSCNLIVAQLLWLDANDPDKDITLYVNSPGGSVTAGMAVFDTMRHIRPDVSTVCVGLAASMGAFLLASGTQGKRFSLPNSRIMIHQPLGGAQGQAADIEIQANEIMHHKSTLNGYLAEFTNQSLEKVMEDTDRDFFMSAEEAVTYGLIDSVIEHPTHLAVNTSGIPMYASEF

SEQ ID NO: 170584 - protein, 203 aa, Unknown
  Bacterial polypetide isolated from the Sargasso Sea
MSEKILEQMNTLIPMVVEQSSRGERAYDIYSRLLKERIVFLVGPINDNVASLVTAQLLFLESENPKKEISLYINSPGGLVTAGLGIYDTMQYIKPDVSTLCIGQAASMGSFLLAAGEKGKRFSLPNSRIMVHQPSAGFQGQATDIEIHANEVLSLKKRLNQIYSKHTGKSEDEIKIALERDNFMTSENAKEFGLIDQVVEKRS

SEQ ID NO: 170585 - protein, 133 aa, Unknown
  Bacterial polypetide isolated from the Sargasso Sea
MNKISEYMNNLIPMVVEQSNKGERAYDIYSRLLKERIIFLTGQINDNVASLVTAQLLFLEAEDPKKEIYLYINSPGGLVTAGLGIYDTMQYIKPEISTLCIGQAASMGSFLLAAGSKGKRFSLPNSRIMFINH

SEQ ID NO: 170586 - protein, 199 aa, Unknown
  Bacterial polypetide isolated from the Sargasso Sea
MTDIHSALIPMVIEQTPRGERSFDIYSRLLKERVIFLSGAIDDYISNLVVAQLLFLESENPEKDISIYINSPGGSISAGLAIYDTMQFITPSISTMCIGQAASMGALLLAGGDKKKRFALPNSRIMIHQPLGGFQGQASDFEIHAKEIIHMKKIVNEILAKHTGQSIKKIEKDTDRDNFLDASAAKTYGIVDKILEQRS

SEQ ID NO: 170587 - protein, 153 aa, Unknown
  Bacterial polypetide isolated from the Sargasso Sea
MNKIPEHLNTLIPMVVEQSSRGERAYDIYSRLLKERIVFLVGPINDNVASLITAQLLFLESEDPKKEISLYINSPGGLVTAGLGIYDTMQYIKPNVSTLCIGQAASMGSFLLAAGTKGKRFSLPNSRIMVHQPSAGFQGQATDIEIHANEVLS

SEQ ID NO: 170588 - protein, 170 aa, Unknown
  Bacterial polypetide isolated from the Sargasso Sea
MKNIEQMSSFVPIVVEQSSRGERAFDIFSRLLKDNVIFAVGPIDDYIANLIVAQMLFLESENPKKDIYLYINSPGGSITSGLSIYDTMQFIKPDVSTICVGQAASMGALLLAGGAESKRFSLPNSRMMIHQPISGFQGQASDIDIHAKEVLKMKSLVNSILSKHTGKTEK

SEQ ID NO: 170589 - protein, 114 aa, Unknown
  Bacterial polypetide isolated from the Sargasso Sea
MNNLVPMVVEQTPRGERAYDIYSRLLKERIIFMVGPVDDYSSNLIVAQLLFLESENPTKDISLYINSPGGSVTAGMSIYDTMQFVKPDISTLCIGQAASMGADIVVRREKRQTF

SEQ ID NO: 170590 - protein, 177 aa, Unknown
  Bacterial polypetide isolated from the Sargasso Sea
YDIYSRLLKERIIFLTGQINDNVASLVTAQLLFLEAENPKKEIYLYINSPGGLVTAGLGIYDTMQYVKPDISTLCIGQAASMGSFLLAAGTKEKRFSLPNSRIMVHQPSAGFQGQATDIEIHANEVLSLKKRLNELYSKHTGKSVEEVKSALERDNFMTADVAKSFGLIDEVVEKRS

SEQ ID NO: 170591 - protein, 201 aa, Unknown
  Bacterial polypetide isolated from the Sargasso Sea
MALIPMVVEQNSRGERAYDIYSRLLKDRIIFLGTPIDDNVANVMIAQLLFLEAEDAESDIAFYINCPGGLVSSGLAVYDTIQYLKAEVQTICIGQASSMGAVLLAAGAKGKRFALPHSRIMIHQPTGGFSGQAEDIDIQAKEILRTTETLNNILASHTGQDVEKVATDTQRDYYFSSNEAKAYGIIDSVMHDRKLQAVPSN

SEQ ID NO: 170592 - protein, 124 aa, Unknown
  Bacterial polypetide isolated from the Sargasso Sea
FGYYDTIKYVKSDVVTICVGLAASMGAFLLAAGTKGKRVALPHSRIMIHQPLGGTSQRQASDIEIEAKEILRIKDMLNMSMADMTGQSFEKIEKDTDRDYFLSAEEAKNYGLIDRVITHPSEAN

SEQ ID NO: 170593 - protein, 147 aa, Unknown
  Bacterial polypetide isolated from the Sargasso Sea
MVVEQSSRGERAYDIYSRLLKERIVFVVGPINDTVASLVTAQLLFLESEDPKKEISLYINSPGGLVTAGLGIYDTMQYIKPEVNTLCIGQAASMGSFLLAAGAKGKRFSLPNSRIMVHQPSAGFQGQATDIEIHANEVLSLKKRLNE

SEQ ID NO: 170594 - protein, 202 aa, Unknown
  Bacterial polypetide isolated from the Sargasso Sea
MNKIPEHLNTLIPMVVEQSNRGERAYDIYSRLLKERIVFLTGPINDQVASLATAQLLFLESENPKKEIYLYINSPGGLVTAGLGVYDTMQYIKPDVSTLCIGQAASMGSFLLAAGTKGKRFSLPNSRIMVHQPSAGFQGQATDIEIHANEVLSLKKRLNEIYSKHTGKSVDEIKTALERDNFMTPQDAKNFGLIDKVVEKRQ

SEQ ID NO: 170595 - protein, 197 aa, Unknown
  Bacterial polypetide isolated from the Sargasso Sea
MNQLIPMVVEQTPRGERAYDIYSRLLKERVIFLTGPVEDYGANLVVAQMLFLEAENPDKDIHLYINSPGGSVTSGMSIYDTMQFIKPDVSTLCIGQAASMGAVLLAGGAEGKRQALPNSRVMIHQVLGGFQGQASDIEIHTKEILSIKSKLNEILAKHSGQKVDKVAKDSDRDNFMSPQEAVKYGLIDNVVDSRLKE

SEQ ID NO: 170596 - protein, 203 aa, Unknown
  Bacterial polypetide isolated from the Sargasso Sea
MKDPIDNITNNLIPMVVEQSSRGERSYDIYSRLLKERIIFLTGPIDDNIASLICAQILFLESENPKKEISFYINSPGGIVWSGLAIYDTMQYVSSKIMTICIGQAASAGSLLLTAGEKGMRFSLPNSRIMVHQPSGGYQGQVTDIEIQTNEIKKTKLKLNEIYSKHTGKKISEISTIMERDKYFSAEEAIKFGLIDKVVKGRN

SEQ ID NO: 170597 - protein, 192 aa, Unknown
  Bacterial polypetide isolated from the Sargasso Sea
MNKIPEHLNTLIPMVVEQSSRGERAYDIYSRLLKERIVFVVGPINDNVASLVTAQLLFLESEDPKKEISLYINSPGGLVTAGLGIYDTMQYIKPDVSTLCIGQAASMGSFLLAAGTKGKRFSLPNSRIMVHQPSAGFQGQATDIEIHANEVLSLKKRLNEIYSKHTNKSVEEIKSALERDNFMTPDNAKDFG

SEQ ID NO: 170598 - protein, 190 aa, Unknown
  Bacterial polypetide isolated from the Sargasso Sea
MVVEQTPRGERSFDIYSRLLKERVIFLSGPIDDYISNLVVAQLLFLESENPEKDISIYINSPGGSISAGLAIYDTMQFIKPSISTLCIGQAASMGALLLAGGDKKKRFALPNSRIMIHQPLGGFQGQASDFEIHAKEILHMKKIVNEILSKHTGQTLKKIEKDTDRDNFLDAKAAKTYGIVDSILEQRGS

SEQ ID NO: 170599 - protein, 217 aa, Unknown
  Bacterial polypetide isolated from the Sargasso Sea
MITRAELLDMLASNAPQGFEAQALGLVPIVVETSGRGERSYDIYSRLLKERLVFMVGEVNDQTANLVVAQLLFLESENPDKDISLYINSPGGSVSAGMAIYDTMQFIKPDVSTLCMGLAASMGAFLLASGAKGKRFALPNSRVMIHQPLGGARGQASDIEIQAREILYLKERLNQLLAQHTGQDVERIARDTDRDNFMSSEDAKAYGLIDQVLLKRP

SEQ ID NO: 170600 - protein, 189 aa, Unknown
  Bacterial polypetide isolated from the Sargasso Sea
MVIEQTPRGERSFDIYSRLLKERVIFLSGPIDDYISNLVVAQLLFLESENPEKDISIYINSPGGSISAGLAIYDTMQFVSPSISTMCIGQAASMGALLLAGGDNKKRFALPNSRIMIHQPLGGFQGQASDFEIHAKEILHMKKIVNEILAKHTCQTIKKIEKDTDRDNFLDANSAKAYGIVDKILEERK

SEQ ID NO: 170601 - protein, 195 aa, Unknown
  Bacterial polypetide isolated from the Sargasso Sea
MIPLVLEESGGSERVFDIYSRLLRERIIFLGEQVTSETANRIVAQLLFLEAEDPDKDIYMYINSPGGSVYDGLGIFDTMQHVKPDIHTVCVGLAASMGAFLLAAGTKGKRSSLRHSRIMIHQPLGGARGQASDIRIQADEILFLKERLNTELSERTGKDYDTIKEDTDRDFYMSPNEAVEYGLIDLVLDKKPIKV

SEQ ID NO: 170602 - protein, 202 aa, Unknown
  Bacterial polypetide isolated from the Sargasso Sea
MNIDEKTLNQLVPIVVEQTGRSERAFDIYSRLLKERIVFLGTPIDDSIASLIIAQLLFLEAEDPEKDIYLYINSPGGIITSGMGIYDTMQYIKPDISTICLGQAASMGAFLLAGGAKGKRSALPNSRIMIHQPMGGAQGQATDIKIQAEEILRMKKQLNSILAKNTGQTLKKIEADTERDNYLTSKEAKTYGIIDSILAKRK

SEQ ID NO: 170603 - protein, 207 aa, Unknown
  Bacterial polypetide isolated from the Sargasso Sea
MDSNKIFNQLVPMVVEQTGRGERAFDIYSRLLKERIIFLVGPVNDSMASLVSAQLLFLESENPEKEISLYINSPGGVVSDGLAIYDTMQFIQSPVSTLCFGQAASMGSFLLAAGEKDKRFALPNSRIMVHQPSAGFQGQATDIEIHAKEVLAQKSNLNKIYSKHTGQPVEAIEEALERDNFMSPTDAQKFGIIDSIQEKRVAPKIEK

SEQ ID NO: 170604 - protein, 202 aa, Unknown
  Bacterial polypetide isolated from the Sargasso Sea
MSKDQKIIDQLVPIVVEQTGRSERAFDIYSRLLKERIIFLGTPIEDTMSSLTIAQLLFLESEDPEKDIYLYINSPGGIITSGFGIYDTMQYIKPDVATICMGQAASMGAFLLAGGAKGKRSALPNSRIMIHQPMGGAEGQAADIRIQADEILRMKTQLNKILAKNTGQTVKKIEVDTDRDNFMTAAEAKRYGIIDTILTSRK

SEQ ID NO: 170605 - protein, 205 aa, Unknown
  Bacterial polypetide isolated from the Sargasso Sea
MKKEPSNYVVPTVIENTNRGERAFDIYSRLLKDRIIFLGTPIDDGVANLIMAQLLHLESEDPEKDIYIYINSPGGSITSLFAIYDTMKYIKPDVATVCMGLAASAGAVILAGGTPGKRYSLPHARIMLHQPAGGAEGTSKDIEIQAKLITDMRNQINGLLADFTDKDVEQIAVDTDRDFWMTAQEALEYGIVDEVLTQRELADKK

SEQ ID NO: 170606 - protein, 206 aa, Unknown
  Bacterial polypetide isolated from the Sargasso Sea
MENKFTPQSNLIPMVVEQSNRGERAYDIYSRLLKERIVFVTGPIEDYMASVITAQLLYLEAENPKKEISMYINSPGGVVSSGLAIYDTMQYIKPEVSTLCIGQAASMGSLLLAAGAKSKRFALPNSRIMVHQPSGGFQGQASDIERHAKEIISLRSRLNEIYVNHTGKDLKTIEAALDRDTFMTSDDAKKFGLIDKVVQKRDVEEK

SEQ ID NO: 170607 - protein, 207 aa, Unknown
  Bacterial polypetide isolated from the Sargasso Sea
MYKNYNDVTESPRNALIPMVVEQTAKGERSYDIYSRLLKERVIFLTGQVEDHMANLVVAQLLFLESENPDQDISIYINSPGGAVTAGMSIYDTMQFIKPDVSTVCMGQACSMGAFLLAGGAKGKRFCLPNARVMIHQPLGGFQGQASDIQIHAQEILKIKNTLNERLAFHTGQDMATIERDTDRDNFMSAEQAVAYGLVDGVLSRRS

SEQ ID NO: 170608 - protein, 195 aa, Unknown
  Bacterial polypetide isolated from the Sargasso Sea
MSNLIPMVVEQSSRGERAYDIYSRLLKERIIFIVGPINDAVASLVTAQMLFLESENPKKDIFMYINSPGGLVTAGLGIYDTMQYIKPEVSTICIGQAASMGSFLLSAGCKGKRFSLPNSRIMVHQPSAGFQGQATDIEIHANEVLSLKKRLNEIYSKHTGKTVDEIKAALERDNFMTPDAAKNFGLIDKVVEKRD

SEQ ID NO: 170609 - protein, 203 aa, Unknown
  Bacterial polypetide isolated from the Sargasso Sea
MTTKIPEQLNTLIPMVVEQSSRGERAYDIYSRLLKERIVFVVGPIHDAVASLVTAQLLFLESEDPKKEISLYINSPGGLVTAGLGIYDTMQYIKPEISTLCIGQAASMGSFLLAAGAKGKRFSLPNSRIMVHQPSAGFQGQATDIEIHANEVLSLKKRLNEIYSKHTGKSVDEIKSALERDNFMTPDNAKSFGLIDKVVEKRE

SEQ ID NO: 170610 - protein, 202 aa, Unknown
  Bacterial polypetide isolated from the Sargasso Sea
MNKIPEHLNTLIPMVVEQSNRGERAYDIYSRLLKERIVFVVGPINDTVASLVTAQLLFLESEDPKKEISLYINSPGGLVTAGLGIYDTMQYIKPDVSTLCIGQAASMGSFLLAAGTKGKRFSLPNSRIMVHQPSAGFQGQATDIEIHANEVLSLKKRLNEIYSHHTNKSVDEIKSALERDNFMTPENAKDFGLIDKVVVNRQ

SEQ ID NO: 170611 - protein, 203 aa, Unknown
  Bacterial polypetide isolated from the Sargasso Sea
MPIGTPSVPYRLPGSQYERWVDIYTRLGVERILFLGQEVNDGIANSLVAQMLYLDSDDNSKPIYLYINSPGGSVTAGLAIYDTIKYVKSDVVTICVGLAASMGAFLLAAGTKGKRVALPHSRIMIHQPLGGTSQRQASDIEIEAKEILRIKDMLNMSMADMTGQSFEKIEKDTDRDYFLSAEEAKNYGLIDRVITHPSEANHS

SEQ ID NO: 170612 - protein, 191 aa, Unknown
  Bacterial polypetide isolated from the Sargasso Sea
MSIKIPEHLNTLIPMVVEQSNRGERAYDIYSRLLKERIVFLVGPINDNVASLVTAQLLFLESEDPKKEISLYINSPGGLVTAGLGIYDTMQYIKPDVSTLCIGQAASMGSFLLAAGTKGKRFSLPNSRIMVHQPSAGYQGQATDIEIHANEVLSLKKRLNEIYSKHTKKSVDEIKTALERDNFMTPDNAKD

SEQ ID NO: 170613 - protein, 198 aa, Unknown
  Bacterial polypetide isolated from the Sargasso Sea
MVLEQTNRGERVFDIYSRLLKERIVFINGAIDDNISSLTVAQLLFLESVSPTQPIWMYINSPGGSVTAGLGIYDTMQYISPPVHTLCVGQASSMGSLLLAAGEPGERRSLPNARVMLHQPSGGASGQASDIAIHAQEILNVREKLIKIYMQHTKQEFNQIGVTLERDTFMDPEDAKSFGIIDEVIAKRPDTTVDETKK

SEQ ID NO: 170614 - protein, 195 aa, Unknown
  Bacterial polypetide isolated from the Sargasso Sea
MSNLVPMVVEQSSKGERAYDIYSRLLKERIIFLTGQINDNVASLITAQLLFLEAEDPKKEIYLYINSPGGLVTAGLGIYDTMQYVKPDISTLCIGQAASMGSFLLAAGTKNKRFSLPNSRIMVHQPSAGFQGQATDIEIHAKEVLSLKKRLNEIYSKHTGKSEDEIKAALERDNFMTAETAKSFGLIDEVVEKRS

SEQ ID NO: 170615 - protein, 202 aa, Unknown
  Bacterial polypetide isolated from the Sargasso Sea
MNIDERVLNQLVPMVVEQTGRSERAFDIFSRLLKERIVFLGTPINDSMASLIIAQLLFLEAEDSEKDINLYINSPGGVITSGMGIYDTMQYIKPDVATICLGQAASMGAFLLAGGAKGKRSALPNSRIMIHQPMGGAEGQATDIEIQAEEILRMKKQLNSILAKNSGQTLKKIEADTDRDNYLTSKEAKAYGLIDTILVKRK

SEQ ID NO: 170616 - protein, 203 aa, Unknown; identical to SEQ ID NO: 170263
  Bacterial polypetide isolated from the Sargasso Sea

SEQ ID NO: 170617 - protein, 169 aa, Unknown
  Bacterial polypetide isolated from the Sargasso Sea
MPIGTPSVPYRLPGSQYERWVDIYTRLGVERILFLGQEVNDGIANSLVAQMLYLDSDDNSKPIYLYINSPGGSVTAGLAIYDTIKYVKSDVVTICVGLAASMGAFLLAAGTKGKRVALPHSRIMIHQPLGGTSQRQASDIEIEAKEILRIKDMLNMSMADMTGQSFEKN

SEQ ID NO: 170618 - protein, 200 aa, Unknown
  Bacterial polypetide isolated from the Sargasso Sea
METFNQLVPMVVEQTPRGERAFDIYSRLLKERVIFITGTVEDQMANLIVAQLLFLEAENPDKDINLYINSPGGSVTSGLSIYDTMTYIKPDISTLCIGQACSMGAVLLAGGSKGKRFALPNSRIMIHQPMGGFQGQATDIEIQAKEMLKIRTKLNEILSNHCGQSLDKISEDTERDNFMSGEEACEYGLIDKVLSERIEK

SEQ ID NO: 170619 - protein, 64 aa, Unknown
  Bacterial polypetide isolated from the Sargasso Sea
MTKIDEHMNTLIPMVVEQTSRGERAFDIYSRLLKERIVFVVGPINDHVASLVTAQLLFLESEDP

SEQ ID NO: 170620 - protein, 94 aa, Unknown
  Bacterial polypetide isolated from the Sargasso Sea
MTSKLSEQLNTLVPMVVEQSSRGERAYDIYSRLLKERIVFVVGPINDTVASLVTAQLLFLESEDPKKEISLYINSPGGLVTAGLGIYDTMQYIK

SEQ ID NO: 170621 - protein, 94 aa, Unknown
  Bacterial polypetide isolated from the Sargasso Sea
SFLLAAGTKGKRFSFPNSRIMVHQPSAGFQGQATDIEIHANEVLSLKKRLNEIYSKHTNKTSDEIKSALERDNFMSPETAKEFGLIDKVVVKRE

SEQ ID NO: 170622 - protein, 153 aa, Unknown
  Bacterial polypetide isolated from the Sargasso Sea
MTIKIPEQLNTLIPMVVEQSSRGERAYDIYSRLLKERIVFVVGPINDAVASLVTAQLLFLESEDPKKEISLYINSPGGLVTAGLGIYDTMQYIKPEISTLCIGQAASMGSFLLAAGAKGKRFSLPNSRIMVHQPSAGFQGQATDIEIHANEVL

SEQ ID NO: 170623 - protein, 195 aa, Unknown; identical to SEQ ID NO: 170601
  Bacterial polypetide isolated from the Sargasso Sea

SEQ ID NO: 170624 - protein, 90 aa, Unknown
  Bacterial polypetide isolated from the Sargasso Sea
MDKINSGLVPMVVEQTPRGERAFDIYSRLLKERIIFLSGPIDDYISNLVVAQLLFLESENPEKDISIYINSPGGVISSGLAIYDTMQFVA

SEQ ID NO: 170625 - protein, 106 aa, Unknown
  Bacterial polypetide isolated from the Sargasso Sea
CVGQAASMGALLLGGGASGKRFALPHSRIMVHQPSAGFQGQATDIDIHAREVLELKNRLNKIMAKHTGQKITKIEKDLERDNFMSSIEAQKYGLIDTVLNNRKELK

SEQ ID NO: 170626 - protein, 89 aa, Unknown
  Bacterial polypetide isolated from the Sargasso Sea
MGEKGKRYSLPNSRIMVHQPSAGFQGQATDIQIHAKEILSLKERLNKIYSKHTGKSLAEISDALERDNFMTAEEAKKFGLIDSVVEKRK

SEQ ID NO: 170627 - protein, 141 aa, Unknown
  Bacterial polypetide isolated from the Sargasso Sea
MVVEQTGRGERAFDIYSRLLKERIIFLVGPVNDHMASLVSAQLLFLESENPEKEISLYINSPGGVVSDGLAIYDTMQFIQSPVSTLCFGQAASMGSFLLAAGEKGKRYALPNSRIMVHQPSAGFQGQATDIEIHAKEVLAM

SEQ ID NO: 170628 - protein, 203 aa, Unknown
  Bacterial polypetide isolated from the Sargasso Sea
MTIKIPEYMNNLVPMVVEQSSRGERAFDIYSRLLKERIVFVVGPINDNIASLVTAQLLFLESEDPKKDISLYINSPGGLVTAGLGIYDTMQYIKPEVSTLCIGQAASMGSFLLSAGKKGKRFSLPNSRIMVHQPSAGYQGQATDIEIHANEVMSLKKRLNEIYSKHTGKAVEEIKSALERDNFMTPENAKEFGLIDKVVDKRE

SEQ ID NO: 170629 - protein, 120 aa, Unknown
  Bacterial polypetide isolated from the Sargasso Sea
MNKIPEHLNTLIPMVVEQSSRGERAYDIYSRLLKERVVFVVGPINDTVASLVTAQLLFLESEDPKKEISLYINSPGGLVTAGLGIYDTMQYIKPRCFYFMYRTSSKYGFIFISSQVQKGK

SEQ ID NO: 170630 - protein, 149 aa, Unknown
  Bacterial polypetide isolated from the Sargasso Sea
MKDPIDNLTNNLIPMVVEQSSRGERAYDIYSRLLKERIIFLTGPIDDNIASLICAQILFLESENPKKEISFYINSPGGIVWSGLAIYDTMQYVSSKIMTICVGQAASAGSLLLTAGDKDMRFSLPNSRIMVHQPSGGYQGQVTDIEIQT

SEQ ID NO: 170631 - protein, 203 aa, Unknown
  Bacterial polypetide isolated from the Sargasso Sea
MIRKIEEQLNNLVPMVVEQTTKGERAYDIYSRLLKERIVFLVGGVNDTAASLVTAQLLFLESENPKKEIFFYINSPGGLVTSGLGIYDTMQYIKSPVSTLCIGQASSMGSFLLSAGEKGKRFSLPNSRIMVHQPSAGFQGQATDIQIHAKEILALKERLNKIYSKHTGKSLKEISQALERDNFMTPEEAKDFGLIDSVVEKRK

SEQ ID NO: 170632 - protein, 156 aa, Unknown
  Bacterial polypetide isolated from the Sargasso Sea
AIASLVTAQLLFLESEDPKKEISLYINSPGGLVTAGLGIYDTMQYIKPEISTLCIGQAASMGSFLLAAGAKGKRFSLPNSRIMVHQPSAGFQGQATDIEIHANEVLSLKKRLNEIYSKHTGKSVDEIKSALERDNFMTPDNAKSFGLLDKVVEKRE

SEQ ID NO: 170633 - protein, 207 aa, Unknown
  Bacterial polypetide isolated from the Sargasso Sea
MTKKEDLAMNLIPMVVEQSNRGERAYDIFSRLLKERIIFITGPIDDSVATIVTAQLLFLEAENPKKEISLYINSPGGVVTAGMAIYDTMQFIRPPVSTLCIGQAASMGSLLLAAGEKGMRYCLPHSRVMVHQPSGGFSGQASDIERHAEDIIKIKKRLNDLYVNHTGQSYNTIEKTLDRDYFMDSKEAKKFGIVDAVIASREESDEK

SEQ ID NO: 170634 - protein, 71 aa, Unknown
  Bacterial polypetide isolated from the Sargasso Sea
MEEHNSTLIPMVVEQTARGERAFDIYSRLLKERVIFLTGPINDQVSNLVVAQIIIFRIGKSQERHQHLYNS

SEQ ID NO: 170635 - protein, 206 aa, Unknown
  Bacterial polypetide isolated from the Sargasso Sea
MENKFTPQSNLIPMVVEQSNRGERAYDIYSRLLKERIVFVTGPIEDYMASVITAQLLYLEAENPKKEISMYINSPGGVVSSGLAIYDTMQYIKPEVSTLCIGQAASMGSLLLAAGEKNKRFALPNSRIMVHQPSGGFQGQASDIERHAKEIISLRSRLNEIYVNHTGKDLKTIESALDRDTFMTSDDAKKFGLIDKVVQKRDIEEK

SEQ ID NO: 170636 - protein, 151 aa, Unknown
  Bacterial polypetide isolated from the Sargasso Sea
VTAQLLFLESEDPKKEISLYINSPGGLVTAGLGIYDTMQYIKPEISTLCIGQAASMGSFLLAAGSKGKRFSLPNSRIMVHQPSAGFQGQATDIEIHANEVLSLKNRLNEIYSKHTGKTVDEIKSALERDNFMTPDNAKSFGLIDKVVEKRE

SEQ ID NO: 170637 - protein, 189 aa, Unknown
  Bacterial polypetide isolated from the Sargasso Sea
MVVEQSSKGERAYDIYSRLLKERIIFLTGQINDNVASLVTAQLLFLEAEDPKKEIYLYINSPGGLVTAGLGIYDTMQYVKPDISTLCIGQAASMGSFLLSAGKKGKRFSLPNSRIMVHQPSAGFQGQATDIEIHANEVLSLKKRLNEIYSKHTGKSVDEIKSALERDNFMTADAAKSFGLIDEVVEKRS

SEQ ID NO: 170638 - protein, 188 aa, Unknown
  Bacterial polypetide isolated from the Sargasso Sea
VVEQSSRGERAYDIYSRLLKERIVFVVGPINDAVASLVTAQLLFLESEDPKKEISLYINSPGGLVTAGLGIYDTMQYIKPEISTLCIGQAASMGSFLLAAGSKGKRFSLPNSRIMVHQPSAGFQGQATDIEIHANEVLSLKKRLNEIYSKHTGKSVDEIKSSLERDNFMTPDNAKSFGLIDKVVEKRE

SEQ ID NO: 170639 - protein, 217 aa, Unknown
  Bacterial polypetide isolated from the Sargasso Sea
MDLGKEFKDYATKHHGINSMYYDKIISSMTPYIIEERQLNVAQMDVFSRLMMDRIMFLGTAINDNVANVIQAQLLFLQSTDSSSDINMYINSPGGSVYAGLGIYDTMQFISPNVATICTGIAASMSAILLCAGEKGKRSVLTHSRVMIHQPLGGVHGQASDIEITAREILKLKEELYQIIAKHSGQDYKKVSQDGDRDYWMKANEAKSYGMVDEVLT

SEQ ID NO: 170640 - protein, 203 aa, Unknown
  Bacterial polypetide isolated from the Sargasso Sea
MSIKIPEQLNTLIPMVVEQSSRGERAYDIYSRLLKERIVFVVGPINDAVASLVTAQLLFLESEDPKKEISLYINSPGGLVTAGLGIYDTMQYIKPEISTLCIGQAASMGSFLLAAGAKGKRFSLPNSRIMVHQPSAGFQGQATDIEIHANEVLSLKKRLNEIYSKHTGKSVDEIKSALERDNFMTPDNAKSFGLIDKVVEKRE

SEQ ID NO: 170641 - protein, 203 aa, Unknown
  Bacterial polypetide isolated from the Sargasso Sea
MKDPLENFYNNLVPMVVEQSSRGERAYDIYSRLLKERIIFLTGPIDDNIASLICAQILFLESENPKKEISFYINSPGGIVWSGLAIYDTMQYVSSKIMTICVGQAASAGSLLLTAGAKDMRFSLPNSRIMVHQPSGGFQGQVTDIEIQTNEIKKTKQKLNEIYSKHTGKKITDISSIMERDKFFSPEEAIKFGLIDKIVESRK

SEQ ID NO: 170642 - protein, 201 aa, Unknown
  Bacterial polypetide isolated from the Sargasso Sea
MGKNAMAQLVPMVVEQSGRTERAYDIYSRLLKERIIFLGTPIDDTVASLVIAQLLFLEAENSDKDIFLYINSPGGYVSAGLGIFDTMNYIKPNVATICMGAASSMAAVLLAGGSPGKRSALPNSRVMIHQPLGGAEGQASDIKIQADEILRLRQRLNSILSKSTKQTIKKIEKDTDRNFFMSADEAKAYGIIDTILTARKK

SEQ ID NO: 170643 - protein, 199 aa, Unknown
  Bacterial polypetide isolated from the Sargasso Sea
MKDIKSALIPMVIEQTPRGERSFDIYSRLLKERVIFLSGPIDDYISNLVVAQLLFLESENPEKDISIYINSPGGSISAGLAIYDTMQFVTPSISTMCIGQAASMGALLLAGGDKNKRFALPNSRIMIHQPLGGFQGQASDFEIHAKEILHMKKIVNEILAKHTGQTIKKIEKDTDRDNFLDANAAKAYGIVDKILEERK

SEQ ID NO: 170644 - protein, 71 aa, Unknown
  Bacterial polypetide isolated from the Sargasso Sea
MVVEQSSRGERAFDIYSRLLNERIIFIGGPIDDNLANIVVAQLLFLESVDKKKDISIYINSPGGSVTAGLQ

SEQ ID NO: 170645 - protein, 92 aa, Unknown
  Bacterial polypetide isolated from the Sargasso Sea
LLAAGTKGKRFSLPNSRIMVHQPSAGFQGQATDIEIHANEVLSLKKRLNEIYSKHTGKSVDEIKTALERDNFMTADTAKTFGLIDEVVEKRS

SEQ ID NO: 170646 - protein, 158 aa, Unknown
  Bacterial polypetide isolated from the Sargasso Sea
MVVEQSSRGERAYDIYSRLLKERIVFVVGPINDSVASLVTAQLLFLESEDPKKEISLYVNSPGGLVTAGLGIYDTMQYIKPEISTLCIGQAASMGSFLLAAGTKGKRYSLPNSRIMVHQPSAGFQGQATDIEIHANEVLSLKKRLNEIYAKHTGKSVD

SEQ ID NO: 170647 - protein, 200 aa, Unknown
  Bacterial polypetide isolated from the Sargasso Sea
MNDIQQALIPMVIEQTPRGERSFDIYSRLLKERVIFLSGPIDDYISNLVVAQLLFLESENPEKDISIYINSPGGSISAGLAIYDTMQFVKPSISTMCIGQAASMGALLLAGGDEKKRFALPNSRIMIHQPLGGFQGQASDFEIHAKEILHMKKIVNEILAKHTGQTIKKIEKDTDRDNFLDAKAAKTYGIIDNILEVRNS

SEQ ID NO: 170648 - protein, 196 aa, Unknown; identical to SEQ ID NO: 170568
  Bacterial polypetide isolated from the Sargasso Sea

SEQ ID NO: 170649 - protein, 216 aa, Unknown
  Bacterial polypetide isolated from the Sargasso Sea
MPAQRFPLPSSNAPIDPSAASAYRDYQRQRQMTLGDLLLENRIILLQGEIYDGNANELVMKLLYLQSENRRKDIHFYINSPGGSVTATMAIYDTMQILSCPVATYCVGLAASGGAVLLAGGAAGKRFSLPHAKVMIHQPYGQVGGQVSDIEIQADEIIKTRAVLNEILASHTGQPIDRIAQDTDRDRYLTATESKEYGLVDDILTKPPGEEDKDVD

SEQ ID NO: 170650 - protein, 203 aa, Unknown
  Bacterial polypetide isolated from the Sargasso Sea
MIRRIEEQLNNLIPMVVEQTNKGERAYDIYSRLLKERIVFLVGGVNDNVASLVTAQLLFLESENPKKEIFFYINSPGGLVTSGLGIYDTMQYIKSPVSTLCIGQASSMGSFLLAAGEKGKRFSLPNSRIMVHQPSAGFQGQATDIQIHAKEILSLKERLNKIYSKHTGKTVKEIASALERDKFMTAEEAKDFGLIDKVVEKRN

SEQ ID NO: 170651 - protein, 205 aa, Unknown
  Bacterial polypetide isolated from the Sargasso Sea
MEKEPSNYVVPTVIENTNRGERAFDIYSRLLKDRIIFLGTPIDDGVANLIMAQLLHLESEDPEKDIYVYINSPGGSITSLFAIYDTMKYIKPDVATVCMGLAASAGAVILAGGTPGKRYSLPHARIMLHQPAGGAEGTSKDIEIQAKLITDMRHQINGLLAEFTKKDIDQISVDTDRDFWMTAQEALEYGIVDEVLTQRELVDKK

SEQ ID NO: 170652 - protein, 177 aa, Unknown
  Bacterial polypetide isolated from the Sargasso Sea
RERIIFLGTGVDDAVADALVAQMLFLEAEDPEKDIQIYINSPGGSVTAGLAIYDTMQQVAPDVVTICYGLAASMGAFLLSGGCKGKRLALPNARIMIHQPLGGAQGQAVDIEIQAKEILFLKETLNGLMADHTGQPLDKIAEDTDRDYFLSPAEAVQYGLIDRVVDSSGGEGIVTEG

SEQ ID NO: 170653 - protein, 31 aa, Unknown
  Bacterial polypetide isolated from the Sargasso Sea
VIERDTDRDNFMSATQAVEYGLVDAVMTKRG

SEQ ID NO: 170654 - protein, 204 aa, Unknown
  Bacterial polypetide isolated from the Sargasso Sea
VNSMYYDEIISSLTPYIIEERQLNVAQMDVFSRLMMDRIMFLGTAINDNVANVIQAQLLFLQSTDSKRDIQMYINSPGGGVYAGLGIYDTMQFITPDVATICTGIAASMSAVLLSAGKSGKRSALPHSRVMIHQPLGGAQGQASDIEITAREILKLKDELYQIIAKHSGQPIKRVTEDSDRDYWMKAEEAKKYGMVDEVLKSSK

SEQ ID NO: 170655 - protein, 195 aa, Unknown; identical to SEQ ID NO: 170601
  Bacterial polypetide isolated from the Sargasso Sea

SEQ ID NO: 170656 - protein, 193 aa, Unknown
  Bacterial polypetide isolated from the Sargasso Sea
MVVEQTPRGERAFDIFSRLLKDNVIFAVGPIEDHMANLIIAQMLFLESENPNKDIYLYINSPGGSITSGLSIYDTMQFIKPDVSTICVGQAASMGAILLAGGAQSKRFSLPNSRMMIHQPISGFQGQASDIDIHAKEVLKMKSLVNSILSKHTGKTEKQIAKDTDRDNFMDAKSALDYGLIDQILEERDEALK

SEQ ID NO: 170657 - protein, 125 aa, Unknown
  Bacterial polypetide isolated from the Sargasso Sea
MTTKIPEHLSTLIPMVVEQSSRGERAYDIYSRLLKERIVFVVGPINDAVASLVTAQLLFLESEDPKKEISLYINSPGGLVTAGLGIYDTMQYIKPEVSTLCIGQAASMGSFLLAAGSKGKRLSLP

SEQ ID NO: 170658 - protein, 84 aa, Unknown
  Bacterial polypetide isolated from the Sargasso Sea
KRFSLPNSRIMVHQPSAGFQGQATDIEIHAKEVLSLKKRLNEIYSKHTGKSVDEIKSALERDNFMTADAAKSFGLIDEVVEKRS

SEQ ID NO: 170659 - protein, 55 aa, Unknown
  Bacterial polypetide isolated from the Sargasso Sea
MNDPAEFYMNTLVPMVVEQTSRGERAYDIFSRLLKERIIFINGAVHDGMSSLVVA

SEQ ID NO: 170660 - protein, 208 aa, Unknown
  Bacterial polypetide isolated from the Sargasso Sea
MNDPAEFYMNTLVPMVVEQTSRGERAYDIFSRLLKERIIFLNGAVHDGMSSLVVAQLLHLEAENPSKDISMYINSPGGVVTSGLSIYDTMQYIKPKVSTLVIGQAASMGSLLLTAGEPGMRYSLPNSRIMVHQPSGGYQGQATDIMIHAEETLKLKKRLNEIYVKHTGQSLKTVEAALERDNFMAAEDAKKWGLIDEIVTQRTSSDEE

SEQ ID NO: 170661 - protein, 217 aa, Unknown
  Bacterial polypetide isolated from the Sargasso Sea
MTFRAQMLDTLTSQSSRDLEAQALGLVPIVVETSGRGERSYDIYSRLLKERIVFLVGEVNDQTANLVVAQMLFLESENPDKDISFYINSPGGSVSAGMAIYDTMQFIKPDVSTLCMGLAASMGAFLLAAGAKGKRFALPNSRVMIHQPLGGARGQASDIEIQAREILYLKERLNHLLAHHTGQPVERIARDTDRDNFMSGDDAQAYGLVDQVAHKRP

SEQ ID NO: 170662 - protein, 197 aa, Unknown
  Bacterial polypetide isolated from the Sargasso Sea
MIPIVIEESGRGERAFDIYSRLLRERIIFLGEAVTSDSANRIVAQMLFLEAEDPEKDIYLYINSPGGSVYDGLGIFDTMQHIKPDVHTVCVGLAASMGAFLLCAGTKGKRSSLQHSRIMIHQPLGGAQGQASDIRIQADEILFLKDRLNKELSDRTGQPLDRIQQDTDRDFFMSPTEAVNYGLIDSVIDKRPVQAVA

SEQ ID NO: 170663 - protein, 111 aa, Unknown
  Bacterial polypetide isolated from the Sargasso Sea
FIKPDVSTMCIGQAASMGAFLLSGGTQGKRYILPNARTMIHQPSGGAQGQATDIEIQAKEILFLRERLNGLLADHTGQTMEVIERDTERDRFMSAEQSVEYGLVDEVITSR

SEQ ID NO: 170664 - protein, 203 aa, Unknown
  Bacterial polypetide isolated from the Sargasso Sea
MKDPIESLNNNLVPMVVEQSSRGERAYDIFSRLLKERIIFLTGPIDDNISSLVCAQLLFLESENPKKEISFYINSPGGVVWSGLAMYDTMQYISSKIMTICIGQAASAASLLLASGEKDMRFSLPNSRIMVHQPSGGFQGQVTDIEIQTKEIIKTKKRLNEIYTKHTGKDLKEVEQIMERDKFFSPDEAVKFGLIDKIIKNRK

SEQ ID NO: 170665 - protein, 121 aa, Unknown
  Bacterial polypetide isolated from the Sargasso Sea
MTNNVSEHMNNLVPMVVEQSNKGERAYDIYSRLLKERIIFLTGQINDNVASLITAQLLFLEAEDPKKEIYFYINSPGGLVTAGLGIYDTMQYVKPDISTMCIGQAASMGSFLLSAGTKGKR

SEQ ID NO: 170666 - protein, 106 aa, Unknown
  Bacterial polypetide isolated from the Sargasso Sea
FTLCIGQASSMGSFLLAAGEKGKRFSLPNSRIMVHQPSSGFQGQATDIQIHAKEILDLKNRLNKIYAKHTGKSVEEISSALERDNFMTADEAKKFGLIDSVVEKRK

SEQ ID NO: 170667 - protein, 211 aa, Unknown
  Bacterial polypetide isolated from the Sargasso Sea
MANHNETFNPKNLNLIPMVVEQTSRGERAYDIYSRLLKERVIFVVGPVEDYMANVIIAQILFLESEDPNKEISIYINSPGGSVTAGLAIYDTMQFCKPSINTLCIGQAASMGAVLLAGGDKNKRFALPNSRIMIHQPLGGFQGQASDISIHAQEILKVREKLNEILSKHTGNDVNKISEDTERDNFMTAEEAKQYGIIDNILTNRVDMKKD

SEQ ID NO: 170668 - protein, 199 aa, Unknown
  Bacterial polypetide isolated from the Sargasso Sea
IFEHMSNLIPMVVEQSSRGERAYDIFSRLLKERIIFLVGPINDNVASLVTAQMLFLESENPKKEIYFYINSPGGLVTSGLGIYDTMQYIKPDISTLCIGQAASMGSFLLGAGTKGKRFSLPNSRIMVHQPSAGFQGQATDIEIHANEILSLKKRLNEIYSKHTGKGVDEIKIALERDNFMTPIDAKKFGLIDEVVEKRS

SEQ ID NO: 170669 - protein, 203 aa, Unknown
  Bacterial polypetide isolated from the Sargasso Sea
MKDPIDNITNNLIPMVVEQSSRGERSYDIYSRLLKERIIFLTGPIDDNIASLICAQILFLESENPKKEISFYINSPGGIVWSGLAIYDTMQYVSSKIMTICIGQAASAGSLLLTAGEKGMRFSLPNSRIMVHQPSGGMQGQVTDIEIQTNEIKKTKLKLNEIYSKHTGKKLSEISSIMERDKYFSAEEAIKFGLIDKIVKDRK

SEQ ID NO: 170670 - protein, 203 aa, Unknown; identical to SEQ ID NO: 170437
  Bacterial polypetide isolated from the Sargasso Sea

SEQ ID NO: 170671 - protein, 195 aa, Unknown
  Bacterial polypetide isolated from the Sargasso Sea
MSNLVPMVVEQSSKGERAYDIYSRLLKERIIFLTGQINDNVASLVTAQLLFLEAEDPKKEIYLYVNSPGGLVTAGLGIYDTMQYVKPDISTLCIGQAASMGSFLLAAGTKGKRFSLPNSRIMVHQPSAGFQGQATDIEIHANEVLSLKKRLNEIYSKHTGKSVDEVKSALERDNFMTADVAKSFGLIDEVVEKRS

SEQ ID NO: 170672 - protein, 195 aa, Unknown; identical to SEQ ID NO: 170671
  Bacterial polypetide isolated from the Sargasso Sea

SEQ ID NO: 170673 - protein, 203 aa, Unknown
  Bacterial polypetide isolated from the Sargasso Sea
MIRRIEEQLNNLVPMVVEQTTKGERAFDIYSRLLKERIVFLVGGVNDTVASLVTAQLLFLESENPKKEIFFYINSPGGLVTSGLGIYDTMQYIKSPVSTLCIGQASSMGSFLLSAGEKGKRFSLPNSRIMVHQPSAGFQGQATDIQIHAKEILALKERLNKIYSKHTGKSVKEISQALERDNFMTPEEAKDFGLIDSVVEKRK

SEQ ID NO: 170674 - protein, 119 aa, Unknown
  Bacterial polypetide isolated from the Sargasso Sea
IYDTMQFVKPSISTMCIGQAASMGALLLAGGDEKKRFALPNSRIMIHQPLGGFQGQASDFEIHAKEILHMKKIVNEILAKHTGQTIKKIEKDTDRDNFLDAKAAKTYGIIDNILEVRNS

SEQ ID NO: 170675 - protein, 172 aa, Unknown
  Bacterial polypetide isolated from the Sargasso Sea
MSNLVPMVVEQSSKGERAYDIYSRLLKERIIFLTGQINDNVASLVTAQLLFLEAEDPKKEIYLYINSPGGLVTAGLGIYDTMQYVKPDISTLCIGQAASMGSFLLAAGTKGKRFSLPNSRIMVHQPSAGFQGQATDIEIHANEVLSLKKRLNEIYSKHTGKSVEEIKSALER

SEQ ID NO: 170676 - protein, 136 aa, Unknown
  Bacterial polypetide isolated from the Sargasso Sea
MTTKIPEHLSTLIPMVVEQSSRGERAYDIYSRLLKERIVFVVGPINDAVASLVTAQLLFLESEDPKKEISLYINSPGGLVTAGLGIYDTMQYIKPEVSTLCIGQAASMGSFLLAAGSKGKRLSLPNSRIMVHQPSA

SEQ ID NO: 170677 - protein, 195 aa, Unknown
  Bacterial polypetide isolated from the Sargasso Sea
MNNLIPMVVEQTSRGERAFDIYSRLLKERIVFVVGPINDNVASLVTAQLLFLESEDPKKDIFLYINSPGGLVTSGLGIYDTMQYIKPDVSTLCIGQAASMGSFLLAAGTKGKRFSLPNSRIMVHQPSAGFQGQATDIEIHANEVLSLKKRLNEIYSKHTGKSVDEIKSALERDNFMTPDAAEEFGLVDKVVSNRD

SEQ ID NO: 170678 - protein, 199 aa, Unknown
  Bacterial polypetide isolated from the Sargasso Sea
MTDIHSALIPMVIEQTPRGERSFDIYSRLLKERVIFLSGPIDDYISNLVVAQLLFLESENPDKDISIYINSPGGSISAGLAIYDTMQFIKPSISTLCIGQAASMGALLLAGGNKKKRFALPNSRIMIHQPLGGFQGQASDFEIHAKEILHMKKIVNEILSKHTGQSLKKIEKDTDRDNFLDANAAMTYGIVDSILEQRD

SEQ ID NO: 170679 - protein, 202 aa, Unknown
  Bacterial polypetide isolated from the Sargasso Sea
MHNASDIQSALVPMVIEQTAKGERSFDIYSRLLKERIIFLVGQVEEHMANLIVAQLLFLESESPDKDIFLYINSPGGSVTAGMAIYDTMQFIKPNVSTVCIGQAASMGAFLLAGGEKGKRFCLPNSRVMIHQPLGGFQGQASDIAIHAQEILGIKHKLNLMLSEHTGQPLEVIERDTDRDNFMSATQAVEYGLVDAVMTKRG

SEQ ID NO: 170680 - protein, 203 aa, Unknown
  Bacterial polypetide isolated from the Sargasso Sea
MNEEINSLIPMVVEQTPRGERAFDIFSRLLKDNVIFAVGPIEDHMANLIIAQMLFLESENPNKDIYLYINSPGGSITSGLSIYDTMQFIKPDVSTICVGQAASMGAILLAGGAQSKRFSLPNSRMMIHQPISGFQGQASDIDIHAKEVLKMKSLVNSILSKHTGKTEKQIAKDTDRDNFMDAKSALDYGLIDQILEERSEALK

SEQ ID NO: 170681 - protein, 195 aa, Unknown
  Bacterial polypetide isolated from the Sargasso Sea
MTNLVPMVVEQSSKGERAYDIYSRLLKERIIFLTGQINDNVASLITAQLLFLEAEDPKKDIYLYINSPGGLVTAGLGIYDTMQYVKPDISTLCIGQAASMGSFLLAAGTKGKRFSLPNSRIMVHQPSAGFQGQATDIEIHANEVLSLKKRLNEIYSKHTGKSVDEIKTALERDNFMTAESAKVFGLVDEVVEKRS

SEQ ID NO: 170682 - protein, 195 aa, Unknown
  Bacterial polypetide isolated from the Sargasso Sea
MNNLIPMVVEQSSRGERAYDIYSRLLKERIVFLVGPINDTVASLVTAQLLFLESEDPKKEISLYINSPGGLVTAGLGIYDTMQYIKPDVTTLCIGQAASMGSFLLSAGAKGKRFSLPNSRIMVHQPSAGFQGQATDIEIHANEVLSLKKRLNEIYSKHTAKTVDEIKVALERDNFMTPENAKDFGLIDKVVDKRQ

SEQ ID NO: 170683 - protein, 96 aa, Unknown
  Bacterial polypetide isolated from the Sargasso Sea
MGSFLLAAGEKGKRFSLPNSRIMVHQPSAGFQGQATDIEIHAKEILLLKERLNKIYSKHTGKSIKDISQALERDKFMTAEEAKDFGLIDSVVEKRK

SEQ ID NO: 170684 - protein, 199 aa, Unknown
  Bacterial polypetide isolated from the Sargasso Sea
SKDSINQLIPMVVEQTGRFERAYDIYSRLLKERIVFLGTPIDDNVASLVIAQLLFLEADDSEKDIYLYINSPGGIITSGMGIYDTMNYIKPDVATICMGQAASMAAFLLSGGTPGKRSALPNSRIMIHQPLGGAEGQASDIKILSDEILRLRKNLNSILSKNTKQTLKKIEKDTDRNFFMSAHEAKGYGIIDTILDKRK

SEQ ID NO: 170685 - protein, 174 aa, Unknown
  Bacterial polypetide isolated from the Sargasso Sea
LKERIIFVVGPIDDAVASVVCAQLLFLEADNPTKDISMYINSPGGIVTSGLAMYDTMEYIRPEISTVCIGQAASMGSLLLTAGAKGKRFSLPNSKIMIHQPSGGFQGQATDIEIHAKEILSTRSRLNEIYVKHTGQKLDKIEKAMERDNFMTPEEALSFGLIDEVVEKRPADQE

SEQ ID NO: 170686 - protein, 203 aa, Unknown
  Bacterial polypetide isolated from the Sargasso Sea
MTSKIPEHLNTLIPMVVEQSSRGERAYDIYSRLLKERIVFVVGPINDAIASLVTAQLLFLESEDPKKEISLYINSPGGLVTAGLGIYDTMQYVKPEVSTLCIGQAASMGSFLLAAGSKGKRFSLPNSRIMVHQPSAGFQGQATDIEIHANEVLSLKKRLNEIYSKHTGKSVVDIKEALERDNFMTPDNAKEFGLIDKVVDKRE

SEQ ID NO: 170687 - protein, 203 aa, Unknown
  Bacterial polypetide isolated from the Sargasso Sea
MKNPIDNLTNNLIPMVVEQSSRGERAYDIYSRLLKERIIFLTGPIDDNIASLICAQILFLESENPKKEISFYINSPGGIVWSGLAIYDTMQYVSSKIMTICVGQAASAGSLLLTAGEKDMRFSLPNSRIMTHQPSGGYQGQVTDIEIQTNEIKKTKQKLNEIYAKHTGKKISEVSSIMERDKYFSAEEAVEFGLIDKIIKSRK

SEQ ID NO: 170688 - protein, 148 aa, Unknown
  Bacterial polypetide isolated from the Sargasso Sea
MFLESENPEKDVSIYINSPGGSISAGLAIYDTMQFITPSISTLCIGQAASMGALLLAGGDKGKRFALPNSRIMIHQPLGGFQGQASDFEIHAKEILHMKKVVNEILSNHTGQSLKKVEKDTDRDNFLDAESAKTYGIVDKILNERGTK

SEQ ID NO: 170689 - protein, 160 aa, Unknown
  Bacterial polypetide isolated from the Sargasso Sea
QINDNVASLVTAQLLFLEAEDPKKEIYLYINSPGGLVTAGLGIYDTMQYVKPDISTLCIGQAASMGSFLLAAGTTGKRFSLPNSRIMVHQPSAGFQGQATDIEIHANEVLSLKKRLNEIYSKHTGKSVEEIKSALERDNFMTADVAQSFGLIDEVVEKRS

SEQ ID NO: 170690 - protein, 90 aa, Unknown
  Bacterial polypetide isolated from the Sargasso Sea
HQPSGGAQGQATDIEIQAKEILDLRKRLNDIYVAHTGQDFQVIEEAVERDRYMSPEEAKKFGLIDEVVDKRPELEEVSSDKSSNEDNNAD

SEQ ID NO: 170691 - protein, 121 aa, Unknown
  Bacterial polypetide isolated from the Sargasso Sea
MTIKLFEHMSTLVPMVVEQSSKGERAYDIYSRLLKERIIFLTGQINDNVASLVTAQLLFLEAEDPKKEIYLYINSPGGLVTAGLGIYDTMQYVKPDISTLCIGQAASMGSFLLAAGTKEKR

SEQ ID NO: 170692 - protein, 218 aa, Unknown
  Bacterial polypetide isolated from the Sargasso Sea
MDYSKEFKKYATKHHGVSSTYYDKIISSMTPYIIEERQLNVAQMDVFSRLMMDRIMFLGTAITDSVANVIQAQLLFLQSTDSSRDIQMYINSPGGGVYAGLGIYDTMQYIKPDVATICTGCAASMAAVLLCAGKKGKRSALKHSRVMIHQPLGGVSGQAADIEITAREILKLKDELYKIISKHTGQTFKKVNADSDRDYWMKADEAHKYGMVDEVLNK

SEQ ID NO: 170693 - protein, 184 aa, Unknown
  Bacterial polypetide isolated from the Sargasso Sea
MTDFNSALIPMVIEQTPRGERSFDIYSRLLKERVIFLSGPIDDYISNLVVAQLLFLESENPEKDISIYINSPGGSISAGLAIYDTMQFVKPSISTLCIGQAASMGALLLAGGDSKKRFALPNSRIMIHQPLGGFQGQASDFEIHAKEILHMKKIVNEILSKHTGQSIKKIEKGTDRDNFLDAKA

SEQ ID NO: 170694 - protein, 195 aa, Unknown
  Bacterial polypetide isolated from the Sargasso Sea
MSNLVPMVVEQSSKGERAYDIYSRLLKERIIFLTGQINDNIASLVTAQLLFLEAEDPKKEIYLYINSPGGLVTAGLGIYDTMQYVKPDISTLCIGQAASMGSFLLAAGTKGKRFSLPNSRIMVHQPSAGFQGQATDIEIHANEVLSLKKRLNEIYSKHTGKTVDEIKSALERDNFMTADVAKSFGLIDEVVEKRS

SEQ ID NO: 170695 - protein, 197 aa, Unknown
  Bacterial polypetide isolated from the Sargasso Sea
SVPYRLPGSQYERWVDIYTRLGVERILFLGQEVNDGIANSLVAQMLYLDSDDNSKPIYLYINSPGGSVTAGLAIYDTIKYVKSDVVTICVGLAASMGAFLLAAGTKGKRVALPHSRIMIHQPLGGTSQRQASDIEIEAKEILRIKDMLNMSMADMTGQSFEKIEKDTDRDYFLSAEEAKNYGLIDRVITHPSEANQS

SEQ ID NO: 170696 - protein, 125 aa, Unknown
  Bacterial polypetide isolated from the Sargasso Sea
SYHLGLAIYDTMQFISPSISTLCIGQAASMGALLLAGGEKEKRFALPNSRIMIHQPLGGFQGQASDIEIHAQEILLMKKKVNEILSRHTGKNLKTVEKDTDRDNFLNAEEAKKYGIIDDILEERS

SEQ ID NO: 170697 - protein, 209 aa, Unknown
  Bacterial polypetide isolated from the Sargasso Sea
MKNIEEISNLIPMVVEQTPRGERAFDIFSRLLKDNVIFAVGPIEDHMANLIIAQMLFLESENPSKDIYLYINSPGGSITSGLSIYDTMQFIKPDVSTICVGQAASMGAILLAGGAESKRFSLPNSRMMIHQPISGFQGQASDIDIHAKEVLKMKSLVNSILSKHTGKTEKQIAKDTDRDNFMDAESALKYGLIDEILNERTEALNQDGR

SEQ ID NO: 170698 - protein, 203 aa, Unknown
  Bacterial polypetide isolated from the Sargasso Sea
MTTKIPEHLSNLIPMVVEQSSRGERAYDIYSRLLKERIVFVVGPINDSVASVVTAQLLFLESEDPKKEISLYINSPGGLVTAGLGIYDTMQYIKPDVSTLCIGQAASMGSFLLAAGTKGKRLSLPNSRIMVHQPSAGFQGQATDIEIHAKEVLSLKERLNEIYSKHTNKSVDEIKQALERDNFMTPENAKDFGLIDKVVDKRD

SEQ ID NO: 170699 - protein, 175 aa, Unknown
  Bacterial polypetide isolated from the Sargasso Sea
MIPIVIEESGRGERAFDIYSRLLRERIIFLGEAVTSDSANRIVAQMLFLEAEDPEKDIYLYINSPGGSVYDGLGIFDTMQHIKPDVHTVCVGLAASMGAFLLSAGTKGKRSSLQHSRIMIHQPLGGARGQASDIRIHADEILYLKDRLNQELSDRTGQPLDRIQQDTDRDFFMAP

SEQ ID NO: 170700 - protein, 167 aa, Unknown
  Bacterial polypetide isolated from the Sargasso Sea
MTDFNSALIPMVVEQTPRGERSFDIYSRLLKERVIFLSGPIDDYISNLVVAQLLFLESENPEKDISIYINSPGGSISAGLAIYDTMQFVKPSISTLCIGQAASMGALLLAGGDSKKRFALPNSRIMIHQPLGGFQGQASDFEIHAKEILHMKKIVNEILSKHTGQSI

SEQ ID NO: 170701 - protein, 218 aa, Unknown
  Bacterial polypetide isolated from the Sargasso Sea
MDYSKEFKKYATKHHGVSSTYYDKIVSSMTPYIIEERQLNVAQMDVFSRLMMDRIMFLGTAINDSVANVIQAQLLFLQSTDSSRDIQMYINSPGGGVYAGLGIYDTMQYIKPDVATICTGCAASMAAVLLCAGKKGKRSALKHSRVMIHQPLGGVSGQAADIEITAREILKLKDELYKIISKHSGQTFKKVNADSDRDYWMKADEAHKYGMVDEVLNK

SEQ ID NO: 170702 - protein, 106 aa, Unknown
  Bacterial polypetide isolated from the Sargasso Sea
STLCIGQAASMGSFLLAAGTKGKRFSLPNSRIMVHQPSAGFQGQATDIEIHANEVLSLKKRLNEIYSKHTGKSVEDIKSALERDNFMTPDAAKDFGLLDKVVDKRE

SEQ ID NO: 170703 - protein, 222 aa, Unknown
  Bacterial polypetide isolated from the Sargasso Sea
MIPRKKNKVSNAPNNYLVPTVVEQTNRGERGYDLYSKLLKENIIFIGTPIDDGIANLVCAQLLHLESENPDKDVSLYINSPGGNINSVFAIYDTMSYIKPEIATICYGQAVAAAAVLLAAGTRGKRLALPHSRILIHQPYAGAQGQVSDLEIASREVQRLKNQLEEVLAAHTGQSIEKIQTDTDRDNIMDAYEAKDYGIIDEVIESRGEVDNSGPITAVENG

SEQ ID NO: 170704 - protein, 206 aa, Unknown
  Bacterial polypetide isolated from the Sargasso Sea
MVNKFTPQSNLIPMVVEQSNRGERAYDIYSRLLKERIVFVTGPIEDYMASVITAQLLYLEAENPKKEISMYINSPGGVVSSGLAIYDTMQYIKPEVSTLCIGQAASMGSLLLAAGEKNKRFALPNSRIMVHQPSGGFQGQASDIERHAKEIISLRSRLNEIYVNHTGKDLKTIEAALDRDTFMTSDDAKKFGLIDKVVQKRDTEEK

SEQ ID NO: 170705 - protein, 122 aa, Unknown
  Bacterial polypetide isolated from the Sargasso Sea
MNLVPIVIEQSGKGERSFDIFSRLLRERIIFLTGPINDETASLICAQLLFLESENPEEPINLYINSPGGLVTAGLAMYDTMQYIKCPVHTVCIGQAASAGSLILAAGKEGNRYALPHAKIMI

SEQ ID NO: 170706 - protein, 208 aa, Unknown
  Bacterial polypetide isolated from the Sargasso Sea
MKNIEEMSSFVPIVVEQSSRGERAFDIFSRLLKDNVIFAVGPIDDYIANLIVAQMLFLESENPKKDIYLYINSPGGSITSGLSIYDTMQFIKPDVSTICVGQAASMGALLLAGGAESKRFSLPNSRMMIHQPISGFQGQASDIDIHAKEVLKMKSLVNSILSKHTGKTEKQIAKDTDRDNFMDAEEALKYGLIDQILEERVEALESNG

SEQ ID NO: 170707 - protein, 97 aa, Unknown
  Bacterial polypetide isolated from the Sargasso Sea
MSRNFEEKMNSLIPMVVEQTNKGERAYDIYSRLLKERIVFLVGPVNDAVASLVTAQLLFLESENPNKEISFYINSPGGLVTAGLGIYDTMQYINSPS

SEQ ID NO: 170708 - protein, 216 aa, Unknown
  Bacterial polypetide isolated from the Sargasso Sea
MLINPFESYERSIRDQEPEQNIVPMVIETSNRGERAFDIYSLLLKERIVFLGTPIADPVANLIVAQLLYLEREDPDRPISMYINSPGGVISSGLAIYDTMQMIKPEVSTVCLGMAASMATVLLCGGAKGKRYALPSSTIHMHQALGGAQGQATDIEIAAKEILRLQDKLRTILSTQTGQTYEKIAQDSDRDYYLTSDQAVEYGLIDEILGSDSNKS

SEQ ID NO: 170709 - protein, 203 aa, Unknown
  Bacterial polypetide isolated from the Sargasso Sea
MPIGTPSVPYRLPGSQYERWVDIYTRLGVERILFLGQEVNDGIANSLVAQMLYLDSDDNSKPIYLYINSPGGSVTAGLAIYDTIKYVKSDVVTICVGLAASMGAFLLAAGTKGKRVALPHSRIMIHQPLGGTSQRQASDIEIEAKEILRIKDMLNMSMADMTGKSFEKIEKDTDRDYFLSAEEAKNYGLIDRVITHPSEANHS

SEQ ID NO: 170710 - protein, 180 aa, Unknown
  Bacterial polypetide isolated from the Sargasso Sea
AFDIYSRLLRERIIFLGTDVNDQVADALVAQMLFLEADDPEKDIQLYVNSPGGSVTAGLAIYDTMQQVSPDVITICYGLAASMGAFLLSGGTKGKRLALPNSRIMIHQPLGGAQGQAVEIEIQAKEILYLKETLNSLLAEHTGQNIEKISEDTDRDHFLSPQEAVEYGLIDKVVSNLNSI

SEQ ID NO: 170711 - protein, 156 aa, Unknown
  Bacterial polypetide isolated from the Sargasso Sea
DYVANVIQAQLLFLESTDASKDIQIYINSPGGSVYAGLGIYDTMQYIKPDVATICTGMAASMGAVLLCAGAEGKRSALPHSRVMIHQPSGGAQGVATDMEINLKEMLKLKDELYQIISKHSGQSFDKVHKDSERDYWMIADEAKEYGMIDEVLRRS

SEQ ID NO: 170712 - protein, 143 aa, Unknown
  Bacterial polypetide isolated from the Sargasso Sea
ESEDPKKEISLYINSPGGLVTAGLGIYDTMQYIKPEVNTLCIGQAASMGSFLLAAGAKGKRFSLPNSRIMVHQPSAGFQGQATDIEIHANEVLSLKKRLNEIYSKHTEKSVDEIKAALERDNFMTPENAKDFGLIDKVVDKRE

SEQ ID NO: 170713 - protein, 227 aa, Unknown
  Bacterial polypetide isolated from the Sargasso Sea
MVKKYTCKMYTIKRVKQERKNRMEKEPSNYVVPTVIENTNRGERAFDIYSRLLKDRIIFLGTPIDDGVANLIMAQLLHLESEDPEKDIYVYINSPGGSITSLFAIYDTMKYIKPDVATVCMGLAASAGAVILAGGTPGKRYSLPHARIMLHQPAGGAEGTSKDIEIQAKLITDMRHQINGLLAEFTKKDIDQISVDTDRDFWMTAQEALEYGIVDEVLTQRELVDKK

SEQ ID NO: 170714 - protein, 227 aa, Unknown; identical to SEQ ID NO: 170713
  Bacterial polypetide isolated from the Sargasso Sea

SEQ ID NO: 170715 - protein, 203 aa, Unknown
  Bacterial polypetide isolated from the Sargasso Sea
MTTNLSEHMSNLVPMVVEQSSKGERAYDIYSRLLKERIIFLTGQINDNVASLVTAQLLFLEAEDPKKEIYLYVNSPGGLVTAGLGIYDTMQYVKPDISTLCIGQAASMGSFLLAAGTKGKRFSLPNSRIMVHQPSAGFQGQATDIEIHANEVLSLKKRLNEIYSKHTGKSVDEVKSALERDNFMTADVAKSFGLIDEVVEKRS

SEQ ID NO: 170716 - protein, 227 aa, Unknown
  Bacterial polypetide isolated from the Sargasso Sea
MVKKYIFKMCTIKIQIQERKNNMKKEPSNYVVPTVIENTNRGERAFDIYSRLLKDRIIFLGTPIDDGVANLIMAQLLHLESEDPEKDIYVYINSPGGSITSLFAIYDTMKYIKPDVATVCMGLAASAGAVILAGGTPGKRYSLPHARIMLHQPAGGAEGTSKDIEIQAKLITDMRNQINGLLADFTKKDIEQIAVDTDRDFWMTAQEALEYGIVDEVLTQRELADKK

SEQ ID NO: 170717 - protein, 170 aa, Unknown
  Bacterial polypetide isolated from the Sargasso Sea
SEQQLIDCSGPQGNHGCEGGIMEHGFQYIIDNGGICSEEDYPYQGVDNQCQDCETIVDIKKYGDIYPKNEKVLKRAVAQQPVSVAIQANISSFRFYKEGIYSDYNCGDQLDHGVLVVGYGTDEVQNMDYWLVKNSWGKLWGEEGYIRILRNIDDKNGLCGIAMQPTIPLL

SEQ ID NO: 170718 - protein, 293 aa, Unknown
  Bacterial polypetide isolated from the Sargasso Sea
AWEDFREVYTGYKDSAKYLRRTKNVNEALLDADAQAAAPASVDWTTKNAVTPVKNQGQCGSCWAFSTTGSTEGAYAIASGKLVSLSEQMLVSCDHNGDQGCNGGLMDNAFGWIQQNGGICKESDYPYQGTTGTCTTGCSPAVTVSGHHDVPQKDEKALAVAAAIGPVSVAIEADKQAFQFYKSGVFDNAGCGTNLDHGVLVVGYGSMDSKDYWKVKNSWGATWGLNGYILMARGKNMCGISQSASYPTGATAATPGPSPGPSPGPSPGPAPGPSPGPSPGPGPAPGSTHYGDP

SEQ ID NO: 170719 - protein, 184 aa, Unknown
  Bacterial polypetide isolated from the Sargasso Sea
MKKNLAGRNAKAWRARAEASVERLRRRYDAERGEMTTENRGETSVEVHNYMDAQYYGEIEIGNPRQKFQVVFDTGSSNLWVPSSKCGFLQIPCDLHAKFHAEASETYVEDGEPFAIQYGSGSLSGFLSQDEVKVGDLVVAGQYFAEATKEPGMAFLFAKFDGILGLGFDNISVDKVTPVFYNMM

SEQ ID NO: 170720 - protein, 170 aa, Unknown
  Bacterial polypetide isolated from the Sargasso Sea
MSKPLCSTGLRWLWLVVVVLIIDLGSKYLILQNFALGDTVPLFPSLNLHYARNYGAAFSFLADSGGWQRWFFAGIAIGICVILAVMMYRSRATQKLNNIAYALIIGGALGNLFDRLWHGFVVDMIDFYVGDWHFATFNLADSAICIGAAMIVLEGFPAEKAGVIQCRMAA

SEQ ID NO: 170721 - protein, 280 aa, Unknown
  Bacterial polypetide isolated from the Sargasso Sea
NGYTQRLPQLFQALLSGYFSYTSTDEQLEQAKSWYAQMMDSAEKGKAYDQAIMPVQMLSQVPYFSRDERRQLLPSITLKEVMTYRDTLKTGARPEFLVIGNMSEAQTTSMARDIQKQLGANGSQWCRNKDVVVDKKQSVIFEKAGSSTDSALAAVFVPTGYDEYASSAYSAMLGQIVQPWFYNQLRTEEQLGYAVFAFPMSVGRQWGMGFLLQSSDKQPSYLWERYKAFFPTAEAKLRAMKPEEFAQIQQAIIAQMLQAPQTLGAEASQLSKDFDRGNMR

SEQ ID NO: 170722 - protein, 277 aa, Unknown
  Bacterial polypetide isolated from the Sargasso Sea
VQALQKFHEKYYSANLMKAVIYSNKPLPELARIAADTFGRVPNRNIEKPEITVPVVTDAQKGIIIHYVPAMPRKVLRVEFRIDNNSAQFRSKTDELVTYLIGNRSPGTLSDWLQKQGLVEGIRADSDPVVNGNSGVLAISATLTDKGLANRNEVVAAIFSYLNLLREKGVDKRYFDELAHVLDLDFRYPSITRDMDYVEWLADTMIRVPVEHTLDAVNIADQYDAKAVEQRLAMMTPQNARIWYISAKEPHNKTAYFVDAPYQVDKISDKTFADWQQ

SEQ ID NO: 170723 - protein, 202 aa, Unknown
  Bacterial polypetide isolated from the Sargasso Sea
MTRSEYDRGVTTFSPEGRLFQVEYAIEAIKLGSTAIAILTKEGIVLAVERRTQSPLMVPSSLDKIMEIDSHVACAVSGLTADAQSMVEHGRVQAQNHYFTYNESMPVRSLTQSLCALSANFGTDDEDSMSRPFGVALLVAGHDVDNGYQLYHTDPSGTWTAYKAKAIGSGSEGAQTTLQEEYKDDMTLKEAENLALSTLKAV

SEQ ID NO: 170724 - protein, 232 aa, Unknown
  Bacterial polypetide isolated from the Sargasso Sea
MAYDRAITVFSPDGRLFQVEYAREAVKRGTTTVGVKFKDGVVLIVDKRLSSKLIEPESIEKIFQIDGHIGCATSGLVADARALVDRARVECQVNSFNYSEDLAVESLVKKLCDFKQSYTQYGGVRPFGTAMLIGGIDNSGPHLYETDPSGALMAYKAGGIGAGRNEVMEVFEKDYKENMSQNQAISLGLKGLSAANENNLKADVIEIAVVNSSKGFHTLDSKSVGEAVKKIK

SEQ ID NO: 170725 - protein, 249 aa, Unknown
  Bacterial polypetide isolated from the Sargasso Sea
QLTQPILILATADEETTMAGAQQICKHPNLKPARCIIGEPTDMTPVFTHKGHMSTAIRVVGRSGHSSDPERGLNAIEVMHKVTSKLLILKEQLKNKYSLSHFEIPYPTLNLGNIHGGDNANRICGCCEMHIDMRPLPGLSVQELQALLLDATKDINEQYPNSVSVIDLHDPIPAFTGRTDSALVQLAEKVAGQKAIAVNYCTEAPFIQQLGCETIVMGPGSINQAHQPDEFLAMEKIKPSQHIISNIIK

SEQ ID NO: 170726 - protein, 285 aa, Unknown
  Bacterial polypetide isolated from the Sargasso Sea
PVIELLAAWLGDLGFACETQQIAPGKFNLLASYGSGPGGLVLAGHSDTVPFDAALWQTDPLKLTEVGDRWVGLGSCDMKGFFALAIEAVRPLLDQQFQQPLLILATCDEESSMAGARALAEAGRPLGRAAVIGEPTGLKPIRLHKGVMMERIDILGQSGHSSDPALGRSALEAMQDVMGELRGLRAQWQREFNNPQFGVPQPTLNLGCIHGGDNPNRICGQCALEFDLRPLPGMDPEQLREAIRGKLQPLALKHQVRIDYGPLFPAVPPFEQSADAELVRLAERL

SEQ ID NO: 170727 - protein, 264 aa, Unknown
  Bacterial polypetide isolated from the Sargasso Sea
MKGFFALVLEALKEMPLDQFKRPLTIFASADEETTMSGAKAFADSKTVAPDYAIIGEPTSLKPVYMHKGHLAQGIRVIGRSGHSSDPARGLNAIEVMHKVISQLMKLKQHLSENYREDAFTVPYPTMNFGHIHGGDAANRICGCCDLHLDIRPLPGMELAELELMVLNYLSDISKEYPGSISVSTLYPGAESFAGKADNPWTKLVAELSGNEAEVVNYSTEAPYINKLGCQTLVLGPGSINQAHQPDEFIGLEYLTPTVELIKK

SEQ ID NO: 170728 - protein, 256 aa, Unknown
  Bacterial polypetide isolated from the Sargasso Sea
MNIDTIMTRGVSTMKNNLPPFIEIYRALIATPSISATEEALDQSNAGLITLLAGWFKDLGFNVEVQPVPDTRNKFNMLASIGQGAGGLLLAGHTDTVPFDDGRWTRDPFTLTEHDNKLYGLGTADMKGFFAFILDALRDVDVTKLKKPLYILATADEETSMAGARYFSETTALRPDCAIIGEPTSLQPVRAHKGHISNAIRILGQSGHSSDPARGVNAIELMHDAIGHIMHLRDDLKARYHHDAFTVPYPTLNLGH

SEQ ID NO: 170729 - protein, 377 aa, Unknown
  Bacterial polypetide isolated from the Sargasso Sea
DFFSLYKNIIAIPSISSTDPRWDQSNEAVIRLLADWFGQLGFQCEVTALPDLPGKFNLVATIGQGEGGLLLAGHTDTVPFDEGAWRKDPFKVTEEGNRLYGLGTIDMKGFFAFIVEALKEIDLKTLNKPLRILATADEETTMAGARAIAAAAELKPDYAVIGEPTGLVPVVAHKGHMSEAIRITGKSGHSSDPANGVNALEIMHQAMGQVLKLQHSLKEKYADHRFAVPQPTLNLGYIQGGDSPNRICGCCELHIDMRPTPQVGPDELMGMLKEALSPIEIHQPGCLHLQHLHEPIPAYACADDSELVREAERASGRAAESVNYCTEAPFIQQLGCETIVLGPGHIAQAHQPDEYLDLSFVKPTTRVLQHLIRRFCL

SEQ ID NO: 170730 - protein, 250 aa, Unknown
  Bacterial polypetide isolated from the Sargasso Sea
LYCAGDAHTPFSVQSISKVFSLVQAIEHSGEDIWQRLGHEPSGQPFNSLVQLEFERGKPRNPFINAGALVICDINQSRFAAPVLSMRDFVRRLAGNPEVVVDRHVAESEYQHRARNAAAAYLMQSFGNFHNDVEAVLRSYFSYCALRMSCVDLARAFCFLANDGFCKHSGQQILSARQSKQVNAIMATSGLYDEAGNFAYRVGLPGKSGVGGGIVAVVPGRFSVCVWSPELNAAGNSLAGIKALELLSER

SEQ ID NO: 170731 - protein, 293 aa, Unknown
  Bacterial polypetide isolated from the Sargasso Sea
MLELLEAIFDEVKPMLGEGKVADYIPALASVDPHQFGIAICDIEGHITSIGDADVPFSIQSISKVFNLVLAMNHYGEGMWERVGCEPSGLPFNSLVQLEYEDGIPRNPFINAGALVVSDMTQSRFASPHIGMRDFVRRLSCNDNIFANKVVADSEFEHRARNAAMAYLMKAYNNFENEVEDVLHSYFNNCALEMSCVDLARATNFLANRGYSKCADEQVLSPDQNRQVNALLATSGMYDEAGSFAFKVGLPGKSGVGGGVIAVVPGRFSICVFSPALNAVGNSHLGVAALTSL

SEQ ID NO: 170732 - protein, 56 aa, Unknown
  Bacterial polypetide isolated from the Sargasso Sea
EPFSIQSISKVFSLTLALTLYEETEIWSRVGKEPSGHSFNSLVQVELERGKPRNPF

SEQ ID NO: 170733 - protein, 182 aa, Unknown
  Bacterial polypetide isolated from the Sargasso Sea
LQGRLSAPRQRMLEVVRALSGVSDIAYDAAVARSEFEHSARNAAIAWLMKSFGNFHHDVTTVLQNYFHYCALKMSCVELARTFVFLANQGHAFHLAEPVVTPMQARQINALMATSGMYQNAGEFAWRVGLPAKSGVGGGIVAIVPHEMAIAVWSPELDPAGNSLAGIAVLEQLTQQLGRSVY

SEQ ID NO: 170734 - protein, 306 aa, Unknown
  Bacterial polypetide isolated from the Sargasso Sea
MVLSSELLASILDEVRPLLGQGKVADYIPALAQVPADRLGIAVCTVEGELFTAGDASEPFSIQSISKALSLTLALTLYQEEEIWARVGKEPSGQPFNSLVQLEFEQGIPRNPFINAGALVVSDLLETRLTAPRQRTLELVRRLSGNPAIMADQVVARSEYQHSARNAAIAYLMKAYGNFENEVDKVLQSYFNACAIRMSCVDLARAFIYLANRGVPLGATTPLLPARTTKQVNALLATCGLYDEAGDFAYRVGMPGKSGVGGGIIALIPGELCVCVWSPELNKAGNSLAGTAALELLAERLGRSIF

SEQ ID NO: 170735 - protein, 302 aa, Unknown
  Bacterial polypetide isolated from the Sargasso Sea
MLALLQDIYDEVEPMLGMGKVADYIPALATVNPRQFGISICDTNGQITSIGDASVPFSIQSISKVFNLVLAINHYGETMWERVGCEPSGLPFNSLVQLEYENGIPRNPFINAGALVVSDMVQSRFASPYIAMRDFVRRLSCNGDIVVNKVVAESEYEHRSRNAAMAYLMKAYGNFENEVEDVLRNYFHNCALEMSCEDLARSTSFLANAGFSTCANEKVLTPYQTKQVNALLATSGMYDEAGSFAFKVGLPGKSGVGGGIVAVVPGRFSICVFSPALNSVGNSQLGVAALTSLSERINWSIY

SEQ ID NO: 170736 - protein, 304 aa, Unknown
  Bacterial polypetide isolated from the Sargasso Sea
MNYQTILERIHADLAPWIGQGRVADYIPELAKVPADKFGMAVVTLDGNVCTVGDAYERFSIQSISKLFACTLAFQLLGDELWERVGREPSGNAFNSLVQLESERGKPRNPFINAGALVVTDVLCRRFVKAETALVEFVRRLIGANDIDYDSRVAQSELQHAERNRAMAHFMASFGNMQMPPDIVIDAYCRQCAITMNCVELARAALFLANGGVAPVTGERIVDSSSAKRLSALMLTCGTYDAAGDFVYRVGLPAKSGVGGGIVAVLPGEMAVCVWAPGLDANGNSLAGTLALEWLTTYSGRSIF

SEQ ID NO: 170737 - protein, 304 aa, Unknown
  Bacterial polypetide isolated from the Sargasso Sea
MPEQALLEEVVDKVRPLLGQGKVANYIPALANVDAGKLGIAVTTIDGETIGAGDYLEPFSIQSISKVFSLTLALTLYEETEIWSRVGKEPSGHSFNSLVQVELERGKPRNPFINAGALVIADLLQSRLGAPKHRMLELVRALSQNDKVCFDKQVADSEYQHSARNAAIAYLMKSFGNFQGDVDTVLRTYFHYCALKMNCADLSRAMLYLANRGKTLDGTELISQVQTRQLNALLATSGLYDGAGEFAYRVGMPGKSGVGGGIIAVIPGELSVCVWSPELDNQGNSLAGTAMLEHLSQRLGRSIF

SEQ ID NO: 170738 - protein, 304 aa, Unknown; identical to SEQ ID NO: 170737
  Bacterial polypetide isolated from the Sargasso Sea

SEQ ID NO: 170739 - protein, 205 aa, Unknown
  Bacterial polypetide isolated from the Sargasso Sea
LEAEHGKPRNPFINAGALVVTDVLCRRFVQAETALVEFMRRLTGETSIDYDSRVALSELQHAHRNRAMAHFMASFGNMEMPPEVVVDAYCRQCAISMSCVELAKAALFLTNHGVVPATGERILDTSSAKRLSALMLTCGTYDAAGDFVYRVGLPAKSGVGGGIVAVLPGEMAVCVWSPGLDSNGNSLAGVLALEWLTTYTGRSIF

SEQ ID NO: 170740 - protein, 544 aa, Unknown
  Bacterial polypetide isolated from the Sargasso Sea
TTDGQVYERGDSNKDFSIQSMCKPFNYCFAMEQLGLEGVHKHVGQEPSGRQFDDLTLLARTVTGNYTGDFAKDNLEGRFARVPFNPMVNAGAIMTAGLINPNDSHSQRLRHIRQQFGRLIGWTSKNNNVSKLPRFNKNMARQENFKGYNNIAMGYLLMATGSLPHTKSDLHKDIHPDEDEFDFYIEPAVTEALKLYFSICSLEMTATDVAMAAATLANSGVCPISQDRVLSQKTVRNCLPVLQTSGMYNASGVFFQEVGLPAKSGVGGGVLLVVPQLMGICIFSPRLDEQGNSVRGLEMAKKLTSKYLVHTFDGTMTDTSREDPKLPIARWLANSCGEAIWAASNGNIRTLESLVSQQRDLQQGDYDIRTPLHLASAEGQLEVVKFLLNQGVKPIPDRWGGYPISDARNNKHQKIVDLFNELKINYTEPFHLVENPKGKTDKMANFEDELMVIELLFAAAENNVDNIRHLVAQGVPVHAGDYDLRTALHLAAAEGSLDAVEYLVSHGHPLNVRDRWGATPLDEAKREKRKKAVNFLQNYKANIN

SEQ ID NO: 170741 - protein, 100 aa, Unknown
  Bacterial polypetide isolated from the Sargasso Sea
MKLSPREKDKLLISMAAEVARKRLNRGVKLNYPEAIALISDFVVEGARDGRSVADLMQDGAKVLSSEMVMKGIPEMIREVQVEATFPDGVKLVTVHEPIR

SEQ ID NO: 170742 - protein, 147 aa, Unknown
  Bacterial polypetide isolated from the Sargasso Sea
MVKISRAAYADMYGPTTGDKVRLADTELFIEVENDLTTYGEEVKFGGGKVIRDGMGQSQISRKKGAADTVITNALIVDVNGIYKADVGLKDGKIFEIGKAGNPDTQSKVNIIIGPGTEIIAGEGKILTAGGFDSHIHYICPQQIDDA

SEQ ID NO: 170743 - protein, 50 aa, Unknown
  Bacterial polypetide isolated from the Sargasso Sea
KSVAELMEAGAHVIKKKDCMEGIPDMVKEVQVEATFPDGTKLVTVHKPIR

SEQ ID NO: 170744 - protein, 300 aa, Unknown
  Bacterial polypetide isolated from the Sargasso Sea
IQSADGFSMNLAFAGKGNSSLPEGLEEQILAGASALKLHEDWGTTPGAIDNCLNIADKNDVQVMIHTDTLNESGFVENTIKAINKRTIHAFHTEGAGGGHAPDIIKVCGEEYVIPSSTNPTRPYTVNTIEEHLDMLMVCHHLDKSIPEDVAFAESRIRRETIAAEDILHDMGAFSIIASDSQAMGRVGEVIIRTWQTAHKMKVQRGSLPEEKGDNDNFRVKRYLAKYTINPAIAHGISKHIGSIEKNKRADLVLWDPAFFGAKPEIILIGGSIACAQMGDPNASIPLPQQCIQNRCFLHF

SEQ ID NO: 170745 - protein, 289 aa, Unknown
  Bacterial polypetide isolated from the Sargasso Sea
GHAPDIIKVCGEEYVIPSSTNPTRPYTVNTIEEHLDMLMVCHHLDKSIPEDVAFAESRIRRETIAAEDILHDMGAFSIIASDSQAMGRVGEVIIRTWQTAHKMKVQRGSLPEEKGDNDNFRVKRYLAKYTINPAIAHGISKHIGSVEKNKRADLVLWDPAFFGAKPEMILIGGSIACAQMGDPNASIPTPQPVYTRPMFSSFGTSLEKSSVIFTSKLALEKNSLKDASIRKDLLPVENTRAISKKDMILNNKCPKIEVNPETYEVKADGEIITCEPAKELPLAQRYFMF

SEQ ID NO: 170746 - protein, 316 aa, Unknown
  Bacterial polypetide isolated from the Sargasso Sea
GACGLKLHEDWGTTPSTINSCLNVADNFDVQVCIHTDTLNEAGFVEDTINAIAGRTIHTFHTEGAGGGHAPDIIKICGEKNILPSSTNPTRPYTRNTLEEHLDMLMVCHHLDSKIPEDIAFAESRIRRETIAAEDILHDMGAFSIIASDSQAMGRVGEVIIRTFQTAHKMKLQRGPYHRILIRNDNYRVKRYISKVTINPAIAHGINKYVGSIEKGKIADLVLWKPSFFAVKPELVIKGGSIVWSQMGDANASIPTPGPVHGRPMFANFGNSLTKSSFTFLSKNSIDQNIPKKLGLQKECIAVENTRNINKSHLKL

SEQ ID NO: 170747 - protein, 102 aa, Unknown
  Bacterial polypetide isolated from the Sargasso Sea
MKPGEIITKGNNELKLNEDRVSIVMKVSNKGDRPIQVGSHYHFAETNEFLEFDRDTSRGMRLDIPSGTAVRFEPGQKKDVELIEISGGRKIFGFNKKIMGKL

SEQ ID NO: 170748 - protein, 72 aa, Unknown
  Bacterial polypetide isolated from the Sargasso Sea
KLNYPEAIALITDFVIEGARDGKMVSELMESGANVVKKENCMDGVADMISEVQVEATFPDGTKLVTVHKPIR

SEQ ID NO: 170749 - protein, 216 aa, Unknown
  Bacterial polypetide isolated from the Sargasso Sea
MAKISRAAYADMYGPTTGDKVRLADTELIIEVENDLTTYGEEVKFGGGKVIRDGMGQSQISRKKGAADTVITNALIVDVNGIYKADVGLKDGKIFEIGKAGNPDTQSEVNIIIGPGTEIIAGEGKILTAGGFDSHIHYICPQQIDDALHSGITTMLGGGTGPAHGTLATTCTPGPWHIQRMIQSADGFSMNLAFAGKGNSSLPEGLEEQILAGASA

SEQ ID NO: 170750 - protein, 100 aa, Unknown
  Bacterial polypetide isolated from the Sargasso Sea
DKNDVQVMIHTDTLNESGFVENTIKAINKRTIHAFHTEGAGGGHAPDIIKVCGEKYVIPSSTNPTRPYTVNTIEEHLDMLMVCHHLNKSIPEDVAFAESR

SEQ ID NO: 170751 - protein, 282 aa, Unknown
  Bacterial polypetide isolated from the Sargasso Sea
KVCGEKYVIPSSTNPTRPYTINTVEEHLDMLMVCHHLDKSIPEDVAFAESRIRRETIAAEDILHDMGAFSIIASDSQAMGRVGEVIIRTWQTAHKMKVQRGQLKEENGDNDNVRVKRYIAKYTINPAIAHGISENIGTIEKNKRADIVIWDPAFFGVKPEVILMGGSIACAQMGDPNASIPTPQPVYSRPMFSSFGKSLEKSSVTFVSQISLDRDMHKNSGVNKSLLPVKNIRNISKKDMVLNNYCPQIEVNPETYEVKADGELITCEPANTLPLAQRYFMY

SEQ ID NO: 170752 - protein, 158 aa, Unknown
  Bacterial polypetide isolated from the Sargasso Sea
MKKIKREAYADMYGPTTGDKVRLADTELFIEVEKDLTTYGEEVKFGGGKVIRDGMGQSQVSRKDGAVDTVITNALIVDINGIYKADIGLKDGLINEIGKAGNPDTQPNVNIIIGPGTEIIAGEGKNITAGGFDSHIHFICPQQIDDALHSGIYTMFGS

SEQ ID NO: 170753 - protein, 102 aa, Unknown
  Bacterial polypetide isolated from the Sargasso Sea
MKVGEIITKKNSDIILNEDRNSITIKVSNSGDRPIQVGSHYHFSETNEYLKFDREKSNGMRLDIPSGTAVRFEPGQSKDVKLIPITGNRKIFGFNKKVMGQL

SEQ ID NO: 170754 - protein, 60 aa, Unknown
  Bacterial polypetide isolated from the Sargasso Sea
DFVIEGARDGKMVSELMEKGAHVLKKEDCMDGIPDMIREVQVEATFPDGTKLVTVHKPIR

SEQ ID NO: 170755 - protein, 100 aa, Unknown
  Bacterial polypetide isolated from the Sargasso Sea
MKLSPREKDKLLISLAAIVARNRKSRGIKLNYPEAIALISDFVVEGAREGRTVADLMEAGAHVVKKDECMSGIPEMIHEVQVEATFPDGTKLVTVHHPIR

SEQ ID NO: 170756 - protein, 110 aa, Unknown
  Bacterial polypetide isolated from the Sargasso Sea
MSSKITRSSYAEMFGPTTGDKVRLADTDLFIEVENDLTVYGEEVKFGGGKVIRDGMGQSQVTRKDGAVDTVITNALIVDVNGIFKADIGIKDGIIQKIGKSGNPDTQPKN

SEQ ID NO: 170757 - protein, 101 aa, Unknown
  Bacterial polypetide isolated from the Sargasso Sea
MIPGEIITKSDEIVLNKDSDALSIKVSNTGDRPIQVGSHYHFYETNEFLSFDRDKTKGMRLDIAAGTAVRFEPGQTREVNLINIKGDKNIFGFNQKIMGAL

SEQ ID NO: 170758 - protein, 239 aa, Unknown
  Bacterial polypetide isolated from the Sargasso Sea
MKKISRDAYADMYGPTTGDKIRLADTELFIEVEKDLTTYGEEVKFGGGKVIRDGMGQSQVSRKDGAVDTVITNALVVDVNGIYKADIGLKDGLINEIGKAGNPDTQPNVNIIIGPGTEIIAGEGKIITAGGFDSHIHFICPQQIDDSLHSGITTMLGGGTGPAHGTLATTVTPGPWHLERMIQSADAFSMNLAFAGKGNSSLPLALEEQVIAGASSLKLHEDWGTTPAAIDNLLNVADK

SEQ ID NO: 170759 - protein, 91 aa, Unknown
  Bacterial polypetide isolated from the Sargasso Sea
MELKLNEDRASIVMKVSNKGDRPIQVGSHYHFAETNEFLEFDRDTSRGMRLDIPSGTAVRFEPGQTKDVELIAISGERKIYGFNKKIMGKL

SEQ ID NO: 170760 - protein, 100 aa, Unknown
  Bacterial polypetide isolated from the Sargasso Sea
MKLSPREKDKLLISMAAMVARNRKERGVKLNYPEAIALISDFVVEGARDGRSVADLMEAGAHVVTRGDCMEGISEIIHDVQVEATFPDGTKLVTVHNPIR

SEQ ID NO: 170761 - protein, 293 aa, Unknown
  Bacterial polypetide isolated from the Sargasso Sea
ALIVDYWGIVKADVGVKSGRIAAIGKAGNPDIQPAATVVIGPGTEIIAGEGKILTAGGIDSHIHFICPQQIDEALASGITTMLGGGTGPATGTNATTCTPGPFNIEMMMRAIEGQPMNFGFLGKGNSSNRQALVEQIEAGACGLKLHEDWGTTPQAIDTCLTVADETDTQVAIHTDTLNESGFVEETIRAIAGRTIHTYHTEGAGGGHAPDIIKAAGLPNILPSSTNPTRPYTINTVDEHLDMLMVCHHLSPNIPEDVAFADSRIRKETIAAEDILHDKGAFSMIASDSQAMG

SEQ ID NO: 170762 - protein, 277 aa, Unknown
  Bacterial polypetide isolated from the Sargasso Sea
GPTTGDKVRLADTELFIEVENDLTTYGEEVKFGGGKVIRDGMGQSQISREKGAADTVITNALIVDVNGIYKADVGLKDGKIFEIGKAGNPDTQSKVNIIIGPGTEIIAGEGKILTAGGFDSHIHYICPQQIDDALHSGITTMLGGGTGPAHGTLATTCTPGPWHIQRMIQSADGFSMNLAFAGKGNSSLPEGLEEQILAGASALKLHEDWGTTPGAIDNCLNIADKNDVQVMIHTDTLNESGFVENTIKAINKRTIHAFHTEGAGGGHAPDIIKVCG

SEQ ID NO: 170763 - protein, 172 aa, Unknown
  Bacterial polypetide isolated from the Sargasso Sea
MSYKIDRTTYAQTYGPTTGDRVRLADTELFIEVEKDLTTYGDEVKFGGGKVIRDGMGQSQVRRADGAVDTVITNALIVDWWGIVKADVGIKDGMIFEIGKAGNPDIQDNVDIVIGASTEVIAGEGNILTAGSIDTHIHFICPQQIETAIASGITTMLGGGTGPATGTNATTC

SEQ ID NO: 170764 - protein, 321 aa, Unknown
  Bacterial polypetide isolated from the Sargasso Sea
CTAGTIDSHIHFISPQQAIDAICMGTTTMIGGGTGPADGTNATTCTPGEFNIHKMIQAVEESPLNFGFLCKGNDSQEESLMEQIRAGACGLKLHEDWGTTPATINSALNVADKTDTQVAIHTDTLNECGYVDDTIAAINGRVIHTYHTEGAGGGHAPDIMKIASEPNILPSSTNPTRPFTTNTLEEHLDMMMVCHHLNPSVPEDISFAESRIRAETIAAEDILHDIGAISMMSSDSQAMGRVGETTTRNWQTADKMKKMKGALPEDSQENDNFRIKRYVAKITANPAITHGISEHVGTLENGKMADIIVWMPQFFGIKRKA

SEQ ID NO: 170765 - protein, 100 aa, Unknown
  Bacterial polypetide isolated from the Sargasso Sea
MHLSPQEKDKLLIFSAALLAERRLSRGLKLNYPETIAFLSFQVLEGARDGKSVSQLMSEGTTWLSKSQVMEGIPEMVDEVQIEAVFTDGTKLVTIHNPIN

SEQ ID NO: 170766 - protein, 262 aa, Unknown
  Bacterial polypetide isolated from the Sargasso Sea
IFEIGKAGNPDVQDKVDIVIGASTEVIAGEGHILTAGSIDTHIHFICPQQIETALASGITTMLGGGTGPATGTNATTCTPGSFHISRMLQSAEAFPMNLGFFGKGNSTNERNLIDQVEAGACGLKLHEDWGTTPSTINSCLNVADKFDVQVCIHSDTLNEAGFVEDTINAIAGRTIHTFHTEGAGGGHAPDIIKICGENNVLPSSTNPTRPYTRNTLEEHLDMLMVCHHLDSKIPEDIAFAESRIRRETIAAEDILHDMGAF

SEQ ID NO: 170767 - protein, 105 aa, Unknown
  Bacterial polypetide isolated from the Sargasso Sea
MDLTPREKDKLLLFTAGLVAERRLARGLTLNYPEAVALISMEILEGARDGRTVAELMQLGRTIITRDQVMEGVAEMVDEVQVEATFPDGTKLVTVHEPIQERLKS

SEQ ID NO: 170768 - protein, 293 aa, Unknown
  Bacterial polypetide isolated from the Sargasso Sea
GAGGGHAPDIIKICGEKFVLPSSTNPTRPFTKNTVEEHLDMLMVCHHLDKSIPEDIAFAESRIRRETIAAEDILHDMGAFSIIASDSQAMGRVGEVIIRTWQTADKMKKQRGALSEETGNNDNLRARRYIAKYTINPAIAHGISHEVGSVELGKRADLVLWNPAFFGVKPEMVLLGGTIAVAQMGDPNASIPTPQPVYTRSMFGALGRALSETSVTFVSEAAHADGISSKLGLAKKAVPVKNTRNIGKLDLKLNVALPKIDVDPETYEVRADGELLTCQPADEVSMAQRYFMF

SEQ ID NO: 170769 - protein, 231 aa, Unknown
  Bacterial polypetide isolated from the Sargasso Sea
VTPGPWHIERMIQSADAFSMNLAFAGKGNSSLPQALEEQVIAGASSLKLHEDWGTTPAAIDNCLNVADDHDIQVMIHTDTLNESGFVESTIKAINGRTIHAFHTEGAGGGHAPDIIKVCGEQYVIPSSTNPTRPYTVNTVEEHLDMLMVCHHLDKSIPEDVAFAESRIRKETIAAEDILHDMGAFSIIASDSQAMGRVGEVIIRTWQTAHKMKVQRGQLKEEQGNNDNVRV

SEQ ID NO: 170770 - protein, 302 aa, Unknown
  Bacterial polypetide isolated from the Sargasso Sea
TGPAHGTLATTCTPGPWNIGKMLQSADAFPMNLSFAGKGNASLPMALKEQVKAGASSLKLHEDWGTTPGAIDCCLNVADELDVQVMIHTDTLNESGFVENTIKAIGGRTIHAFHTEGAGGGHAPDIIKLAGEENVIPSSTNPTRPYTVNTIEEHLDMLMVCHHLDKSIPEDVAFAESRIRKETIAAEDILHDVGAMSIIASDSQAMGRVGEVIIRTWQTADKMKKQRGRLSEEKGQNDNLRIKRYIAKYTINPAIAHGISNHIGSIEIGKRADFVLWNTAFFGVKPEMVLIGGVITCAQMGD

SEQ ID NO: 170771 - protein, 299 aa, Unknown
  Bacterial polypetide isolated from the Sargasso Sea
PAHGTLATTVTPGPWHIEKMIQSADAFSMNLAFAGKGNSSLPQALEEQVIAGASSLKLHEDWGTTPAAIDNCLNVADDHDIQVMIHTDTLNESGFVESTIKAINGRTIHAFHTEGAGGGHAPDIIKVCGEQYVIPSSTNPTRPYTVNTVEEHLDMLMVCHHLDKSIPEDVAFAESRIRKETIAAEDILHDMGAFSIIASDSQAMGRVGEVIIRTWQTAHKMKVQRGQLKEEKGNNDNVRVKRYIAKYTINPAIAHGISDHIGSIEKNKRADIVIWDTAFFGVKPEMVLQGWKYCLRTNG

SEQ ID NO: 170772 - protein, 221 aa, Unknown
  Bacterial polypetide isolated from the Sargasso Sea
MSYKIDRNTYAQTYGPTTGDRLRLADTELFIEVEKDLTTYGDEVKFGGGKVIRDGMGQSQVRRADGAVDTVITNALIVDWWGIIKADVGIKDGMIFEIGKAGNPDIQDNVDIVIGASTEVIAGEGHILTAGSIDTHIHFICPQQIETALASGITTMLGGGTGPATGTNATTCTPGSFHISRMLQSAEAFPMNLGFFGKGNSTNESNLIDQVEAGACGLKAS

SEQ ID NO: 170773 - protein, 279 aa, Unknown
  Bacterial polypetide isolated from the Sargasso Sea
DGKIFEIGKAGNPDTQSKVNIIIGPGTEIIAGEGKILTAGGFDSHIHYICPQQIDDALHSGITTMLGGGTGPAHGTLATTCTPGPWHIQRMIQSADGFSMNLAFAGKGNSSLPEGLQEQILAGASALKLHEDWGTTPGAIDNCLNIADKNDVQVMIHTDTLNESGFVENTIKAINKRTIHAFHTEGAGGGHAPDIIKVCGEEYVIPSSTNPTRPYTVNTIEEHLDMLMVCHHLDKSIPEDVAFAESRIRRETIAAEDILHDMGAFSIIASDSPGNGRVG

SEQ ID NO: 170774 - protein, 243 aa, Unknown
  Bacterial polypetide isolated from the Sargasso Sea
NASQPAALVEMVKAGASSLKLHEDWGTTPAAIDCCLSVADDMDVQVMIHTDTLNESGFVENTVAAIKGRTIHAFHTEGAGGGHAPDIIKICGDANVIPSSTNPTRPFTVNTVDEHLDMLMVCHHLDKSIPEDVAFAESRIRRETIAAEDILHDMGAFSIIASDSQAMGRVGEVLIRTWQTADKMRKQRGRLPEETGENDNLRVRRYIAKYTINPAIAHGISHEIGSIDLGKRADLVLWSPAFF

SEQ ID NO: 170775 - protein, 149 aa, Unknown
  Bacterial polypetide isolated from the Sargasso Sea
MPYRISRQAYAETYGPTTGDRVRLADTDLILEVEKDYTVYGDEVKFGGGKVIRDGMGQSQTPRAEGAVDTVITNALILDWWGIVKADVGLKDGRIVGIGKAGNPDTQEGVTIVVGPGTEAIAGEGHILTAGGIDTHIHFICPQQIETAL

SEQ ID NO: 170776 - protein, 242 aa, Unknown
  Bacterial polypetide isolated from the Sargasso Sea
MVSGVTTMIGGGTGPAAGTHATTCTPGPWYIARMLQAADTLPVNIGLLGKGNGSNPDALREQISAGAIGLKIHEDWGATPAAIDCALTVADEMDIQVALHSDTLNESGFVEDTLAAIGDRTIHTFHTEGAGGGHAPDIITACAHPNILPSSTNPTLPYTINTIDEHLDMLMVCHHLDPDIAEDVAFAESRIRRETIAAEDVLHDIGAFSLTSSDSQAMGRVGEVILRTWQVAHRMKVQRGPL

SEQ ID NO: 170777 - protein, 304 aa, Unknown
  Bacterial polypetide isolated from the Sargasso Sea
YADMYGPTKGDKVRLADTELIIEVEEDFTTYGEEIKFGGGKVIRDGMGQSQTPRSKGAVDTIITNALILDISGIYKADLGILDGRICKIGKGGNPDTQPNVDIIVGPGTEVIAGEGKILTAGGFDSHIHFICPQQIEDALHSGLTTMLGGGTGPAHGTLATTCTPGKWHIGRMLQSADAFPMNLAFAGKGNASLPEALEEQILAGACALKLHEDWGTTPAAINNCLSVADSLDVQVMIHTDTLNESGYVETTVKAIDNRTIHAFHTEGAGGGHAPDIIKVCGEKNVIPSSTNPTRPYTINTLEE

SEQ ID NO: 170778 - protein, 213 aa, Unknown
  Bacterial polypetide isolated from the Sargasso Sea
MVKISRAAYADMYGPTTGDKVRLADTELFIEVENDLTTYGEEVKFGGGKVIRDGMGQSQISRKKGAADTVITNALIVDVNGIYKADVGLKDGKIFEIGKAGNPDTQSKVNIIIGPGTEIIAGEGKILTAGGFDSHIHYICPQQIDDALHSGITTMLGGGTGPAHGTLATTCTPGPWHIQRMIQSADGFSMNLAFAGKGNSSLPEGLEEQILAG

SEQ ID NO: 170779 - protein, 268 aa, Unknown
  Bacterial polypetide isolated from the Sargasso Sea
LQDLTRLTLLEEHLDMLMVCHHLDKSIPEDIAFAESRIRKETIAAEDILHDMGAFSIIASDSQAMGRVGEVIIRTWQTAHKMKIQRGRLKEENGDNDNVRVKRYIAKYTINPAITHGISKYIGSISEGKRADIVIWDPAFFGVKTEIVMIGGSIACAQMGDPNASIPTPQPVYTRPMFSSFGRSLEASSITFVSKDSIKTGNLDKLNLAKETVAVEKTRDISKKDMVFNNYCPDISVDPETYEVTADGNILTCEPATELPLAQRYFLF

SEQ ID NO: 170780 - protein, 101 aa, Unknown
  Bacterial polypetide isolated from the Sargasso Sea
MAKISRAAYADMYGPTTGDKVRLADTDLIIEVENDLTTYGEEVKFGGGKVIRDGMGQSQISRKKGAADTVITNALIVDVHGIYKADVGLKDGKILKSVKLV

SEQ ID NO: 170781 - protein, 94 aa, Unknown
  Bacterial polypetide isolated from the Sargasso Sea
EKDKLLISLAAIVAKNRLSKGIKLNYPEAIALITDFVVEGAREGKSVAELMEAGAHVIKKKDCMEGIPDMVKEVQVEATFPDGTKLVTVHKPIR

SEQ ID NO: 170782 - protein, 217 aa, Unknown
  Bacterial polypetide isolated from the Sargasso Sea
MGAFSIIASDSQAMGRVGEVIIRTWQTAHKMKVQRGSLPEEKGDNDNFRVKRYLAKYTINPAIAHGISKHIGSIEKNKRADLVLWDPAFFGAKPEMILIGGSIACAQMGDPNASIPTPQPVYTRPMFSSFGTSLEKSSVIFTSKLALEKNSLKDASIRKDLLPVENTRAISKKDMILNNKCPKIEVNPETYEVKADGEIITCEPAKELPLAQRYFMF

SEQ ID NO: 170783 - protein, 100 aa, Unknown
  Bacterial polypetide isolated from the Sargasso Sea
MNLSPREKEKLFVSLAAMVARDRRERGIKLNHPEAIALITDFVLEGAREGKSVAELMASGAKVIKKSECMEGIPEMIPEVQVEATFKDGTKLVTVHQPIR

SEQ ID NO: 170784 - protein, 94 aa, Unknown
  Bacterial polypetide isolated from the Sargasso Sea
MKLTPREKDKLLISLAAIVAKNRLSKGIKLNYPEAIALITDFVVEGAREGKSVAELMEAGAHVIKKKDCIEGIPDMVKKVQVEATFPDGTKLVT

SEQ ID NO: 170785 - protein, 223 aa, Unknown
  Bacterial polypetide isolated from the Sargasso Sea
MVKISRAAYADMYGPTTGDKVRLADTELIIQVENDLTTYGEEVKFGGGKVIRDGMGQSQISRKKGAADTVITNALIVDVNGIYKADVGLKDGKIFEIGKAGNPDTQSEVNIIIGPGTEIIAGEGKILTAGGFDSHIHYICPQQIDDALHSGITTMLGGGTGPAHGTLATTCTPGPWHIQRMIQSADGFSMNLAFAGKGNSSLPEGLEEQILAGASALKLHEDW

SEQ ID NO: 170786 - protein, 78 aa, Unknown
  Bacterial polypetide isolated from the Sargasso Sea
RLERGVKLNYPEVIALITDFVIEGARDGKMVSELMESGAHVVKKDDCMDGIPDMIPEVQVEATFPDGTKLVTVHKPIR

SEQ ID NO: 170787 - protein, 302 aa, Unknown
  Bacterial polypetide isolated from the Sargasso Sea
AQRVPPGPWHIQKMIQSADGFSMNLAFAGKGNSSLPEGLEEQILAGASALKLHEDWGTTPGAIDNCLNIADKNDVQVMIHTDTLNESGFVENTIKAINKRTIHAFHTEGAGGGHAPDIIKVCGEEYVIPSSTNPTRPYTVNTIEEHLDMLMVCHHLDKSIPEDVAFAESRIRRETIAAEDILHDIGAFSIIASDSQAMGRVGEVIIRTWQTAHKMKVQRGSLPEEKGENDNFRVKRYLAKYTINPAIAHGISRHIGSIEKNKRADLVLWDPAFFGAKPEMILIGGSIACAQMGDPNASIPTP

SEQ ID NO: 170788 - protein, 77 aa, Unknown
  Bacterial polypetide isolated from the Sargasso Sea
MAKGIKLNYPEAIALITDFVIEGAREGKSVSELMESGAHVIKKVDCMEGVPDMVKEVQVEATFPDGTKLVTVHKPIR

SEQ ID NO: 170789 - protein, 85 aa, Unknown
  Bacterial polypetide isolated from the Sargasso Sea
MVKISRASYADMYGPTIGDKVRLADTELIIEVENDLTTYGEEVKFGGGKVIRDGMGQSQISREKGAVDTVITNALIVDVSGIYKA

SEQ ID NO: 170790 - protein, 100 aa, Unknown
  Bacterial polypetide isolated from the Sargasso Sea
MKLTPREKDKLLISLAAIVAKNRLSKGIKLNYPEAIALITDFVIEGAREGKSVAELMEAGAYVIKKKDCMEGIPDMVKEVQVEATFPDGTKLVTVHKPIR

SEQ ID NO: 170791 - protein, 100 aa, Unknown
  Bacterial polypetide isolated from the Sargasso Sea
MKLSPREKDKLLVSLAAIVARNRKSRGVKLNYPEAIALITDFVIEGARDGKSVAELMEAGAHVIKKDDCMSGIPDMIHDVQVEATFPDGTKLVTVHHPIR

SEQ ID NO: 170792 - protein, 262 aa, Unknown
  Bacterial polypetide isolated from the Sargasso Sea
RNTLEEHLDMLMVCHHLDPKIPEDVAFAESRIRRETIAAEDILHDLGAFSIIASDSQAMGRVGEVITRTFQTAHKMKVQRGALPEDSARNDNHRLKRYIAKVTINPALAHGISSEVGSIETGKLADLVLWKPGFFGIRPELVVKGGSIVWAQMGDANASIPTPGPVHGRPMFGAFGKALAPSCLTFVSEAAMDADIQRQLGLERTCIAVKETRSVGKSALKLNSALPKVSVDPQTYEVFADGELLTCEPAEVLPLAQRYLLL

SEQ ID NO: 170793 - protein, 258 aa, Unknown
  Bacterial polypetide isolated from the Sargasso Sea
RRMLQAAEGLPVNLGFFGKGNASTPEALEEQVRAGACGLKLHEDWGTTPATIDACLSVADRMDVQVCIHTDTLNEAGFVEDTIAAIKGRTIHTFHTEGAGGGHAPDIIKICGEANVLPSSTNPTRPYTRNTLEEHLDMLMVCHHLDPKIPEDVAFAESRIRRETIAAEDILHDLGAFSIIASDSQAMGRVGEVITRTFQTAHKMKVQRGALPEDSARNDNHRLKRYIAKVTINPALAHGISSEVGSIETGKLADLVLW

SEQ ID NO: 170794 - protein, 204 aa, Unknown
  Bacterial polypetide isolated from the Sargasso Sea
FGGGKVIRDGMGQSQVSRQDGAVDTVITNALIVDVKGIYKADIGLKDGLINEIGKAGNPDTQPNVNIVIGPGTEIIAGEGKIITAGGFDSHIHFICPQQIDDALHSGITTMLGGGTGPAHGTLATTVTPGPWHIERMIQSADAFSMNLAFAGKGNSSLPKALEEQVIAGASSLKLHEDWGTTPAAIDNCLNVADEHDIQVMIHT

SEQ ID NO: 170795 - protein, 230 aa, Unknown
  Bacterial polypetide isolated from the Sargasso Sea
MPKKISRAAYADMYGPTTGDSLRLADTDLIIEVEKDFTSYGEEVKFGGGKVIRDGMGQSQTSRAGGAVDTVITNALVVDASGIYKADIGLKNGVIAGIGKAGNPDTQPNVDIIIGPGTEAIASEGHVLTAGGFDSHIHYICPQQIEDALHSGLTTMLGGGTGPAHGTLATTCTPGPWHIGRMLQSADAFPMNLAFAGKGNAALPAALEEQVRGGACALKLHEDWGTTPAA

SEQ ID NO: 170796 - protein, 90 aa, Unknown
  Bacterial polypetide isolated from the Sargasso Sea
MKLTPREKEKLMISMAANVARKRLERGVKLNYPEAIALITDFVIEGARDGKMVSELMESGAHVVKKEDCMDGIPDMITEVQVEATFPDGT

SEQ ID NO: 170797 - protein, 253 aa, Unknown
  Bacterial polypetide isolated from the Sargasso Sea
PTRPYTVNTIEEHLDMLMVCHHLDKSIPEDVAFAESRIRRETIAAEDILHDMGAFSIIASDSQAMGRVGEVIIRTWQTAHKMKVQRGSLPEEKGDNDNFRVKRYLAKYTINPAIAHGISKHIGSIEKNKRADLVLWDPAFFGAKPEMILIGGSIACAQMGDPNASIPTPQPVYTRPMFSSFGTSLEKSSVIFTSKLALEKNSLKDASIRKDLLPVENTRAISKKDMILNNKCPKIEVNPETYEVKADGEMITL

SEQ ID NO: 170798 - protein, 298 aa, Unknown
  Bacterial polypetide isolated from the Sargasso Sea
PWHIERMLQSADHFAMNLAFAGKGNASLPHPLEEQIIGGACALKLHEDWGTTPGAIDNCLSVADELDVQVMIHTDTLNESGFVENTLRAIDGRTIHAFHTEGAGGGHAPDIIKVCGENNIIPSSTNPTRPYTVNTLEEHLDMLMVCHHLDKSIPEDVAFAESRIRRETIAAEDILHDMGAFSIIASDSQAMGRVAEVIIRTWQTAHKMKQQRGRLSEEPGDNDNFRVKRYIAKYTINPAICHGIAAHIGSIEVGKRADLVIWNPAFFGVKPEMVLLGGSIAVSQMGDPNASIPTPQPV

SEQ ID NO: 170799 - protein, 284 aa, Unknown
  Bacterial polypetide isolated from the Sargasso Sea
IQVMIHTDTLNESGFVESTIKAINGRTIHAFHTEGAGGGHAPDIIKLCGEPYVIPSSTNPTRPYTVNTVEEHLDMLMVCHHLDKSIPEDVAFAESRIRKETIAAEDILHDMGAFSIIASDSQAMGRVGEVIIRTWQTAHKMKIQRGQLQEETGNNDNIRVKRYIAKYTINPAIAHGISSYIGSIETNKRADIVIWDPAFFGVKPEMILIGGSIACAQMGDPNASIPTPQPIYSRPMFSSFGKSLEKSSVTFVSNISLEKNSHNKSGIKKDLLPVENIRNITKKD

SEQ ID NO: 170800 - protein, 100 aa, Unknown
  Bacterial polypetide isolated from the Sargasso Sea
MKLTPREKDKLLISLAAIVAKNRLSKGIKLNYPEAVALITDFVVEGAREGKSVAELMEAGAHVIKKKDCMEGIPDMIKEVQVEATFPDGTKLVTVHKPIR

SEQ ID NO: 170801 - protein, 86 aa, Unknown
  Bacterial polypetide isolated from the Sargasso Sea
MAANVARKRLERGVKLNYPEAIALITDFVIEGARDGKMVSELMETGAHVVKKEDCMDGIPDMIPEVQVEATFPDGTKLVTVHKPIR

SEQ ID NO: 170802 - protein, 93 aa, Unknown
  Bacterial polypetide isolated from the Sargasso Sea
MKKIKREAYADMYGPTTGDKVRLADTELFIEVEKDLTTYGEEVKFGGGKVIRDGMGQSQVSRKDGAVDTVITNALIVDVNGIYKADIGLKDGL

SEQ ID NO: 170803 - protein, 281 aa, Unknown
  Bacterial polypetide isolated from the Sargasso Sea
MKKIKRDAYADMYGPTTGDKVRLADTELFIEVEKDLTTYGEEVKFGGGKVIRDGMGQSQVSRKDGAVDTVITNALIVDVNGIYKADIGIKDGLINEIGKAGNPDTQPNVNIIIGPGTEIIAGEGKIITAGGFDSHIHFICPQQIDDALHSGITTMLGGGTGPAHGTLATTVTPGPWHIERMIQSADAFSMNLAFAGKGNSSLPNALEEQVIAGASSLKLHEDWGTTPAAIDNCLSVADEHDIQVMIHTDTLNESGFVESTIKAINGRTIHAFHTEGAGGGH

SEQ ID NO: 170804 - protein, 261 aa, Unknown
  Bacterial polypetide isolated from the Sargasso Sea
DSQEESLMEQIRAGACGLKLHEDWGTTPATINSALNVADKTDTQVAIHTDTLNECGYVDDTIAAINGRVIHTYHTEGAGGGHAPDIMKIASEPNILPSSTNPTRPFTTNTLEEHLDMMMVCHHLNPSVPEDISFAESRIRAETIAAEDILHDIGAISMMSSDSQAMGRVGETTTRNWQTADKMKKMKGALPEDSQENDNFRIKRYVAKITANPAITHGISEHVGTLENGKMADIIIWMPQFFGIKPKMIVKGGFIAYALMG

SEQ ID NO: 170805 - protein, 292 aa, Unknown
  Bacterial polypetide isolated from the Sargasso Sea
MTKISRAAYADMYGPTTGDKVRLADTELFIEVENDLTTYGEEVKFGGGKVIRDGMGQSQICRKKGAADTVITNALIVDVNGIYKADVGLKDGKIFEIGKAGNPDTQSKVNIIIGPGTEIIAGEGKILTAGGFDSHIHYICPQQIDDALHSGITTMLGGGTGPAHGTLATTCTPGPWHIQRMIQSADGFSMNLAFAGKGNSSLPDGLEEQILAGASALKLHEDWGTTPGAIDNCLNIADKNDVQVMIHTDTLNESGFVENTIKAINKRTIHAFHTEGAGGGHAPDIIKVCGEE

SEQ ID NO: 170806 - protein, 296 aa, Unknown
  Bacterial polypetide isolated from the Sargasso Sea
KLHEDWGTTPQAIDCCLGVADDLDIQVMIHTDTLNESGFVERTVESMKGRTIHAFHTEGAGGGHAPDIIKICGEQFVLPSSTNPTRPFTKNTVEEHLDMLMVCHHLDKSIPEDIAFAESRIRRETIAAEDILHDMGAFSIIASDSQAMGRVGEVIIRTWQTADKMKKQRGALSEETGNNDNLRARRYIAKYTINPAIAHGISHEVGSVELGKRADLVLWNPAFFGVKPEMVLLGGTIAVAQMGDPNASIPTPQPVYTRSMFGAFGRALSESSVTFVSEAAHADGISSKLDLAKKAV

SEQ ID NO: 170807 - protein, 332 aa, Unknown
  Bacterial polypetide isolated from the Sargasso Sea
IIGPGTEIIAGEGKIITAGGFDSHIHFICPQQIDDALHSGITTMLGGGTGPAHGTLATTVTPGPWHIERMIQSADAFPMNLAFAGKGNSSLPKALEEQVIAGASSLKLHEDWGTTPAAIDNCLNVADDFDIQVMIHTDTLNESGFVESTIKAINGRAIHAFHTEGAGGGHAPDIIKVCGEEYVIPSSTNPTRPYTVNTVEEHLDMLMVCHHLDKSIPEDVAFAESRIRKETIAAEDILHDMGAFSIIASDSQAMGRVGEVIIRTWQTAHKMKVQRGQLKEEQGDNDNLRVKRYIAKYTINPAIAHGISDHIGSIEKNKRADIVIWDTAFFGV

SEQ ID NO: 170808 - protein, 104 aa, Unknown
  Bacterial polypetide isolated from the Sargasso Sea
MEAIVQLSPREKDKLLIAMAAEVARKRKSRGVKLNYPEAIALICDAVVEGARDGKSVAEMMEYGATIVKSTDCMDGIPDMIPEVQVEATFPDGTKLVTVHNPIR

SEQ ID NO: 170809 - protein, 220 aa, Unknown
  Bacterial polypetide isolated from the Sargasso Sea
MVKIPRASYADMYGPTTGDKVRLADTELFIEVENDLTNYGEEVKFGGGKVIRDGMGQSQISREKGAVDTVITNALIVDINGIYKADVGLKDGKIFEIGKAGNPDTQSKVNIIIGPGTEIIAGEGKILTAGGFDSHIHYICPQQIDDALHSGITTMLGGGTGPAHGTLATTCTPGPWHIKRMIQSADGFSMNLAFAGKGNSSLPEGLEEQILAGASALKYT

SEQ ID NO: 170810 - protein, 100 aa, Unknown
  Bacterial polypetide isolated from the Sargasso Sea
MDLLPRERDKLLIFTAALLAERRLKRGVKLNYPEAMAYISMEIIEGARDGKTVAEMMDYGRTLLTKEQVMEGVSELIPEVQVEATFPDGTKLVTIHNPII

SEQ ID NO: 170811 - protein, 268 aa, Unknown
  Bacterial polypetide isolated from the Sargasso Sea
MLGGGTGPAHGTLATTCTPGPWHIQRMIQSSDAFPMNLGFAGKGNSSLPEGLKEQIMAGACALKLHEDWGTTPGAIDNCLSMADKFDIQVMIHTDTLNESGFVENTLKAINKRIIHAFHTEGAGGGHAPDIIKVCGEKNIIPSSTNPTRPYTINTIEEHLDMLMVCHHLDKSIPEDVAFAESRIRKETIAAEDILHDMGAFSIIASDSQAMGRVGEVIIRTWQTAHKMKVQRGKLPEEQGDNDNFRVKRYIAKYTINPAITHGISKHI

SEQ ID NO: 170812 - protein, 294 aa, Unknown
  Bacterial polypetide isolated from the Sargasso Sea
DTELFIEVENDLTTYGEEVKFGGGKVIRDGMGQSQISRKKGAVDTVITNALIVDVNGIYKADVGLKDGKIFEIGKAGNPDTQSKVNIIIGPGTEIIAGEGKILTAGGFDSHIHYICPQQIDDALHSGITTMLGGGTGPAHGTLATTCTPGPWHIQRMIQSADGFSMNLAFAGKGNSSLPEGLEEQILAGASALKLHEDWGTTPGAIDNCLNIADKNDVQVMIHTDTLNESGFVENTIKAINKRTIHAFHTEGAGGGHAPDIIKVCGEEYVIPSSTNPTRPYTVNTIEEHLDMLM

SEQ ID NO: 170813 - protein, 228 aa, Unknown
  Bacterial polypetide isolated from the Sargasso Sea
ETIAAEDILHDLGAFSIIASDSQAMGRVGEVIIRTWQTAHKMKVQRGRLQEEKGDNDNVRVKRYVAKYTINPAITHGLSKHIGSITEGKRADIVIWDPAFFGVKPEIVMLGGSIACAQMGDPNASIPTPQPVYTRPMFSSYGRSLETSSITFVSKDSIKSGSLDSLKLAKSTVAVEKTRDISKKDMVYNNYCPDISVDPETYEVTADGEILTCEPATELPMAQRYFLF

SEQ ID NO: 170814 - protein, 258 aa, Unknown
  Bacterial polypetide isolated from the Sargasso Sea
KADVGLKDGKIFEIGKAGNPDTQSKVNIIIGPGTEIIAGEGKILTAGGFDSHIHYICPQQIDDALHSGITTMLGGGTGPAHGTLATTCTPGPWHIQRMIQSADGFSMNLAFAGKGNSSLPESLEEQILAGASALKLHEDWGTTPGAIDNCLNIADKNDVQVMIHTDTLNESGFVENTIKAINKRTIHAFHTEGAGGGHAPDIIKVCGEEYVIPSSTNPTRPYTVNTIEEHLDMLMVCHHLDKSIPEDVAFAESRIRRE

SEQ ID NO: 170815 - protein, 100 aa, Unknown
  Bacterial polypetide isolated from the Sargasso Sea
MKLSPREIDKMMVSMAAIVARKRLDRGVKLNYPEAVSIISDYVVEGARDGKSVAELMESAAHVLKKDDCMDGVAEMIAEVQTEATFPDGTKLVTVHKPIR

SEQ ID NO: 170816 - protein, 102 aa, Unknown
  Bacterial polypetide isolated from the Sargasso Sea
MIPGEIITSDSDIILNKDLVSLTMKVSNTGDRPIQVGSHYHFSEANESLEFDRKKALGMRLNISSGTAVRFEPGQTRDVELIEIQGLKKLFGFNKKVMGKIK

SEQ ID NO: 170817 - protein, 117 aa, Unknown
  Bacterial polypetide isolated from the Sargasso Sea
MAKISRAAYADMYGPTTGDKVRLADTNLFIEVENDLTTYGEEVKFGGGKVIRDGMGQSQISREKGAADTVITNALIVDVNGIYKADVGLKNGKIFEIGKAGNPDTQSKVNIIIGPRN

SEQ ID NO: 170818 - protein, 71 aa, Unknown
  Bacterial polypetide isolated from the Sargasso Sea
LNYPEAIALITDFVVEGAREGKSVAELMEAGAHVIKKKDCMEGIPDMVKEVQVEATFPDGTKLVTVHKPIR

SEQ ID NO: 170819 - protein, 73 aa, Unknown
  Bacterial polypetide isolated from the Sargasso Sea
LKLNYPEAIALITDFVVEGAREGKSVAELMEAGAHVIKKKDCMEGIPDMVKEVQVEATFPDGTKLVTVHKPIR

SEQ ID NO: 170820 - protein, 234 aa, Unknown
  Bacterial polypetide isolated from the Sargasso Sea
TIHTFHTEGAGGGHAPDIIKICGENNVLPSSTNPTRPYTKNTLEEHLDMLMVCHHLDSKIPEDIAFAESRIRRETIAAEDILHDIGAFSIIASDSQAMGRVGEVITRTFQTAHKMKVQRGPLPEDSDRNDNYRVKRYISKVTINPAIAHGINRFVGSIEKGKIADLVLWKPSFFGVKPELVVKGGSIVWSQMGDANASIPTPGPVHGRPMFANYGQSLLKSSFTFLSKNAIELD

SEQ ID NO: 170821 - protein, 228 aa, Unknown
  Bacterial polypetide isolated from the Sargasso Sea
MTLKLTRTQYAEMYGPTVGDRVRLGDTNLFIEVERDLIEEGGGYGNEIKFGGGKVIRDGMGQSPLALGADCLDLVVTNATILDPILGVIKADVGVKDGRISGVGHGGNPLIQDGVSESMVVGAGTEVIAGEGMILTAGGYDSHIHFICPQQIEEAIASGLTTMTGGGTGPATGTNATTCTPGSWNLGKMLQAADSFPMNLGFLGKGNSSSPDALREQVEAGAIGLKLH

SEQ ID NO: 170822 - protein, 233 aa, Unknown
  Bacterial polypetide isolated from the Sargasso Sea
MVKISRAAYADMYGPTTGDKVRLADTELFIEVENDLTTYGEEVKFGGGKVIRDGMGQSQTSREKGAADTVITNALIVDVNGIYKADVGLKDGKIFEIGKAGNPDTQSKVNIIIGPGTEIIAGEGKILTAGGFDSHIHYICPQQIDDALHSGITTMLGGGTGPAHGTLATTCTPGPWHIQRMIQSADGFSMNLAFAGKGNSSLPEGLEEQILAGASALKLHEDWGTTPGAIDNC

SEQ ID NO: 170823 - protein, 299 aa, Unknown
  Bacterial polypetide isolated from the Sargasso Sea
LGGGTGPATGTNATTCTPGAFHISRMLQSAEGFPVNLGFFGKGNATNKAALEEQVRAGACGLKLHEDWGTTPACIDSCLSVADQLDVQVCIHTDTLNEAGFVEDTIKAIRGRTIHTFHTEGAGGGHAPDIIKICGESNVIPSSTNPTRPFTLNTLEEHLDMLMVCHHLDPKIPEDVAFAESRIRRETIAAEDILHDLGAFSIIASDSQAMGRVGEVISRTFQTAHKMKVQRGALPEDNQRNDNHRLKRYISKVTINPAIAHGISAHVGSVEVGKLADLVLWKPGFFGIKPDLVVKGGCI

SEQ ID NO: 170824 - protein, 85 aa, Unknown
  Bacterial polypetide isolated from the Sargasso Sea
AANVARKRLERGVKLNFPEAIALITDFVIEGARDGKMVSELMETAAHVIKKEECMDGISNMITEVQVEATFPDGTKLVTVHKPIR

SEQ ID NO: 170825 - protein, 178 aa, Unknown
  Bacterial polypetide isolated from the Sargasso Sea
EENGDNDNLRVKRYIAKYTINPAIAHGISKHIGSLEINKRADIVIWDPAFFGAKPEMILIGGSIACAQMGDPNASIPTPQPVYSRPMFSSFGRSLERSSVTFVSNEAIIKDSLADTGIRKDLLPVENTRKISKKDMVLNSSCPSIEVNPETYEVKANGELLTCEPAKELPLAQRYFMY

SEQ ID NO: 170826 - protein, 286 aa, Unknown
  Bacterial polypetide isolated from the Sargasso Sea
ATTCTPGPWHIQRMIQSADGFSMNLAFAGKGNSSLPEGLEEQILAGASALKLHEDWGTTPGAIDNCLNIADKNDVQVMIHTDTLNESGFVENTIKAINKRTIHAFHTEGAGGGHAPDIIKVCGEEYVIPSSTNPTRPYTVNTIEEHLDMLMVCHHLDKSIPEDVAFAESRIRRETIAAEDILHDMGAFSIIASDSQAMGRVGEVIIRTWQTAHKMKVQRGSLSEEKGDNDNFRVKRYLAKYTINPAIAHGISKHIGSIEKNKRADLVLWDPAFFGAKPEMILIWRK

SEQ ID NO: 170827 - protein, 101 aa, Unknown
  Bacterial polypetide isolated from the Sargasso Sea
MKLTPREKDKLLISLAAIVAKKRLSKGIKLNYPEAIALITDFVIEGAREGKSVAELMEAGAHVIKKKDCMEGIPDMVKEVQVEATFPDGTKLVTVHKPIRQ

SEQ ID NO: 170828 - protein, 120 aa, Unknown
  Bacterial polypetide isolated from the Sargasso Sea
MVKISRAAYADMYGPTTGDKVRLADTDLFIEVENDLTIYGEEVKFGGGKVIRDGMGQSQTSRKKGAADTVITNALIVDVDGIYKADVGLKDGKIFEIGKAGNPDTQSKVNIVIGPGTEII

SEQ ID NO: 170829 - protein, 268 aa, Unknown
  Bacterial polypetide isolated from the Sargasso Sea
PTRPYTVNTIEEHLDMLMVCHHLDKSIPEDVAFAESRIRRETIAAEDILHDMGAFSIIASDSQAMGRVGEVIIRTWQTAHKMKVQRGSLPEEKGDNDNLRVKRYLAKYTINPAVAHGISKYIGSIEKNKRADLVLWDPAFFGAKPEMILIGGSIACAQMGDPNASIPTPQPVYTRPMFSSFGTSLEKSSVIFTSKLAIEKNSLKDASIRKDLLAVENTRSISKKDMILNNICPKIEVNPETYEVKADGKIITCEPAKELPLAQRYFMF

SEQ ID NO: 170830 - protein, 242 aa, Unknown
  Bacterial polypetide isolated from the Sargasso Sea
IPEDVAFAESRIRKETIAAEDILHDMGAFSIIASDSQAMGRVGEVIIRTWQTAHKMKVQRGQLKEEQGDNDNVRVKRYIAKYTINPAIAHGISDHIGSIEKNKRADIVIWDTAFFGVKPEMVLQGGSIACAQMGDPNASIPTPQPVYSRPMFSSFGKSLEKSTTTFVSKASLDKNSFKNSGISKSLLPVKNIRKISKKDMILNDYCPKIEVNPETYEVLADGELITCEPAETLPLAQRYFMY

SEQ ID NO: 170831 - protein, 100 aa, Unknown
  Bacterial polypetide isolated from the Sargasso Sea
MKLTPREKDKLLISLAAIVAKNRLSKGIKLNHPEAIALITDFVVEGAREGKSVAELMEAGAHVIKKKDCMEGIPEMVKEVQVEATFPDGTKLVTVHKPIR

SEQ ID NO: 170832 - protein, 293 aa, Unknown
  Bacterial polypetide isolated from the Sargasso Sea
GPATGTNATTCTPGSFHIARMLQSAEAFPMNLGFFGKGNSTNERNLIDQVEAGACGLKLHEDWGTTPSTINSCLNVADKFDVQVCIHTDTLNEAGFVEDTIKAIAGRTIHTFHTEGAGGGHAPDIIKICGEKNVLPSSTNPTRPYTRNTLEEHLDMLMVCHHLDSKIPEDIAFAESRIRRETIAAEDILHDVGAFSIIASDSQAMGRVGEVITRTFQTAHKMKVQRGPLSQDSDRNDNYRVKRYISKVTINPAIAHGIEKHVGSIEKGKIADLVLWKPSFFAVKPELVVKGGS

SEQ ID NO: 170833 - protein, 312 aa, Unknown
  Bacterial polypetide isolated from the Sargasso Sea
MLWKLATTCTPGPWHIQRMIQSADGFSMNLAFAGKGNSSLPEGLEEQILAGASALKLHEDWGTTPGAIDNCLNIADKNDVQVMIHTDTLNESGFVENTIKAINKRTIHAFHTEGAGGGHAPDIIKVCGEEYVIPSSTNPTRPYTVNTIEEHLDMLMVCHHLDKSIPEDVAFAESRIRRETIAAEDILHDMGAFSIIASDSQAMGRVGEVIIRTWQTAHKMKVQRGSLPEEKGDNDNFRVKRYLAKYTINPAIAHGISKYIGSIEKNKRADLVLWDPAFFGAKPEMILIKWKYSLRSNGRPKCINSNSTACIH

SEQ ID NO: 170834 - protein, 278 aa, Unknown
  Bacterial polypetide isolated from the Sargasso Sea
DTLNEAGFVEDTINAIAGRTIHTFHTEGAGGGHAPDIIKICGEKNVLPSSTNPTRPYTRNTLEEHLDMLMVCHHLDSKIPEDIAFAESRIRRETIAAEDILHDIGAFSIIASDSQAMGRVGEVITRTFQTAHKMKVQRGPLSQDSNRNDNFRVKRYISKVTINPAIAHGIDKHVGSIEKGKIADFALWKPSFFAVKPELVVKGGSIVWSQMGDANASIPTPGPVHGRPMFASFGQSLIKSSFTFLSKNSIEQNIPNKLGLQKKCIAVENTRNINKSNL

SEQ ID NO: 170835 - protein, 198 aa, Unknown
  Bacterial polypetide isolated from the Sargasso Sea
MAKISRAAYADMYGPTTGDKVRLADTELFIEVENDLTTYGEEVKFGGGKVIRDGMGQSQISREKGAADTVITNALIVDVNGIYKADVGLKDGKIFEIGKAGNPDTQSKVNIIIGPGTEIIAGEGKILTAGGFDSHIHYICPQQIDDALHSGITTMLGGGTGPAHGTLATTCTPGPWHIQRMIQSADGFSMNLAFAEKE

SEQ ID NO: 170836 - protein, 309 aa, Unknown
  Bacterial polypetide isolated from the Sargasso Sea
EGHILTAGSIDTHIHFICPQQIETALASGITTMLGGGTGPATGTNATTCTPGSFHISRMLQSAEAFPMNLGFFGKGNSTNENNLIDQVEAGACGLKLHEDWGTTPSTINSCLNVADKFDVQVCIHTDTLNEAGFVEDTIKAIAGRTIHTFHTEGAGGGHAPDIIKICGEKNVLPSSTNPTRPYTRNTLEEHLDMLMVCHHLDSKIPEDIAFAESRIRRETIAAEDILHDVGAFSIIASDSQAMGRVGEVITRTFQTAHKMKVQRGPLSQDSDRNDNYRVRRYISKVTINPAIAHGINKYVGSIEKGKIA

SEQ ID NO: 170837 - protein, 101 aa, Unknown
  Bacterial polypetide isolated from the Sargasso Sea
MKKIKREAYADMYGPTTGDKVRLADTELFIEVEKDLTTYGEEVKFGGGKVIRDGMGQSQVSRKDGAVDTVITNALIVDVNGIYKADIGLKDGLIYEIGKAR

SEQ ID NO: 170838 - protein, 102 aa, Unknown
  Bacterial polypetide isolated from the Sargasso Sea
MKPGEIITKQNSDINLNDERQSITLKVSNSGDRPIQVGSHYHFAETNEYLKFDREKSNGMRLDIPSGTAVRFEPGQSKDVELIQISGNRKIFGFNKKVMGQL

SEQ ID NO: 170839 - protein, 78 aa, Unknown
  Bacterial polypetide isolated from the Sargasso Sea
RLERGVKLNYPEAIALITDFVIEGARDGKMVSELMETGAHVVKKEDCMDGIQDMIPEVQVEATFPDGTKLVTVHKPIR

SEQ ID NO: 170840 - protein, 313 aa, Unknown
  Bacterial polypetide isolated from the Sargasso Sea
KCYYLYSRIFSYSRMLQSAEAFPMNLGFFGKGNSTNERNLIDQVEAGACGLKLHEDWGTTPSTINSCLNVADKFDVQVCIHTDTLNEAGFVEDTINAISGRTIHTFHTEGAGGGHAPDIIKICGEKNVLPSSTNPTRPYTRNTLEEHLDMLMVCHHLDSKIPEDIAFAESRIRRETIAAEDILHDIGAFSIIASDSQAMGRVGEVITRTFQTAHKMKLQRGPLSQDSDRNDNFRVKRYISKVTINPAIAHGIDKHVGSIEKGKIADFVLWKPSFFAVKPELVVKGGSIVWSQMGDANASIPTPGPVHGRPYVA

SEQ ID NO: 170841 - protein, 100 aa, Unknown
  Bacterial polypetide isolated from the Sargasso Sea
MKLTPREKDKLMVSMAANVARKRLERGVKLNYPEAIALITDFVIEGARDGKMVSELMETAAYVIKKEECMDGISDMITEVQVEATFPDGTKLVTVHKPIR

SEQ ID NO: 170842 - protein, 278 aa, Unknown
  Bacterial polypetide isolated from the Sargasso Sea
GLKNGNIDHIGKAGNPDTQPGVDIIIGPGTEVIAGEGKIVTAGGFDSHIHFICPQQIDDALHSGITTMLGGGTGPAHGTLATTCTPGPWHIGRMLQSSDAFSMNLAYAGKGNSSMPSGLEEQVLGGAAALKLHEDWGSTPGAIDNCLNVADKFDVQVMIHTDTLNESGFVENTINAINKRTIHTFHTEGAGGGHAPDIIKICGEPYVLPSSTNPTRPFTVNTVEEHLDMLMVCHHLDKSIPEDVAFAESRIRRETMAAEDILHDMGAFSIIASDSQAM

SEQ ID NO: 170843 - protein, 275 aa, Unknown
  Bacterial polypetide isolated from the Sargasso Sea
TGDRVRLADTELFIEVEKDLTTYGDEVKFGGGKVIRDGMGQSQVKRADGAVDTVITNALIVDWWGIIKADVGIKDGMIFEIGKAGNPDIQDNIDIVIGASTEVIAGEGHILTAGSIDTHIHFICPQQIETALASGITTMLGGGTGPATGTNATTCTPGSFHISRMLQSAEAFPMNLGFFGKGNSTNESNLIDQVEAGACGLKLHEDWGTTPSTINSCLNVADKFDVQVCIHTDTLNEAGFVEDTINAIAGRTIHTFHTEGAGGGHAPDIIKICGE

SEQ ID NO: 170844 - protein, 100 aa, Unknown
  Bacterial polypetide isolated from the Sargasso Sea
MKLSPREKEKLLVSLAAMVAKDRLKRGVKLNYPEAIAIISDFVIEGARDGKSVADLMEEGAHVVKKNQCMEGIKDMIHEVQVEATFPDGTKLVTVHHPIR

SEQ ID NO: 170845 - protein, 100 aa, Unknown
  Bacterial polypetide isolated from the Sargasso Sea
MKLTPREKDKLLISLAAIVAKNRLSKGIKLNYPEAIALITDFVVEGAREGKSVAELMEAGAHVIKKKDCMEGIPDMIKEVQVEATFPDGTKLVTVHKPIR

SEQ ID NO: 170846 - protein, 293 aa, Unknown
  Bacterial polypetide isolated from the Sargasso Sea
FAGKGNSSLPEGLEEQILAGASALKLHEDWGTTPGAIDNCLNIADKNDVQVMIHTDTLNESGFVENTIKAINKRTIHAFHTEGAGGGHAPDIIKVCGEEYVIPSSTNPTRPYTVNTIEEHLDMLMVCHHLDKSIPEDVAFAESRIRRETIAAEDILHDMGAFSIIASDSQAMGRVGEVIIRTWQTAHKMKVQRGSLPEEKGDNDNFRVKRYLAKYTINPAIAHGISKHIGSIEKNKRADLVLWDPAFFGAKPEMILIGGSIACAQMGDPNASIPTPQPVYTRPMFSSFGTSLE

SEQ ID NO: 170847 - protein, 203 aa, Unknown
  Bacterial polypetide isolated from the Sargasso Sea
MKKIKREAYADMYGPTTGDKIRLADTELFIEVEKDLTTYGEEVKFGGGKVIRDGMGQSQVSRKDGAVDTVITNALIVDVNGIYKADIGLKDGLINEIGKAGNPDTQPNVNIIIGPGTEIIAGEGKIITAGGFDSHIHFICPQQIDDALHSGITTMLGGGTGPAHGTLATTVTPGPWHIEKMIQSADAFSMNLAFSGKGNSSLP

SEQ ID NO: 170848 - protein, 87 aa, Unknown
  Bacterial polypetide isolated from the Sargasso Sea
LNDERQSITFKVSNSGDRPIQVGSHYHFAETNEYLKFDREKSNGMRLDIPSGTAVRFEPGQSKDVELIPITGNRKIFGFNKKVMGQL

SEQ ID NO: 170849 - protein, 193 aa, Unknown
  Bacterial polypetide isolated from the Sargasso Sea
MKKINRDAYADMYGPTIGDKIRLADTELFIEVEKDLTTYGEEVKFGGGKVIRDGMGQSQVSRKDGAVDTVITNALIVDINGIYKADIGLKDGLINEIGKAGNPDTQPNVNIIIGPGTEIIAGEGKIITAGGFDSHIHFICPQQIDDALHSGITTMLGGGTGPAHGTLATTVTPGPWHIEKMIQSADAFSMNLA

SEQ ID NO: 170850 - protein, 95 aa, Unknown
  Bacterial polypetide isolated from the Sargasso Sea
KQNSDINLNDKRQSITVKVSNSGDRPIQVGSHYHFAETNEYLKFDREKSNGMRLDIPSGTAVRFEPGQSKDVELIPITGNRMIFGFNKKVMGQLK

SEQ ID NO: 170851 - protein, 31 aa, Unknown
  Bacterial polypetide isolated from the Sargasso Sea
MDGIADMIAEIQVEATFPDGTKLVTVHNPIR

SEQ ID NO: 170852 - protein, 260 aa, Unknown
  Bacterial polypetide isolated from the Sargasso Sea
EEVKFGGGKVIRDGMGQSQVTNKDGAVDTIITNALILDITGIYKADVGLKDGKINKIGKGGNPDTQPNVDIIVGPGTEVIAGEGKILTAGGFDSHIHFICPQQIDDALHSGLTTMLGGGTGPAHGTLATTCTPGPWHIQRMIQASDAFPMNLGFAGKGNSSLPEGLKEQIMAGACALKLHEDWGTTPGAIDNCLSMADKFDIQVMIHTDTLNESGFVENTLKAINNRIIHAFHTEGAGGGHAPDIIKVCGEENIIPSSTN

SEQ ID NO: 170853 - protein, 258 aa, Unknown
  Bacterial polypetide isolated from the Sargasso Sea
EEHLDMLMVCHHLDKSIPEDVAFAESRIRRETIAAEDILHDMGAFSIIASDSQAMGRVGEVITRTWQTAHKMKIQRGRLKEEQGKNDNLRVKRYIAKYTINPAIAHGVSNHIGTLEKNKRADIVIWDPAFFGAKPEMILVGGSIACAQMGDPNASIPTPQPIHSRSMFSSYGRSLESSSVTFVSNYSIQEGSFNGLEIKKEMLPVANTRKISKKDMVLNNICPEIEVNPETYEVKADGELLTCEPASELPLAQRYFLY

SEQ ID NO: 170854 - protein, 95 aa, Unknown
  Bacterial polypetide isolated from the Sargasso Sea
QEKDKLLIVTAALLAERRLGRGLKLNHPEAVAWLSFLVLEGARDGRTVAELMQDSSTWLSKNQVMEGVSELVHEVQIEAVFPDGTKLVTLHDPIR

SEQ ID NO: 170855 - protein, 148 aa, Unknown
  Bacterial polypetide isolated from the Sargasso Sea
MSYKIDRNTYAQTYGPTTGDRVRLADTELFIEVEKDLTTYGDEVKFGGGKVIRDGMGQSQVRRSDGAVDTVITNALIVDWWGIIKADVGIKDGMIFEIGKAGNPDIQDNVDIVIGASTEVIAGEGHILTAGSIDTHIHFICPQQMKQH

SEQ ID NO: 170856 - protein, 100 aa, Unknown
  Bacterial polypetide isolated from the Sargasso Sea
MKLSPREKDKLLVSVAALVARNRKERGVKLNYPEAIALITDYVVEGARDGRSVSDLMEAGAHVVKRRDCMEGIAEMIHDVQVEATFPDGTKLVTVHHPIR

SEQ ID NO: 170857 - protein, 92 aa, Unknown
  Bacterial polypetide isolated from the Sargasso Sea
MIPGEIVTKKGDILINAGRQQVKLTVANSGDRPIQVGSHYHFYETNEALVFSRNSAYGMRLDIPAGTAVRFEPGQEREVQLVPYGGKRRVLG

SEQ ID NO: 170858 - protein, 317 aa, Unknown
  Bacterial polypetide isolated from the Sargasso Sea
MSVKITRYDYAGMYGPTKGDKIRLADTELFIEVEKDLTTYGEEVKFGGGKVIRDGMGQSQATRAEGTPDTVITNALILDYTGIYKADVALRDGKIDSIGKAGNPDTQPNVDITIGPGTEIIAGEGKIVTAGGFDSHIHYICPQQIDDALHSGVTTMLGGGTGPAHGTLATTCTPGPWHIGRMLQSADGLPMNLAFAGKGNASLPGALEEQVLGGACALKLHEDWGTTPQAIDCCLGVADDLDVQVMIHTDTLNESGFVERTVDSMKERTIHAFHTEGAGGGHAPDIIKICGEKFVLPSSTNPTRPFTKILWKSISIC

SEQ ID NO: 170859 - protein, 80 aa, Unknown
  Bacterial polypetide isolated from the Sargasso Sea
RNRHARGVKLNHPEAMAIITDFVVEGARDGRSVGDLMQAGAQVIGAADCMEGIPEMIHEVQVEATFPDGTKLVTVHNPIR

SEQ ID NO: 170860 - protein, 98 aa, Unknown
  Bacterial polypetide isolated from the Sargasso Sea
MHLSPQEKDKLLIVTAALLSERRLNRGLKLNHPEAVAWLSFLVLEGARDGKSVAELMQEGTTWLRQDQVMEGVAELVHEVQIEAVFPDGTKLVTLHDP

SEQ ID NO: 170861 - protein, 102 aa, Unknown
  Bacterial polypetide isolated from the Sargasso Sea
MKPGEIITKNNSEIKLNEGRKVVTIKVSNKGDRPIQVGSHYHFAETNKFLEFDRDISRGKRLNIFSGTAVRFEPGQTKDVELIELSGKRKIFGFNKKIMGKL

SEQ ID NO: 170862 - protein, 74 aa, Unknown
  Bacterial polypetide isolated from the Sargasso Sea
GIKLNYPEAIALITDFVIEGARDGKMVSELMESGSKVVKKEDCMDGIADMIPEVQVEATFPDGTKLVTVHKPIR

SEQ ID NO: 170863 - protein, 269 aa, Unknown
  Bacterial polypetide isolated from the Sargasso Sea
NIADNHDIQVMIHTDTLNESGFVESTIKAINGRTIHAFHTEGAGGGHAPDIIKVCGEQYVIPSSTNPTRPYTVNTVEEHLDMLMVCHHLDKSIPEDVAFAESRIRKETIAAEDILHDMGAFSIIASDSQAMGRVGEVIIRTWQTAHKMKVQRGQLKEEQGNNDNVRVKRYIAKYTINPAIAHGISDHIGSIEKNKRADIVIWDTAFFGVKPEMVLQGGSIASAQMGDPNASIPTPQPVYSRPMFSSFGKSLEKSTVTFVSKVSLDKESF

SEQ ID NO: 170864 - protein, 290 aa, Unknown
  Bacterial polypetide isolated from the Sargasso Sea
KDLTTYGDEVKFGGGKVIRDGMGQSQVRRADGAVDTVITNALIVDWWGIIKADVGIKDGMIFEIGKAGNPDIQDNVDIVIGASTEVIAGEGHILTAGSIDTHIHFICPQQIETALASGITTMLGGGTGPATGTNATTCTPGSFHISRMLQSAEAFPMNLGFFGKGNSTNESNLIDQVEAGACGLKLHEDWGTTPSTINSCLNVADKFDVQVCIHTDTLNEAGFVEDTINAIAGRTIHTFHTEGAGGGHAPDIIKICGEKNVLPSSTNPTRPYTRNTLEEHLDMLMVCHHL

SEQ ID NO: 170865 - protein, 122 aa, Unknown
  Bacterial polypetide isolated from the Sargasso Sea
MAKISRAAYADMYGPTTGDKVRLADTELFIEVENDLTTYGEEVKFGGGKVIRDGMGQSQISREKGAADTVITNALIVDVNGIYKADVGLKDGKIFEIGKAGNPDTQSKVNIIIGPVTEIIAG

SEQ ID NO: 170866 - protein, 83 aa, Unknown
  Bacterial polypetide isolated from the Sargasso Sea
MVAKNRLSKGIKLNYPEAIALITDFVVEGAREGKSVAELMEAGAHVIKKKDCMDGIPDMIKEVQVEATFPDGTKLVTVHKPIR

SEQ ID NO: 170867 - protein, 100 aa, Unknown
  Bacterial polypetide isolated from the Sargasso Sea
MKLSPREKDKLLVSMAAIVAQKRKKRGVKLNYPEAVALITDFVIEGARDGRSVADLMEAGAHVVALDDCMDGIAEMIPDVQVEATFPDGTKLVTVHRPIR

SEQ ID NO: 170868 - protein, 76 aa, Unknown
  Bacterial polypetide isolated from the Sargasso Sea
DRGIKLNYPEAIALITDFVIEGARDGKKVSELMESGAKVVKKENCMDGVADMISEVQVEATFPDGTKLVTVHKPIR

SEQ ID NO: 170869 - protein, 294 aa, Unknown
  Bacterial polypetide isolated from the Sargasso Sea
VLTAGSIDTHIHFICPQQMETALASGITTMLGGGTGPATGTNATTCTPGSFHISRMLQSAEAFPMNLGFFGKGNSTNETNLIDQVEAGACGLKLHEDWGTTPSTINSCLNVADKFDVQVCIHTDTLNEAGFVEDTINAIAGRTIHTFHTEGAGGGHAPDIIKICGEKNVLPSSTNPTRPYTRNTLEEHLDMLMVCHHLDSKIPEDIAFAESRIRRETIAAEDILHDIGAFSIIASDSQAMGRVGEVITRTFQTAHKMKVQRGPLSQDSDRNDNYRVKRYISKVTINPAIAHGID

SEQ ID NO: 170870 - protein, 270 aa, Unknown
  Bacterial polypetide isolated from the Sargasso Sea
MLIEVEKDFTNYGEEVKFGGGKVIRDGMGQSQLGSSETVDLVITNALILDHWGIVKADIGIDDGRIVGIGKAGNPDIQDGVSIVIGPGTEVVAGEGQIVTAGGIDAHIHFICPQQIEEALMSGVTTMLGGGTGPATGTNATTCTPGPWNIARMLESTDNLPMNLGFLGKGNSSLPFALEEQLLAGACGLKLHEDWGTTPASIDNCLAVAESFDVQVAIHTDTLNESGFVDDTIAAFKNRAIHTYHTEGAGGGHAPDIIKACSQPNVLSSS

SEQ ID NO: 170871 - protein, 101 aa, Unknown
  Bacterial polypetide isolated from the Sargasso Sea
MIPGELLTEPGEHLLNTGRRTLTLVVRNTGDRPIQVGSHYHFAETNNALGFDRAAARGMRLNIASGTAVRFEPGQERTVELVDYAGERRVFGFQGLTQGAL

SEQ ID NO: 170872 - protein, 35 aa, Unknown
  Bacterial polypetide isolated from the Sargasso Sea
MDGIADMIKDVQVEATFPDGTKLVTVHYPIRKDKK

SEQ ID NO: 170873 - protein, 96 aa, Unknown
  Bacterial polypetide isolated from the Sargasso Sea
MKLSPREKDKLLVSLAAIVARSRKSRGVKLNYPEAIAIITDFVIEGARDGKSVAELMEAGAHVIKKDDCMSGIPDMIHDVQVEATFPDGTKLGQSP

SEQ ID NO: 170874 - protein, 319 aa, Unknown
  Bacterial polypetide isolated from the Sargasso Sea
MLGGGTGPATGTNATTCTPGSFHISRMLQSAEAFPMNLGFFGKGNSTNERNLIDQVEAGACGLKLHEDWGTTPSTINSCLNVADEFDVQVCIHTDTLNEAGFVEDTINAIAGRTIHTFHTEGAGGGHAPDIIKICGENNVLPSSTNPTRPYTRNTLEEHLDMLMVCHHLDSKIPEDIAFAESRIRRETIAAEDILHDIGAFSIIASDSQAMGRVGEVITRTFQTAHKMKVQRGPLSQDSDRNDNYRVKRYISKVTINPAIAHGINKYVGSIEKGKIADLVLWKPSFFAVKPELVVKGGSIVGSKWVMRMLQFPTQVLFM

SEQ ID NO: 170875 - protein, 286 aa, Unknown
  Bacterial polypetide isolated from the Sargasso Sea
FHTEGAGGGHAPDIIKVCGEEYVIPSSTNPTRPYTVNTIEEHLDMLMVCHHLDKSIPEDVAFAESRIRRETIAAEDILHDMGAFSIIASDSQAMGRVGEVIIRTWQTAHKMKVQRGSLPEEKGDNDNFRVKRYLAKYTINPAIAHGISKYIGSIEKNKRADLVLWDPAFFGAKPEMILIGGSIACAQMGDPNASIPTPQPVYTRPMFSSFGTSLEKSSVIFTSKLALEKNSLKDASIRKDLLPVENTRAISKKDMILNNKCPKIEVNPETYEVKADGEIITCEPAK

SEQ ID NO: 170876 - protein, 100 aa, Unknown
  Bacterial polypetide isolated from the Sargasso Sea
MKLSPREIDKMMVSMAAIVARKRLDRGVKLNYPEAVSIISDYVVEGAREGKSVAELMESAAHVLKKDDCMDGVAEMIAEVQTEATFPDGTKLVTVHKPIR

SEQ ID NO: 170877 - protein, 193 aa, Unknown
  Bacterial polypetide isolated from the Sargasso Sea
MAKISRAAYADMYGPTTGDKVRLADTELFIEVENDLTTYGEEVKFGGGKVIRDGMGQSQISREKGAADTVITNALIVDVNGIYKADVGLKDGKIFEIGKAGNPDTQSKVNIIIGPGTEIIAGEGKILTAGGFDSHIHYICPQQIDDALHSGVTTMLGGGTGPAHGTLATTCTPGPWHIQRMIQSADGFSMNLA

SEQ ID NO: 170878 - protein, 278 aa, Unknown
  Bacterial polypetide isolated from the Sargasso Sea
DVNGIYKADVGLKDGKIFEIGKAGNPDTQSKVNIIIGPGTEIIAGEGKILTAGGFDSHIHYICPQQIDDALHSGITTMLGGGTGPAHGTLATTCTPGPWHIQRMIQSADGFSMNLAFAGKGNSSLPEGLEEQILAGASALKLHEDWGTTPGAIDNCLNIADKNDVQVMIHTDTLNESGFVENTIKAINKRTIHAFHTEGAGGGHAPDIIKVCGEEYVIPSSTNPTRPYTVNTIEEHLDMLMVCHHLDKSIPEDVAFAESRIRRETIAAEDILHDMGAF

SEQ ID NO: 170879 - protein, 100 aa, Unknown
  Bacterial polypetide isolated from the Sargasso Sea
MHLSPQEKDKLLIFSAALLAERRLNRGLKLNYPETIAFLSFQVLEGARDGKSVSQLMSEGTTWLSKSQVMEGISEMVDEVQIEAIFPDGTKLVTIHNPIN

SEQ ID NO: 170880 - protein, 326 aa, Unknown
  Bacterial polypetide isolated from the Sargasso Sea
VADKFDVQVCIHTDTLNEAGFVEDTINAIAGRTIHTFHTEGAGGGHAPDIIKICGEKNVLPSSTNPTRPYTRNTLEEHLDMLMVCHHLDSKIPEDIAFAESRIRRETIAAEDILHDVGAFSIIASDSQAMGRVGEVITRTFQTAHKMKVQRGPLTQDSDRNDNYRVKRYISKVTINPAIAHGIDKHVGSIEKGKIADLALWKPSFFAIKPELVVKGGSIVWSQMGDANASIPTPGPVHGRPMFASFGQSLIKSSFTFLSKNSIEQNIPNKLGLQKKCIAVENTRNINKSNLKLNSELPNISVDPQTYEVFSDGELLTCEPLDEVPM

SEQ ID NO: 170881 - protein, 275 aa, Unknown
  Bacterial polypetide isolated from the Sargasso Sea
EVTFGGGKVIRDGMGQSQAADQECMDLVITNALIVDYLAIVKADVGVKHGRIAAIGKAGNPDIQDGVTVVIGPATEVIAGEGKILTAGGIDSHIHFICPQQIDEALASGITTMIGGGTGPATGTNATTCTPGPFNLEMMMRAIEGQPMNFGFLGKGNSSKRDPLAEQIGAGACGLKLHEDWGTTPQAIDTCLSIAEETDVQVAIHTDTLNESGFVEETLKAINGRTIHTYHTEGAGGGHAPDIIKAAGLANVLPSSTNPTRPYTINTVDEHLDML

SEQ ID NO: 170882 - protein, 317 aa, Unknown
  Bacterial polypetide isolated from the Sargasso Sea
DVQVCIHTDTLNEAGFVEDTINAIAGRTIHTFHTEGAGGGHAPDIIKICGEKNVLPSSTNPTRPYTRNTLEEHLDMLMVCHHLDSKIPEDIAFAESRIRRETIAAEDILHDIGAFSIIASDSQAMGRVGEVITRTFQTAHKMKVQRGPLSQDSDRNDNYRVKRYISKVTINPAIAHGINEHVGSIEKGKIADFALWKPSFFAVKPELVVKGGSIVWSQMGDANASIPTPGPVHGRPMFASFGQSLVKSSFTFLSKNSIDQNIPNKLGLQKKCIAVENTRNINKSHLKLNNKLPNISVNPQTYEVFSDGELLTCEPLD

SEQ ID NO: 170883 - protein, 287 aa, Unknown
  Bacterial polypetide isolated from the Sargasso Sea
ILEIGKAGNPYTQSKVNIIIGPGTEIIAGEGKILTAGGFDSHIHYICPQQIDDALHSGITTMLGGGTGPAHGTLATTCTPGPWHIQRMIQSADGFSMNLAFAGKGNSSLPEGLEEQILAGASALKLHEDWGTTPGAIDNCLNIADKNDVQVMIHTDTLNESGFVENTIKAINKRTIHAFHTEGAGGGHAPDIIKVCGEEYVIPSSTNPTRPYTVNTIEEHLDMLMVCHHLDKSIPEDVAFAESRIRRETIAAEDILHDMGAFSIIASDSQAMGRVGEVIIRTWQTAH

SEQ ID NO: 170884 - protein, 233 aa, Unknown
  Bacterial polypetide isolated from the Sargasso Sea
MSYKIDRKTYAQTYGPTTGDRVRLADTELFIEVEKDLTTYGDEVKFGGGKVIRDGMGQSQVIRADGAVDTVITNALIVDWWGIIKADVGIKDGMIFEIGKAGNPDIQDNVDIVIGASTEVIAGEGHILTAGSIDTHIHFICPQQIETALASGITTMLGGGTGPATGTNATTCTPGYFHISRMLQSAEAFPMNLGFFGKGNSTNERNLIDQVEAGACGLKLHEDWGTTPSTINS

SEQ ID NO: 170885 - protein, 270 aa, Unknown
  Bacterial polypetide isolated from the Sargasso Sea
TSLVDQITGGACGLKIHEDWGAMPAAIDTCLGVADEMDFQVQLHTDTLNESGFVEDTLAAINGRTIHMYHAEGAGGGHAPDIISITGQPNCLPSSTNPTNPFTRNTFDEHLDMIMVCHHLNPAVPEDVAFAESRIRAETIAAEDVLHDLGAISMLGSDSQGMGRINEVICRTWQLASKMRDQRGRLNEEKTSLGDNERIKRYIAKYTINAARTFGMDKWIGSLEKGKLGDVVLWKPEFFGIKPELVIKGGFIVWAAMGDSAASLMTCEPL

SEQ ID NO: 170886 - protein, 100 aa, Unknown
  Bacterial polypetide isolated from the Sargasso Sea
MHLSPQEKDKLLIFSAALLAERRLSRGLKLNYPETIAFLSFQVLEGARDGKSVSQLMSEGTTWLSKSQVMEGIPEMVDEVQIEAVFPDGTKLVTIHNPIN

SEQ ID NO: 170887 - protein, 253 aa, Unknown
  Bacterial polypetide isolated from the Sargasso Sea
MVKIPRASYADMYGPTTGDKVRLADTELFIEVENDLTNYGEEVKFGGGKVIRDGMGQSQISREKGAVDTVITNALIVDVNGIYKADVGLKDGKIFEIGKAGNPDTQSKVNIIIGPGTEIIAGEGKILTAGGFDSHIHYICPQQIDDALHSGITTMLGGGTGPAHGTLATTCTPGPWHIKRMIQSADGFSMNLAFAGKGNSSLPEGLEEQILAGASALKLHEDWGTTPGAIDNCLNIADKNDVQVMIHTDTLNE

SEQ ID NO: 170888 - protein, 287 aa, Unknown
  Bacterial polypetide isolated from the Sargasso Sea
MSYKIDRKTYAQTYGPTTGDRVRLADTELFIEVEKDLTTYGDEVKFGGGKVIRDGMGQSQVIRADGAVDTVITNALIVDWWGIIKADVGIKDGMIFEIGKAGNPDIQDNVDIVIGASTEVIAGEGHILTAGSIDTHIHFICPQQIETALASGITTMLGGGTGPATGTNATTCTPGYFHISRMLQSAEAFPMNLGFFGKGNSTNERNLIDQVEAGACGLKLHEDWGTTPSTINSCLNVADKFDVQVCIHTDTLNEAGFVEDTINAIAGRTIHTFHTEGAGGGHAPDII

SEQ ID NO: 170889 - protein, 100 aa, Unknown; identical to SEQ ID NO: 170765
  Bacterial polypetide isolated from the Sargasso Sea

SEQ ID NO: 170890 - protein, 101 aa, Unknown
  Bacterial polypetide isolated from the Sargasso Sea
MIPGEVKAAEGSITLNEGRQTLEIEVANTGDRPIQVGSHYHFYEVNNSLTFDREKTRGYRLNIPAGTAVRIEPGQTRTVELVEYTGARKVYGFQGKVMGDL

SEQ ID NO: 170891 - protein, 69 aa, Unknown
  Bacterial polypetide isolated from the Sargasso Sea
LSGSRRLYTAAIMEGARDGRTVSELMGHGRTLLTRDDVMEGVPEMIHEVQVEATFPDGTKLVTVHNPIV

SEQ ID NO: 170892 - protein, 100 aa, Unknown; identical to SEQ ID NO: 170845
  Bacterial polypetide isolated from the Sargasso Sea

SEQ ID NO: 170893 - protein, 270 aa, Unknown
  Bacterial polypetide isolated from the Sargasso Sea
IKNRTIHAFHTEGAGGGHAPDIIKICGKSHVIPSSTNPTRPYTVNTLEEHLDMLMVCHHLDKSIPEDVAFAESRIRKETIAAEDILHDMGAFSIIASDSQAMGRVGEVITRTWQTAHKMKIQRGRLSDETGDNDNLRVRRYVAKYTLNPAICHGISAHVGSIEAGKRADLVLWKPAFFGVKPEMVLLGGSIAVAQMGDPNASIPTPQPVYTRPMFAAYGRSVENSAICFVSQAAKSEDIGDKLGLAKQTKPVQNTRNITKMDMVFNSYLP

SEQ ID NO: 170894 - protein, 100 aa, Unknown
  Bacterial polypetide isolated from the Sargasso Sea
MNLTPREKDKLLIFTAALVAEKRKERGLTLNHPEAVAFISAAILEGARDGKTVAELMDFGKSLLKKEDVMEGVSEMIPDIQVEATFPDGTKLVTVHNPIM

SEQ ID NO: 170895 - protein, 102 aa, Unknown
  Bacterial polypetide isolated from the Sargasso Sea
MIPGEIIVADGDIDLNKNRQSIEINVLNNGDRPIQVGSHYHFFEVNDALMFDRLETKGFRLDIASGTAVRFEPGQSRTVILIRFGGSQNIYGFQEKVMGEVK

SEQ ID NO: 170896 - protein, 303 aa, Unknown
  Bacterial polypetide isolated from the Sargasso Sea
MSKMKRRDYAQMYGPTKGDAVRLGDTNLFAEVEHDFITYGDECLHGGGKTLRDGLGLTPGYDSAMGALDMLLCNATVIDPVIGIVKGDIGIKDGKIVGIGKAGNPGTMDGVHSDLICGVATTVRDAEGLIATPGGIDVHVHFDSAQLCDHAIAAGITSLMGGSLGPITVGIDCGGAFNVGKMIQASEDFPVNFGFLGRGNTSKPKSIYDQIKGGAVGLKIHEDWGSMPAAIDTCLSVADELDFQVQIHTDTLNESGFLESTLEAIANRTIHMYHTEGAGGGHAPDVIRVAGEMNCLPSSTTPR

SEQ ID NO: 170897 - protein, 260 aa, Unknown
  Bacterial polypetide isolated from the Sargasso Sea
DAFSMNLAFAGKGNSSKPEGLIEQVNAGACALKLHEDWGTTPGAIDNCLNVADKMDVQVMIHTDTLNESGFVENTIEAIKNRTIHAFHTEGAGGGHAPDIIKVCGNQNVIPSSTNPTRPYTINTLEEHLDMLMVCHHLDKSIPEDVAFAESRIRKETIAAEDILHDMGAFSIIASDSQAMGRVGEVIIRTWQTAHKMKIQRGRLREENGDNDNVRVKRYIAKYTINPAITHGISQHIGSISEGKRADIVLWDPAFFGVKP

SEQ ID NO: 170898 - protein, 293 aa, Unknown
  Bacterial polypetide isolated from the Sargasso Sea
FEIGKAGNPDTQSKVNIIIGPGTEIIAGEGKILTAGGFDSHIHYICPQQIDDALHSGITTMLGGGTGPAHGTLATTCTPGPWHIQRMIQSADGFSMNLAFAGKGNSSLPEGLEEQILAGASALKLHEDWGTTPGAIDNCLNIADKNDVQVMIHTDTLNESGFVENTIKAINKRTIHAFHTEGAGGGHAPDIIKVCGEEYVIPSSTNPTRPYTINTIEEHLDMLMVCHHLDKSIPEDVAFAESRIRRETIAAEDILHDMGAFSIIASDSQAMGRVGEVIIRTWQTAHKNESSKR

SEQ ID NO: 170899 - protein, 100 aa, Unknown
  Bacterial polypetide isolated from the Sargasso Sea
MKLSPREKDKLLISLAAIVARNRKSRGIKLNYPEAIALISDFVVEGAREGRTVADLMEAGAHVIKKDECMSGIPEMIHEVQVEATFPDGTKLVTVHHPIR

SEQ ID NO: 170900 - protein, 218 aa, Unknown
  Bacterial polypetide isolated from the Sargasso Sea
MSKLTRASYADMFGPTTGDKVRLGDTELFIEVEKDFTTYGEEVKFGGGKVIRDGMGQSQLSREKGAVDTVITNALIIDVTGIFKADVGLKSGKIFEIGKAGNPDTQPNVNIIIGPGTEIIAGEGKILTAGGFDSHIHYICPQQIDDALHSGITTMLGGGTGPAHGTLATTCTPGPWHIKKMIQSADGFSMNLAFAGKGNASLPDALQEQILAGACALK

SEQ ID NO: 170901 - protein, 283 aa, Unknown
  Bacterial polypetide isolated from the Sargasso Sea
TLQPALPGEFNIHKMIQVVEEFPLNFGFLCKGNDSQEESLMEQIRAGACGLKLHEDWGTTPATINSALNVADKTDTQVAIHTDTLNECGYVDDTIAAINGRVIHTYHTEGAGGGHAPDIMKIASEPNILPSSTNPTRPFTTNTLEEHLDMMMVCHHLNPSVPEDISFAESRIRAETIAAEDILHDIGAISMMSSDSQAMGRVGETTTRNWQTADKMKKMKGALPEDSQENDNFRIKRYVAKITANPAITHGISEHVGTLENGKMADIIIWMPQFFGIKPKMIV

SEQ ID NO: 170902 - protein, 275 aa, Unknown
  Bacterial polypetide isolated from the Sargasso Sea
TLNEAGFVEDTINAIAGRTIHTFHTEGAGGGHAPDIIKICGEKNVLPSSTNPTRPYTRNTLEEHLDMLMVCHHLDSKIPEDIAFAESRIRRETIAAEDILHDMGAFSIIASDSQAMGRVGEVITRTFQTAHKMKVQRGPLSQDSDRNDNYRVKRYISKVTINPAIAHGIDKHVGSIEKGKIADLALWKPSFFGVKPELVVKGGSIVWSQMGDANASIPTPGPVHGRPMFASFGQSLIKSSFTFLSKNSIDQNIPNKLGLQKKCIAVENTRNINKS

SEQ ID NO: 170903 - protein, 100 aa, Unknown
  Bacterial polypetide isolated from the Sargasso Sea
MHLSPQEKDKLLIVTAALLAERRLNRGLKLNHPEAVAWLSFLVLEGARDGKSVAELMQEGTTWLRQNQVMEGVPELVHEVQIEAVFPDGTKLVTLHDPIR

SEQ ID NO: 170904 - protein, 210 aa, Unknown
  Bacterial polypetide isolated from the Sargasso Sea
IKREAYADMYGPTTGDKVRLADTELFIEVEKDLTTYGEEVKFGGGKVIRDGMGQSQVSRKDGAVDTVITNALIVDVNGIYKADIGLKDGLIYEIGKAGNPDTQPNVNIIIGPGTEIIAGEGKIITAGGFDSHIHFICPQQIDDALHSGITTMLGGGTGPAHGTLATTVTPGPWHIEKMIQSADAFSMNLAFAGKGNSSLPKALEEQVIAG

SEQ ID NO: 170905 - protein, 284 aa, Unknown
  Bacterial polypetide isolated from the Sargasso Sea
IEKDLTTYGEEVKFGGGKVIRDGMGQSQISRKNGAVDTVITNVIILDVNGIFKADIGLKDGLIHSIGKAGNPDTQPNVNIIIGPGTEAIAGEGKIITAGGFDSHIHFICPQQIDDALHSGITTMLGGGTGPAHGTLATTCTPGPWHIKRMIQSADAFSMNLAFAGKGNSSLKDGLIEQIHAGACALKLHEDWGTTPGAIDACLNAANEYDIQVMIHTDTLNESGFVENTIKAIGNRTIHAFHTEGAGGGHAPDIIKLCGEEYVIPSKTNPTRPYTVNTIEEHLD

SEQ ID NO: 170906 - protein, 360 aa, Unknown
  Bacterial polypetide isolated from the Sargasso Sea
TSMGGAAALNFHEDWGSTPAAIDNCLNIADKYDVQVMIHTDTLNESGFVENTINAINKRTIHTFHTEGAGGGHAPDIIKICGEPYVLPSSTNPTRPFTVNTVEEHLDMLMVCHHLDKSIPEDVAFAESRIRRETMAAEDILHDMGAFSIIASDSQAMGRVGEVIIRTWQTAHKMKVQRGRLAEEQGDNDNLRVKRYIAKYTINPSIAHGISSYVGSLEKNKKADIVIWDPAFFGVKPEMVIMGGSIACSQMGDPNASIPTPQPVFTRPMFASFGKSLEKSSYTFVSKESLESGNLNHLEIKKDILPVFNTRSISKKDMILNDVCPKIDVNPETYEVRANGEIITCEPAEELPMAQRYFMY

SEQ ID NO: 170907 - protein, 100 aa, Unknown
  Bacterial polypetide isolated from the Sargasso Sea
MHLSPQEKDKLLIFSAALLAERRLGRGLKLNYPETIAFLSFQVLEGARDGKSVSQLMSEGTTWLSKSQVMEGIPEMVDEVQIEAVFPDGTKLVTIHNPIN

SEQ ID NO: 170908 - protein, 331 aa, Unknown
  Bacterial polypetide isolated from the Sargasso Sea
MAKISRAAYADMYGPTTGDKVRLADTDLFIEVENDLTTYGEEVKFGGGKVIRDGMGQSQISREKGAADTVITNALIVDVNGIYKADVGLKDGKIFEIGKAGNPDTQSKVNIIIGPGTEIIAGEGKILTAGGFDSHIHYICPQQIDDALHSGITTMLGGGTGPAHGTLATTCTPGPWHIQRMIQSADGFSMNLAFAGKGNSSLPEGLEEQILAGASALKLHEDWGTTPGAIDNCLNIADKNDVQVMIHTDTLNESGFVENTIKAINKRTIHAFHTEGAGGGHAPDIIKVCGEEYVIPSSTNPTRPYTVNTIEEHLDMLMVCHHLDKSIPEDV

SEQ ID NO: 170909 - protein, 100 aa, Unknown
  Bacterial polypetide isolated from the Sargasso Sea
MKLTPREKDKLLISLAAIVAKNRLLKGIKLNYPEAIALITDFVVEGAREGKSVAELMEAGAHVIKKKDCMEGIPDMVKEVQVEATFPDGTKLVTVHKPIR

SEQ ID NO: 170910 - protein, 301 aa, Unknown
  Bacterial polypetide isolated from the Sargasso Sea
TIHAFHTEGAGGGHAPDIIKICGESHVLPSSTNPTRPFTKNTIEEHLDMLMVCHHLDKSIPEDVAFAESRIRRETIAAEDILHDMGAFSIIASDSQAMGRVGEVLIRTWQTADKMKKQRGQLADENGNNDNFRVRRYIAKYTINPAIAHGMSSEIGSVEIGKRADLVLWDPAFFGVKPEMVLLGGTIAMAQMGDPNASIPTPQPVYSRPMFGAYGRSVEKSAATFVSKAAFDEGIKNTLGLAKELLPVINTRDIGKADLLLNNATPVMEVNPETYEVRADGELLTCEPAEVLPMAQRYFMF

SEQ ID NO: 170911 - protein, 434 aa, Unknown
  Bacterial polypetide isolated from the Sargasso Sea
MPYRISRQAYAETYGPTTGDRVRLADTDLILEVEKDYTVYGDEVKFGGGKVIRDGMGQSQTPRAEGAVDTVITNALILDWWGIVKADVGLKDGRIVGIGKAGNPDTQEGVTIVVGPGTEAIAGEGHILTAGGIDTHIHFICPQQIETALASGVTTLMGGGTGPATGTNATTCTPGAFHIGRMLQAAEGLPVNLGFFGKGNASTPEALEEQVRAGACGLKLHEDWGTTPATIDACLSVADRMDVQVCIHTDTLNEAGFVEDTIAAIKGRTIHTFHTEGAGGGHAPDIIKICGKANVLPSSTNPTRPYTRNTLEEHLDMLMVCHHLDPKIPEDVAFAESRIRRETIAAEDILHDLGAFSIIASDSQAMGRVGEVITRTFQTAHKMKVQRGALPEDSNRNDNHRLKRYIAKVTINPALAHGISSEVGSIETGKLADL

SEQ ID NO: 170912 - protein, 328 aa, Unknown
  Bacterial polypetide isolated from the Sargasso Sea
DVQVAIHTDTLNESGFVENTLAAFKGRAIHTYHTEGAGGGHAPDIIKACGASNVLPSSTNPTRPYTVNTIDEHLDMLMVCHHLDPKIPEDVAFAESRIRRETIAAEDILHDLGAFSMIASDSQAMGRIGEVICRTWQTAHKMKVQRGPLSPDPAHHDNFRAKRYVAKYTINPAITHGISHEVGSIEIGKLADIVLWKPAFFGAKPSMIIKGGMIAAAPMGDPNASIPTPQPVHYRPMFGALGGARSETCVSFVSKAANENGMGEKLRLNKRLVSVHDTRGVTKKQLIHNSYLPKIEVDSQTYEVRADGDLLTCEPAKELPLAQRYFLF

SEQ ID NO: 170913 - protein, 411 aa, Unknown
  Bacterial polypetide isolated from the Sargasso Sea
MAIEISRFDYAGMYGPTVGDKVRLADTELFIEVEKDLTTYGEEVKFGGGKVIRDGMGQSQVTRANGAPDTVITNALILDYTGIFKADVALRDGKIEAIGKAGNPDTQPNIDIIIGPGTEIIAGEGKILTAGGFDSHIHYICPQQIDDALHSGVTTMLGGGTGPAHGTLATTCTPGPWHIGRMLQSADGLPMNLAFAGKGNASLPGALEEQVLGGACALKLHEDWGTTPQAIDCCLGVADDLDVQVMIHTDTLNESGFVERTVDSMKGRTIHAFHTEGAGGGHAPDIIKICGEQFVLPSSTNPTRPFTKNTVEEHLDMLMVCHHLDKSIPEDIAFAESRIRRETIAAEDILHDMGAFSIIASDSQAMGRVGEVIIRTWQTADKMKKQRGALSEETGDNDNLRARRYIAKYTI

SEQ ID NO: 170914 - protein, 153 aa, Unknown
  Bacterial polypetide isolated from the Sargasso Sea
MKRISRKSYADMYGPTTGDQVRLADTELFIEVEQDLTTYGEEVKFGGGKVIRDGMGQSQYSRLKGAVDTVITNSLLVDVNGIFKADIGIKDGLISGIGKAGNPDTQPNVSIIIGPGTEIIAGEGKIITSGGFDSHIHFICPQQIDDALHSGIT

SEQ ID NO: 170915 - protein, 218 aa, Unknown
  Bacterial polypetide isolated from the Sargasso Sea
MEDWGTTPAAIDNCLNVADEHDIQVMIHTDTLNESGFVESTIKAINGRTIHAFHTEGAGGGHAPDIIKVCGEEYVIPSSTNPTRPYTVNTVEEHLDMLMVCHHLDKSIPEDVAFAESRIRKETIAAEDILHDMGAFSIIASDSQAMGRVGEVIIRTWQTAHKMKVQRGQLKEEQGDNDNLRVKRYIAKYTINPAIAHGISDHIGSIEKNKRADIVIWD

SEQ ID NO: 170916 - protein, 231 aa, Unknown
  Bacterial polypetide isolated from the Sargasso Sea
MKKINRDSYADMYGPTTGDKIRLADTELFIEVEKDLTTYGEEVKFGGGKVIRDGMGQSQVSRQDGAVDTVITNALIVDVKGIYKADIGLKDGLINEIGKAGNPDTQPNVNIVIGPGTEIIAGEGKIITAGGFDSHIHFICPQQIDDALHSGITTMLGGGTGPAHGTLATTVTPGPWHMERMIQSADAFSMNLAFAGKGNSSLPKALEEQVIAGASSLKLHGRLGHNSCSYR

SEQ ID NO: 170917 - protein, 402 aa, Unknown
  Bacterial polypetide isolated from the Sargasso Sea
MKKINRDAYADMYGPTTGDKIRLADTELFVEVEKDLTTYGEEVKFGGGKVIRDGMGQSQVSRKEGAVDTVITNALIVDVKGIYKADIGLKEGLINEIGKAGNPDTQPNVNIIIGPGTEIIAGEGKIITAGGFDSHIHFICPQQIDDALHSGITTMLGGGTGPAHGTLATTVTPGSWHIEKMIQSADAFSMNLAFAGKGNSSLPQALEEQVIAGASSLKLHEDWGTTPAAIDNCLNVADKHDIQVMIHTDTLNESGFVESTIKAINGRTIHAFHTEGAGGGHAPDIIKVCGEEYVIPSSTNPTRPYTVNTVEEHLDMLMVCHHLDKSIPEDVAFAESRIRKETIAAEDILHDMGAFSIIASDSQAMGRVGEVIIRTWQTAHKMKVQRGKLKEEKGDNDNLRVK

SEQ ID NO: 170918 - protein, 76 aa, Unknown
  Bacterial polypetide isolated from the Sargasso Sea
ERGVKLITPEAIALISDFVIEGARDGKMVSELMESGAHVVKKEDCMDGIPDMIPEVQVEATFPDGTKLVTVHKPIR

SEQ ID NO: 170919 - protein, 568 aa, Unknown
  Bacterial polypetide isolated from the Sargasso Sea
MKKIKRDAYADMYGPTTGDKIRLADTELFIEVEKDLTTYGEEVKFGGGKVIRDGMGQSQVSRKDGAVDTVITNALIVDINGIYKADIGLKDGLINEIGKAGNPDTQPNVDIIIGPGTEIIAGEGKIITSGGFDSHIHFICPQQIDDALHSGITTMLGGGTGPAHGTLATTVTPGPWHIEKMIQSADAFSMNLAFAGKGNSSLPKALIEQVTAGASSLKLHEDWGTTPSAIDNCLNVADEHDIQVMIHTDTLNESGFVESTIQAINGRTIHAFHTEGAGGGHAPDIIKVCGEQYVIPSSTNPTRPYTVNTVEEHLDMLMVCHHLDKSIPEDVAFAESRIRKETIAAEDILHDMGAFSIIASDSQAMGRVGEVIIRTWQTAHKMKVQRGQLKEEKGDNDNLRVKRYIAKYTINPAIAHGISDHIGSIEKNKRADIVIWDTAFFGVKPEMVLQGGSIACSQMGDPNASIPTPQPVYSRPMFSSFGKSLEKSTATFVSKASLYKDSFKNSGISKSLLPVKNIRNISKKDMILNNYCPNIEVNPETYEVLADGELITCEPAKTLPLAQRYFIY

SEQ ID NO: 170920 - protein, 100 aa, Unknown
  Bacterial polypetide isolated from the Sargasso Sea
MKLTPREKDKLMISMAANVARKRLERGVKLNYPEVIALITDFVIEGARDGKMVSELMETGAHVVKKEDCMDGIPDMIPEVQVEATFPDGTKLVTVHKPIR

SEQ ID NO: 170921 - protein, 100 aa, Unknown
  Bacterial polypetide isolated from the Sargasso Sea
MKLTPREKDKLMVSMAANVARKRLERGVKLNYPEAIALITDFVIEGARDGKMVSELMETGAHVVKKEDCMDGIPDMIPEVQVEATFPDGTKLVTVHKPIR

SEQ ID NO: 170922 - protein, 148 aa, Unknown
  Bacterial polypetide isolated from the Sargasso Sea
MKKIKREAYADMYGPTTGDKVRLADTELFVEVEKDLTTYGEEVKFGGGKVIRDGMGQSQVSRKDGAVDTVITNALIVDVNGIYKADIGLKDGLINEIGKAGNPDTQPNVNIIIGPGTEIIAGEGKIITAGGFDSHIHFICPQQIDDAL

SEQ ID NO: 170923 - protein, 214 aa, Unknown
  Bacterial polypetide isolated from the Sargasso Sea
IFIIASDSQAMGRVGEVIIRTWQTAHKMKVQRGSLPEEKGDNDNFRVKRYLAKYTINPAIAHGISKHIGSIEKNKRADLVLWDPAFFGAKPEMILIGGSIACAQMGDPNASIPTPQPVYTRPMFSSFGTSLEKSSVIFTSKLALEKNSFKDASIRKDLLPVENTRTISKKDMILNNKCPKIEVNPETYEVKADGEIITCEPAKELPLAQRYFMF

SEQ ID NO: 170924 - protein, 568 aa, Unknown
  Bacterial polypetide isolated from the Sargasso Sea
MVKISRASYADMYGPTTGDKVRLADTELFIEVENDLTTYGEEVKFGGGKVIRDGMGQSQISREKGALDTVITNALIADVNGIYKADVGLKDGKIFDIGKAGNPDTQSKVNIIIGPGTEIIAGEGKILTAGGFDSHIHYICPQQIDDALHSGITTMLGGGTGPAHGTLATTCTPGPWHIKRMIQSADGFSMNLAFAGKGNSSLPEGLEEQILAGASALKLHEDWGTTPGAIDNCLNIADKNDVQVMIHTDTLNESGFVENTIKAINKRTIHAFHTEGAGGGHAPDIIKVCGEEYVIPSSTNPTRPYTVNTIEEHLDMLMVCHHLDKSIPEDVAFAESRIRRETIAAEDILHDMGAFSIIASDSQAMGRVGEVIIRTWQTAHKMKVQRGSLPEEKGDNDNFRVKRYLAKYTINPAIAHGISKYIGSIEKGKRADLVLWDPAFFGAKPEIILIGGSIACAQMGDPNASIPTPQPVYTRPMFSSFGTSLEKSSVIFTSKLALEKNSLKDESIRKDLIAVENTRSISKKDMVLNNKCPKIEVNPETYEVKADGKIITCEPAKELPLAQRYFMY

SEQ ID NO: 170925 - protein, 483 aa, Unknown
  Bacterial polypetide isolated from the Sargasso Sea
MPYRISRQAYAETYGPTTGDRVRLADTDLILEVEKDYTVYGDEVKFGGGKVIRDGMGQSQTPRTEGAVDTVITNALILDWWGIVKADVGLKDGRIVGIGKAGNPDTQQGVTIVVGPGTEAIAGEGHILTAGGIDTHIHFICPQQIETALASGVTTLMGGGTGPATGTNATTCTPGAFHIGRMLQAAEGLPVNLGFFGKGNASTPEALEEQVRAGACGLKLHEDWGTTPATIDACLSVADRMDVQVCIHTDTLNEAGFVEDTIAAIKGRTIHTFHTEGAGGGHAPDIIKICGEANVLPSSTNPTRPYTRNTLEEHLDMLMVCHHLDPKIPEDVAFAESRIRRETIAAEDILHDLGAFSIIASDSQAMGRVGEVITRTFQTAHKMKVQRGALPEDSARNDNHRLKRYIAKVTINPALAHGISSEVGSIETGKLADLVLWKPGFFGIRPELVVKGGSIVWAQMGDANASIPTPGPVHGRPMFGAFG

SEQ ID NO: 170926 - protein, 100 aa, Unknown
  Bacterial polypetide isolated from the Sargasso Sea
MHLSPQEKDKLLIVTAALLAERRLNRGLKLNHPEAVAWLSFLVLEGARDGKSVAELMQEGTTWLRQDQVMEGVPELVHEVQIEAVFPDGTKLVTLHDPIR

SEQ ID NO: 170927 - protein, 513 aa, Unknown
  Bacterial polypetide isolated from the Sargasso Sea
MKKIPRQSYAAMYGPTTGDKVRLADTELFIEVEKDLTVYGEEVKFGGGKVIRDGMGQSQVSRSDGAVDTVITNALILDVTGIFKADIGLKNGNIDHIGKAGNPDTQPGVDIIIGPGTEVIAGEGKIVTAGGFDSHIHFICPQQIDEALHSGITTMLGGGTGPAHGTLATTCTPGPWHIGRMLQSSDAFSMNLAYAGKGNSSLPSGLEEQVLGGAAALKLHEDWGSTPGAIDNCLNVADKFDVQVMIHTDTLNESGFVENTINAINKRTIHTFHTEGAGGGHAPDIIKICGEPYVLPSSTNPTRPFTVNTVEEHLDMLMVCHHLDKSIPEDVAFAESRIRRETMAAEDILHDMGAFSIIASDSQAMGRVGEVIIRTWQTAHKMKVQRGRLSEEQGDNDNLRVKRYLAKYTINPSIAHGMSSYVGSLEKNKRADIVIWDPAFFGVKPEIVIMGGSIACAQMGDPNASIPTPQPVYTRPMFGSYGRSLENSSVTFVSKSSLEAGSLNHLNIQKSML

SEQ ID NO: 170928 - protein, 382 aa, Unknown
  Bacterial polypetide isolated from the Sargasso Sea
MVSGKLDEKRDDAVKKLHENGFKNSLEDTTEEQGSLEIPRNRYVELFGPSKGDKVRLADTDLVLEVEEDLIKHGDELVFGGGKSARDGLGQASGVLREQSADLVITNAVIVDAKLGIIKADIGIKDGKILGVGNAGNPDVMDDVDIIVSSNTEIISGEHTICTAGTIDSHIHFISPQQAIDAICNGTTTMIGGGTGPADGTNATTCTPGEFNIHKMIQAVEEFPLNFGFLCKGNDSQEESLMEQVRAGACGLKLHEDWGTTPATINSALNVADKTDTQVAIHTDTLNECGYVDDTIAAINGRVIHTYHTEGAGGGHAPDIMKIASEPNILPSSTNPTRPFTTNTLEEHLDMMMVCHHLNPSVPEDISFAESRIRAETIAAED

SEQ ID NO: 170929 - protein, 569 aa, Unknown
  Bacterial polypetide isolated from the Sargasso Sea
MPYRIDRRTYAETYGPTTGDRLRLADTELILEVEKDYTIYGDEVKFGGGKVIRDGMGQGQTSRADGAVDTVITNALILDWWGIVKADVGLKDGRICAIGKAGNPDISDGVTIPIGPGTEAIAGEGHILTAGGIDTHIHFICPQQIETAIASGVTTLLGGGTGPATGTNATTCTPGAFHISRMLQAADGLPVNLGFFGKGNASTPEALDEQVLAGACGLKLHEDWGTTPAAIDCCLSVADRFDVQVCIHTDTLNEAGFVEDTIAAIKGRTIHTFHTEGAGGGHAPDIIRICGETNVLPSSTNPTRPYTRNTLEEHLDMLMVCHHLDSAIPEDVAFAESRIRRETIAAEDILHDLGAFSIIASDSQAMGRVGEVITRTFQTAHKMKLQRGVLAGDNSRNDNTRLKRYIAKVTINPAIAHGLDHQVGSVEVGKLADLVLWKPGFFGVKPELVLKGGSIAWAQMGDANASIPTPGPVHGRPMFASFGGAMAPSCLTFLSQAGLDAGVPQALGLRTPCVPVQNTRGIGKAQMKNNIALPKVEVDPETYEVFADGELLTCEPAEVLPMAQRYFLL

SEQ ID NO: 170930 - protein, 326 aa, Unknown
  Bacterial polypetide isolated from the Sargasso Sea
MAKISRAAYADMYGPTTGDKVRLADTDLVIEVENDLTTYGEEVKFGGGKVIRDGMGQSQISREKGAADTVITNALIVDVNGIYKADVGLKDGKIFEIGKAGNPDTQSKVNIIIGPGTEIIAGEGKILTAGGFDSHIHYICPQQIDDALHSGITTMLGGGTGPAHGTLATTCTPGPWHIQRMIQSADGFSMNLAFAGKGNSSLPEGLEEQILAGASALKLHEDWGTTPGAIDNCLNIADKNDVQVMIHTDTLNESGFVENTIKAINKRTIHAFHTEGAGGGHAPDIIKVCGEEYVIPSSTNPTRPYTVNTIEEHLDMLMVCHHLDKS

SEQ ID NO: 170931 - protein, 100 aa, Unknown
  Bacterial polypetide isolated from the Sargasso Sea
MHLSPQEKDKLLIFSAALLAERRLSRGLKLNYPETIAFLSFQVLEGARDGKSVSQLMSEGTSWLSKSQVMEGIPEMVDEVQIEAVFPDGTKLVTIHNPIN

SEQ ID NO: 170932 - protein, 100 aa, Unknown
  Bacterial polypetide isolated from the Sargasso Sea
MKLTPREKDKLLISLAAIVAKNRLSKGIKLNYPEAIALITDFVVEGAREGKSVAELMEAGAHVIKKKDCMEGIPDMVKEVQVEATFPDGTKLVTVHKPIR

SEQ ID NO: 170933 - protein, 568 aa, Unknown
  Bacterial polypetide isolated from the Sargasso Sea
MKKIPRQSYAAMYGPTTGDKIRLADTELFVEVEKDLTVYGEEVKFGGGKVIRDGMGQSQVSRSDGAVDTVITNALILDVTGIYKADIGLKNGNIDHIGKAGNPDTQPGVDIIIGPGTEVIAGEGKIVTAGGFDSHIHFICPQQIDDALHSGITTMLGGGTGPAHGTLATTCTPGPWHIGRMLQSSDAFSMNLAYAGKGNSSLPSGLEEQVLGGAAALKLHEDWGSTPGAIDNCLNVADEFDVQVMIHTDTLNESGFVENTINAINKRTIHTFHTEGAGGGHAPDIIKICGEPYVLPSSTNPTRPFTVNTVEEHLDMLMVCHHLDKSIPEDVAFAESRIRRETMAAEDILHDMGAFSIIASDSQAMGRVGEVIIRTWQTAHKMKVQRGRLSEEQGDNDNIRVKRYIAKYTINPSIAHGISSYVGSLEKNKRADIVIWDPAFFGVKPEIIIMGGSIACAQMGDPNASIPTPQPVYTRPMFGSYGRSLENSSVTFVSKSSLEAGSLNHLNIQKSMLPVSNTRSISKKDMVLNDVCPTIDVNPETYEVRANGEIITCEPAEELPMAQRYFMY

SEQ ID NO: 170934 - protein, 247 aa, Unknown
  Bacterial polypetide isolated from the Sargasso Sea
MVKISRAAYADMYGPTTGDKVRLADTDLFIEVENDLTTYGEEVKFGGGKVIRDGMGQSQTSREKGAADTVITNALVVDINGIYKADVGLKDGKIFEIGKAGNPDTQSKVNIIIGPGTEVIAGEGKILTAGGFDSHIHYICPQQIDDALHSGITTMLGGGTGPAHGTLATTCTPGPWHIQRMIQSADGFSMNLAFAGKGNSSLPDGLEEQILAGASALKLHEDWGTTPGAIDNCLNIANKYDVQVMIH

SEQ ID NO: 170935 - protein, 100 aa, Unknown
  Bacterial polypetide isolated from the Sargasso Sea
MKLTPREKDKLLISLAAIVAKNRLSKGIKLNYPEAIALITDFVVEGAREGKSVAELMEAGAHVIKKKDCMEGIPEMIKEVQVEATFPDGTKLVTVHKPIR

SEQ ID NO: 170936 - protein, 100 aa, Unknown
  Bacterial polypetide isolated from the Sargasso Sea
MYLSPREKDKLLISMAADVARKRLNRGLKLNLPETIAIISDFVQEGARDGESVANLMSKGAKVLSKNDVMEGISEMLPEIQVEATFPDGSKLVTVHEPIR

SEQ ID NO: 170937 - protein, 230 aa, Unknown
  Bacterial polypetide isolated from the Sargasso Sea
MSYKIDRKTYAQTYGPTTGDRVRLADTELFIEVEKDLTTYGDEVKFGGGKVIRDGMGQSQVRRADGAVDTVITNALIVDWWGIIKADVGIKDGMIFEIGKAGNPDIQDNVDIVIGASTEVIAGEGHILTAGSIDTHIHFICPQQIETALASGITTMLGGGTGPATGTNATTCTPGSFHISRMLQSAEAFPMNLGFFGKGNSTNESNLIDQVEAGACGLKLHEDWGTTPST

SEQ ID NO: 170938 - protein, 568 aa, Unknown
  Bacterial polypetide isolated from the Sargasso Sea
MTLRLSRRAYAEMFGPTTGDRVRLADTELLIEIERDYTTYGEEVKFGGGKVIRDGMGQSQRVAADVPDTIITNAVILDHWGIVKADIAIKHGRIAAIGKAGNPDIQPGVTIAIGAATEVIAGEGLIVTAGGIDTHIHFISPQQIDEALASGVTTMLGGGTGPATGTNATTCTPGPWHMERMLQAADGWPINLGFLGKGNASLPQPLVEQIAAGAIGLKLHEDWGTTPAAIDNCLSVADDTDTQVAIHTDTLNEGGFVESTVAAFKGRTIHTYHTEGAGGGHAPDILKVCGEMNVLPSSTNPTRPYTINTLDEHLDMLMVCHHLDPSIAEDLAFAESRIRRETIAAEDILHDLGALSMLSSDSQAMGRVGEVIIRTWQTAHKMKVQRGALPEDSTRNDNFRAKRYVAKYTINPALTHGIAHEVGSIEPGKWADLVLWEPAFFGIKPSMILKGGMIAMAQMGDPNASIPTPQPVHYREMFATRGGALARTSLTFVSQMAADAGIAERYGLAKRIVPVRNCRNVTKADMIHNAWRPSISVDPETYDVIADGQLLTCEPATVLPMAQRYFLF

SEQ ID NO: 170939 - protein, 100 aa, Unknown
  Bacterial polypetide isolated from the Sargasso Sea
MKLTPREKDKLLIFTAALLAERRRARGLKLNYPEAVAFITAALMEAARDGKTVAEVMHYGTTLLTRDDVMDGVPEMIPDIQVEATFPDGTKLVTVHHPIP

SEQ ID NO: 170940 - protein, 568 aa, Unknown
  Bacterial polypetide isolated from the Sargasso Sea
MAKISRAAYADMYGPTTGDKVRLADTDLFIEVENDLTTYGEEVKFGGGKVIRDGMGQSQISRKKGAADTVITNALIVDVNGIYKADVGLKDGKIFEIGKAGNPDTQSKVNIIIGPGTEIIAGEGKILTAGGFDSHIHYICPQQIDDALHSGITTMLGGGTGPAHGTLATTCTPGPWHIQRMIQSADGFSMNLAFAGKGNSSLPEGLEEQILAGASALKLHEDWGTTPGAIDNCLNIADKNDVQVMIHTDTLNESGFVENTIKAINKRTIHAFHTEGAGGGHAPDIIKVCGEEYVIPSSTNPTRPYTVNTIEEHLDMLMVCHHLDKSIPEDVAFAESRIRRETIAAEDILHDMGAFSIIASDSQAMGRVGEVIIRTWQTAHKMKVQRGSLPEEKGNNDNYRVKRYLAKYTINPAIAHGISKHIGSIEKNKRADLVLWDPAFFGAKPEMILIGGSIACAQMGDPNASIPTPQPVYTRPMFSSFGTSLEKSSVIFTSKLALEKNSLKDASIRKDLLPVENTRAISKKDMILNNKCPKIGVNPETYEVKADGEIITCEPAKELPLAQRYFMF

SEQ ID NO: 170941 - protein, 45 aa, Unknown
  Bacterial polypetide isolated from the Sargasso Sea
MMEAGAHVIKKKDCMEGIPDMVKEVQVEATFPDGTKLVTVHKPIR

SEQ ID NO: 170942 - protein, 100 aa, Unknown
  Bacterial polypetide isolated from the Sargasso Sea
MKLTPREKDKLLISLAAIVAKNRLSKGIKLNYPEAIALITDFVVEGAREGKSVAELMEAGAHVIRKKDCMEGIPDMVKEVQVEATFPDGTKLVTVHKPIR

SEQ ID NO: 170943 - protein, 102 aa, Unknown
  Bacterial polypetide isolated from the Sargasso Sea
MKPGEIITKQNSDINLNDKSQSIILKVSNSGDRPIQVGSHYHFAETNEYLKFDREKSKGMRLDIPSGTAVRFEPGQSKDVELIPITGNRKIFGFNKKVMGQL

SEQ ID NO: 170944 - protein, 99 aa, Unknown
  Bacterial polypetide isolated from the Sargasso Sea
MQLSPREKDKLLIAMAAEVARKRKSRGVKLNYPEAISLICDAVVEGARDGKSVAEMMEYGATIVKSTDCMDGVPDMIPEVQVEATFPDGTKLVTVHNPI

SEQ ID NO: 170945 - protein, 100 aa, Unknown; identical to SEQ ID NO: 170926
  Bacterial polypetide isolated from the Sargasso Sea

SEQ ID NO: 170946 - protein, 100 aa, Unknown
  Bacterial polypetide isolated from the Sargasso Sea
MHLSPQEKDKLLVFSAALLAERRLSRGLKLNYPETIAFLSFQVLEGARDGKSVSQLMSEGTTWLSKSQVMEGIPEMVDEVQIEAVFPDGTKLVTIHNPIN

SEQ ID NO: 170947 - protein, 458 aa, Unknown
  Bacterial polypetide isolated from the Sargasso Sea
IIIGPGTEIIAGEGKIITAGGFDSHIHFICPQQIDDALHSGITTMLGGGTGPAHGTLATTVTPGPWHIEKMIQSADAFSMNLAFAGKGNSSLPKALEEQVIAGACSLKLHEDWGTTPAAIDNCLNVADNHDVQVMIHTDTLNESGFVESTIKAINGRTIHAFHTEGAGGGHAPDIIKVCGEEYVIPSSTNPTRPFTVNTIEEHLDMLMVCHHLDKSIPEDVAFAESRIRKETIAAEDILHDMGAFSIIASDSQAMGRVGEVIIRTWQTAHKMKVQRGQLKEEQGDNDNVRVKRYIAKYTINPAIAHGISDHIGTIEKNKRADIVIWDTAFFGVKPEMVLQGGSIACAQMGDPNASIPTPQPVYSRPMFSSFGKSLEKSTVTFVSKVSLDKDSFKNSGVNKSLLPVKNIRKISKKDMILNDYCPKIKVNPETYEVLADGELITCDPAKTLPLAQRYFMY

SEQ ID NO: 170948 - protein, 102 aa, Unknown
  Bacterial polypetide isolated from the Sargasso Sea
MKPGEIITKQKSDINLNDNRNSIILKVSNSGDRPIQVGSHYHFAETNEFLKFDREKSKGMRLDIPSGTAVRFEPGQSKDVELIPITGNRKIFGFNKKIMGQL

SEQ ID NO: 170949 - protein, 254 aa, Unknown
  Bacterial polypetide isolated from the Sargasso Sea
DMLMVCHHLDKSIPEDVAFAESRIRKETIAAEDILHDMGAFSIIASDSQAMGRVGEVIIRTWQTAHKMKVQRGQLKEENGDNDNVRVKRYIAKYTINPAIAHGISENIGTIEKNKRADIVIWDPAFFGVKPEIILMGGSIACAQMGDPNASIPTPQPVYSRPMFSSFGKSLEKSSVTFVSQISIDRDMHKNSGINKLLLPVKNIRNVSKKDMILNNYCPQIEVNPETYEVKADGELITCEPAETLPLAQRYFLY

SEQ ID NO: 170950 - protein, 362 aa, Unknown
  Bacterial polypetide isolated from the Sargasso Sea
MAKISRAAYADMYGPTTGDKVRLADTELFIEVENDLTTYGEEVKFGGGKVIRDGMGQSQISREKGAADTVITNALIVDVNGIYKADVGLKDGKIFEIGKAGNPDTQSKVNIIIGPGTEIIAGEGKILTAGGFDSHIHYICPQQIDDALHSGITTMLGGGTGPAHGTLATTCTPGPWHIKRMIQSADGFSMNLAFAGKGNSSLPEGLEEQILAGASALKLHEDWGTTPGAIDNCLNIADKNDVQVMIHTDTLNESGFVENTIKAINKRTIHAFHTEGAGGGHAPDIIKVCGEEYVIPSSTNPTRPYTINTIEEHLDMLMVCHHLDKSIPEDVAFAESRIRRETIAAEDILHDMGAFSIIASDS

SEQ ID NO: 170951 - protein, 365 aa, Unknown
  Bacterial polypetide isolated from the Sargasso Sea
SHIHYICPQQIDDALHSGLTTMLGGGTGPAHGTLATTCTPGSWHIGKMIQSADAFSMNLAFAGKGNSSKPEGLIEQVNAGACALKLHEDWGTTPGAIDNCLNVADKMDVQVMIHTDTLNESGFVENTIKAINNRTIHAFHTEGAGGGHAPDIIKVCGNENVIPSSTNPTRPYTINTLEEHLDMLMVCHHLDKSIPEDVAFAESRIRKETIAAEDILHDLGAFSIIASDSQAMGRVGEVIIRTWQTAHKMKVQRGRLQEEKGDNDNVRVKRYVAKYTINPAITHGLSKHIGSITEGKRADIVIWDPAFFGVKPEIVMLGGSIACAQMGDPNASIPTPQPVYTRPMFSSYGRSLETSSITFVSKDSI

SEQ ID NO: 170952 - protein, 569 aa, Unknown
  Bacterial polypetide isolated from the Sargasso Sea
MVYKIERSSYATMFGPTKGDKVRLADTDLIIEVEDDKTVYGEEVKFGGGKVIRDGMGQSQISREAGAVDTIITNALIVDVTGIYKADVGLKDGKIEGIGKAGNPDVQPGVDIIIGPGTEAIAGEGRILTAGGIDAHIHWISPQQIDDALYSGVTTMLGGGTGPAEGTNATTCTPGAWHISRMLQAAEGLPMNLGFFGKGNASQPEELEAQIGAGACGLKLHEDWGTTPSAIDTCLSIADKMDVQVAIHTDTLNESGFVENTVNAFKGRTIHAFHTEGAGGGHAPDIIKVCGEANVLPSSTNPTRPFTVNTVDEHLDMLMVCHHLDARIPEDVAFAESRIRRETIAAEDILHDLGAFSMIASDSQAMGRVGEVIIRTWQTADKMKKQRGTLSEEKGDNDNFRVRRYIAKYSINPALTHGIADYVGSVEVGKLADLVLWKPMFFGVKPDLVLKSGTIAAAAMGDPNASIPTPQPVHYRPMFGSFGKSLTESSISFVSQAAMDAGIHEALALEKQVLAVNGTRSVKKRDMMLNDYQPKMEVDPETYEVRADGELLLCEPAEEVSMAQRYFLF

SEQ ID NO: 170953 - protein, 103 aa, Unknown
  Bacterial polypetide isolated from the Sargasso Sea
MIPGELFIKSGTIDLNEGRDVVTLKITNTGDRPIQVGSHYHFYETNSALDFDREATRGFRLDIPAGTAVRFEPGQSREVDLIAYQGNREVYGFNGKINGSLEG

SEQ ID NO: 170954 - protein, 44 aa, Unknown
  Bacterial polypetide isolated from the Sargasso Sea
MSEGAGVLRRDEVMDGVAEMIHDIQVEATFPDGTKLVTVHEPIR

SEQ ID NO: 170955 - protein, 100 aa, Unknown
  Bacterial polypetide isolated from the Sargasso Sea
MFLTPREIDKLQIFTAAQVALRRKERGLKLNHPESVALIADHILEGARDGKSVSEIMSSGKNVLRKDDVLPGVPEIIHTIQVEATFEDGTKLVTIHDPIV

SEQ ID NO: 170956 - protein, 399 aa, Unknown
  Bacterial polypetide isolated from the Sargasso Sea
KISRQAYADMFGPTVGDKVRLADTDLWIEVEKDFTTYGEEVKFGGGKVIRDGMGQGQLCAADVVDTLITNALIIDHWGIVKADVGLKDGRIAAIGKAGNPDIQPDVTIAIGAGTEVIAGEGMILTAGGIDTHIHFICPQQIEEALMSGVTTMIGGGTGPATGTNATTCTSGPWHMARMLQAADAFPMNLGFTGKGNASLPEPLIEQVKAGAIGLKLHEDWGTTPAAIDNCLSVADQYDVQVAIHTDTLNESGFVETTLGAFKGRTIHTYHTEGAGGGHAPDIIKACGFPNVLPSSTNPTRPFTRNTIDEHLDMLMVCHHLDPSIAEDVAFAESRIRRETIAAEDILHDLGAFSMISSDSQAMGRVGEVITRTWQTARQMKQQRGPFAEDAPGNDNFRAK

SEQ ID NO: 170957 - protein, 103 aa, Unknown
  Bacterial polypetide isolated from the Sargasso Sea
LYDSRRNITSESDIILNKDLVSLTMKVSNTGDRPIQVGSHYHFAEVNESLEFDRKKSLGMRLNISSGTAVRFEPGQTRDVELIEMQGLKKLFGFNKKVMGKIR

SEQ ID NO: 170958 - protein, 214 aa, Unknown
  Bacterial polypetide isolated from the Sargasso Sea
MPKISRSSYADMYGPTTGDKVRLADTELFIEVEKDLTTYGEEVKFGGGKVIRDGMGQSQISRKNGAVDTVITNALIVDVNGIYKADIGLKDGVIQCIGKAGNPDTQSNVNIVIGPGTEAIAGEGKIITAGGFDSHIHFICPQQIDDALHSGLTTMLGGGTGPAHGTLATTCTPGPWHIKRMMQSADAFSVNLAFAGKGNSSLPEGLEEQVLGGA

SEQ ID NO: 170959 - protein, 100 aa, Unknown
  Bacterial polypetide isolated from the Sargasso Sea
MKLTPREKDKLMISMAAIVARKRLDRGIKLNYPEAIALITDFVIEGARDGKMVSKLMEAGANVVKKENCMDGVADMISEVQVEATFPDGTKLVTVHKPIR

SEQ ID NO: 170960 - protein, 89 aa, Unknown
  Bacterial polypetide isolated from the Sargasso Sea
MKPGEIITKGNNELKLNEDRTSIVMKVSNKGDRPIQVGSHYHFAETNEFLEFDRDTSRGMRLDIPSGTAVRFEPGQTKDVELIAISGER

SEQ ID NO: 170961 - protein, 419 aa, Unknown
  Bacterial polypetide isolated from the Sargasso Sea
MGTTTMIGGGTGPADGTNATTCTPGEFNIHKMIQAVEEFPLNFGFLCKGNDSREESLIEQIKAGACGLKLHEDWGTTPATINSALNVADKTDTQVAIHTDTLNECGYVDDTIAAINGRVIHTYHTEGAGGGHAPDIMKIASEPNILPSSTNPTRPYTTNTLEEHLDMMMVCHHLNPSVPEDISFAESRIRAETIAAEDILHDIGAISMMSSDSQAMGRVGETTTRNWQTADKMKKMKGPLPEDSDENDNFRIKRYVAKITANPAITHGISEHVGTLENGKMADIIIWTPQFFGIKPKMIVKGGFIAYALMGDPNASIPTTEPVYYRPMFGALGKTKQSTSVTFTSQLALDDGLQDKLNIDKKLVAVKNCRNIGKKDMVHNDGTPKIEIDPETYEVRVDGEVATVDPATSVSLGRLYSLF

SEQ ID NO: 170962 - protein, 100 aa, Unknown
  Bacterial polypetide isolated from the Sargasso Sea
MKLSPRERDKLLISMAAMVAQNRKERGVKLNYPEAIALISDFVVEGARDGRPVSELMETGAHVVKRTDCMDGIPEIIHDVQVEATFPDGTKLVTVHNPIR

SEQ ID NO: 170963 - protein, 568 aa, Unknown
  Bacterial polypetide isolated from the Sargasso Sea
MKKINRDAYADMYGPTTGDKIRLADTELFIEVEKDLTTYGEEVKFGGGKVIRDGMGQSQVSRKNGAVDTVITNALIVDVNGIYKADIGLKDGKINEIGKAGNPDTQPNVNIIIGPGTEIIAGEGKIITAGGFDSHIHFICPQQIDDALHSGITTMLGGGTGPAHGTLATTVTPGPWHLEKMIQSADAFSMNLAFAGKGNSSLPEALEEQVIAGASSLKLHEDWGTTPAAIDNCLNIADKYDVQVMIHTDTLNESGFVESTIKAINERTIHAFHTEGAGGGHAPDIIKICGESYVIPSSTNPTRPYTVNTVEEHLDMLMVCHHLDKSIPEDVAFAESRIRKETIAAEDILHDMGAFSIIASDSQAMGRVGEVIIRTWQTAHKMKVQRGQLKEETGNNDNERVKRYIAKYTINPAIAHGIADHIGSITKNKRADLVLWDRAFFGVKPEMVLMGGSIACAQMGDPNASIPTPQPVYSRPMFASFGKSLEKSSNVFVSQISLEKETFINSGIMKELLPVKNIRNISKKDMVHNDYCPNIEVNPETYEVKADGEIITCEPAESLPLAQRYFMY

SEQ ID NO: 170964 - protein, 100 aa, Unknown
  Bacterial polypetide isolated from the Sargasso Sea
MKLTPREKDKLMVSMAAIVARKRLERGIKLNYPEAIALITDFVIEGARDGKKVSELMESGAHVVTIKDCMEGIADMIPEVQVEATFPDGTKLVTVHKPIR

SEQ ID NO: 170965 - protein, 102 aa, Unknown
  Bacterial polypetide isolated from the Sargasso Sea
MKPGEIITTNNEITLNKDHNCITIKVANTGDRPIQVGSHYHFAETNIALDFDRKISKGMRLDIPSGTAVRFEPGQIKNVDLIPFSGERKIFGFNKKIMGKLK

SEQ ID NO: 170966 - protein, 387 aa, Unknown
  Bacterial polypetide isolated from the Sargasso Sea
MRAIEDQPMNFGFLGKGNSSRRDPLVEQIRAGACGLKLHEDWGTTPQAIDTCLAVAEETDTQVAIHTDTLNESGFVEETIKAINGRTIHTYHTEGAGGGHAPDIIKAAGLANVLPSSTNPTRPYTINTVDEHLDMLMVCHHLSPNIPEDVAFADSRIRKETIAAEDILHDKGAFSMIASDSQAMGRVGEVITRTWQTAHKMKDQFGSLAEDPSWHDNFRAKRYIAKYTINPAIAHGISHEVGSIEIGKMADLVLWKPAFFGTKPSLIIKSGFIAAAPMGDPNASIPTPQPTHFRPMFGSMGSSASALSATFVSQLSLNTDNPWMKNTKRNLSAVRDIRSVTKTDMKLNSAQPVIEVHPETYEVRADGDLLICEPASSLPLAQRYFLF

SEQ ID NO: 170967 - protein, 124 aa, Unknown
  Bacterial polypetide isolated from the Sargasso Sea
MVKISKAAYADMYGPTTGDKVRLADTDLFIEIENDLTTYGEEVKFGGGKVIRDGMGQSQISRKKGAADTVITNALIVDVNGIYKADVGLKDGKIFEIGKAGNPDTQSKVNIIIGPGTEIIAGEG

SEQ ID NO: 170968 - protein, 452 aa, Unknown
  Bacterial polypetide isolated from the Sargasso Sea
MVKISRSSYADMYGPTTGDKVRLADTELFVEVENDFTTYGEEVKFGGGKVIRDGMGQSQISREKGAVDTVITNALVIDVNGIYKADIGLKDGLINCIGKAGNPDTQSNVNIIIGPGTEAIAGEGKIVTAGGFDSHIHFICPQQIDDALHSGLTTMLGGGTGPAHGTLATTCTPGPWHIKRMMQSADAFSMNLAFAGKGNSSLPEGLEEQVVGGASALKLHEDWGTTPGAIDNCLNIADKHDVQVMIHTDTLNESGFVENTIKAINKRTIHAFHTEGAGGGHAPDIIKVCGENYVLPSSTNPTRPYTVNTIEEHLDMLMVCHHLDKSIPEDVAFAESRIRRETIAAEDILHDMGAFSIIASDSQAMGRVGEVIIRTWQTAHKMKIQRGRLPEEKGENDNFRVKRYIAKYTINPAIAHGISKHIGSIENGKRADLVVWDPAFFGVKPEMILIGG

SEQ ID NO: 170969 - protein, 100 aa, Unknown
  Bacterial polypetide isolated from the Sargasso Sea
MKLSPREKDKLLISLAAMVAKNRLDRGIKLNYPEAIAIISDFVVEGARDGKTVAELMELGAHVIKKKNCMDGIADMINEVQVEATFPDGTKLVTVHKPIR

SEQ ID NO: 170970 - protein, 101 aa, Unknown
  Bacterial polypetide isolated from the Sargasso Sea
MKPGEIIPKNEDIELNQGKKTFTLKISNTGDRPIQVGSHYHFYETNEFLEFDRKVSYGKRLDIPSGTAVRFEPGQSKDVKLIDINGLKKIFGFNKKVMGDL

SEQ ID NO: 170971 - protein, 65 aa, Unknown
  Bacterial polypetide isolated from the Sargasso Sea
IALITDFVVEGAREGKSVAELMEAGAHVIKKKDCMEGIPDMIKEVQVEATFPDGTKLVTVHKPIR

SEQ ID NO: 170972 - protein, 100 aa, Unknown
  Bacterial polypetide isolated from the Sargasso Sea
MKLTPREKDKLMVSMAANVARKRLQRGVKLNYPEAIALITDFVIEGARDGKMVSELMETGAHVVKKEDCMDGIQDMIPEVQVEATFPDGTKLVTVHKPIR

SEQ ID NO: 170973 - protein, 102 aa, Unknown
  Bacterial polypetide isolated from the Sargasso Sea
MKPGEVITKKNSDINLNDDRNSITLKVSNSGDRPIQVGSHYHFAETNEYLKFDREKSNGMRLDIPSGTAVRFEPGQSKDVELIPIAGDRKIFGFNKKVMGQL

SEQ ID NO: 170974 - protein, 371 aa, Unknown
  Bacterial polypetide isolated from the Sargasso Sea
MVKIPRASYADMYGPTTGDKVRLGDTELFIEVENDLTNYGEEVKFGGGKVIREGMGQSQISREKGAVDTVITNALIVDVKGIYKADVGLKDGKIIEIGKAGNPDTQSNVNIIIGPGTEIIAGEGKILTAGGFDSHIHYICPQQIDDALHSGITTMLGGGTGPAHGTLATTCTPGPWHIKRMIQSADGFSMNLAFAGKGNSSLPEGLEEQIHAGACALKLHEDWGTTPGAIDNCLSIADKNDVQVMIHTDTLNESGFVENTIKAINKRTIHAFHTEGAGGGHAPDIIKVCGEEYVIPSSTNPTRPYTVNTIEEHLDMLMVCHHLDKSIPEDVAFAESRIRRETIAAEDILHDMGAFSIIASDSQAMGRVGEV

SEQ ID NO: 170975 - protein, 430 aa, Unknown
  Bacterial polypetide isolated from the Sargasso Sea
MASGVTTMLGGGTGPATGTLATTCTSGPFNMERMLQAADAFPMNLGFLGKGNASLPDALHEQINAGAIGLKLHEDWGTTPSAISNCLDVAEATDTQVAIHSDTLNESGFVENTIAAVGGRGICAFHTEGAGGGHAPDILRVVGEDNFLPSSTNPTMPYTQNTLDEHVDMLMVCHHLDASIAEDLAFAESRIRKETIAAEDILHDLGAISMMSSDSQAMGRVGEVILRTWQTAHKMKVQRGWLAPTAGRDELAEILQRNDNFRIKRYVAKYTINPAIAHGIAHEVGSLEVGKWADIVIWKPAFFGVKPALILKGGLIAMAAMGDPNASIPTPQPVHYRPMFGAFGGAIAKTSLTFVSQAGLNAGIGERFGLRKQLSAVRNIRGVRKQHMVHNSYTPKMEVDAQTYTVRADGQLLTCEPATLLPMAQRYFLF

SEQ ID NO: 170976 - protein, 102 aa, Unknown
  Bacterial polypetide isolated from the Sargasso Sea
MIPGEIITSDSEIVLNKDLVSLTMKVSNTGDRPIQVGSHYHFAEVNESLEFDRKKSLGMRLNISSGTAVRFEPGQSRDIELIEIQGLKKLFGFNKKVMGKIK

SEQ ID NO: 170977 - protein, 224 aa, Unknown
  Bacterial polypetide isolated from the Sargasso Sea
AEDILHDMGAFSIIASDSQAMGRVGEVIIRTWQTAHKMKVQRGQLKEEQGNNDNLRVKRYIAKYTINPAIAHGISDHIGSIEKNKRADIVIWDTAFFGVKPEMVLQGGSIACAQMGDPNASIPTPQPVYSRPMFSSFGKSLEKSTTTFVSKASLDKNSFKNSGISKSLLPVKNIRKISKKDMMLNDYCPKIEVNPETYEVLADGELITCEPAETLPLAQRYFMY

SEQ ID NO: 170978 - protein, 104 aa, Unknown; identical to SEQ ID NO: 170808
  Bacterial polypetide isolated from the Sargasso Sea

SEQ ID NO: 170979 - protein, 554 aa, Unknown
  Bacterial polypetide isolated from the Sargasso Sea
MAVEISRFDYAGMYGPTEGDKVRLADTEIFIEVEKDLTTYGEEVKFGGGKVIRDGMGQSQVTRADGAPDTVITNALILDYTGIYKADVALRDGKIEAIGKAGNPDTQPNVDIIIGPGTEIIAGEGKILTAGGFDSHIHYICPQQIDDALHSGLTTMLGGGTGPAHGTLATTCTPGPWHIGRMLQAADGLPMNLAFAGKGNASLPDALEEQVLGGACALKLHEDWGTTPQAIDCCLGVADDLDVQVMIHTDTLNESGFVERTVDSMKGRTIHAFHTEGAGGGHAPDIIKICGEQFVLPSSTNPTRPFTKNTVEEHLDMLMVCHHLDKSIPEDIAFAESRIRRETIAAEDILHDMGAFSIIASDSQAMGRVGEVIIRTWQTADKMKKQRGALSEETGNNDNLRARRYIAKYTINPAIAHGVSHVVGSVEPGKRADLVLWNPAFFGVKPEMVLLGGTIAVAQMGDPNASIPTPQPVYTRSMFGAYGRALSETSVTFVSGAAHAEGVGVKLGLAKQTVPVKNTRNIGKLDLKLNVALPKIDVDPETYEVRADGELLTC

SEQ ID NO: 170980 - protein, 101 aa, Unknown
  Bacterial polypetide isolated from the Sargasso Sea
MKPGEIITLNGSITLNEGREGCSIMVSNTGDRPIQVGSHYHFFETNEALSFDRESARGMRLDIASGTAVRFEPGQSRKVNLIPFSGEKRIFGFNGKIMGDL

SEQ ID NO: 170981 - protein, 100 aa, Unknown
  Bacterial polypetide isolated from the Sargasso Sea
MKLTPREKDKLLISLAAIVAKKRLSKGIKLNYPEAIALITDFVVEGAREGKSVAELMEAGAHVIKKKDCMEGIPDMVKEVQVEATFPDGTKLVTVHKPIR

SEQ ID NO: 170982 - protein, 100 aa, Unknown
  Bacterial polypetide isolated from the Sargasso Sea
MKLTPREKDKLLISLSAMVARNRLAKGIKLNYPEVIALISDFVIEGAREGKSVSELMEAGAHVIKKKDCMEGVPDMVNDVQVEATFPDGTKLVTVHKPIR

SEQ ID NO: 170983 - protein, 100 aa, Unknown
  Bacterial polypetide isolated from the Sargasso Sea
MKLTPREKDKLLIFTAALLAERRRARGLKLNYPEAVAFITAALMEAARDGKTVAEVMHYGTTLLTRADVMEGVAEMIPDIQVEATFPDGTKLVTVHHPIP

SEQ ID NO: 170984 - protein, 100 aa, Unknown
  Bacterial polypetide isolated from the Sargasso Sea
MKLTPREKDKLLISLSAIVARNRLAKGIKLNYPEAIALITDFVIEGAREGKSVSELMEAGAHVIKKKDCMEGVPDMIKDVQVEATFPDGTKLVTVHKPIR

SEQ ID NO: 170985 - protein, 225 aa, Unknown
  Bacterial polypetide isolated from the Sargasso Sea
MKEISRKSYSDMYGPTVGDQIRLADTDLIIEVENDFTNYGEEVKFGGGKVIRDGMGQSQIPRSQGAVDTVITNALVIDVKGIFKADVGIKDGKICELGKAGNPDTQNNVNIIIGPGTEIIAGEGKIITAGGFDSHIHFICPQQIDDALHSGITTMLGGGTGPAHGTLATTCTPGPWHIKRMIQSADAFSMNLAFAGKGNSSLPEGLEEQIAAGACSLKLHEDWGT

SEQ ID NO: 170986 - protein, 419 aa, Unknown
  Bacterial polypetide isolated from the Sargasso Sea
SGITTMLGGGTGPAHGTLATTVTPGPWHMEKMIQSADAFSMNLAFAGKGNSSLPQALEEQVIAGASSLKLHEDWGTTPAAIDNCLNIADKYDIQVMIHTDTLNESGFVESTIRAINGRTIHAFHTEGAGGGHAPDIIKVCGEKYVIPSSTNPTRPYTINTVEEHLDMLMVCHHLDKSIPEDVAFAESRIRKETIAAEDILHDMGAFSIIASDSQAMGRVGEVIIRTWQTAHKMKVQRGQLKEEKGNNDNLRVKRYIAKYTINPAIAHGISDHIGSIEKNKRADIVIWDTAFFGVKPEMVLQGGSISCAQMGDPNASIPTPQPVYSRPMFSSFGKSLEKSSVTFVSQISLDKNIHKKSGISKSLLPVKNIRKISKMDMIFNDYCPNIEVNPETYEVVADGELITCEPSKTLPLAQRYFMY

SEQ ID NO: 170987 - protein, 398 aa, Unknown
  Bacterial polypetide isolated from the Sargasso Sea
CTPGPWHLERMLQAADGYPMNLGFLGKGNVSQPQPALEQIAAGAIGLKLHEDWGTTPAAIDNCLSVADDTDTQVAIHTDTLNEAGFVEATVAAFKGRTIHTYHTEGAGGGHAPDIIKVCGEANVLPSSTNPTRPYTVNTLEEHLDMLMVCHHLDPSIAEDIAFAESRIRRETIAAEDILHDLGALSMLSSDSQAMGRVGEVIIRTWQTAHKMKVQRGALPEDNARHDNFRAKRYVAKYTINPAITHGISHEVGSIEPGKWADLVFWEPAFFGIKPSLILKGGMIAMAQMGDPNASIPTPQPVHYREMFATRGGALGRTSLTFVSQMAADAGVGERYGLNKRIVAVKNCRNITKADMIHNAWRPSISVDPETYQVIADGQLLTCEPATVLPMAQRYFLF

SEQ ID NO: 170988 - protein, 61 aa, Unknown
  Bacterial polypetide isolated from the Sargasso Sea
SDYVVEGARDGKSVAELMESAAHVLKKDDCMEGVAEMIAEVQTEATFPDGTKLVTVHKPIR

SEQ ID NO: 170989 - protein, 420 aa, Unknown
  Bacterial polypetide isolated from the Sargasso Sea
HSGITTMLGGGTGPAHGTLATTCTPGPWHIQRMIQSADGFSMNLAFAGKGNSSLPEGLEEQILAGASALKLHEDWGTTPGAIDNCLNIADKNDVQVMIHTDTLNESGFVENTIKAINKRTIHAFHTEGAGGGHAPDIIKVCGEEYVIPSSTNPTRPYTVNTIEEHLDMLMVCHHLDKSIPEDVAFAESRIRRETIAAEDILHDMGAFSIIASDSQAMGRVGEVIIRTWQTAHKMKVQRGSLSEEKGDNDNFRVKRYLAKYTINPAIAHGISKHIGSIEKNKRADLVLWDPAFFGAKPEMILIGGSIACAQMGDPNASIPTPQPVYTRPMFSSFGTSLEKSSVIFTSKLAIEKNSLKDANIRKDLLPVENTRTISKKDMILNNKCPKIEVNPETYEVKADGEIITCEPAKELPLAQRYFMF

SEQ ID NO: 170990 - protein, 460 aa, Unknown
  Bacterial polypetide isolated from the Sargasso Sea
SKYYYCPGTEIIAGEGKILTAGGFDSHIHYICPQQIDDALHSGITTMLGGGTGPAHGTLATTCTPGPWHIKRMIQSADGFSMNLAFAGKGNSSLPEGLEEQILAGASALKLHEDWGTTPGAIDNCLNIADKNDVQVMIHTDTLNESGFVENTIKAINKRTIHAFHTEGAGGGHAPDIIKVCGEDYVIPSSTNPTRPYTVNTIEEHLDMLMVCHHLDKSIPEDVAFAESRIRRETIAAEDILHDMGAFSIIASDSQAMGRVGEVIIRTWQTAHKMKVQRGSLPEEKGDNDNFRVKRYLAKYTINPAIAHGISKHIGSIEKNKRADLVLWDPAFFGVKPEIILMGGSIACAQMGDPNASIPTPQPVYTRPMFSSFGTSLEKSSVIFTSKLALEKNSLKDSSIRKDLLAVENTRSISKKDMVLNNKCPKIEVNPETYEVKADGEIITCEPAKELPLAQRYFMY

SEQ ID NO: 170991 - protein, 174 aa, Unknown
  Bacterial polypetide isolated from the Sargasso Sea
MTIRKILTIPDPLLRKKSLSVEKVDKEIRNLMDDMISTMYDAPGIGLAAVQIGVPKRVVVMDLSKNPDRKKPMYFINPEIIWKSNVNSSYEEGCLSIPNQFAKVERPDKCHIKYLDYEGNEKKLEAEGLLSTCIQHEIDHLNGVLFIDYLSKLKKDMIIKKVSKDKKELERVVV

SEQ ID NO: 170992 - protein, 207 aa, Unknown
  Bacterial polypetide isolated from the Sargasso Sea
MNAGVILAGSFAQLARAAEQSRDTMLVPKTALETPPLEIHTLGAEVLRQPARRIGKVTEQTRELARDMLRSMYTAKGIGLAAPQVGIHQQLLVIDLDLENAATPPLVLINPEISAASASIDTYEEGCLSIPGVYLDVVRPTAIELSFRDEMGRPRKMKADGLMARVIQHEMDHLNGVLFVDRVTDEAGLQKELKDHGFQRQHVQSVS

SEQ ID NO: 170993 - protein, 201 aa, Unknown
  Bacterial polypetide isolated from the Sargasso Sea
MAGSFAHLARAADKSRDTMLVPKEGLETPPLEIHTLGAEVLRQPARRIGKVNEQVRDLARDMLRSMYTAKGIGLAAPQVGVHQQLLVIDLDLDNPTTPPLVLINPEISSASAGLDTYEEGCLSIPGVYLDVVRPTAIELSFRDEMGRPRKMKADGLMARCILHEMDHLNGVLFVDRVTDEAVLQKELKEHGFQRQHVQSVS

SEQ ID NO: 170994 - protein, 114 aa, Unknown
  Bacterial polypetide isolated from the Sargasso Sea
VDIHIRLVVMDLSEERNEPRVFVNPEYTILDKSPFTYEEGCLSIPGFNEEISRPSKILLKWQDLQGNFHEEKPDGIFTVCAQHEIDHLDGKLFVDYLSPIKRDRIRKKLEKRRN

SEQ ID NO: 170995 - protein, 150 aa, Unknown
  Bacterial polypetide isolated from the Sargasso Sea
MSDLKILIFPDPKLRKVAKKINKFDKSLEMLSKNMLKTMYEAEGIGLAATQVDIHIRLVVMDLSEERNEPRVFVNPEYTILDKSPFTYEEGCLSIPGFNEEISRPSKILLKWQDLQGNFHEEMPDGIFTVCAQHEIDHLDGKLFVDYLSP

SEQ ID NO: 170996 - protein, 168 aa, Unknown
  Bacterial polypetide isolated from the Sargasso Sea
MTVLTVLHYPDDRLRTVAAAVPEVTAEIKQLTADMLDTMYAENGIGLAATQVNVHKRVVVIDISENRDEPMIFINPEIVAKSGDTEYEEGCLSVPQSYAKVERAAAVTVKAQNTKGEWFEIQAEGLLAICLQHELDHLMGKLFIDYLSPLKRDRIKKKLEKEARLAAR

SEQ ID NO: 170997 - protein, 169 aa, Unknown
  Bacterial polypetide isolated from the Sargasso Sea
MAKNLKILIFPDPRLRKVAEKVTKFDKSLENLAKSMLKTMYDANGIGLAATQVDQHIRLIVMDLSENRDDPRIFINPTYKILENHSLYEFEEGCLSIPGFNEVIARPDKIELRWQDLDGNEHIDKPEGLLTVCIQHEIDHLEGKLMVDYVSALKRDRVRSRLLKEYNRK

SEQ ID NO: 170998 - protein, 174 aa, Unknown
  Bacterial polypetide isolated from the Sargasso Sea
MAIKKILTEPNKFLRQISKPVEKVSDEERKLMDDMLETMYNANGIGLAAIQIGIPKRIIVIDISKKEDGKKPMFFVNPVVIKKNNKNATYEEGCLSVPNQFAEIDRPSQCDVEYLDYDGNKKILKAEGLLATCIQHEIDHLEGILFIDYLSKLKKTMIIKKLSKLKVKPDRIVV

SEQ ID NO: 170999 - protein, 154 aa, Unknown
  Bacterial polypetide isolated from the Sargasso Sea
MTIKKILTLPDPILRKKSSNVVDVDNNLRQLMDDMLQTMYDAPGIGLAAIQIGVPKRVVVMDLAKNDEKKNPMYFINPEIIWKSEEKSSYEEGCLSIPNQFAKIERAEKCNVKYLDYNGNKKKIEATGLLSTCLQHEIDHLNGILFIDYLSKLK

SEQ ID NO: 171000 - protein, 129 aa, Unknown
  Bacterial polypetide isolated from the Sargasso Sea
YNANGIGLAATQVDRHLRLIVMDLSENKDDPRVFINPTYKILDNHSLYEFEEGCLSIPGFNELISRPDKIDLKWQDLDGNEHNDKPEGLLTVCIQHEIDHLEGKLMVDYISSLKRDRIRKKIIRDFNRK

SEQ ID NO: 171001 - protein, 173 aa, Unknown
  Bacterial polypetide isolated from the Sargasso Sea
MTIKTIITEPNEILRQVSKPVQSVGNEERKLMDDMLETMYAANGIGLAAIQIGIPKRIIVMDISKDGEKNPMYFVNPTIKNKDKEKTTYEEGCLSVPDYFAEVDRPKYCEVEYLDYNGKNKILEADGLLATCIQHEMDHLEGILFIDYLSKLKKTMIVKKLSKRKNPPDRIIV

SEQ ID NO: 171002 - protein, 158 aa, Unknown
  Bacterial polypetide isolated from the Sargasso Sea
KEILSKDTKKLIKKMWNIMAEAGGIGLAAPQIGVLKQVAVIKLDSESKRYEIQEDSDEFVIINPSLEILDKTKQGFWEGCLSVPGLRGFVERPRKLRITYLDEEAIQNEIIVEDFLATVFQHELDHLFGYLYVDRLNSVKDLIFEDDANDISEEKLLD

SEQ ID NO: 171003 - protein, 174 aa, Unknown
  Bacterial polypetide isolated from the Sargasso Sea
MAIKTIITEPNKILRQKSKPVETVGEEERNIMDDMLETMYHANGIGLAAIQIGIPKRIIVMDISKNKEKKNPMYFVNPIIKNKNSEKSTYEEGCLSVPNYFAEIDRPKKCEVDYLDYDGKKKTLSADGLLATCIQHEIDHLEGILFIDYLSKLKKTMIVKKLSKQKKSPDRIIV

SEQ ID NO: 171004 - protein, 180 aa, Unknown
  Bacterial polypetide isolated from the Sargasso Sea
MSINEIRVIGDPVLRVTATEITEITENLALLTQGMLSTMYAAPGIGLAAPQIGVQKRLFVYDWGSGPGVLINPEIKDADGEWTFEEGCLSIPGLSWELLRPKQIHIVGLDMEGKEVSIEADELESRLFQHEMDHLNGVLLVDHLDEDQRREANKTLMGISESVGYPLPIVKDNLGLKQSD

SEQ ID NO: 171005 - protein, 169 aa, Unknown
  Bacterial polypetide isolated from the Sargasso Sea
MATLNILEFPNPNLRKIAVPVTSFDSDLKCLIDNMFETMYEANGIGLAATQVDVHKRLLVLDVSEERNDPQVFVNPTIDVIESDLADYDEGCLSVPGFYETVSRPKKIKVSAQDKEGSQFEIEADGVLSVCIQHEIDHLDGKLFVDYLSSLKRNRIKDKLQKEQKSISS

SEQ ID NO: 171006 - protein, 169 aa, Unknown
  Bacterial polypetide isolated from the Sargasso Sea
MSVLQVLHIPDERLRKVAKPVEEVNAEIQRIVDDMFETMYAEEGIGLAATQVDIHQRIIVIDVSENRDEQLVLINPELLEKDGETGIEEGCLSIPEQRALVPRAEKVKIRALDRNGKSFELEADGLLAICIQHEMDHLVGKLFIDYLSPLKQQRIRQRVEKLDRLNARA

SEQ ID NO: 171007 - protein, 161 aa, Unknown
  Bacterial polypetide isolated from the Sargasso Sea
LRSKCKKVDKVDNDLRLLMDDMLETMYKAPGIGLAAIQIGVLKRVVVIDLAKDHDKKNPLYLINPEITFKSKTKAVYEEGCLSLPGQFAEIERPAECHINYLDYEGKNKNLKAEGLLATCIQHEIDHLDGVLFIDYLSKLKKTMIIKKLEKQKKSLERIVV

SEQ ID NO: 171008 - protein, 106 aa, Unknown
  Bacterial polypetide isolated from the Sargasso Sea
KKEPIYFINPEITWKSDFKESYEEGCLSIPDQFAKIERPSKCIVKFLDYNGSKKELKAEGLLATCIQHEIDHLNGILFIDYLSKLKKNIIIKKLSKNKKELERIVV

SEQ ID NO: 171009 - protein, 176 aa, Unknown
  Bacterial polypetide isolated from the Sargasso Sea
MTSTTNLIPIVKMPDPVLRQIAQPVAGITDGVRQLLDDMAATMYDAPGIGLAAPQINISQRLVVIDCGSDETAELFKMVNPEIISLSDERAVLEEGCLSIPDQTADVERPAEVSVRYLDENGAAQMMTAVGLLAACIQHEIDHLNGVLFIDHISRLKRDMITRRVMKELRQSTGVK

SEQ ID NO: 171010 - protein, 176 aa, Unknown
  Bacterial polypetide isolated from the Sargasso Sea
MRNLEILTFPDPRLRTKASFVEVFDDELRIMAENMLHTMYSANGIGLAATQVDFHKRLIVIDISENQDEPIFIVNPSFQILDKTIEEYKEGCLSVPKFFEEIYRPKKIKLSYKDLDGNDKELIAEGVLSVCIQHEIDHLDGKLMVDYLSPLKRGRIKGKLLKSKTKPKQQIQQRSS

SEQ ID NO: 171011 - protein, 174 aa, Unknown
  Bacterial polypetide isolated from the Sargasso Sea
MSIRKIITEPDPILRKISEPVKEVDNTIRSLMDDMLETMYNAPGIGLAAIQIGVPKRIIVLDISRDVEKKEPMYFVNPEIVLKSKTDSSYEEGCLSVPGQFAEINRPDKCHIKYLDYNGKKRELKAEGLLATCIQHEMDHLEGILFIDYLSKIKKTMIVKKLSKQKKNLERIVV

SEQ ID NO: 171012 - protein, 164 aa, Unknown
  Bacterial polypetide isolated from the Sargasso Sea
MAIKKIVTVPDSILRKKSLVVEKVDKEIKNLMDDMLETMYKAPGIGLAAVQIGIPKRIVVIDISKDENKKDPIYFVNPELTWKSKEKATYEEGCLSIPDQFAKIDRPEKCTVKFLDYNGNPKEIKAEGLLATCIQHEIDHLNGILFIDYLSKLKKDIIYKKIIK

SEQ ID NO: 171013 - protein, 168 aa, Unknown
  Bacterial polypetide isolated from the Sargasso Sea
MKKILYVPHEKLRQKAIEIKKINKEDLLLAEEMMEIMASYSGVGLAANQIGVLKKIVTINIEKNEKNSKKKYILFNPKILSFSKEKVIMEEGCLSIPQQFAEIERPEKISVQYLNYKNILIKQSFDGIEARILQHEIDHLFGKLFVDYLSSLKRNIIIKKAVKLLKNK

SEQ ID NO: 171014 - protein, 165 aa, Unknown
  Bacterial polypetide isolated from the Sargasso Sea
LIQYFREKSLPVKKVDKDIKKLMDDMLETMYDAPGIGLAAIQIGIAKRVVVMDLSKDENKKEPVYFVNPEITWKSNVNSTYEEGCLSIPNQFAKIDRSEQCHVKYLDYEGRENEIKAEGLLSTCIQHEVDHLNGILFIDYLSKLKKDIILKKISKNKKELERVVV

SEQ ID NO: 171015 - protein, 125 aa, Unknown
  Bacterial polypetide isolated from the Sargasso Sea
MYQVTGIGLAATQVNVHKRVIVIDVSDDRTDPKIFINPEFEVKDNKSLFSFSEGCLSIPGYNEEITRPDKILLKWQDVNGKFHEEEPEGILTVCIQHEIDHLEGKLMVDYISSLKRERIRSKLRK

SEQ ID NO: 171016 - protein, 174 aa, Unknown
  Bacterial polypetide isolated from the Sargasso Sea
MAIRKILTIPDIILREKSLPVEKVNKEIKNLMDDMLNTMYDAPGIGLAAIQIGIPKRIVVMDLSKDPEKKNPMYFVNPEITWKSDLKSTYEEGCLSIPNQFAKIDRPEKCNVKFLDYDGNPKEIKAEGLLSTCIQHEIDHLNGVLFIDYLSKLKKDIIIKKVSKDKKETERVVV

SEQ ID NO: 171017 - protein, 154 aa, Unknown
  Bacterial polypetide isolated from the Sargasso Sea
MNDILIIPNSVLRQKSLPLKNITKKDIDLSLKMMKIMNNAPGIGLAAPQIGILKKIITINIKETENEKKINYALFNPEIISYSKKKVLIEEGCLSIPEHFAEIERPEKIHFKYFNESNELIEKEAIGNESRVIQHEIDHLNGKLFIDYLSSLKR

SEQ ID NO: 171018 - protein, 169 aa, Unknown
  Bacterial polypetide isolated from the Sargasso Sea
MANKLNILVFPDPRLRKVAEKIVKFDKCLEKLASDMLYTMYEANGIGLAATQVDHHIRLIVMDLSEDRNEPKVFINPSYKILEGYKMFEYEEGCLSIPGFNEVIARPDKIELSWQDLKGKTHMDTPEGLLTVCIQHEIDHLEGKLMVDYVSALKRDRVRSKLLKEFKRN

SEQ ID NO: 171019 - protein, 201 aa, Unknown
  Bacterial polypetide isolated from the Sargasso Sea
MAGSFAQLARNADKARDTMLVPKQALETPPLEIHTLGDEVLRQPARRIGKVDEQVRELARDMLRSMYTAKGIGLAAPQVGIHQQLLVIDLDLENAATPPLVLINPEISASSASIDTYEEGCLSIPGVYLDVVRPTSIELSYRDEMGRPRKMKADGLMARCIQHEMDHLNGVLFVDLVTDASGLEKELKENGFQSQHVRSVS

SEQ ID NO: 171020 - protein, 124 aa, Unknown
  Bacterial polypetide isolated from the Sargasso Sea
MTVRKILTVPDPILRTKSNSVKKVDKDTKNLMRDMLETMYDAPGIGLAAIQIGVAKRVVVMDVSKETDKKEPMYFVNPEITWKSNTNATYEEGCLSIPNQFAKIERPDKCKVKYLDFDGVEKEI

SEQ ID NO: 171021 - protein, 174 aa, Unknown
  Bacterial polypetide isolated from the Sargasso Sea
MAIKTILTVPDPILRKKSLQVDKVDKEIKKLMDDMLETMYKAPGIGLAAVQIGVLKRVVVMDVSRETDKKEPMYFVNPEIVWKSNEKVTYEEGCLSIPNQFANIERSEKCTVKYLDYFGAEKEIQAEGLLATCIQHEIDHLNGILFIDYLSKLKKDIIVKKLLKNKKELERIVV

SEQ ID NO: 171022 - protein, 162 aa, Unknown
  Bacterial polypetide isolated from the Sargasso Sea
MSDLKILIFPDPKLRKVAKKIENFDKSLEMLAQKMLQTMYEAEGIGLAATQVDVHIRLVVMDLSEERNEPRVFVNPEYTILDKSPLTYEEGCLSIPGFNEEISRPSKILLKWQDLQGNFHEDQPDGIFTVCAQHEIDHLDGKLFVDYLSPIKRDRIRKKLEN

SEQ ID NO: 171023 - protein, 175 aa, Unknown
  Bacterial polypetide isolated from the Sargasso Sea
MSKRKIIIEPDPILRKVSEPLEKVDNELRKLMDDMLETMYSAPGIGLAAVQIGILKRLIVIDISKGEEKKKNPLFLINPIITSRSKDTSIYEEGCLSIPGHFAEIERPAQCHINFLDYTGKQKQLKADGLLSTCIQHEIDHLDGKLFIDYLSKLKKDMIIKKLLKQKKTQDKIVL

SEQ ID NO: 171024 - protein, 171 aa, Unknown
  Bacterial polypetide isolated from the Sargasso Sea
MRKILLVPHPILRQKAKDIKEIKEEDIFIAKEMMKIMNNAPGVGLAANQIGVLKKIITINIQDEENNLKNQYILFNPRIISYSKNTNIMEEGCLSIPEQFAEIERSEEIIIEYIDEKKKILKKRVAGIESRVLQHEIDHLSGKLFIDYLSSLKRNIMIKKVKKLVKVKSGK

SEQ ID NO: 171025 - protein, 143 aa, Unknown
  Bacterial polypetide isolated from the Sargasso Sea
MTVKKLITVPDEILRKNSQPIEKVSNNEKKLIKDLLETMYHHKGIGLAAIQVGIPKRIIVLDVNQKDDIKKPLCFINPVIKDVSKEKSKYEEGCLSIPNTFIEIERPKTCLVEYIDIEGKKKSMECDDLLSTCIQHEINHLDE

SEQ ID NO: 171026 - protein, 161 aa, Unknown
  Bacterial polypetide isolated from the Sargasso Sea
MAKLKVLTFPDPRLRKVAVPVKKFDKSLENITSDMLETMYAEGGIGLAATQVDIHERIIVMDLSEEQNDPKIFINPEYKILNDKSLLSFSEGCLSVPGVNEEITRPDSIYLSWQDIKGNFHEAEPSGLLTVCIQHEIDHLEGKLMVDYLSPLKEAGSGRKL

SEQ ID NO: 171027 - protein, 151 aa, Unknown
  Bacterial polypetide isolated from the Sargasso Sea
MIRPIVLHPDARLKKKSVEVEGITDALIELAEDMMETMYNAPGIGLAAPQIGVLQRVIVMDCAKKEDEEPDPIIMVNPLIKASSEEKNVYEEGCLSIPEHFAEVTRPEIVQVEWIDLEGKQHSEEFNGLKSTCVQHEIDHLNGKLFIDYLG

SEQ ID NO: 171028 - protein, 136 aa, Unknown
  Bacterial polypetide isolated from the Sargasso Sea
MYAAKGIGLAAPQIGINKELLVIDVNFEDSAAEPLILINPEITDFGTTLNSYEEGCLSIPGVYLNVVRPSTIKLKFRDEMGRPRKMKADGLLARCIQHEMDHLNGILFVDRVTSKDDLNKELIKEGFNEKDVISID

SEQ ID NO: 171029 - protein, 154 aa, Unknown
  Bacterial polypetide isolated from the Sargasso Sea
MAIKKILTAPDPFLKQVSAPVKEVTKDIQLLMDDMLDTMYDAPGIGLAAVQIGVPLRVIVMDISWRNEDGKKEPYFFVNPEIKVKTKNMSTYEEGCLSVPDQYAEIDRPEECEVSYLDYNGKKTKLHAEGLLATCIQHEMDHLEGILFIDYLSN

SEQ ID NO: 171030 - protein, 106 aa, Unknown
  Bacterial polypetide isolated from the Sargasso Sea
GEKKPKILINPEIIWSSEDVSLFEEGCLSIPDVREEIKRPSSVIIKFTDIRGVLKEDFFEGLWATCIQHEIDHLNGKLFIDYLGPIKRSFITKKMKKYKKEINKNI

SEQ ID NO: 171031 - protein, 174 aa, Unknown
  Bacterial polypetide isolated from the Sargasso Sea
MTIRKILTEPNKILRQVSLPVEKVGKEEQALMDDMLETMYDANGIGLAAIQIGVPKRIIVMDLSKEEGNKEPRYFVNPIVKNKNKNLATYEEGCLSVPGQFAEIDRPSKCDLEYLDYFGKKCFESVSGLLATCIQHEIDHCDGRLFIDYLSKLKKSMIIKKLSKQNSKSNRIVV

SEQ ID NO: 171032 - protein, 129 aa, Unknown
  Bacterial polypetide isolated from the Sargasso Sea
IETMYHTDDGIGLASTQVGSTYAVIVIDLSENRDQPLVLINPEIVEKSGEYVGEEGCLSIPGYRAKVTRFEKVKVTALDRQGKAIEIETDDFLAIVLQHEIDHLHGKVFIEHLSALKQQIALKKVRKYA

SEQ ID NO: 171033 - protein, 178 aa, Unknown
  Bacterial polypetide isolated from the Sargasso Sea
MAIKKILTAPDPFLKQVSTPVKEVTKDIQLLMDDMLDTMYDAPGIGLAAVQIGVPLRVIVMDISWRNEDGKKEPYFFVNPEIKLKTKNMSTYEEGCLSVPDQYAEIDRPEECEVSYLDYNGKKATLHAEGLLATCIQHEMDHLEGVLFIDYLSNLKKNMIVKKLIKSKKQSNKERIVA

SEQ ID NO: 171034 - protein, 130 aa, Unknown
  Bacterial polypetide isolated from the Sargasso Sea
MYDENGIGLAATQVNIHQRIVVIDVSEERDEPLVLINPQIIKKDGSTISEEGCLSVPNSYAKVDRAETVTVAALNENGEEFVLDADELLAICIQHELDHLQGKLFIDYLSPLKRQRIRKKLEKEAKFAAQ

SEQ ID NO: 171035 - protein, 168 aa, Unknown
  Bacterial polypetide isolated from the Sargasso Sea
MAKNLKILIFPDPRLRKVAEKVTKFDKSLENLANSMLKTMYDANGIGLAATQVDQHIRLIVMDLSENRDDPRIFINPTYKILENHSLYEFEEGCLSIPGFNEVIARPDKIELRWQDLDGNEHIELPEGLLTVCIQHEIDHLEGKLMVDYVSALKRDRVRNKLLKEYKR

SEQ ID NO: 171036 - protein, 149 aa, Unknown
  Bacterial polypetide isolated from the Sargasso Sea
MPDLKILIFPDPKLRKVAKKIDKFDKSLEMLSKNMLKTMYEAEGIGLAATQVDIHIRLVVMDLSEERNEPRVFVNPEYTILDKSPFTYEEGCLSIPGFNEEISRPSKILLKWQDLQGNFHEEKPDGIFTVCAQHEIDHLDGKLFVDYLS

SEQ ID NO: 171037 - protein, 174 aa, Unknown
  Bacterial polypetide isolated from the Sargasso Sea
MPIKNIITVPNEILRKKSQLVEKITNLEKTLVNDMFETMYNSNGIGLAAIQIGIAKRIVVLDVSGKDEEKKPMCFINPKIKNTSDERSVYEEGCLSIPNTFIQIERPKTCVVEYVDLNSKKKEIKCNDLLSTCIQHECNHLDGKLIIDFLSKFKKDLIIKKISKNKSSPNKIVV

SEQ ID NO: 171038 - protein, 141 aa, Unknown
  Bacterial polypetide isolated from the Sargasso Sea
KFDKSLEIITSNMLETMYAEEGIGLAATQVDIHERIIVMDLSEERNDPKIFINPEFKILNDKSLLSFTEGCLSVPGITEEITRPDNIHLVWQDLKGEKHEAEPSGLLTVCIQHEIDHLEGKLMVDYLSPLKRDRIRKKASK

SEQ ID NO: 171039 - protein, 151 aa, Unknown
  Bacterial polypetide isolated from the Sargasso Sea
MAKKQILTIPDPLLRKVSEPVNSVNSEVKKLMDDMLDTMYAAPGIGLAAVQIGVLMRVIVIDLSKQDEKKNPLFIVNPEITSKSKELISYEEGCLSIPNQFAEVKRPSSCKINFLDYNGKKSEINADGLLATCIQHEVDHLNGILFIDHLS

SEQ ID NO: 171040 - protein, 154 aa, Unknown
  Bacterial polypetide isolated from the Sargasso Sea
VFDNKLQILCDDLIETMYAAPGIGLAAPQIGILKKVIVMDCDKETQDHKPIILINPKIVWASEEKRSYEEGCLSIPETYAEISRADKVKVTYNDLLGQRNETIFSDLWATCVQHEIDHLNGKLFIDYLGSVKRGVIMRKMMKIKRETLKISKDK

SEQ ID NO: 171041 - protein, 155 aa, Unknown
  Bacterial polypetide isolated from the Sargasso Sea
ICTQVTNIDESIKKLCSDMIDTMYKHSGVGLAAPQVGILKRVVVMDCSEEGEKRPISLINPEIVWSSKEDSKFEEGCLSIPHIREEIKRPSSVQVKFNDISGILKESYFKGLWSTCIQHEIDHLNGKLFIDYLGPIKRSFITKKMKKYKKEIIKK

SEQ ID NO: 171042 - protein, 174 aa, Unknown
  Bacterial polypetide isolated from the Sargasso Sea
MAIKKIVTVPDSILRKKSLVVQKVDKEIKNLMDDMLETMYKAPGIGLAAIQIGIPKRIVVIDISKDENKKDPIYFVNPELTWQSKEKVTYEEGCLSIPDQFAKIDRPEKCTVKFLDYNGDHKELRAEGLLATCIQHEIDHLNGILFIDYLSKLKKDIIIKKLSKNKKELERIVV

SEQ ID NO: 171043 - protein, 113 aa, Unknown
  Bacterial polypetide isolated from the Sargasso Sea
MAIREILLHPDQRLKKICKPIQEITDFERTLIKDMFETMYNATGIGLAAPQVGVLKRIFVMDCSDKDNSSEPIVLINPEILWASDETILYEEGCLSIPEFFGEIKRASRGKFK

SEQ ID NO: 171044 - protein, 142 aa, Unknown
  Bacterial polypetide isolated from the Sargasso Sea
MAKKLKILIFPDPRLRKVAEKVIKFDKSLQKLADNMFLTMYEANGIGLAATQVDEHIRLIVMDLSEERNDPRIFINPEYKVLEGHSLFEYEEGCLSIPGFNEKISRPDKIELKWQDINGKEHISEPEGLLTVCIQHEIDHLE

SEQ ID NO: 171045 - protein, 126 aa, Unknown
  Bacterial polypetide isolated from the Sargasso Sea
RSSIGINKELLVIDVNFEDSAAEPLILINPEITNYGTTLNSYEEGCLSIPGVYLNVVRPSTIKLKFRDEMGRPRKMKADGLLARCIQHEMDHLNGVLFVDRVTSKEDLHKELIKEGFHEKDVMPIK

SEQ ID NO: 171046 - protein, 158 aa, Unknown
  Bacterial polypetide isolated from the Sargasso Sea
MAIKKILTAPDPFLKQISTPVKEVTNDIQILMDDMLDTMYDAPGIGLAAVQIGVPLRVIVMDISWRNEDGKKEPYFFVNPEIKVKTKIMSTYEEGCLSVPDQYAEIDRPEECEVDYLDYNGQKSTLHAEGLLATCIQHEMDHLEGILFIDYLSNLKKN

SEQ ID NO: 171047 - protein, 168 aa, Unknown
  Bacterial polypetide isolated from the Sargasso Sea
MNKLNILTFPDPRLRKTAEPVIDFNDELKSMASDMLYTMYEDKGIGLAATQVDIHKRLIVIDLSEDKSSPLYIINPDYEILDDTLELSEEGCLSIPSFRQEVKRAKKIKLKYQDLNGLDKELTAEGLLGFCIQHEIDHLNGKLLVDYSSSLKRNRIRDKLLKLKDEKK

SEQ ID NO: 171048 - protein, 165 aa, Unknown
  Bacterial polypetide isolated from the Sargasso Sea
MSDLKILIFPDPKLRKVAKKIDKFNKSLEMLSKNMLNTMYEAEGIGLAATQVDIHIRLVVMDLSEERNEPRVFVNPEYTILDKSPFTYEEGCLSIPGFNEEISRPSKILLKWQDLQGNFHEEKPDGIFTVCAQHEIDHLDGKLFVDYLSPIKRDRIRKKLENRRN

SEQ ID NO: 171049 - protein, 169 aa, Unknown
  Bacterial polypetide isolated from the Sargasso Sea
MAKNLKILIFPDPRLRKVAKKITKFDKSLEKLANSMLKTMYDANGIGLAATQVNEHIRLIVMDLSENRDNPMIFINPTYKILENHSLFEYEEGCLSIPGFNELIARPDKIELKWQDIKGNEHIDIPEGLLTVCIQHEIDHLEGKLMVDYVSALKRDRVRKRLLKEYKRK

SEQ ID NO: 171050 - protein, 154 aa, Unknown
  Bacterial polypetide isolated from the Sargasso Sea
MKKRKILIEPDPLLRKKCEPLEKVDDDLRKFMNEMLATMYDAPGIGLAAIQVGVLKRVVVIDLSKDEKKNPLFLINPEIVHKSKNTSIYEEGCLSLPGQFAEIERPAECVLQYVDYNGKKKELKAKGLLATCIQHEVDHLDGILFIDYLSKLKK

SEQ ID NO: 171051 - protein, 159 aa, Unknown
  Bacterial polypetide isolated from the Sargasso Sea
MAIKKIVTVPDSVLRKKSLVVERVDKEIKNLMDDMLETMYKAPGIGLAAVQIGIPKRVVVIDISKDENKKDPIYFVNPELTWQSKEKATYEEGCLSIPDQFAKIDRPKKCIVKFMDYNGNPKEIKAEGLLATCIQHEIDHLNGILFIDYLSKLKKDIII

SEQ ID NO: 171052 - protein, 174 aa, Unknown
  Bacterial polypetide isolated from the Sargasso Sea
MTIKKILTIPDPILRKKSTPVTQVNKDTQSLMDDMLETMYDAPGIGLAAIQIGVPKRVIVMDLSKDNDEKKPLYFINPEIIWKSKLNSSYEEGCLSIPNQFAKIERPEKCHIKFLDYNGVQKEIKADGLLSTCIQHEIDHLNGVLFIDYLSKLKKDIIIKKVSKNKKELERVVV

SEQ ID NO: 171053 - protein, 169 aa, Unknown
  Bacterial polypetide isolated from the Sargasso Sea
MAILPILCYPDPRLHKVARPVQAVDDRIRTLVADMLATMYDAHGIGLAATQVDVHERLVVIDVSEERDQPLVLINPELVWTSAEKHLNEEGCLSVPGIYDGVERFDAVHVRALDAQGQSRVIEADGLLAVCIQHEMDHLMGKVFVEYLSPLKRNRIKTKMVKQQREARG

SEQ ID NO: 171054 - protein, 175 aa, Unknown
  Bacterial polypetide isolated from the Sargasso Sea
MPAATKLIPIVTIPDPVLRQIAKPVDEITDGVRQLLDDMTATMYNAPGIGLAAPQINVSQRLVVIDCGKDDAPELFKMVNPEIIALSEEQAVLEEGCLSIPDQTAEVRRPAEVSIRYLDETGATQTLVADRLLAACIQHEIDHLNGILFIDHISRLKRDMITRRVMKELRQTSAS

SEQ ID NO: 171055 - protein, 122 aa, Unknown
  Bacterial polypetide isolated from the Sargasso Sea
GINKELLVIDVNFEDSAAEPLILINPEITDFGTTLNSYEEGCLSIPGIYLNVVRPSTIKLKFRDEMGRPRKMKADGLLARCIQHEMDHLKGILFVDRVTSKDDLNKELIKEGFNEKDVISIN

SEQ ID NO: 171056 - protein, 170 aa, Unknown
  Bacterial polypetide isolated from the Sargasso Sea
MNRLNILTFPDPRLRKKAVPITTFDKDLEKKAEDMLFTMYEDRGIGLAATQVNIHERLIVMDLTEDRSDPLVIVNPSYEILDDSLEISKEGCLSIPTFQQEVPRAKEIELTYQDLKGQKQKLIADGLLGYCIQHEIDHLNGKLLVDYASSLKRSRLKEKLMKSKDGKNKN

SEQ ID NO: 171057 - protein, 168 aa, Unknown
  Bacterial polypetide isolated from the Sargasso Sea
MALLKVLRFPDERLRTQAQPITEFTTELQTQIDDMFETMYQEKGIGLAATQVDYHKQLIVMDLQDEVERPKVFINPEIIASSGDFCNEEGCLSVPGIYAKVDRAEFVTVKALDRHGNEFTVEADDLFAICIQHEMDHLKGKLFVDYLSPLKRQRIKQKLEKAAKQDAK

SEQ ID NO: 171058 - protein, 168 aa, Unknown
  Bacterial polypetide isolated from the Sargasso Sea
MTVLTVLHYPDERLRTVAQAVPAVTAEIKQLVKDMLDTMYDENGIGLAATQVNVHKRVVVIDISENRDEPMVFINPEIIAKSGDTEYEEGCLSVPQSYAKVERAAAVTVKAQNEKGDWFELQAEGLLAICLQHELDHLVGKLFIDYLSPLKRDRIKKKLEKEARLAAR

SEQ ID NO: 171059 - protein, 169 aa, Unknown
  Bacterial polypetide isolated from the Sargasso Sea
MAKKLKILIFPDPRLRKVAEKVTKFDKSLQKLADDMFLTMYDANGIGLAATQVNEHIRLIVMDLSEERNDPKIFINPEYKVLEGHSLFEYEEGCLSIPGFNEKISRPDKIELKWQDINGKEHITEPEGLLTVCIQHEIDHLEGKLMVDYVSALKRDRVRNKLLKEYNRK

SEQ ID NO: 171060 - protein, 167 aa, Unknown
  Bacterial polypetide isolated from the Sargasso Sea
MALLNILHYPDKRLHKVAKPVDKVDDRIRKLVADMAETMYAAPGIGLAATQVDVHERVIVIDVSEEKNELRAFINPEIVWSSDAKQIYEEGCLSVPGIYDEVERPDHVRVRALNEQGETFELDCEGLLAVCVQHEMDHLMGRVFVEYLSPLKQTRIKTKMKKLERAM

SEQ ID NO: 171061 - protein, 165 aa, Unknown
  Bacterial polypetide isolated from the Sargasso Sea
MSDLKILIFPDPKLRKVAKKINKFDKSLEILSKNMLKTMYEAEGIGLAATQVNIHIRLVVMDLSEERNEPRVFVNPEYTILDKSPFTYEEGCLSIPGFNEEISRPSKILLKWQDLQGNFHEEEPDGIFTVCAQHEIDHLDGKLFVDYLSPIKRDRIRKKLENRRN

SEQ ID NO: 171062 - protein, 162 aa, Unknown
  Bacterial polypetide isolated from the Sargasso Sea
MTIKTIITEPNEILRQVSKPVLSVGKEERKLMDDMLDTMYAANGIGLAAIQIGIPKRIIVMDISKDGEKNPMYFVNPTIKNKDKEKTTYEEGCLSVPDYFAEVDRPKYCEVEYLDYNGENKILEADGLLATCIQHEMDHLEGILFIDYLSKLKKTMIVKNYQ

SEQ ID NO: 171063 - protein, 168 aa, Unknown
  Bacterial polypetide isolated from the Sargasso Sea
MNKLDILTFPDPRLRKKAQPIERFDENLKDMAKKMLHTMYADKGIGLAATQVNYHERLIVIDVSENQDEPIYIVNPSYEVLDSSLESSKEGCLSIPTFQQEVFRAKKIELSYQDLDGEPQKLTAEGLFGYCIQHEIDHLNGKLIVDYASSLKRSRIKAKLLKTKDGKA

SEQ ID NO: 171064 - protein, 161 aa, Unknown
  Bacterial polypetide isolated from the Sargasso Sea
PCLRQVSKPVDQVGKEEQTLMDDMLETMYDAPGIGLAAIQVGVPKRIIVMDISKEEGKKEPRYFVNPVIKNKDPIKATYEEGCLSVPNQFAEIDRPSKCEVEYLDYHGKKQLLKADGLLATCIQHEMDHLEGVLFIDYLSKLKKSMIIKKLSKLKSNTAVL

SEQ ID NO: 171065 - protein, 167 aa, Unknown
  Bacterial polypetide isolated from the Sargasso Sea
MAKKLDILIFPDPRLRKIAEKITKFDKSLENLSNDMLKTMYEANGIGLAATQVDHHVRLIVMDLSEQRNDPKVFINPTFEVLKGYKMYEFEEGCLSIPGFNETLARPDKIELTWQDLRGKIHVDKPEGLLTVCIQHEIDHLDGKLMVDYISALKRDRVRSKLLKDFK

SEQ ID NO: 171066 - protein, 153 aa, Unknown
  Bacterial polypetide isolated from the Sargasso Sea
KEIQDLMDDMLDTMYDAPGIGLAAVQIGVPLRVIVMDISWRNEEGIKEPLYFVNPEITVKTKNLSTYEEGCLSVPDQYAEIDRPEECEINFLDYNGKKSTLNAKGLLATCIQHEMDHLEGILFIDHLSNMKRNMIVKKLIKTRKQSKKERIVA

SEQ ID NO: 171067 - protein, 168 aa, Unknown; identical to SEQ ID NO: 171047
  Bacterial polypetide isolated from the Sargasso Sea

SEQ ID NO: 171068 - protein, 183 aa, Unknown
  Bacterial polypetide isolated from the Sargasso Sea
MLVPKTALYTPPLEIHTLGAEVLRQPARRIGKVTEQTRELARDMLRSMYTAKGIGLAAPQVGIHQQLLVIDLDLENAATPPLVLINPEISAASASIDTYEEGCLSIPGVYLDVVRPTAIELSFRDEMGRPRKMKADGLMARCIQHEMDHLNGVLFVDRVTDEAGLQKELMDHGFQRQHVQSVS

SEQ ID NO: 171069 - protein, 167 aa, Unknown
  Bacterial polypetide isolated from the Sargasso Sea
MAKKLKILIFPDPRLRKVAKKVTKFDKSLENLANDMLETMYIANGIGLAATQVDRHIRLIVMDLSEERDDPRIFINPTFKILKNHKLFEFEEGCLSIPGFNETIARPDKIELTWQDIKGNQHIDKPEGLLTVCIQHEIDHLDGRLMVDYISSLKRDRIRSKLLKEHK

SEQ ID NO: 171070 - protein, 169 aa, Unknown
  Bacterial polypetide isolated from the Sargasso Sea
MAKKLKILIFPDPRLRKVAKKVIKFDKSLEILANDMLKTMYEANGIGLAATQVDFHVRLVVMDVSEDRNDPKIFVNPMYRVLDDHKLFEFEEGCLSIPGFNEIISRPDKIELTWQDLTGKEHKDYPEGLLTVCIQHEIDHLEGKLMVDYVSALKRDRVRKRLLKEFKRK

SEQ ID NO: 171071 - protein, 166 aa, Unknown
  Bacterial polypetide isolated from the Sargasso Sea
MAILEILTVPDPRLGTKAEPVENIAAVQGLIDDMLETLYATDNGIGLAATQVGRKEAIVIIDLSEKRDQPLVLINPQVTSGTEPAFGQEGCLSVPDYYADVERYSSVVVSALDRHGVPITVKSSDFLAIVMQHEIDHLQGKVFIDYLSPLKRKMALKKVKKHLKAT

SEQ ID NO: 171072 - protein, 148 aa, Unknown
  Bacterial polypetide isolated from the Sargasso Sea
SIRKLSREMLQSMYAAKGIGLAAPQIGINKELLVIDVNFEDSAAEPLILINPEITDYGTTLNSYEEGCLSIPGVYLNVVRPSTIKLKFRDEMGRPRKMKADGLLARCIQHEMDHLNGILFVDRVTSKDDLNKELIKEGFNQKDVISIN

SEQ ID NO: 171073 - protein, 174 aa, Unknown
  Bacterial polypetide isolated from the Sargasso Sea
MIRPIVLHPDARLKKKSVEVESITDALIKLADDMMETMYDAPGIGLAAPQIGVLERLIVMDCAKKEGEDPDPVIMVNPIITASSAEKSVYEEGCLSIPEHFAEITRPEFVQVEWIDLDGKQHSEEFNGLKSTCVQHEIDHLNGKLFIDYLGPMKRQLITRKMQKFKREKLRGDE

SEQ ID NO: 171074 - protein, 168 aa, Unknown
  Bacterial polypetide isolated from the Sargasso Sea
MAILEIIEFPHPNLRKIAAPVTAFDANLRRLVDDMFETMYEANGIGLAATQVDIHKRLLVLDTSEERDKPQVFVNPIIEIIESDLSEYDEGCLSVPGFYETISRPKKIKVEAQNCVGEKFSIEAEGILSVCIQHEIDHLDGKLFVDYLSSLKRNRIRDKLQKDHRSSY

SEQ ID NO: 171075 - protein, 118 aa, Unknown
  Bacterial polypetide isolated from the Sargasso Sea
AATQVDIHIRLVVMDISEERNEPRVFVNPEYTILDKSPFTYEEGCLSIPGFNEEISRPSKILLKWQDLQGNFHEEKPDGIFTVCAQHEIDHLDGKLFVDYLSPIKRDRIRKKLENRRN

SEQ ID NO: 171076 - protein, 142 aa, Unknown
  Bacterial polypetide isolated from the Sargasso Sea
MDDMLETMYAANGIGLAAIQIGIPKRIIVMDISKDGEKNPMYFVNPTIKNKDKEKTTYEEGCLSVPDYFAEVDRPKYCEVEYLDYNGENKILEADGLLATCIQHEMDHLEGILFIDYLSKLKKTMIVKKLSKRKNPPDRIIV

SEQ ID NO: 171077 - protein, 139 aa, Unknown
  Bacterial polypetide isolated from the Sargasso Sea
MALLPILEFPDPRLRTRAVPVVAVDPRIQQLVDDMFETMYAAPGIGLAASQVDVHERVIVMDLSEDHSDPRVFINPEITVIDETLGSYDEGCLSVPGFYETVERPEIVEVTALDRDGAAFHRATRWPHGYLSAARDRPS

SEQ ID NO: 171078 - protein, 169 aa, Unknown
  Bacterial polypetide isolated from the Sargasso Sea
MAKNLKILIFPDPRLRKVAEKITKFDKSLENLANSMLKTMYDANGIGLAATQVDQHIRLIVMDLSENRDDPRIFINPTYKILENHSLYEFEEGCLSIPGFNEVIARPDKIELRWQDLDGNEHIDKPEGLLTVCIQHEIDHLEGKLMVDYVSALKRDRVRSRLLKEYKRK

SEQ ID NO: 171079 - protein, 174 aa, Unknown
  Bacterial polypetide isolated from the Sargasso Sea
MTVKKLITIPDEVLRKKSQNIQKVGENEKKLIKDLFETMYHHKGIGLAAIQVGIPQRIIVIDITQKNNQKNPLCFINPVIKHSSNEKSKYEEGCLSIPNTFIEIERPKKCLVEYVDIEGKKNSMECDDLLSTCIQHEINHLDGKLIIDFLSKLKKDLIIKKLSKTRQNTDRIVV

SEQ ID NO: 171080 - protein, 168 aa, Unknown
  Bacterial polypetide isolated from the Sargasso Sea
MALLKVLRFPDERLRTQATPITEFTAELQTQIDDMFETMYQEKGIGLAATQVDYHKQLIVMDLQDEVDHPKVFINPEIIASSGDFCNEEGCLSVPGIYAKVDRAEFVTVKALDRHGNEFTVEADELFAICIQHEMDHLKGKLFVDYLSPLKRQRIKQKLEKAARQDAK

SEQ ID NO: 171081 - protein, 169 aa, Unknown
  Bacterial polypetide isolated from the Sargasso Sea
MAILDVLSFPDERLRTVAKPVEEVNDEIKQLVSDMFETMKDENGIGLAATQVNRHVQVVVMDVSEDQNEPRVFINPEIIRKDGSTISEEGCLSVPGNYAKVERAEAITVKALDQNGESFELDAEGLLAICIQHELDHLKGKLFIDYLSPLKRQRIRKKLEKEARLAAKA

SEQ ID NO: 171082 - protein, 167 aa, Unknown
  Bacterial polypetide isolated from the Sargasso Sea
MAKKLDILIFPDPRLRKVAEKVTKFDKCLEKLAQDMLQTMYEANGIGLAATQVDKHIRLVVMDLSEERNDPRIFVNPEYEILEGYEMFEFEEGCLSIPGFNETIARPDKIKLIWQNLSGEAMEDTPEGILTVCIQHEIDHLDGKLMVDYVSALKRDRIRNKLLKDFR

SEQ ID NO: 171083 - protein, 194 aa, Unknown
  Bacterial polypetide isolated from the Sargasso Sea
MARQLERQSSTVMVPKGEEQPESPLIHTLGSNELRKPAKRISKVNEQVRELAREMLRSMYAARGIGLAAPQVGVHQQLLVIDLDPEEASNHPLVLINPEIVSTSGALDTYEEGCLSIPGVYLNVVRPSQVEVKFRDELGRPQRRKADGLMARCILHEMDHLNGVLFVDRVSDELSLTDELQRLGFDRNDVKPVA

SEQ ID NO: 171084 - protein, 171 aa, Unknown
  Bacterial polypetide isolated from the Sargasso Sea
MTKLLYVPNPLLRQKAEKINIVGHEELKIAKKMKEIMLKAPGVGLAANQIGILKQIVTIFYVDKETKKEIEYNLFNPQIISYSEETIIMEEGCLSIPEQFAEIERPKIIKLQYLDDHNKLIEREVDGVEARILQHEIDHLSGKLFVDYLSYLKRNIMIKKVQKYLKIKNNA

SEQ ID NO: 171085 - protein, 169 aa, Unknown
  Bacterial polypetide isolated from the Sargasso Sea
MSKKLKILVFPDPKLRTVAKKITKFDKSLEKLSDNMLHTMYNANGIGLAATQVDEHIRLVVMDLSEDRNEPMVFVNPEYKVQKEHKLVEFEEGCLSIPGFNHNIARPDNIELKWQDLKGKEHEIKPEGMLSICIQHEIDHLEGKLMVDYVSALKRDRVRKRLLKEFKRK

SEQ ID NO: 171086 - protein, 170 aa, Unknown
  Bacterial polypetide isolated from the Sargasso Sea
MAILDVLRFPDERLRTVAAPVETFTPELQHIVDDMFETMYAEEGIGLAATQVDIHQRIIVIDVSENREDPLVLINPEIIEQAGSTGIEEGCLSVPGSRALVPRAEWVKVRALDRHGKAFELEADDLLAICIQHEMDHLVGKLFVDYLSPLKRQRIRQKLEKMAREDRKVL

SEQ ID NO: 171087 - protein, 178 aa, Unknown
  Bacterial polypetide isolated from the Sargasso Sea
MTIKRILTAPDPFLKQISKPVDSVTKEIQDLMDDMLETMYDAPGIGLAAVQIGVPLRVIVIDIAWRNEDGKKEPMYFVNPEIISTVENLATYEEGCLSVPDQYAEIDRPEKCKVKYLDYDGNEQIMSAEGMLATCIQHEMDHLEGILFIDHLSNLKKNMIVKKLIKSKKTSSKERIVA

SEQ ID NO: 171088 - protein, 165 aa, Unknown
  Bacterial polypetide isolated from the Sargasso Sea
MSELKILIFPDPKLRKVAKKIDKFDKSLEMLSKNMLNTMYEAEGIGLAATQVDIHIRLVVMDLSEERNEPRVFVNPEYTILDKSPFTYEEGCLSIPGFNEEISRPSKILLKWQDLQGNFHEEKPDGIFTVCAQHEIDHLDGKLFVDYLSPIKRDRIRKKLENRRN

SEQ ID NO: 171089 - protein, 153 aa, Unknown
  Bacterial polypetide isolated from the Sargasso Sea
KVAKKVLKFDKSLENLANDMLKTMYEANGIGLAATQVDFHVRLVVMDVSEERNDPKIFVNPIYKVLDGHKLFEFEEGCLSIPGFNEIISRPDKIELTWQDLSGKQHKDYPEGLLTVCIQHEIDHLEGKLMVDYVSALRRDRVRKRLLKEFKRK

SEQ ID NO: 171090 - protein, 155 aa, Unknown
  Bacterial polypetide isolated from the Sargasso Sea
LRKKAQPIERFDENLKDMAKKMLHTMYADKGIGLAATQVNHHERLIVIDVSENQDEPIYIVNPSYEVLDSSPEPSKEGCLSIPTFQQEVLRAKKIELSYQDLDGKPHKLTAEGLFGYCIQHEIDHLNGKLIVDYASSLKRSRIKAKLLKIKDGQG

SEQ ID NO: 171091 - protein, 85 aa, Unknown
  Bacterial polypetide isolated from the Sargasso Sea
YEEGCLSIPGVYLNVVRPSTIKLKFRDEMGRPRKMKADGLLARCIQHEMDHLNGILFVDRVTSKDDLNKELLKEGFNEKDVISIN

SEQ ID NO: 171092 - protein, 165 aa, Unknown
  Bacterial polypetide isolated from the Sargasso Sea
MSDLKILIFPDPKLRKVAKKIDKFDKSLEMLSKNMLKTMYEAEGIGLAATQVDIHIRLVVMDLSEERNEPRVFVNPEYTILDKSPFTYEEGCLSIPGFNEEISRPSKILLKWQDLQGNFHEEKPDGIFTVCAQHEIDHLDGKLFVDYLSPIKRDRIRKKLENRRN

SEQ ID NO: 171093 - protein, 170 aa, Unknown
  Bacterial polypetide isolated from the Sargasso Sea
MAKKLKILIFPDPRLRKVAKKVIKFDKSLENLAKDMLETMYEANGIGLAATQVDFHIRLVVMDISEDRNDPKIFVNPKYKVLDDHNLLEFEEGCLSIPGFNEVISRPDKIELTWQDLSGKEHKDTPEGLLTVCIQHEIDHLEGKLMVDYVSALKRDRVRKKLLKNLTENN

SEQ ID NO: 171094 - protein, 168 aa, Unknown
  Bacterial polypetide isolated from the Sargasso Sea
MNKLDILTFPDPRLRKKAQPIERFDENLKDMAEKMLHTMYADKGIGLAATQVNYHERLIVIDVSENQDEPIYIVNPSYEVLDSSPEPSKEGCLSIPTFQQEVLRAKKIELSYQDLDGNPHKLTAEGLFGYCIQHEIDHLNGKLIVDYASSLKRSRIKAKLLKIKDGQG

SEQ ID NO: 171095 - protein, 177 aa, Unknown
  Bacterial polypetide isolated from the Sargasso Sea
MIREILKMGDPRLLQIADPVDHFDTPELHELIKDMFETMHDANGAGLAAPQIGVNLQVVIFGFGHNERYPDAPPVPETVLINPTITPVSLDMEEGWEGCLSVPGLRGAVSRFSMIKYHGFDQYGKPIDRVAEGFHARVVQHECDHLIGKLYPMRINDFAKFGFTEVLFPDMDPNSDD

SEQ ID NO: 171096 - protein, 167 aa, Unknown
  Bacterial polypetide isolated from the Sargasso Sea
MAKKLKILIFPDPRLRKVAEMVTKFDKSLQILAEDMLETMYDANGIGLAATQVNKHIRLIVMDLSEERNEPKIFINPSFKILKGHKMYEFEEGCLSIPGFNETIARPDKIELKWQDINGKVHTDKPEGLLTVCIQHEIDHLEGKLMVDYISALKRDRVRSKLLKEYN

SEQ ID NO: 171097 - protein, 163 aa, Unknown
  Bacterial polypetide isolated from the Sargasso Sea
MAVLDILTIPDERLKRKAQPVKDIEAIQGFIDDLIETMYHTDDGIGLASTQVGSTDAVIVIDLSETRDQPLVLINPEIVEKSGEYVGEEGCLSIPGYRAKVSRFEKVKVTALDRQGKAVEIETDDFLAIVLQHEIDHLHGKVFIEHLSALKQQIALKKVRKYA

SEQ ID NO: 171098 - protein, 174 aa, Unknown
  Bacterial polypetide isolated from the Sargasso Sea
MAIRKILTIPDSILRQKSLPVDKVNREIKTLMDDMLNTMYDAPGIGLAAIQIGIPKRIVVMDLSKDPEKKNPMYFVNPEITWKSDLKSTYEEGCLSIPNQFAKIDRPEKCNVKFLDYDGNLKEIKADGLLSTCIQHEIDHLNGVLFIDYLSKLKKDIIIKKVSKDKKETERVVV

SEQ ID NO: 171099 - protein, 167 aa, Unknown
  Bacterial polypetide isolated from the Sargasso Sea
MAKKLDILIFPDPRLRKVAEKVTKFDKCLEKLAQDMLKTMYEANGIGLAATQVDKHIRLVVMDLSEERNDPRIFVNPEYEILEGYEMFEFEEGCLSIPGFNETIARPDKIKLIWQNLSGETMKDTPEGILTVCIQHEIDHLDGKLMVDYVSALKRDRIRNKLLKDFR

SEQ ID NO: 171100 - protein, 174 aa, Unknown
  Bacterial polypetide isolated from the Sargasso Sea
MATRKILTIPDSILRQKSLPVDKVNREIKTLMDDMLNTMYDAPGIGLAAVQIGIPKRIVVMDLSKDPEKKNPMYFVNPEITWKSDLKSTYEEGCLSIPNQFAKIERPEKCNVKFLDYDGNPKEIKAEGLLSTCIQHEIDHLNGVLFIDYLSKLKKDIIIKKVSKDKKETERVVV

SEQ ID NO: 171101 - protein, 169 aa, Unknown
  Bacterial polypetide isolated from the Sargasso Sea
MAKKLKILIFPDPRLRKVAKKVTKFDKSLEILANDMLKTMYDANGIGLAATQVDFHVRLVVMDISEDRNDPKIFVNPVYRVLDDHKLFEFEEGCLSIPGFNEIISRPDKIELTWQDLSGKEHKDYPVGLLTVCIQHEIDHLEGKLMVDYVSALKRDRVKKRLLKEFNRK

SEQ ID NO: 171102 - protein, 202 aa, Unknown
  Bacterial polypetide isolated from the Sargasso Sea
MPGNFAQLAKNAEKKKPLISVSKEPVKNPPLKVYQLGHEALRTPANRIVKVDDSIRKLVKDMLITMYSSKGIGLAAPQVGIQKRLLVIDLNFEDPNAPPMVFINPEIISSSASLDTYEEGCLSIPGVYLNVLRPSSIKLSFRDEMGRPKKMNADGLMARCIQHEIDHLNGVCFVDKVSDEEELKKQLNENNFNHSDVIKETN

SEQ ID NO: 171103 - protein, 163 aa, Unknown
  Bacterial polypetide isolated from the Sargasso Sea
MAVLDILTIPDERLKRKAQPVKDIEAIQGFIDDLIETMYHTDDGIGLASTQVGSTDAVIVIDLSENRDQPLVLINPEIVEKSGEYVGEEGCLSIPGYRAKVTRFEKVKVTALDRQGKAIEIETDDFLAIVLQHEIDHLHGKVFIEHLSALKQQIALKKVRKYA

SEQ ID NO: 171104 - protein, 289 aa, Unknown
  Bacterial polypetide isolated from the Sargasso Sea
EADAYRQRILAARPAGSRFEPLMVLYLTDNTSPEDVRAAKASGFVHAAKLYPAGATTNSDSGVTSIDKIFPALEAMAEVGMLLLVHGEVTRAEIDVFDREKIFIDEHLSRVVERFPTLKVVFEHITTRDAVQFVEAASANVGATITAHHLLYNRNHMLVGGIRPHFYCLPILKRNVHQEALLDAATGGNAKFFLGTDSAPHAKHAKEAACGCAGCYTAYAAIELYAEAFEQRGALDKLEAFASFHGPDFYGMPRNSDSITLVREEWTVPASLPLGENSVVPLRAGETLR

SEQ ID NO: 171105 - protein, 311 aa, Unknown
  Bacterial polypetide isolated from the Sargasso Sea
RPDDWHLHLRDEDFLPITVNESAKSFARAIIMPNLVPPITKLVDAENYKRRILNALKPNLSFDPLMTLYLTEETDPKEVKEGFLSGQISAVKLYPAGATTNSQSGVRNFEKIKPVLEIMAEIGCPLCIHGEVTEKDIDIFDREKAFIDNVLNKIRTDNPTLKVIMEHITTKDAVDYVFSENENLAATVTTHHLSINRNDLLAGGIRPHFYCLPVVKRETHRLALVEAVVSGSPKFFLGTDSAPHLDRDKESSCGCAGCFTATNSLEILAHIFEEQNALNKLELFTSINGAKFYGKNINKDKIRIVKKDKPT

SEQ ID NO: 171106 - protein, 217 aa, Unknown
  Bacterial polypetide isolated from the Sargasso Sea
MSDRLTLLRPDDWHIHLRDGAVLPHTVGDAARTFGRAIIMPNLVPPVRNAAEADAYRQRILAARPAGSRFEPLMVLYLTDNTSPEDVCAAKASGFVHAAKLYPAGATTNSDSGVTSIDKIFPALEAMAEVGMLLLVHGEVTRAEIDVFDREKAFIDEHLTRVVERFPTLKVVFEHITTRDAVQFVEAASANVGATITAHHLLYNRNHMLVGGIRPHF

SEQ ID NO: 171107 - protein, 214 aa, Unknown
  Bacterial polypetide isolated from the Sargasso Sea
MTQTITITRPDDWHLHVRDGDAMRCVVPHTARQMGRAIIMPNLKPPVTTAEMAADYRARILSAVPAGSRFQPLMTLYLTDNLGPEEIVRAKAAGVVACKLYPAGATTNSDHGVTDLRKIYPTLQAMQREGLVLLVHGEVTDQSIDLFDREAVFIEQQLKPLRKDFPELRIVMEHVTTKEAAEYVAAADDFLAATITPQHLLFNRNAIFLGGVRP

SEQ ID NO: 171108 - protein, 198 aa, Unknown
  Bacterial polypetide isolated from the Sargasso Sea
EKVFIDQHLTQLINTIAGFKVVFEHITTADAVEFVKAAPERVAATITPQHLLLNRNDMLVGGVRPHNYCLPVLKRRTHQEALRAVVASGNTKFFLGTDSAPHAKHRKEAACGCAGCYSAWSAIELYAQVFEDLGCLDKLEGFASHYGPDFYNLPRNSGTITLVKQDWTVPAEITLPDGSPIVPFFAEQQLSWQLKQGL

SEQ ID NO: 171109 - protein, 274 aa, Unknown
  Bacterial polypetide isolated from the Sargasso Sea
MRDGQMLNHVVRHTARVFRRAIVMPNLRPPVTTASQARAYRQRILEACLEQPAFTPLMTAYLTDTTDAADLEDGFRAGVFTAAKLYPANATTNSSAGVTDLAKIGSVLACMQRIGMPLLIHGEVTDSDVDVFDREAEFITRHLKPLRRNYPELRIVFEHITTEQAVDFVGSSERNLAATITPHHLHINRNSMFAGGFRSDFYCLPVAKREQHRLALRKAATSGDPRFFLGTDSAPHSRASKETACGCAGIFNAPHALESYAQVFDQEGALDRLE

SEQ ID NO: 171110 - protein, 371 aa, Unknown
  Bacterial polypetide isolated from the Sargasso Sea
ALRRAAPCATRRALGRIHATVSATAGSDRLTITAPDDWHLHVRDDAKIASVVPFTARVFRRALIMPNLVPPVRTTHEAGTYREKILAAVPEGVSFEPQMTLYLTDNTSPAEIEAAAASGFVRGCKLYPAGATTNSDAGVTDVNKCMPALEKMAELGLVLEVHGEVTHGSVDMFDRERVFLDEVLSKLVDKVPGLKIVMEHITTEDAVEFCKAQGDNVAATITPQHILLNRNAMLIGGIRPHLYCLPILKRESHRVAVTAAATGGDKKFFLGTDSAPHPKGAKESACGCAGVFSAHAALPFYAMAFEKEGKLENLEAFASHNGADFYGVPRNEGTVTLVREGWECPGEYEFGGDVVVPFMAGQEIPWRVVEA

SEQ ID NO: 171111 - protein, 354 aa, Unknown
  Bacterial polypetide isolated from the Sargasso Sea
MTASNASSPATLSLARPDDWHLHLRDGDMLAAVLPHTARQFGRAIVMPNLKPPVTTTAQAQAYRERILAALPAGMTFEPLMTLYLTDNTPPDEIRRARESGFVHGVKLYPAGATTNSDHGVTDLAKCAKTLEAMQETGMPLLVHGEVTDASIDLFDREKVFIDRVMTPLRRDFPGLKVVFEHITTKDAADYVRDADAAPGLLGATITAHHLLYNRNALFVGGIRPHYYCLPVLKRETHRVALVEAATSGNPRFFLGTDSAPHARDAKETACGCAGCYTALHALELYAEAFDHAGALDKLEGFASFFGADFYGLPRSAETVTLRREAWELPREIFAGDTPVVPLRGGETIGWKLA

SEQ ID NO: 171112 - protein, 261 aa, Unknown
  Bacterial polypetide isolated from the Sargasso Sea
MQTPDDWHLHFRDGDMLKETVAATARCFKRAIVMPNLVPPVTNAAEALAYKERILAARPAGSCFEPLMVLYLTDKTTAEDIKAAKAAGVVAAKLYPAGATTNSHSGVSSLSKLYPVLEVMAEQQMLLLVHGEVTDSHIDIFDREKVFIDQHLTQLINTIQGLKVVFEHITTADAVEFVKAAPDRVAATITPQHLLLNRNDMLVGGVRPHNYCLPVLKRRTHQEALRAVVATGNKKFFLGTDSAPHAKHRKEAACGCAGCYS

SEQ ID NO: 171113 - protein, 343 aa, Unknown
  Bacterial polypetide isolated from the Sargasso Sea
MKTLTITRPDDWHIHLRDGAQLTDTVRDISRYMGRAIVMPNLVPPAIDTETALAYYDRIKAQVPAGSQFEPLMVLYLTDKTSPEEIRKAKASGKIVAAKLYPAGATTNSDSGVTDLKNIYPALEAMQEVGMLFLVHGEVTDSSIDIFDRERVFIENILSKIVADFPKLKIVLEHITTKDAVDFVTQASDNVAATITAHHLLYNRNHMLAGGIRPHFYCLPILKRNTHQQALLAAAASGNKKFFLGTDSAPHAKDRKEAACGCAGSYTAHAAIELYAEAFESVNALDKLEAFASFNGPDFYNLPRNSDTITLVKKSWDVPVSYPLGDNNVVPIRAGEQIDWQVE

SEQ ID NO: 171114 - protein, 451 aa, Unknown
  Bacterial polypetide isolated from the Sargasso Sea
MTKSSIGIKNVRIIDPYNNIDNVLDILIENGKITNIAEGIFSQSGNSNLVVIDGTDKILSPGFIDLHTHLRDPGEEHKETIETGMRAAAKGGFTTICSMPNTNPPVDNSTTVKYILDESNKFELIQVLPIGCVTKGRKGMQISEMWDLKNAGCVGFSDDGDPIYNSEIMQTALQYSEHLGLPVINHCEDTQLSKHSAVNEGKISNRLGLSGWPNQAEDIMIARDIELAKKYGGHLHIAHASTSRSVELINDAKNLGVNITAEVTPHHLTMTDSWLLGHQKDTDVFASLGSEAYDSNLKVNPPLRTKTDIYSLLTGLKEGIIDAIATDHAPHALQDKITTLDDAAYGINGLETAFTLLASLYHQNMLDIVDIINRLTLGAANVISNSIERPKGIKKGELADIVLLDLNSDFTIIGKDFISKSKLTPLEGMTLKGKVILTLAKGSIVYEENNN

SEQ ID NO: 171115 - protein, 323 aa, Unknown
  Bacterial polypetide isolated from the Sargasso Sea
MSEKEFIIRKPDDWHLHLRDGEMLASVIQHSAANFERAIIMPNLVPPILTTDDAIAYKEHINQVIPHGMSFQPLMTLYLTEATKTSDIKQGFDLGVVTALKLYPAGATTNSENGVKEFENVYSILEFMAEADIPLLVHGEVTDPEIDIFDREAVFIERVLDPLRKRIPELRIVMEHITTKDAVDYVIQGGPNIAATVTTHHLIINRNAYLAGGIRPHYYCLPVAKRETHRMALRSAVCSGNEKFFLGTDSAPHLDGAKENACGCAGIYTSVNTLSCLAHVFEDEDALDKLEGFVSVHGPSFYKLPVNSGLLKFQKTQRSSFLS

SEQ ID NO: 171116 - protein, 343 aa, Unknown
  Bacterial polypetide isolated from the Sargasso Sea
MTTLTITRPDDWHIHLRDGAQLKDTVRDISRYMGRAIVMPNLVPPAIDTETALAYYDRIKAQVPAGSQFEPLMVLYLTDKTSPEEIRKAKASGKIVAAKLYPAGATTNSDSGVTDLKNIYPALEAMQEVGMLFLVHGEVTDSSIDIFDRERVFIENILSKIVADFPKLKIVLEHITTKDAVDFVTQASDNVAATITAHHLLYNRNHMLAGGIRPHFYCLPILKRNTHQQALLGAAASGNKKFFLGTDSAPHAKDRKEAACGCAGSYTAHAAIELYAEAFESVNALDKLEAFASFNGPDFYNLPRNSDTITLVKKSWDVPVSYPLGDNNVVPIRAGEQIDWQVE

SEQ ID NO: 171117 - protein, 312 aa, Unknown
  Bacterial polypetide isolated from the Sargasso Sea
MTYSSKRRTLLLAAATAPLALSVAACASRQAAAPDDATAAAAAAAAAVTPAAAGQVLAELERSAGGRLGVCAIDIATGRRAEHRADERFPFCSTFKAMLSAAVLAQSVDRPALLQQRVTYTKADLVNYSPVSGKHVDDGMTVAALCEAAIQYSDNSAANLLMKLLGGPSAVTAYARSIGDDAFRLDRWETELNTALPGDPRDTTTPAAMAASMRALMLGDALPAAQRAQLVTWMRGNKVGDKRLRAGVPAGWTVGDKTGTGDYGTTNDAGVMWSPSGAPIALVVYYTQTRADARAKDDVIASVARIVVRAFG

SEQ ID NO: 171118 - protein, 213 aa, Unknown
  Bacterial polypetide isolated from the Sargasso Sea
CLPTLRAAYAEGLVDAVDGFCEGIAFSAEQMARVFDVAAELGLPVKLHAEQLSHQGGSKLAAERGALSVDHVEYATEEDARAMAASGSVAVLLPGAFYTIRETQLPPMEHFRAHGVPMALATDCNPGSSPLTSLLLTLNMGCTLFRLTPEEALAGITTHAARALGLSDRGRIAPGLRADLVVWDVARPAELAYRIGFNPLHARVMGGKLEVRT

SEQ ID NO: 171119 - protein, 201 aa, Unknown
  Bacterial polypetide isolated from the Sargasso Sea
GLVDAVDAFCETIGFTPAQTARMFEAAQRHGLPVKLHAEQLSDQGGAALVARYGGLSADHLECLTDAGVAAMAQAGTVAVLLPGAFYCLRETRLPPMAALRAAGVPMAVSTDCNPGTSPMSSLLLAMNMACTLFRLTPLEALTGATRHAAAALGLSGTCGVLAPGCAADFALWRIDRPADLAYAMGLNPCVGVVKDGAVAA

SEQ ID NO: 171120 - protein, 288 aa, Unknown
  Bacterial polypetide isolated from the Sargasso Sea
MKPSQNWDLLWHSVKLACMNKGGAAYGLIEDGVIAVQDGKIAWTGSASELPGPAEILAREVRDGQGMCITPGLIDSHTHLVYAGNRAREFEMRLEGASYEELAKAGGGILSTVQATRSASEEALFEASKPRLMSLLEEGVTTVEIKSGYGLETETECRMLRVARKLESELPVSISTSFLGAHALPAEFQGKSDDYIDLVCEEMISEVAQQGLADTVDAFCEGIGFDLAQTERVFQAARKHGLPVKLHAEQLSDLKGARLAAEYGAVSADHLEYIEEDGVTAMAESGTV

SEQ ID NO: 171121 - protein, 235 aa, Unknown
  Bacterial polypetide isolated from the Sargasso Sea
MRTLWQHCHVATMADGRYSAIEDAAIVTSAGLIEWIGPRAELAPVEADRTVDLGGAWVTPGLIDCHTHAVFGGNRSGEFEQRLQGVSYAEIAAQGGGIASTVRATRAASEDELFASARQRVQALMRDGVTTLEVKSGYGLDLANERKMLRVARRLADELPLTVRATCLAAHALPPEYAGRADDYIAHICDEMLPALAAEGLVDAVDAFCEHLAFSPAQVERLFIKARELGLPVKL

SEQ ID NO: 171122 - protein, 410 aa, Unknown
  Bacterial polypetide isolated from the Sargasso Sea
MSWDQVWIDVNVATMDPSISAPYGAITNAAIAVKDGKIAWLGPRSELPAFDVLSIPVYRGKGGWITPGLIDAHTHLVFAGNRANEFELRLKGATYEEIARAGGGIISTVNACREADEAELFDLGRQRLNALAKEGVTTVEIKSGYGLDTETELKILRVARELGQHHHVDVKTTFLGAHAVPPEFKDNSDGYVDLIINKMLPAVIAENLADAVDVFCENIAFNLEQTERVLSAAKAAGLQVKLHAEQLSNMGGSELAARLGAKSVDHIEYLDEAGVQALSESGTCAVLLPGAFYFLRETQKPPIDLLRQYGVPMVLASDFNPGSSPICSTLLMLNMGCTLFRLTPEEALAGLTLNAAKALGIEDNVGSLVVGKQADFCLWDIATPAQLAYSYGVNPCKDVVKNGKLVHQHT

SEQ ID NO: 171123 - protein, 408 aa, Unknown
  Bacterial polypetide isolated from the Sargasso Sea
MSWDQVWIDVNVATMDPSISAPYGAITNAAIAVKDGKIAWLGPRSELPAFDVLSIPVYRGKGGWITPGLIDAHTHLVFAGNRANEFELRLKGATYEEIARAGGGIISTVNACREADEAELFDLGRQRLNALAKEGVTTVEIKSGYGLDTETELKILRVARELGQHHHVDVKTTFLGAHAVPPEFKDNSDGYVDLIINKMLPAVIAENLADAVDVFCENIAFNLEQTERVLSTAKAAGLQVKLHAEQLSNMGGSELAARLGAKSVDHIEYLDEAGVKALSESGTCAVLLPGAFYFLRETQKPPIDLLRQYGVPMVLASDFNPGSSPICSTLLMLNMGCTLFRLTPEEALAGLTLNAAKALGIEDNVGSLVVGKQADFCLWDIATPAQLAYSYGVNPCKDVVKNGKLIHQ

SEQ ID NO: 171124 - protein, 400 aa, Unknown
  Bacterial polypetide isolated from the Sargasso Sea
MPNRLLITNASIAKMDEPDDGYGLMMHAALLIQDEKIEWLGSVSDIPAGLGDPEELDACGRLLTPALIDCHTHIVHGGNRAREFEMRLEGASYEEIARAGGGIISTVTATRETDEAALLQDALKRADSLIAEGVSLIEIKSGYGLDVETELKMLRVARAIERERSVRVVTSFLGAHAVPKGADADFYIDKVCIPALEAAHKEGLVDAVDGFCEGIAFDTVQMGRLFERARQLDIPVKLHAEQLSNIGGTKLAASYNALSVDHVEYADKTDIAAMAKAGSVAVLLPGAFYTLHETQKPLVEAFRSESVPMAVATDWNPGSSPMGSLLLAMNMSCTLFGLTPVEALAGTTRNAARALGLKDCGIVAPGKRADLAIWDVLEPAELSYRFGVNPLHRRIFGGRL

SEQ ID NO: 171125 - protein, 406 aa, Unknown
  Bacterial polypetide isolated from the Sargasso Sea
MNCERVWLNVTPATLRSDLADYGLLEPHALGVHEGRIHALVPMQDLKGPYPAHWQDMKGKLVTPGLIDCHTHLIFAGSRAEEFELRQKGVPYAEIARKGGGIISTVRATRAASEDQLFELALPRVKSLIREGVTTVEIKSGYGLTLEDELKMLRVARRLGEALPIRVKTTLLAAHAVPPEYRDDPDSWVETICQEIIPAAAEAGLADAVDVFCEHIGFSLAQTEQVYLAADQYGLAVKGHMDQLSNLGGSTLAANFGALSVDHLEYLDPEGIQALAHRGVVATLLPTAFYFLKETKLPPVVALRKAGVPMAVSSDINPGTAPIVSLRMAMNMACTLFGLTPVEAMAGVTRHAARALGEQEQLGQLRVGMLADFLVWNCGHPAELSYLIGVDQLVSRVVNGEETLHG

SEQ ID NO: 171126 - protein, 407 aa, Unknown
  Bacterial polypetide isolated from the Sargasso Sea
MKPTVWHHLRLCPHGHPDETIDDAAIAVDETGTIVWLGAVSALPHGYAHWRREDLHGAWVTPGLVDCHTHLVYGGTRADEFAQRLAGVSYEEIARQGGGIVSTVRATRAADETTLFVQAAARLQPLLAEGVTAIEIKSGYGLDLASERKMLRVARQLGERFPVTVYTTFLGAHALPPEYAGRADAYIDEVCDRMLPALADEGLVDAVDVFCERIGFSLAQTERVFEAATRRGLPVKLHAEQLSNAGGTALAARYRALSADHLEFLDEAGIEAMKAAGTVAVLLPGAYYFIRETQLPPIELLRKHGVPIALATDHNPGTSPLESLLLTLNMGCTLFRMTVPEVLQGVTCHAAAALGRADRHGALEVGRQADFAAWSVGSLAELAYWIGRPLCEQVVRGGTTVFRRMNG

SEQ ID NO: 171127 - protein, 396 aa, Unknown
  Bacterial polypetide isolated from the Sargasso Sea
MQNTQQNNNLENIDLLLIDANIATMDPTRDTPYGIIKNAALAIKNGIIVWLGEQASLPPFDAFATPTLSIKGQWLTPGLIDCHTHLVFAGSRAQEFEQRLQGVSYEQIAAQGGGIASTVKATRAADREQLFVDAKDRLNTLLKEGVTTVEIKSGYGLDTENEIKLLEVARLLGEHHPIDIKTTFLGAHALPKEYKGRADEYIDLVCNEMLEQVVAGDLADAVDVFCENVGFSYEQTKRVFAAATKHNLPVKCHAEQLSNQHGAELVAEFNGLSADHIEYLDEQGVEAMAKAGTVAVLLPGAFYFLRETKQPPIELLNQYKVPIAIASDFNPGTSPLCSVQLMMNMACTLFRLTPEQALAGVTSNAAKALGLNDRGVLKVGARADIAHWQISHPSQL

SEQ ID NO: 171128 - protein, 163 aa, Unknown
  Bacterial polypetide isolated from the Sargasso Sea
HFDAHTDTYSNGSRFDHGTMFYHAPMEGLIDVEHSIQIGIRTDFDQSKHEFAVIDAMQANDLHANEIAAQIRERVGDLPVYLTFDIDCLDPAFAPGTGTPVCGGLTSDKVLKILRALKGINMVGMDVVEVSPSYDQSELTAIAAATIASELLHLWTHKNKYSL

SEQ ID NO: 171129 - protein, 125 aa, Unknown
  Bacterial polypetide isolated from the Sargasso Sea
MSTLGHQYDNSLVSNAFGFLRLPLNFQPYDSDADWVITGVPFDMATSGRAGGRHGPAAIRQVSTNLAWEHNRFPWNFDMRERLNVVDCGDLVYAFGDAREMSEKLQAHAERLLAAGKRMLSFGGD

SEQ ID NO: 171130 - protein, 237 aa, Unknown
  Bacterial polypetide isolated from the Sargasso Sea
SGPSAIRQASGTLRWEEARWPWRYALADHLKMVDCGDLVFPPGDSAAFTQALYDRALDIIQSGKTLMSFGGDHFISLPLLRAHHAVHGELALIHFDAHTDTYQNGGEFDHGTMFYRAPREGLIDPAASAQIGIRTEYDADHHEFLVLDADKVHHLGCKAVSDRVRERVAGRKAYLTFDIDCLDPAFAPGTGTPVAGGLSSNVVLQILRGLKGVDVVGMDIVEVAPSYDHAEITALAA

SEQ ID NO: 171131 - protein, 173 aa, Unknown
  Bacterial polypetide isolated from the Sargasso Sea
MSTLGHQYDNSLVSNAFGFLRLPMNFMPYDSDADWVITGVPFDMATSGRAGGRHGPAAIRQVSTNLAWEHNRFPWNFDMRERLNVVDCGDLVYAFGDAREMSEKLQAHAEKLLSAGKRMLSFGGDHFVTLPLLRAHAKHFGKMALVHFDAHTDTYANGCEFDHGTMFYTAPNE

SEQ ID NO: 171132 - protein, 340 aa, Unknown
  Bacterial polypetide isolated from the Sargasso Sea
MKTVGDGAFRREDLNSRSNDMTYSGALSFLRRKYSRDLNGVDVAVTGIPYDCATSNRPGARFGPRGIRSASTELASLDAFPFNFDPFKFLAVVDYGDVWLDYGYPQKVVEKVEKHADTILKQSTSLLSLGGDHFITYPLLRSHYKVHGPISLIHFDAHSDTWEDDGNRVDHGSMFLRAAREGIVIPEKSVQIGIRTQNYCTHGFNILHAPWIHTHGVQAVIDTIHKVVSSDDPVYITFDIDCLDPAFAPGTGTPVVGGLTTTQVLPILQSLGDLNLIGMDIVEVAPAYDHAEITALAAATLGYNYLCLIAQMKGAKPEHIGTGLDETPSWFSSWLIKLSK

SEQ ID NO: 171133 - protein, 162 aa, Unknown
  Bacterial polypetide isolated from the Sargasso Sea
FAKGAAERVVVAGLGRSRAAMHLDTVFSFCDRDLVTIFPEVANSIVPFILRPDESRPGGIDVRREDKPFVDVVAESLNLKKLRVVETGGDAYEAEREQWDDGNNVVCLEPGVVIGYDRNTYTNTLLRKAGVEVITISASELGRGRGGGHCMTCPIIRDPIDY

SEQ ID NO: 171134 - protein, 266 aa, Unknown
  Bacterial polypetide isolated from the Sargasso Sea
SFILPPLPNTQFTRDTTCWIYGGVTLNPMYWPARRQETLLTSAIYKFHPEFTNADFQIWYGDPDQEHGAATLEGGDVMPIGNGVVLIGMGERSSHQAIGQLARNLFQNKAVERVIVAGLPKSRAAMHLDTVFSFCDRDLVTVFPEVVNQIVPFTLRPDESKPHGIDIQREKTNFLETVAAALNLKALRVVETGGNSFAAEREQWDDGNNVVAVEPGVVIGYDRNTYTNTLLRKAGVEVITISAGELGRGRGGGHCMTCPIIRDPID

SEQ ID NO: 171135 - protein, 106 aa, Unknown
  Bacterial polypetide isolated from the Sargasso Sea
IIPPNSFALARTVEYFKIPRDVLVICLGKSTYARCGIIVNVTPLEPEWEGHVTLEFSNTTPLPAKVYANEGACQFLFFKGDAPPDVSYKDRSGKYMGQKGVTLPKL

SEQ ID NO: 171136 - protein, 158 aa, Unknown
  Bacterial polypetide isolated from the Sargasso Sea
MSVQPDKWIAKMAKDKEMISPFEAKQIRRDKISFGVSSYGYDARVSEEFKIFTNVNSEIIDPKNFKPTNFITKNGSECIIPPNSFVLASTVEYFKIPNDVLVICLGKSTYARCGIIVNVTPLEPGWEGHVTLEFSNTTPLPAKIYANEGAAQFIFLRG

SEQ ID NO: 171137 - protein, 197 aa, Unknown
  Bacterial polypetide isolated from the Sargasso Sea
MRLCDRDIYQHLQDGKIKIDPTPSYDQISGVTVDIRLGNKFRVFEDHQAPFIDLSGPKAQVQEALDHVMSDEIELEEGKAFFLHPGELALAITHESVTLPDNIVGWLDGRSSLARLGLMVHVTAHRIDPGWSGNIVLEFYNSGKLPLALRPKMKIGALSFEVLSAPAEKPYNARVDAKYKGQAGAVASRISSDDESK

SEQ ID NO: 171138 - protein, 139 aa, Unknown
  Bacterial polypetide isolated from the Sargasso Sea
SEFKIFTNVNSEIVDPKNFKPSSFVSKTGSECIIPPNSFALASTIEKFKIPEDVLVICLGKSTYARCGIIVNVTPLEPGWTGHVTLEFSNTTPLPAKIYANEGVAQFIFLKGNERPEITYADRKGKYMDQENKVTLPKV

SEQ ID NO: 171139 - protein, 165 aa, Unknown
  Bacterial polypetide isolated from the Sargasso Sea
MRLCDRDIYQHLQDGKIKIDPTPSYDQISGVTVDIRLGNKFRVFEDHQAPFIDLSGPKAQVQEALDHVMSDEIELEEGKAFFLHPGELALAITHESVTLPDNIVGWLDGRSSLARLGLMVHVTAHRIDPGWSGNIVLEFYNSGKLPLALRPKMKIGALSFEVCQR

SEQ ID NO: 171140 - protein, 121 aa, Unknown
  Bacterial polypetide isolated from the Sargasso Sea
NFKKEGFVSKKSKVCIIPPNSFVLARTVEYFKIPENVIVICLGKSTYARCGIIVNVTPLEPGWEGHVTLEFSNTTPLPAKIYANEGAAQFIFIKGNEKPETTYSQRKGKYMKQKGVTLPKI

SEQ ID NO: 171141 - protein, 184 aa, Unknown
  Bacterial polypetide isolated from the Sargasso Sea
MSVQSDKWIIQMARDNDMISPFEDKQVRGDKISFGVSSYGYDARVSDEFKIFTNVNSEIVDPKNFKSSNFITKNSSECIIPPNSFVLARTIEYFKIPKNVLVICLGKSTYARCGIIVNVTPLEPGWEGHVTLEFSNTTPLPAKIYANEGVAQFVFIKGNEDPAVSYADRNGKYQGQKGVTLPKI

SEQ ID NO: 171142 - protein, 122 aa, Unknown
  Bacterial polypetide isolated from the Sargasso Sea
KNFKSSNFITKNSSQCIIPPNSFVLARTVEYFKIPKNVLVICLGKSTYARCGIIVNVTPLEPGWEGHVTLEFSNTTPLPAKIYANEGVAQFVFIKGNEDPAVSYADRNGKYQGQKGVTLPKI

SEQ ID NO: 171143 - protein, 137 aa, Unknown
  Bacterial polypetide isolated from the Sargasso Sea
MSIKSDKWIKDMSINHEMIKPFSEGQVRLDDSGNKLISYGVSSYGYDVRCSNEFKVFTNIHSAVVDPKSFDEKSFVDINSDVCIIPPNSFALARTIEYFKIPRNVLTVCLGKSTYARCGIIVNVTPLEPEWEGHVTL

SEQ ID NO: 171144 - protein, 73 aa, Unknown
  Bacterial polypetide isolated from the Sargasso Sea
RCGIIVNVTPLEPGWEGHVTLEFSNTTPLPAKIYANEGVAQFVFIKGNEDPAVSYADRNGKYQGQKGVTLPKI

SEQ ID NO: 171145 - protein, 158 aa, Unknown
  Bacterial polypetide isolated from the Sargasso Sea
MSIKPDVWIKRMAESEGMIEPFSENQVRVDENGEKLISYGVSSFGYDVRCANEFKVFTNIHSATVDPKVFDDNSFVDITSDVCVIPPNSFALARTVEYFRIPRNVLTICLGKSTYARCGIIVNVTPLEPEWEGHVTLEFSNTTNLPEKIYAGEGVAQM

SEQ ID NO: 171146 - protein, 166 aa, Unknown
  Bacterial polypetide isolated from the Sargasso Sea
EDQIRYSDDNSRLISYGLSSYGYDVRCANEFKVFTNIHSAIVDPKSFDEKSFVDINSDVCVIPPNSFALARTVEYFRIPRDVLTICLGKSTYARCGIIVNVTPLEPEWEGHVTLEFSNTSNLPAKIYAGEGVAQMIFHQSDEQCEVSYKDRDGKYQGQTGVTLPKT

SEQ ID NO: 171147 - protein, 142 aa, Unknown
  Bacterial polypetide isolated from the Sargasso Sea
MTIKSDKWIRKMAVEHGMIEPFQEDQIRYSDDNSRLISYGLSSYGYDVRCANEFKVFTNIHSAIVDPKSFDEKSFVDINSDVCVIPPNSFALARTVEYFRIPRDVLTICLGKSTYARCGIIVNVTPLEPEWEGHVTLEFSNT

SEQ ID NO: 171148 - protein, 128 aa, Unknown
  Bacterial polypetide isolated from the Sargasso Sea
MSVLSDKWIKKMAKTKKIISPFVPKQTRKGRISYGLSSYGYDARVSNDFKIFTNVNSTIVDPKNFKKDGFISKKSNICVIPPNSFALARTVEYFKIPDNVIVICLGKSTYARCGIIVNVTPLEPGWEG

SEQ ID NO: 171149 - protein, 184 aa, Unknown
  Bacterial polypetide isolated from the Sargasso Sea
MSVLSDRWIKKMALENEMIKPFVAEQKANKNISFGLSSFGYDARVSNEFKVFTDVNSVIVDPKNFEKNSFVTRTGPECIIPPNSFVLASTVEYFKIPKNVLVICLGKSTYARCGIIVNVTPLEPGWEGHVTLEFSNTTPLPAKIYANEGAAQFIFLEGNEAPETTYSQRNGKYMKQTGVTLPKV

SEQ ID NO: 171150 - protein, 184 aa, Unknown
  Bacterial polypetide isolated from the Sargasso Sea
MSVLSDRWIKKMAIEKEMIKPFISEQKHDGTISYGLSSFGYDARVSDEFKIFTDVDSAVVDPKNFKNNSFVSRKINECIIPPNSFVLASTVEYFKIPKDVLVICLGKSTYARCGIIVNVTPLEPGWEGHVTLEFSNTTPLPAKIYANEGAAQFIFLKGNEEPEITYDKRNGKYMRQAGVTLPKV

SEQ ID NO: 171151 - protein, 148 aa, Unknown
  Bacterial polypetide isolated from the Sargasso Sea
MTIKSDKWIKEMAMHHNMIEPFQEDQVKTNNGDKIVSYGTSSYGYDVRCADEFKVFTNINSTMVDPKNFDDKSFIDIKSDVCTIPPNSFALARTVEYFKIPRQVLTLCLGKSTYARCGIIVNVTPLEPEWEGHVTLEFSNTTSLPAKI

SEQ ID NO: 171152 - protein, 184 aa, Unknown
  Bacterial polypetide isolated from the Sargasso Sea
MSVQSDNWIRKMAISQSMIKPLVSKQIRKGKISFGLSSYGYDARVSNEFKIFTNVNSGIVDPKTFKKESFVTKKGKECIIPPNSFALASTMEYFKIPDNVLVICLGKSTYARCGIIVNVTPLEPGWEGHVTLEFSNTTPLPAKIYANEGVAQFIFIKGNEKPSVTYNDRKGKYMKQRGVTLPKI

SEQ ID NO: 171153 - protein, 188 aa, Unknown
  Bacterial polypetide isolated from the Sargasso Sea
MAIKSDKWIKDMAEGHGMIEPFQYDQVKQNGKGSIVSFGTSSYGYDVRCSDEFKIFTNINSSFVDPKAFDEQSFVDVKSDVCIIPPNSFALARTVEYFRIPRKVLTLCLGKSTYARCGIIVNVTPLEPEWEGHVTLEFSNTTPLPAKIYANEGVAQFIFLESDEVCETSYKDRKGKYQGQKGVTLPKT

SEQ ID NO: 171154 - protein, 74 aa, Unknown
  Bacterial polypetide isolated from the Sargasso Sea
CRCGIIVNVTPLEPGWEGHVTLEFSNTTPLPAKIYANEGVAQFVFIKGNEDPAVSYADRNGKYQGQKGVTLPKI

SEQ ID NO: 171155 - protein, 125 aa, Unknown
  Bacterial polypetide isolated from the Sargasso Sea
VDPKNFKPTNFITKNGSECIIPPNSFVLARTVEYFKIPKDVLVICLGKSTYARCGIIVNVTPLEPGWEGHVTLEFSNTTPLPAKIYANEGVAQFIFLKGNEVPEVTYADRNGKYMGQKGVTLPKV

SEQ ID NO: 171156 - protein, 129 aa, Unknown
  Bacterial polypetide isolated from the Sargasso Sea
MSIKNDRWIIEQAKKGMIEPFSEKQVKQEGNRSLISYGVSSYGYDVRCAREFKIFTNVHASVIDPKSFDPNSFITIEKDICTIPPNSFALARTVEYFRIPRHTLTICLGKITYARCGIIVNVTPLEPEW

SEQ ID NO: 171157 - protein, 184 aa, Unknown
  Bacterial polypetide isolated from the Sargasso Sea
MPVLSDKWIKKMATSQEMIKPFEEKQIRNGKISYGLSSFGYDARVSNEFKIFTNVNSEIVDPKKFKPSNFITKNIDECIIPPNSFVLASTVEYFKIPKNVLVICLGKSTYARCGIIVNVTPLEPGWEGHVTLEFSNTTPLPAKIYANEGVAQFVFLEGNENPEVSYSDRKGKYMGQTGVTLPKV

SEQ ID NO: 171158 - protein, 184 aa, Unknown
  Bacterial polypetide isolated from the Sargasso Sea
MTVLSDKWIKKAAKQKGMIKPFVGKQVRKGKISFGLSSYGYDARVSNEFKIFTNVNSGVVDPKVFKKESFVTKIGKECIIPPNSFALARTMEYFKIPDDILVICLGKSTYARCGIIVNVTPLEPGWEGHVTLEFSNTTPLPAKIYANEGVAQFIFLKGNERPSVTYANRKGKYMKQKGVTLPKV

SEQ ID NO: 171159 - protein, 173 aa, Unknown
  Bacterial polypetide isolated from the Sargasso Sea
MTVLSDKWIKKNAQIKGMIKPFVGKQVRKGKISFGLSSYGYDARVSNEFKIFTNVNSGVVDPKVFKKESFVTKKGKECIIPPNSFALARTVEYFKIPENVLVICLGKSTYARCGIIVNVTPLEPGWEGHVTLEFSNTTPLPAKIYANEGVAQFVYIKGNEKPNGFLCEKKRQI

SEQ ID NO: 171160 - protein, 121 aa, Unknown
  Bacterial polypetide isolated from the Sargasso Sea
FKPTNFVTRKGPECIIPPNSFALASTVEKFKIPEDVLVICLGKSTYARCGIIVNVTPLEPGWTGHVTLELSNSTPLPAKIYANEGCCQFIFLKGNERPEITYADRKGKYMDQENKVTLPKV

SEQ ID NO: 171161 - protein, 124 aa, Unknown
  Bacterial polypetide isolated from the Sargasso Sea
MSIKSDKWIKEMANNHRMIEPFEAGQVRLGAKEEKLISYGTSSYGYDVRCSNEFKVFTNINSATVDPKSFDENSFVDVKSDVCVIPPNSFALASTIEYFRIPRNVLTICLGKSTYARCGIIVNV

SEQ ID NO: 171162 - protein, 172 aa, Unknown
  Bacterial polypetide isolated from the Sargasso Sea
MIKPFSDDQIRKDENGNKLISYGVSSYGYDVRCSNEFKVFTNIHSAIVDPKSFDEKSFVDITSDVCVIPPNSFALASTVEYFKIPRNVLTICLGKSTYARCGIIVNVTPLEPEWEGHVTLEFSNTTNLPAKIYAGEGVAQMLFFESDEECDVSYKDRGGKYQGQTGVTLPKA

SEQ ID NO: 171163 - protein, 184 aa, Unknown
  Bacterial polypetide isolated from the Sargasso Sea
MTVLSDKWIKKMVKTHEIIKPFISKQTRKGKISFGLSSYGYDARVSNEFKIFTNVNSGVVDPKKFKKESFVTKIGKECIIPPNSFALARTIEYFKIPENVLVICLGKSTYARCGIIVNVTPLEPGWEGYVTLEFSNTTPLPAKIYANEGVAQFVFIKGNQTPEVTYSKRKGKYMKQKGVTLPKV

SEQ ID NO: 171164 - protein, 183 aa, Unknown
  Bacterial polypetide isolated from the Sargasso Sea
MTVLSDKWIKRLATQKKMIKPFVGRQVRKGKISFGLSSYGYDARVSNEFKIFTNVNSGVVDPKVFKKDSFVTKIGKECIIPPNSFALARTIEYFKIPENVLVICLGKSTYARCGIIVNVTPLEPGWEGHVTLEFSNTTPLPAKIYANEGVAQFVFIKGNEKPSVTYAKRKGKYMKQKGVTLPK

SEQ ID NO: 171165 - protein, 184 aa, Unknown
  Bacterial polypetide isolated from the Sargasso Sea
MTVQSDKWIKKMSKESGMIYPFEEQQVRGNKISFGTSSYGYDARVGSEFKVFTNVNSEIVDPKNFKSTSFVSKTGSECIIPPNSFALASTVEYFKIPKDILVICLGKSTYARCGIIVNVTPLEPGWEGHVTLEFSNTTPLPAKIYANEGVAQFIFLKGNELPELTYADRKGKYMGQTGVTLPKV

SEQ ID NO: 171166 - protein, 184 aa, Unknown
  Bacterial polypetide isolated from the Sargasso Sea
MSVLSDKWIKRIAKTKGMIKPFVSKQVRKGKISFGLSSYGYDARVSNEFKIFTNVNSGVVDPKEFKNESFVTKKGKECIIPPNSFALARTIEYFKIPENVLVICLGKSTYARCGIIVNVTPLEPGWEGHVTLEFSNTTPLPAKIYANEGVAQFVFIKGNEKPEITYAKRKGKYMKQKGVTLPKV

SEQ ID NO: 171167 - protein, 189 aa, Unknown
  Bacterial polypetide isolated from the Sargasso Sea
MTIKSDKWIRKMAKEHNMIEPFEAGQVRKGQNNDKLISYGTSSYGYDVRCSNEFKVFTNIHSATVDPKHFDENSFVDVVDDVCVIPPNSFALASTIEYFRIPRNVLTICLGKSTYARCGIIVNVTPLEPEWEGHVTLEFSNTTSLPAKIYANEGVAQMLFLESDEECEVSYKDRGGKYQGQTGVTLPKT

SEQ ID NO: 171168 - protein, 189 aa, Unknown
  Bacterial polypetide isolated from the Sargasso Sea
MTIKSDKWIKKMAQEHQLIEPFTENQVRDADSGNKIISYGVSSFGYDVRCADEFKVFTNINSATVDPKSFDENSFVDVKSDVCVIPPNSFALARTIEYFKIPRNVLTICLGKSTYARCGIIVNVTPLEPEWEGHVTLEFSNTTTLPAKIYAGEGVAQMIFLESDEDCETSYKDRKGKYQGQTGVTLPKT

SEQ ID NO: 171169 - protein, 184 aa, Unknown
  Bacterial polypetide isolated from the Sargasso Sea
MSVQSDKWIIKMAKEQAMISPFEDKQIREGKISFGVSSYGYDARVSNEFKIFTNVNSEIVDPKNFKPTNFVTKESDECIIPPNSFVLARTVEYFKIPSDVLVICLGKSTYARCGIIVNVTPLEPGWEGHVTLEFSNTTPLPAKIYANEGVAQFIFLKGNEKPDVSYADRNGKYMGQKGVTLPKI

SEQ ID NO: 171170 - protein, 152 aa, Unknown
  Bacterial polypetide isolated from the Sargasso Sea
HCGVSSYGYDARVSDEFKIFTNVNSEIVDPKNFKSSNFITKNSSECIIPPNSFVLARTVEYFKIPKNVLVICLGKSTYARCGIIVNVTPLEPGWEGHVTLEFSNTTPLPAKIYANEGVAQFVFIKGNEDPLVSYADRNGKYQGQKGVTLPKI

SEQ ID NO: 171171 - protein, 76 aa, Unknown
  Bacterial polypetide isolated from the Sargasso Sea
TYARCGIIVNVTPLEPEWEGHVTLEFSNTTNLPAKIYAGEGVAQMLFFESDEECDVSYKDRGGKYQGQTGVTLPKA

SEQ ID NO: 171172 - protein, 179 aa, Unknown
  Bacterial polypetide isolated from the Sargasso Sea
TIIIDPRPRIEAISGVSVDVRLGNQFRVFQDHTAPYIDLSGPSAEMQLALDRVMSDKIDIAENQAFFLHPGELALAVTLESVTLPADIVGWLDGRSSLARLGLMVHVTAHRIDPGWQGKIVLECYNSGKLPLALRPTMTIGALNFERLSSAVARPYNTRESAKYKDQQDAVPSRISQDK

SEQ ID NO: 171173 - protein, 184 aa, Unknown
  Bacterial polypetide isolated from the Sargasso Sea
MSVLSDKWIRKMSKEYNMISPFEEKQVRGKSISYGLSSFGYDARVSDEFKIFTNVNSEIVDPKNFKPTNFVTKNVSECVIPPNSFVLARTVEKFKIPNDVLVICLGKSTYARCGIIVNVTPLEPGWEGYVTLEFSNTTPLPAKIYANEGVAQFIFLKGNEKPEVTYADRDGKYMGQTGVTLPKV

SEQ ID NO: 171174 - protein, 184 aa, Unknown
  Bacterial polypetide isolated from the Sargasso Sea
MSVQSDKWIKQMAKDHKMISPFEDKQVRGDKISFGVSSYGYDARVSNEFKIFTNVNSEIVDPKNFKPTNFVTKKSSECIIPPNSFVLASTIEYFKVPKNILVICLGKSTYARCGIIVNVTPLEPGWEGHVTLEFSNTTPLPAKIYANEGAAQFVFLKGSEVPETTYADRNGKYMGQTGVTLPKV

SEQ ID NO: 171175 - protein, 171 aa, Unknown
  Bacterial polypetide isolated from the Sargasso Sea
MPVLSDKWIRRNVKLKGMIKPFVNKQVRKGKISFGLSSYGYDARVSNEFKIFTNVNSGIVDPKIFKNESFVTKKGKECIIPPNSFALASTIEYFKIPEDVLVICLGKSTYARCGIIVNVTPLEPGWEGHVTLEFSNTTPLPAKIYANEGVAQFIFIKGNEKPEISYAKRKG

SEQ ID NO: 171176 - protein, 119 aa, Unknown
  Bacterial polypetide isolated from the Sargasso Sea
DDKGFVDRPGKECIIPPNSFALARTVEYFRIPRDVLVVCLGKSTYARCGIIVNVTPLEPEWEGHVTLEFSNTTPLPAKIYANEGACQFLFYKGEAPPEVSYKDRKGKYMMQTGVTLPKL

SEQ ID NO: 171177 - protein, 180 aa, Unknown
  Bacterial polypetide isolated from the Sargasso Sea
MSVQSDKWIKKMAKEHAMISPFEEEQVRGNKISFGTSSYGYDARVNSEFKIFTNVNSEIVDPKNFKPASFVSKTGSECIIPPNSFALASTVEFFKIPKDVLVICLGKSTYARCGIIVNVTPLEPGWEGHVTLEFSNTTPLPAKIYANEGVAQFIFLKGNEVPEVTYADRKGKYMGQTGVT

SEQ ID NO: 171178 - protein, 140 aa, Unknown
  Bacterial polypetide isolated from the Sargasso Sea
CSNEFKVFTNIHSAIVDPKSFDEKSFVDINSDVCVIPPNSFALARTVEYFKIPRNILTVCLGKSTYARCGIIVNVTPLEPEWEGHVTLEFSNTTNLPAKIYAGEGVAQMLFFESDEECEISYKDRDGKYQGQTGVTLPKT

SEQ ID NO: 171179 - protein, 81 aa, Unknown
  Bacterial polypetide isolated from the Sargasso Sea
CLGKSTYARCGIIVNVTPLEPEWEGHVTLEFSNTTNLPAKIYANEGVAQMVFFEADEVCSTSYKDRGGKYQGQKGVTLPKT

SEQ ID NO: 171180 - protein, 184 aa, Unknown
  Bacterial polypetide isolated from the Sargasso Sea
MSVLSDKWIRKMAKEKKMISPFEEKQIRGNSISYGLSSFGYDARVSDEFKIFTNVNSEIVDPKNFKPTNFVTRNNSECIIPPNSFVLARTVEKFKIPDDILVICLGKSTYARCGIIVNVTPLEPGWEGFVTLEFSNTTPLPAKIYANEGVAQFIFLKGNEKPDVTYADRDGKYMGQTGVTLPKV

SEQ ID NO: 171181 - protein, 186 aa, Unknown
  Bacterial polypetide isolated from the Sargasso Sea
MSIKSDKWIKRMALESRLIDPFIDKQVKHTEEAGSTVSYGLSSYGYDVRCADEFKIFTNINSATVDPKNFDEDSFIDIKSEVCVIPPNSFALARTVEYFKIPRNVLTICLGKSTYARCGIIVNVTPLEPEWEGHVTLEFSNTTSLPAKIYANEGVAQMLFFESDELCETSYADRKGKYQGQLGVTP

SEQ ID NO: 171182 - protein, 172 aa, Unknown
  Bacterial polypetide isolated from the Sargasso Sea
MPVQSDKWIKKMATDYKMIEPFEDKQIRGNSISYGVSSYGYDARVGDEFKIFTNVNTEIVDPKNFKSTSFVTKKGTECIIPPNSFVLASTVEYFRIPDNVLVICLGKSTYARCGIIVNVTPLEPSWCGNVTLEFSNTTPLPAKIYANEGACQFIFLKGNEKPETTYSDREGK

SEQ ID NO: 171183 - protein, 172 aa, Unknown
  Bacterial polypetide isolated from the Sargasso Sea
MSVLSDKWIKKMSQEHEMISPFEGKQVRGSNISFGLSSYGYDARVSDEFKIFTNVNSEIVDPKNFKPTNFVTKKVSECIIPPNSFVLARTIEKFKIPNDVLVVCLGKSTYARCGIIVNVTPLEPGWEGYVTLEFSNTTPLPAKIYANEGVAQFIFLKGNEKPEVTYADRDGK

SEQ ID NO: 171184 - protein, 184 aa, Unknown
  Bacterial polypetide isolated from the Sargasso Sea
MSVQSDKWIIQMARDNDMISPFEDKQVRGDKISFGVSSYGYDARVSDEFKIFTNVNSEIVDPKNFKSSNFITKNSSECIIPPNSFVLARTVEYFKIPKNVLVICLGKSTYARCGIIVNVTPLEPGWEGHVTLEFSNTTPLPAKIYANEGVAQFVFIKGNEDPAVSYADRNGKYQGQKGVTLPKI

SEQ ID NO: 171185 - protein, 87 aa, Unknown
  Bacterial polypetide isolated from the Sargasso Sea
GERFNYLFGKSTYARCGIIVNVTPLEPEWEGHVTLEFSNTTTLPAKIYANEGVAQMLFFESDERCEITYKDRNGKYQGQTGVTLPKP

SEQ ID NO: 171186 - protein, 189 aa, Unknown
  Bacterial polypetide isolated from the Sargasso Sea
MTIKSDKWIRKMAVEHGMIEPFQEDQIRYSDDNSRLISYGLSSYGYDVRCANEFKVFTNIHSAIVDPKSFDEKSFVDINSDVCVIPPNSFALARTVEYFRIPRDVLTICLGKSTYARCGIIVNVTPLEPEWEGHVTLEFSNTSNLPAKIYAGEGVAQMIFHQSDEQCEVSYKDRDGKYQGPTGVTLPKT

SEQ ID NO: 171187 - protein, 196 aa, Unknown
  Bacterial polypetide isolated from the Sargasso Sea
MRLCDRDIERHLAEGKIKIEPMPDTDMISGVSVDIRLGNKFRVFQAHAAPYIDLSGPRAEVDKALNSVMSDEIYIADGDKFILHPGELALAMTLESVTLPADIVGWLDGRSSLARLGLMVHVTAHRIDPGWSGNIVLEFYNSGKLPLALRPKMKIGALNFELMTGAAERPYNKRLDAKYQQQTGAVASRIGHDDKG

SEQ ID NO: 171188 - protein, 181 aa, Unknown
  Bacterial polypetide isolated from the Sargasso Sea
MSIKSDRWIKEMAIHHEMIKPFELEQVRFGKNEEKLISYGTSSYGYDVRCSNEFKVFTNINSATVDPKRFDEDSFVDIQSEVCVIPPNSFALASTIEYFKIPRNVLTICLGKSTYARCGIIVNVTPLEPEWEGHVTLEFSNTTSLPAKIYANEGVAQMLFLESDEECEVSYKDRGGKYQGQ

SEQ ID NO: 171189 - protein, 189 aa, Unknown
  Bacterial polypetide isolated from the Sargasso Sea
MTIKSDKWIRKMAVEHGMIEPFQEDQIRYSDDNSRLISYGLSSYGYDVRCANEFKVFTNIHSAIVDPKSFDEKSFVDINSDVCVIPPNSFALARTVEYFRIPRDVLTICLGKSTYARCGIIVNVTPLEPEWEGHVTLEFSNTSNLPAKIYAGEGVAQMIFHQSDEQCEVSYKDRDGKYQGQTGVTLPKT

SEQ ID NO: 171190 - protein, 141 aa, Unknown
  Bacterial polypetide isolated from the Sargasso Sea
ESFNEFKIFTNVNSGIVDPKVFKKESFVTKIGKECIIPPNSFALARTIEYFKIPEDVLVICLGKSTYARCGIIVNVTPLEPGWEGHVTLEFSNTTPLPAKIYANEGVAQFVFMRGNEKPQVSYAKRKGKYMKQKGVTLPKV

SEQ ID NO: 171191 - protein, 76 aa, Unknown
  Bacterial polypetide isolated from the Sargasso Sea
TYARCGIIVNVTPLEPGWEGHVTLEFSNTTPLPAKIYANEGAAQFIFLSGNEEPETTYDQRKGKYMKQTGVTLPKV

SEQ ID NO: 171192 - protein, 133 aa, Unknown
  Bacterial polypetide isolated from the Sargasso Sea
LDHVMSDEIELEEGKAFFLHPGELALAITHESVTLPDNIVGWLDGRSSLARLGLMVHVTAHRIDPGWSGNIVLEFYNSGKLPLALRPKMKIGALSFEVLSAPAEKPYNARVDAKYKGQAGAVASRISSDDESK

SEQ ID NO: 171193 - protein, 150 aa, Unknown
  Bacterial polypetide isolated from the Sargasso Sea
MSIKSDQWIRKMAEEYKMIEPFEPVQIKKNGTEKLISYGTSSYGYDVRCADEFKIFTNVHSATVDPKNFDPDSFVDTKGDHCIIPPNAFALARTIEYFRIPRKILTICLGKSTYARCGIIVNVTPLEPEWEGHVTLEFSNTTNLPAKIYA

SEQ ID NO: 171194 - protein, 185 aa, Unknown
  Bacterial polypetide isolated from the Sargasso Sea
MPVLSDKWIEKYAKAKGMIKPFVSKQVRKGKISFGLSSYGYDARVSNEFKIFTNVNSGIVDPKVFKKESFVTKIGKECIIPPNSFALARTIEYFKIPENVLVICLGKSTYARCGIIVNVTPLEPGWEGHVTLEFSNTTPLPAKIYAYEGVAQFVFLKGNETPEITYAKRKGKYMKQKGVIFRRFD

SEQ ID NO: 171195 - protein, 184 aa, Unknown
  Bacterial polypetide isolated from the Sargasso Sea
MSVLSDKWIKKMVSEHSMISPFEEKQVREGKISYGLSSFGYDARVSDEFKIFTNVNSEIVDPKNFKPSNFVTKKISECVIPPNSFVLASTIEYFKIPKDVLVICLGKSTYARCGIIVNVTPLEPGWHGHVTLEFSNTTPLPAKIYANEGVAQFIFLKGNESPETTYSDRKGKYMGQTGVTLPKV

SEQ ID NO: 171196 - protein, 139 aa, Unknown
  Bacterial polypetide isolated from the Sargasso Sea
MTIMSDNWIKKMSVEEGMIEPFVDAQKKEGTISYGVSSYGYDARVSEEFKIFTNVDSAIVDPKNFNDKGFVDRPGKECIIPPNSFALARTVEYFRIPRDVLVICLGKSTYARCGIIVNVTPLEPEWEGHVTLEFSNTTP

SEQ ID NO: 171197 - protein, 78 aa, Unknown
  Bacterial polypetide isolated from the Sargasso Sea
KSTYARCGIIVNVTPLEPEWEGHVTLEFSNTTNLPAKIYAGEGVAQMLFFESDEECDVSYKDRGGKYQGQTGVTLPKT

SEQ ID NO: 171198 - protein, 162 aa, Unknown
  Bacterial polypetide isolated from the Sargasso Sea
VANQKSNNSISYGLSSYGYDARVSDEFKIFTDVDSAVVDPKNFKSNSFVSRKVKECVIPPNSFALARTVEYFKIPKDVLVICLGKSTYARCGIIVNVTPLEPGWEGHVTLEFSNTTPLPAKIYANEGAAQFIFLKGTEIPETTYDQRDGKYMKQIGVTLPKV

SEQ ID NO: 171199 - protein, 117 aa, Unknown
  Bacterial polypetide isolated from the Sargasso Sea
DSFVHVEGDVCVIPPNSFALACTVEYFRIPRNVLTICLGKSTYARCGIIVNVTPLEPEWEGHVTLEFSNTTTLPAKIYANEGVAQMLFFESDEVCETSYADRGGKYQGQRGVTLPRA

SEQ ID NO: 171200 - protein, 171 aa, Unknown
  Bacterial polypetide isolated from the Sargasso Sea
IEPFQEDQIRYSDDNSRLISYGLSSYGYDVRCANEFKVFTNIHSAIVDPKSFDEKSFVDINSDVCVIPPNSFALARTVEYFRIPRDVLTICLGKSTYARCGIIVNVTPLEPEWEGHVTLEFSNTSNLPAKIYAGEGVAQMIFHQSDEQCEVSYKDRDGKYQGQTGVTLPKT

SEQ ID NO: 171201 - protein, 121 aa, Unknown
  Bacterial polypetide isolated from the Sargasso Sea
MPVLSDKWIKKTVKSKGMIKPFLSKQVRKGKISFGLSSYGYDARVSNEFKIFTNVNSGIVDPKVFKKESFVTKIGKECIIPPNSFALARTVEYFKIPDDVLVICLGKSTYARCGIIVNVTP

SEQ ID NO: 171202 - protein, 184 aa, Unknown; identical to SEQ ID NO: 171173
  Bacterial polypetide isolated from the Sargasso Sea

SEQ ID NO: 171203 - protein, 104 aa, Unknown
  Bacterial polypetide isolated from the Sargasso Sea
PPNSFVLARTVEYFKIPKDVLVICLGKSTYARCGIIVNVTPLEPGWEGHVTLEFSNTTPLPAKIYANEGVAQFIFLKGNEKPEVTYADRNGKYQGQKGVTLPKV

SEQ ID NO: 171204 - protein, 189 aa, Unknown
  Bacterial polypetide isolated from the Sargasso Sea
MSIKSDKWIQEMSEKNGMIKPFSKNQVRLDDDGNKLISYGVSSYGYDVRCSNDFKVFTNIHSAVVDPKSFDEKSFVDIDSDICVIPPNSFALARTIEYFKIPRNVLTVCLGKSTYARCGIIVNVTPLEPEWEGHVTLEFSNTTNLPAKIYAGEGVAQMLFFESDEECKISYKDRGGKYQGQTGVTLPKT

SEQ ID NO: 171205 - protein, 107 aa, Unknown
  Bacterial polypetide isolated from the Sargasso Sea
CIIPPNSFVLARTVEYFKIPKNVLVICLGKSTYARCGIIVNVTPLEPGWEGHVTLEFSNTTPLPAKIYANEGVAQFVFIKGNEDPAVSYADRNGKYQGQKGVTLPKI

SEQ ID NO: 171206 - protein, 121 aa, Unknown
  Bacterial polypetide isolated from the Sargasso Sea
MSVQSDNWIIKMAKEQAMISPFEDKQIREGKISFGVSSYGYDARVSNEFKIFTNVNSEIVDPKNFKPTNFVTKEADECIIPPNSFVLARTVEYFKIPSDVLVICLGKSTYARCGIIVNVTP

SEQ ID NO: 171207 - protein, 142 aa, Unknown
  Bacterial polypetide isolated from the Sargasso Sea
VRCSNEFKVFTNIYSATVDPKHFDENSFVDVVDDVCVIPPNSFALASTIEYFRIPRNVLTICLGKSTYARCGIIVNVTPLEPEWEGHVTLEFSNTTSLPAKIYANEGVAQMLFLESDEECEVSYKDRGGKYQGQTGVTLPKT

SEQ ID NO: 171208 - protein, 144 aa, Unknown
  Bacterial polypetide isolated from the Sargasso Sea
MSVLSDKWIKKMAKSKKIISPFVSKQTRKGRISYGLSSYGYDARVSNDFKIFTNVNSTIVDPKNFKKDGFISKKSNICVIPPNSFALARTVEYFKIPDNVIVICLGKSTYARCGIIVNVTPLEPGWEGHVTREFSNTTPLPAKI

SEQ ID NO: 171209 - protein, 184 aa, Unknown
  Bacterial polypetide isolated from the Sargasso Sea
MSVLSDKWIRKMSKEQDMISPFKETQVRGKSISYGLSSFGYDARVSDEFKIFTNVNSEIVDPKNFKPTNFVTKKVSECIIPPNSFVLARTVEKFKIPNDILVICLGKSTYARCGIIVNVTPLEPGWEGYVTLEFSNTTPLPAKIYANEGVAQFIFLKGNEKPDVTYADRDGKYMGQTGVTLPKV

SEQ ID NO: 171210 - protein, 184 aa, Unknown
  Bacterial polypetide isolated from the Sargasso Sea
MTVLSDKWIRKMSKENDMISPFEEKQIRGDSISYGLSSYGYDARVSDEFKIFTNVNSEIVDPKNFKPTSFVTKNLKECIIPPNSFVLARTVEKFKIPNDVLVICLGKSTYARCGIIVNVTPLEPGWEGYVTLEFSNTTPLPAKIYANEGVAQFIFLKGNEKPEVTYADRKGKYMGQTGVTLPKV

SEQ ID NO: 171211 - protein, 163 aa, Unknown
  Bacterial polypetide isolated from the Sargasso Sea
MTVLSDKWIKKAVKQKGMIKPFVDKQVRKGKISFGLSSYGYDARVSNEFKIFTNVNSGIVDPKVFKKESFVTKIGKECIIPPNSFALATTMEYFKIPNDILVICLGKSTYARCGIIVNVTPLEPGWEGHVTLEFSNTTPLPAKIYANEGVAQIYFFKGVMSGL

SEQ ID NO: 171212 - protein, 139 aa, Unknown
  Bacterial polypetide isolated from the Sargasso Sea
SNEFKIFTNVNSEIVDPKNFKPTNFITKNGSECIIPPNSFVLARTVEYFKIPKDVLVICLGKSTYARCGIIVNVTPLEPGWEGQVTLEFSNTTPLPAKIYANEGVAQFIFLKGTEEPEVTYADRNGKYQGQKGVTLPKV

SEQ ID NO: 171213 - protein, 188 aa, Unknown
  Bacterial polypetide isolated from the Sargasso Sea
MSVKSDFWIRKMANEYKMIEPFEPTQVKKNGKNRLISYGTSSYGYDVRCSDEFKIFTNIHSATVDPKNFDPDSFVDVKSDYCVIPPNAFVLARTVEYFRIPRNVLTICLGKSTYARCGIIVNVTPLEPEWEGHVTLEFSNTTSLPAKIYANEGVAQVIFLESDEECETSYKDRSGKYQGQRGVTLPKA

SEQ ID NO: 171214 - protein, 154 aa, Unknown
  Bacterial polypetide isolated from the Sargasso Sea
KISFGLSSYGYDARVSSEFKIFTNVNSEIVDPKNFKSSNFITKKGSACIIPPNSFVLARTVEYFKIPKDVLVVCLGKSTYARCGIIVNVTPLEPGWEGYVTLEFSNTTPLPAKIYANEGVAQFIFLKGNESPEVTYSDRKGKYMKQKGVTLPKV

SEQ ID NO: 171215 - protein, 194 aa, Unknown
  Bacterial polypetide isolated from the Sargasso Sea
MRLCDRDIYQHLQDGKIKIDPTPDYDQISGVTVDIRLGNKFRVFEDHQAPFIDLSGPKAQVQEALDHVMSDEIELEEGKAFFLHPGELALAITHESVTLPDNIVGWLDGRSSLARLGLMVHVTAHRIDPGWSGNIVLEFYNSGKLPLTLRPKMKIGALSFEVLSAPAEKPYNARVDAKYKGQAGAVASRISSDD

SEQ ID NO: 171216 - protein, 184 aa, Unknown
  Bacterial polypetide isolated from the Sargasso Sea
MSVLSDKWIKNMSKKKNMIKPFVPKQVRKGKISFGLSSYGYDARVSNDFKIFTNVNSTTVDPKKFRKEAFISKKSKVCVIPPNSFALARTVEYFKIPENVMVICLGKSTYARCGIIVNVTPLEPGWEGYVTLEFSNTTPLPAKIYANEGAAQFVFIKGNERPQVSYSKRKGKYMKQKGVTLPKI

SEQ ID NO: 171217 - protein, 184 aa, Unknown
  Bacterial polypetide isolated from the Sargasso Sea
MSVLSDKWIRKMSNEKGMITPFEEKQVRGDNISFGLSSFGYDARVADEFKIFTNVNSEIVDPKNFKPTNFVTKKTSECIIPPNSFVLARTIEKFKIPDDVLVVCLGKSTYARCGIIVNVTPLEPGWEGYVTLEFSNTTPLPAKIYANEGVAQFIFLKGNEKPEVTYADRDGKYMGQTGVTLPKV

SEQ ID NO: 171218 - protein, 184 aa, Unknown
  Bacterial polypetide isolated from the Sargasso Sea
MTVLSDRWIKKMSKSAGMIKPFVDKQNRKGKVSFGLSSYGYDARVSNEFKIFTNVNSGVVDPKVFKKDSFVTKRSKECIIPPNSFALARTVEYFKIPKNVLVICLGKSTYARCGIIVNVTPLEPGWEGHVTLEFSNTTPLPAKIYANEGVAQFVFIKGNEVPNITYDKRKGKYMKQKGVTLPKI

SEQ ID NO: 171219 - protein, 175 aa, Unknown
  Bacterial polypetide isolated from the Sargasso Sea
KEYNMIEPFEPSQVRKNGKEQLISYGTSSYGYDVRCSDEFKIFTNVHSATVDPKNFDPNSFVDIKNDHCIIPPNAFALARTVEYFRIPRNVLTICLGKSTYARCGIIVNVTPLEPEWEGHVTLEFSNTTNLPAKIYANEGVAQVIFLESDEECETSYKDRSGKYQGQRGVTLPKA

SEQ ID NO: 171220 - protein, 184 aa, Unknown
  Bacterial polypetide isolated from the Sargasso Sea
  misc_feature (23)..(23): Xaa can be any naturally occurring amino acid
MSVQSDKWIIQMARENNMITPLXDKQIRGDKISFGVSSYGYDARVSDEFKIFTKVNSEIVDPKNFKSSNFITKNSSECIIPPNSFVLARTVEYFKIPKNVLVICLGKSTYARCGIIVNVTPLEPGWEGHVTLEFSNTTPLPAKIYANEGVAQFVFMMGNEDPSVSYADRNGKYQGQKGVTLPKI

SEQ ID NO: 171221 - protein, 178 aa, Unknown
  Bacterial polypetide isolated from the Sargasso Sea
MSVLSDKSIRKLAIENDMITPFQDKQVSNGKISYGLSSYGYDARVGQDFKIFTNVNSEIVDPKKFTSSNFVTKKTSESIIIPPNSFALATTVEYFNIPRNIMCIVVGKSTYARCGIIVNVTPIEPGFRGEVTIELSNTTPLPAKIYANEGVAQFIFLEGNEPPEVSYADKNGKYQEQK

SEQ ID NO: 171222 - protein, 66 aa, Unknown
  Bacterial polypetide isolated from the Sargasso Sea
VTPLEPEWEGHVTLEFSNTTPLPAKIYANEGVAQMLFYQSDEQCDVTYKDRGGKYMGQIGVTPPKA

SEQ ID NO: 171223 - protein, 184 aa, Unknown
  Bacterial polypetide isolated from the Sargasso Sea
MPVLSDKWITKMALENQMISPFEGKQIRADKISFGLSSFGYDARVSNEFKIFTNVNSEIVDPKNFKPSNFITKNVSECIIPPNSFVLASTVEYFKIPKDVLVICLGKSTYARCGIIVNVTPLEPGWEGHVTLEFSNTTPLPAKIYANEGVAQFIFLKGNEKPEVTYSDRKGKYMGQTGVTLPKV

SEQ ID NO: 171224 - protein, 189 aa, Unknown
  Bacterial polypetide isolated from the Sargasso Sea
MSIKSDKWIKEMAINHEMIKPFELNQVRLGKNEEKLISYGTSSYGYDVRCSDEFKVFTNINSATVDPKRFDEDSFVDVQSEVCVIPPNSFALASTIEYFKIPRNVLTICLGKSTYARCGIIVNVTPLEPEWEGHVTLEFSNTTSLPAKIYANEGVAQMLFLESDEECEVSYKDRGGKYQGQRGVTLPKA

SEQ ID NO: 171225 - protein, 142 aa, Unknown
  Bacterial polypetide isolated from the Sargasso Sea
VRCADEFKIFTNINSATVTPKNFDEDSFIDIKSEVCVIPPNSFALARTVEYFKIPRNVLTICLGKSTYARCGIIVNVTPLEPEWEGHVTLEFSNTTSLPAKIYANEGVAQMLFFESDELCETSYADRKGKYQGQLGVTPPKV

SEQ ID NO: 171226 - protein, 147 aa, Unknown
  Bacterial polypetide isolated from the Sargasso Sea
SYGYDARVSNEFKIFTNVNSGVVDPKIFKKDSFVTKKSKECIIPPNSFALARTVEYFKIPKNVLVICLGKSTYARCGIIVNVTPLEPGWEGHVTLEFSNTTPLPAKIYANEGVAQFVFIKGNEVPSITYDKRKGKYMKQKGVTLPKI

SEQ ID NO: 171227 - protein, 189 aa, Unknown
  Bacterial polypetide isolated from the Sargasso Sea
MSIKSDKWIQEMSEKNGMIKPFSKNQVRLDEDGNKLISYGVSSYGYDVRCSNEFKVFTNIHSAVVDPKSFDEKSFVDIDSDICVIPPNSFALARTVEYFKIPRNVLTVCLGKSTYARCGIIVNVTPLEPEWEGHVTLEFSNTTNLPAKIYAGEGVAQMLFFESDEECEISYKDRGGKYQGQTGVTLPKT

SEQ ID NO: 171228 - protein, 136 aa, Unknown
  Bacterial polypetide isolated from the Sargasso Sea
MTIMSDKWIKKMSLEKDMITPFVDDQKKDGTISYGVSSYGYDARVSEEFKIFTNVDSAIVDPKNFNNKGFVDRPGKECIIPPNSFALARTVEYFKIPRDVLVICLGKSTYARCGIIVNVTPLEPEWEGHVTLEFSN

SEQ ID NO: 171229 - protein, 189 aa, Unknown; identical to SEQ ID NO: 171189
  Bacterial polypetide isolated from the Sargasso Sea

SEQ ID NO: 171230 - protein, 171 aa, Unknown
  Bacterial polypetide isolated from the Sargasso Sea
MIEPFAESQIRHSDGNDLISYGTSSFGYDVRCATEFKVFTNIHSAVVDPKSFDENSFVNFDSDICIIPPNSFALARTIEYFRIPRNVLTICLGKSTYARCGIIVNVTPLEPEWEGHVTLEFSNTTPLPAKIYANEGVAQMIFLESDEDCEESYRDRKGKYQGQTGVTLPKT

SEQ ID NO: 171231 - protein, 142 aa, Unknown
  Bacterial polypetide isolated from the Sargasso Sea
ARVSNEFKIFTNVNSGIVDPKVFKKESFVTKLGKECIIPPNSFALARTIEYFKIPENVLVICLGKSTYARCGIIVNVTPLEPGWEGHVTLEFSNTTPLPAKIYANEGVAQFIFIKGNEKPEISYAKRKGKYMKQKGVTLPKV

SEQ ID NO: 171232 - protein, 148 aa, Unknown
  Bacterial polypetide isolated from the Sargasso Sea
SSYGYDARVSDEFKIFTNVNSEIVDPKNFKSSNFITKNSSECIIPPNSFVLARTVEYFKIPKNVLVICLGKSTYARCGIIVNVTPLEPGWEGHVTLEFSNTTPLPAKIYANEGVAQFVFIKGNEDPAVSYADRNGKYQGQKGVTLPKI

SEQ ID NO: 171233 - protein, 196 aa, Unknown
  Bacterial polypetide isolated from the Sargasso Sea
MRLCDRDIEAYIEAGKIQITPRPTPDMISGVSVDIRLGHKFRTFRAYAAPFIDLSGPREEVDLALNSVMSDEIVLTDDEAFFLHPGELALAITLESVTLPADIVGWLDGRSSLARLGLMVHVTAHRIDPGWSGNIVLEFYNSGRLPLALRPNMKIGALNFETMTGEAARPYNKRVDAKYQQQTGAVASRISQDDQS

SEQ ID NO: 171234 - protein, 98 aa, Unknown
  Bacterial polypetide isolated from the Sargasso Sea
MARTVEYFKIPNDILVICLGKSTYARCGIIVNVTPLEPGWEGHVTLEFSNTTPLPAKIYANEGVAQFVFIKGNEKPEVTYADRNGKYQGQKGVTLPKV

SEQ ID NO: 171235 - protein, 141 aa, Unknown
  Bacterial polypetide isolated from the Sargasso Sea
RVGSEFKIFTNVNTEIVDPKNFKPTSFVTKKGPECIIPPNSFVLASTIEYFRIPNDVLVICLGKSTYARCGIIVNVTPLEPSWCGNVTLEFSNTTPLPAKIYANEGACQFIFLKGNEKPETTYSDREGKYMDQKGVTLPKV

SEQ ID NO: 171236 - protein, 146 aa, Unknown
  Bacterial polypetide isolated from the Sargasso Sea
MSVLSDRWIKKMALEKEMIKPFVKKQVGGKVISYGLSSFGYDARVSNNFKIFTDVDSAVVDPKNFKQNSFVSRKGKECIIPPNSFALASTVEYFKIPKNVLVICLGKSTYARCGIIVNVTPLEPGWEGHVTLEFSNTTPFTCQNLC

SEQ ID NO: 171237 - protein, 148 aa, Unknown
  Bacterial polypetide isolated from the Sargasso Sea
LLDMTQEFPDEFKIFTNVNSEIVDPKNFKPTNFVTKTVKECIIPPNSFVLARTVEKFKIPNDILVICLGKSTYARCGIIVNVTPLEPGWEGYVTLEFSNTTPLPAKIYANEGVAQFIFLKGNEKPEVTYADRNGKYMGQGPEPTLPKV

SEQ ID NO: 171238 - protein, 189 aa, Unknown
  Bacterial polypetide isolated from the Sargasso Sea
MSIKSDKWIKRMALESRLIDPFIDKQVKHTEEAGSTVSYGLSSYGYDVRCADEFKIFTNINSATVDPKNFDEDSFIDIKSEVCVIPPNSFALARTMEYFKIPRNVLTICLGKSTYARCGIIVNVTPLEPEWEGHVTLEFSNTTSLPAKIYANEGVAQMLFFESDELCETSYADRKGKYQGQLGVTPPKV

SEQ ID NO: 171239 - protein, 184 aa, Unknown
  Bacterial polypetide isolated from the Sargasso Sea
MPVLSDKWIKKIVKTKGMIKPFVSKQVRKGKISFGLSSYGYDARVSNEFKIFTNVNSGVVDPKVFKKESFVTKRGKECIIPPNSFALARTVEYFKIPENVLVICLGKSTYARCGIIVNVTPLEPGWEGHVTLEFSNTTPLPAKIYANEGVAQFVFLKGNEKPEVSYAKRKGKYMKQKGVTLPKV

SEQ ID NO: 171240 - protein, 189 aa, Unknown
  Bacterial polypetide isolated from the Sargasso Sea
MTIKSDNWIRKMAESHQLIQPFEPGQVRHCSKGDKLISYGTSSYGYDVRCSEDFKVFTNIHSATVDPKNFDEKSFVDVSGMACIIPPNSFALARTVEYFKIPRNVLTICLGKSTYARCGIIVNVTPLEPEWEGHVTLEFSNTTNLPAKIYANEGVAQMLFFESDEICETSYADREGKYQGQTGVTLPKA

SEQ ID NO: 171241 - protein, 135 aa, Unknown
  Bacterial polypetide isolated from the Sargasso Sea
KYLLMLTLVLLIQKFSKKESFITKIGKECIIPPNSFALARTIEYFKIPDNVLVICLGKSTYARCGIIVNVTPLEPGWEGHVTLEFSNTTPLPAKIYANEGVAQFVFIQGNEKPEVTYAKRKGKYMKQKGVTLPKV

SEQ ID NO: 171242 - protein, 124 aa, Unknown
  Bacterial polypetide isolated from the Sargasso Sea
DPKNFKSSNFITKNSSECIIPPNSFVLARTVEYFKIPKNVLVICLGKSTYARCGIIVNVTPLEPGWEGHVTLEFSNTTPLPAKIYANEGVAQFVFIKGNEDPSVSYADRNGKYQGQKGVTLPKI

SEQ ID NO: 171243 - protein, 157 aa, Unknown
  Bacterial polypetide isolated from the Sargasso Sea
RKGKISFGLSSYGYDARVSDDFKIFTNVNSAVVDPKNFKNESFISKKSKVCVIPPNSFALARTVEYFKIPENVMVICLGKSTYARCGIIVNVTPLEPGWEGFVTLEFSNTTPLPAKIYANEGAAQFVFIRGNEKPEISYSKRKGKYMKQKGVTLPKI

SEQ ID NO: 171244 - protein, 179 aa, Unknown
  Bacterial polypetide isolated from the Sargasso Sea
MTVLSDKWIKQTAKEKGMIKPFVSKQIRKGKISFGLSSYGYDARVSNEFKIFTNVNSGIVDPKIFKKESFVTKIGKECIIPPNSFALARTVEYFKIPDDIMVICLGKSTYARCGIIVNVTPLEPGWEGHVTLEFSNTTPLPAKIYANEGVAQFVFLKGNERPNVTYAKRKGKYMKQKGV

SEQ ID NO: 171245 - protein, 115 aa, Unknown
  Bacterial polypetide isolated from the Sargasso Sea
MAIKSDKWIKEMAESHGMIEPFQYDQVKKNETGSIVSYGTSSYGYDVRCSDEFKIFTNINSAFVDPKAFDDQSFVDVKNDVCIIPPNSFALARTVEYFKIPRQILTLCLGKSTYA

SEQ ID NO: 171246 - protein, 185 aa, Unknown
  Bacterial polypetide isolated from the Sargasso Sea
MPVLSDKWIRKMSKENDMISPFEEKQIRGSSISYGLSSFGYDARVSDEFKIFTNVNSEIVDPKNFKPTNFLTKKTNECIIPPNSFVLARTVEKFKIPDDVLVICLGKSTYARCGIIVNVTPLEPGWEGYVTLEFSNTTPLPAKIYSNEGVAQFVFLKGNEKPEVTYADRKGKYMDQGPEPTLPKV

SEQ ID NO: 171247 - protein, 183 aa, Unknown
  Bacterial polypetide isolated from the Sargasso Sea
MTVLSDKWIKKAAQKGMIKPFIQKQVRKGKISFGLSSYGYDARVSNEFKIFTNVNSGIVDPKVFKKESFVTKIGKECIIPPNSFALARTVEYFKIPENVLVICLGKSTYARCGIIVNVTPLEPGWEGHVTLEFSNTTPLPAKIYANEGVSQFVFIKGNEKPSITYAKRKGKYMKQKGVTLPKI

SEQ ID NO: 171248 - protein, 184 aa, Unknown
  Bacterial polypetide isolated from the Sargasso Sea
MSVLSDKWIRKMSIEEDMISPFEEKQVRGNSISYGLSSFGYDARVSEEFKIFTNVNSEIVDPKNFKPTNFVTKNVSECIIPPNSFVLARTVEKFKIPDDVLVICLGKSTYARCGIIVNVTPLEPGWEGYVTLEFSNTTPLPAKIYANEGVAQFIFLKGNEKPEVTYADRNGKYMGQTGVTLPKV

SEQ ID NO: 171249 - protein, 173 aa, Unknown
  Bacterial polypetide isolated from the Sargasso Sea
MTVLSDKWINKMSKKNGMIKPFVDKQTRSGKVSYGLSSYGYDARVSNEFKIFTNVNSGVVDPKVFKKDSFVTKRSKECIIPPNSFALARTIEYFKIPKNVLVICLGKSTYARCGIIVNVTPLEPGWEGHVTLEFSNTTPLPAKIYANEGVAQFIFIKKTMSFQVFTYDKRKGK

SEQ ID NO: 171250 - protein, 137 aa, Unknown
  Bacterial polypetide isolated from the Sargasso Sea
MPVLSDKWITRMAKDKGMISPFEEKQIRGNSISYGVSSYGYDARVADEFKIFTNVNTEIVDPKNFKPTSFISKKGKECIIPPNSFVLASTVEYFKVPEDVLVICLGKSTYARCGIIVNVTPLEPSWCGHVTLEFSNT

SEQ ID NO: 171251 - protein, 188 aa, Unknown
  Bacterial polypetide isolated from the Sargasso Sea
MSIKNDNWIKQMSIEHDMINPFVDDQTKKIGDKSIISFGTSSYGYDVRCSDEFKIFTNINSAIVDPKSFDPESFVDYKGDVCIIPPNSFALARTVEYFKIPRSILTVCLGKSTYARCGIIVNVTPLEPEWEGHVTLEFSNTTPLPAKIYANEGVAQMLFFESDESCKISYKDRNGKYQGQTGVTLPKT

SEQ ID NO: 171252 - protein, 183 aa, Unknown
  Bacterial polypetide isolated from the Sargasso Sea
MTVLSDKWIKKAAKKGMIKPFIQKQVRKGKISFGLSSYGYDARVSNEFKIFTNVNSGIVDPKVFKKESFVTKIGKECIIPPNSFALARTIEYFKIPENVLVICLGKSTYARCGIIVNVTPLEPGWEGHVTLEFSNTTPLPAKIYANEGVSQFVFIKGNEKPSVTYAKRKGKYMKQKGVTLPKI

SEQ ID NO: 171253 - protein, 184 aa, Unknown
  Bacterial polypetide isolated from the Sargasso Sea
MSVQSDKWIKKMAKEYEMISPFEDRQVRGNKISFGTSSYGYDARVASEFKVFTNVNSEVVDPKNFKSTNFVTKNGSECIIPPNSFVLASTVEYFKIPKDILVICLGKSTYARCGIIVNVTPLEPGWEGHVTLEFSNTTPLPAKIYANEGVAQFIFLKGDEVPEVTYADRKGKYMGQKGVTLPKV

SEQ ID NO: 171254 - protein, 184 aa, Unknown
  Bacterial polypetide isolated from the Sargasso Sea
MSVQSDKWIIKMAKEQRMISPFEDKQIREGKISFGVSSYGYDARVSDEFKIFTNVNSEIVDPKNFKPTNFVTKESNECIIPPNSFVLARTVEYFKIPSDVLVICLGKSTYARCGIIVNVTPLEPGWEGHVTLEFSNTTPLPAKIYSNEGVAQFIFLRGNEKPDVSYADRKGKYMGQKGVTLPKI

SEQ ID NO: 171255 - protein, 189 aa, Unknown
  Bacterial polypetide isolated from the Sargasso Sea
MTIKSDKWIKKMAQEHQLIEPFTENQVRDADSGNKIISYGVSSFGYDVRCADEFKVFTNINSATVDPKSFDEESFVDVKSDVCVIPPNSFALARTIEYFKIPRNVLTICLGKSTYARCGIIVNVTPLEPEWEGHVTLEFSNTTTLPAKIYAGEGVAQMIFLESDEDCETSYKDRKGKYQGQTGVTLPKT

SEQ ID NO: 171256 - protein, 123 aa, Unknown
  Bacterial polypetide isolated from the Sargasso Sea
MSVQSDKWIKKMAKEYGMISPFEEIQVRGNKISFGTSSYGYDARVNSEFKIFTNVNSEIVDPKNFKAASFVSKTGPECIIPPNSFALASTVEYFKIPNDVLVICLGKSTYARCGIIVNVTPLE

SEQ ID NO: 171257 - protein, 152 aa, Unknown
  Bacterial polypetide isolated from the Sargasso Sea
MPVQSDKWIKKMALEHQMISPFEEKQVRGNKISYGLSSFGYDARVSNEFKIFTNLNSEVVDPKNFKPTNFITKNVSECIIPPNSFVLASTIECFKIPKDVLVICLGKSTYARCGIIVNVTPLEPGWEGHVTLEFSNTTHIPAKIYANEGVAQ

SEQ ID NO: 171258 - protein, 184 aa, Unknown
  Bacterial polypetide isolated from the Sargasso Sea
MSIQSDKWIKKMSKEFNMISPFEDKQIRGDKISFGVSSYGYDARVSNEFKIFTNVNSEIVDPKNFKPTNFITKNGPECIIPPNSFVLARTVEYFKIPRDVLVICLGKSTYARCGIIVNVTPLEPGWEGQVTLEFSNTTPLPAKIYANEGVAQFIFLKGNEEPEVTYADRKGKYQGQKGVTLPKV

SEQ ID NO: 171259 - protein, 184 aa, Unknown
  Bacterial polypetide isolated from the Sargasso Sea
MSVLSDKWIRKMSKEQNMISPFEEKQVRGKSISYGLSSFGYDARVSDEFKIFTNVNSEIVDPKNFKPSNFVTKNVSECIIPPNSFVLARTVEKFKIPNDVLVICLGKSTYARCGIIVNVTPLEPGWEGYVTLEFSNTTPLPAKIYANEGVAQFIFLKGNEKPKVTYADRDGKYMGQTGVTLPKV

SEQ ID NO: 171260 - protein, 183 aa, Unknown
  Bacterial polypetide isolated from the Sargasso Sea
MSVLSDKWIKKMALEGMITPFEDKQVREGKISYGLSSYGYDARVSNEFKIFTNVNSDIVDPKNFKPSNFLTKKVSECIIPPNSFVLASTIEYFKIPKDVLVICLGKSTYARCGIIVNVTPLEPGWEGHVTLEFSNTTPLPAKIYSNEGVAQFVFLKGNERPEVTYSDRKGKYMGQVGVTLPKI

SEQ ID NO: 171261 - protein, 193 aa, Unknown
  Bacterial polypetide isolated from the Sargasso Sea
MRLTDIEIEQALDNGTIVIEPRPSIDAISGVSVDVRLGGQFRVFKDHTAPFIDLSGPSIEVQAALDRVMSEIIEIPDGEAFFLHPGELALAVTYESVTLPADIVGWLDGRSSLARLGLMVHVTAHRIDPGWQGKIVLEFYNSGKLPLALRPRMTIGALNFERLSGPVARPYNKRKNAKYKDQQDAVASRISQD

SEQ ID NO: 171262 - protein, 189 aa, Unknown
  Bacterial polypetide isolated from the Sargasso Sea
MSIKSDKWIQKMSQEHNMIDPFSKNQVRLDNNGNKLISYGVSSYGYDVRCSNEFKVFTNIHSAIVDPKSFDEKSFVDINSDVCVIPPNSFALARTVEYFKIPRNILTVCLGKSTYARCGIIVNVTPLEPEWEGHVTLEFSNTTNLPAKIYAGEGVAQMLFFESDEECEISYKDRDGKYQGQTGVTLPKT

SEQ ID NO: 171263 - protein, 151 aa, Unknown
  Bacterial polypetide isolated from the Sargasso Sea
MSIKSDKWIQKMSKEHNMIDPFSKNQVRLDNNGNKLISYGVSSYGYDVRCSNEFKVFTNIHSAIVDPKSFDEKSFVDINSDVCVIPPNSFALARTVEYFKIPRNILTVCLGKSTYARCGIIVNVTPLEPEWEGHVTLEFSNTTNLPAKIYA

SEQ ID NO: 171264 - protein, 189 aa, Unknown
  Bacterial polypetide isolated from the Sargasso Sea
MSIKSDKWIKKMSINEDMINPFSENQVRLDESGNKLISYGVSSYGYDVRCSNEFKVFTNIHSAIVDPKSFDEKSFVNIESDVCVIPPNSFALARTIEYFKIPRNVLTVCLGKSTYARCGIIVNVTPLEPEWEGHVTLEFSNTTNLPAKIYAGEGVAQMLFFESDEECETSYKDRGGKYQGQTGVTLPKT

SEQ ID NO: 171265 - protein, 184 aa, Unknown
  Bacterial polypetide isolated from the Sargasso Sea
MTIMSDNWIKKKALEEGMIEPFVDGQKKEGTISFGLSSYGYDARVSEEFKIFTNVDSALVDPKNFDDKGFVDRPGKECIIPPNSFALARTVEYFRIPRDVLVICLGKSTYARCGIIVNVTPLEPEWEGHVTLEFSNTTPLPAKIYANEGACQFLFYKGEAPPEVSYKDRKGKYMMQKGVTLPKL

SEQ ID NO: 171266 - protein, 177 aa, Unknown
  Bacterial polypetide isolated from the Sargasso Sea
MAANHGMIEPFAESQIRHSDGNDLISYGTSSFGYDVRCATEFKVFTNINSAIVDPKSFDENSFVNFDSDICIIPPNSFALARTIEYFRIPRNVLTICLGKSTYARCGIIVNVTPLEPEWEGHVTLEFSNTTPLPAKIYANEGVAQMIFLESDEDCEESYRDRKGKYQGQTGVTLPKT

SEQ ID NO: 171267 - protein, 188 aa, Unknown
  Bacterial polypetide isolated from the Sargasso Sea
MSIKSDNWIIEQAEKNQLIKPFEKEQIREVDNKKVISYGVSSYGYDVRCANEFKIFTNTFSSVVDPKNFDEKSFVDIQDSECIIPPNSFALARTVEYFKIPRSILTLCLGKSTYARCGIIVNVTPLEPEWEGHVTLEFSNTTNLPAKIYANEGVAQMLFFESDQVCKTSYKDRGGKYQGQTGVTLPKT

SEQ ID NO: 171268 - protein, 189 aa, Unknown
  Bacterial polypetide isolated from the Sargasso Sea
MSIKSDKWIQKMSQEHNMIDPFSKNQVRLDDDGNKQISYGVSSYGYDVRCSNEFKVFTNIHSAIVDPKSFDEKSFVDINSDVCVIPPNSFALARTVEYFKIPRNILTVCLGKSTYARCGIIVNVTPLEPEWEGHVTLEFSNTTNLPAKIYAGEGVAQMLFFESDEECEISYKDRDGKYQGQTGVTLPKT

SEQ ID NO: 171269 - protein, 188 aa, Unknown
  Bacterial polypetide isolated from the Sargasso Sea
MTIKSDKWIIDQSEKNDLIKPFESSQVREIDGEKIVSYGVSSYGYDVRCANEFKIFTNTHSSVVDPKNFDENSFIDIVADECIIPPNSFALARTVEYFKIPRSVLTLCLGKSTYARCGIIVNVTPLEPEWEGHVTLEFSNTTNLPAKIYANEGVAQMVFFESDEICSTSYKDRGGKYQGQKGVTLPKT

SEQ ID NO: 171270 - protein, 184 aa, Unknown
  Bacterial polypetide isolated from the Sargasso Sea
MSVQSDKWIKKMANEYGMIDPFEESQVRGKKISFGVSSYGYDARVSNEFKIFTNVNSEIVDPKDFKPSNFVTRNTSECIIPPNSFVLASTVEYFKIPKDILVICLGKSTYARCGIIVNVTPLEPGWEGHVTLEFSNTTPLPAKIYANEGVAQFIFLKGNEVPEVTYADRKGKYMGQTGVTLPKV

SEQ ID NO: 171271 - protein, 189 aa, Unknown
  Bacterial polypetide isolated from the Sargasso Sea
MSIKSDKWIKRMASTEAMIEPFESGQVRFIDDQKVISYGTSSYGYDVRCASEFKIFTNVHTTNVVDPKNFDETSFVTIDEPSCIIPPNSFALARTIEYFRIPKDVLTICLGKSTYARCGIIVNVTPLEPEWEGHVTLEFSNTTPLPAKIYANEGVAQMLFYQSDEQCDVTYKDRGGKYMRQTGVTPPKA

SEQ ID NO: 171272 - protein, 185 aa, Unknown
  Bacterial polypetide isolated from the Sargasso Sea
MSVLSDNWIKKMSKEKGMISPFEEKQIRGDSISYGLSSFGYDARVSNEFKIFTNVNSEIVDPKNFKPTNFVTKKSNECIIPPNSFVLSTTVEKFKIPDDVLVICLGKSTYARCGIIVNVTPLEPGWEGYVTLEFSNTTPLPAKIYANEGVAQFIFLKGSEKPNVTYADRNGKYMGQGQEPTLPKV

SEQ ID NO: 171273 - protein, 187 aa, Unknown
  Bacterial polypetide isolated from the Sargasso Sea
MSIKSDKWIRKMSQEHNMIDPFSKNQVRLDNNGNKLISYGVSSYGYDVRCSNDFKVFTNIHSAIVDPKSFDEKSFVDINSDVCVIPPNSFALARTVEYFKIPRNILTVCLGKSTYARCGIIVNVTPLEPEWEGHVTLEFSNTTNLPAKIYAGEGVAQMLFFESDEECEISYKDRDGKYQGQTGVTLP

SEQ ID NO: 171274 - protein, 189 aa, Unknown
  Bacterial polypetide isolated from the Sargasso Sea
MSIKSDKWIRRMAEEHKMIEPFVPDQVRASEDGRRIVSYGTSSYGYDIRCADEFKIFTNINSTIVDPKNFDEGSFVDFKGDVCIIPPNSFALARTVEYFRIPRTVLTVCLGKSTYARCGIIVNVTPFEPEWEGYVTLEFSNTTPLPAKIYANEGVAQVLFFESDEVCDVSYADRGGKYQGQRGVTLPKT

SEQ ID NO: 171275 - protein, 193 aa, Unknown
  Bacterial polypetide isolated from the Sargasso Sea
MRLTDIEIEQALDNGSIVIEPRPSNDAISGVSVDVRLGGQFRVFKDHTAPFIDLSGPSTEVQAALDRVMSEIIEIPDGEAFFLHPGELALAVTYESVTLPADIVGWLDGRSSLARLGLMVHVTAHRIDPGWQGKIVLEFYNSGKLPLALRPRMTIGALNFERLSGPVARPYNKRKNAKYKDQQDAVASRISQD

SEQ ID NO: 171276 - protein, 184 aa, Unknown
  Bacterial polypetide isolated from the Sargasso Sea
MSVQSDKWIKKMAKENGMISPFEKKQVRGNKISFGTSSYGYDARVNSEFKIFTNVNSEIVDPKNFKATSFVSKKGPECIIPPNSFALASTVEYFKIPKDVLVICLGKSTYARCGIIVNVTPLEPGWEGHVTLEFSNTTPLPAKIYANEGVAQFIFLKGNEEPEVTYADRKGKYMGQTGVTLPKV

SEQ ID NO: 171277 - protein, 189 aa, Unknown
  Bacterial polypetide isolated from the Sargasso Sea
MSIKSDKWIKEMANNHRMIEPFEAGQVRLGAKEEKLISYGTSSYGYDVRCSNEFKVFTNINSATVDPKSFDENSFVDVKSDVCVIPPNSFALASTIEYFRIPRNVLTICLGKSTYARCGIIVNVTPLEPEWEGHVTLEFSNTTSLPAKIYANEGVAQMLFLESDEECEISYKDRGGKYQGQTGVTLPKA

SEQ ID NO: 171278 - protein, 159 aa, Unknown
  Bacterial polypetide isolated from the Sargasso Sea
MRLCDTDIERHLDEGKIVIEPRPGIERISGVSVDVLLGNEFRVFRDHTAPYIDLSGPSSEMADAIDRVMSDEIHVPDGEAFYLHPGQLALAVTYESVTLPADIVGWLDGRSSLARLGLMVHVTAHRIDPGWSGRIVLEFYNGGKLPLALRPKMKIGALN

SEQ ID NO: 171279 - protein, 133 aa, Unknown
  Bacterial polypetide isolated from the Sargasso Sea
FTNIHSATVDPKSFDENSFVDIVDDVCVIPPNSFALASTIEYFKIPRNVLTICLGKSTYARCGIIVNVTPLEPEWEGHVTLEFSNTTSLPAKIYANEGVAQMLFLESDEECEVSYKDRGGKYQGQQGVTLPKA

SEQ ID NO: 171280 - protein, 136 aa, Unknown
  Bacterial polypetide isolated from the Sargasso Sea
MRLCDRDIEAYIDAGKIQITPRPTPDMISGVSVDIRLGHKFRTFRAYAAAFIDLSGPREEVDHALNSVMSDEIVLSDDEAFFLHPGELALAITLESVTLPADIVGWLDGRSSLARLGLMVHVTAHRIDPGWSGNIV

SEQ ID NO: 171281 - protein, 183 aa, Unknown
  Bacterial polypetide isolated from the Sargasso Sea
MTVLSDKWIKKAAQKGMINPFVSKQVRRGKISFGLSSYGYDARVSNEFKIFTNVNSGIVDPKVFKKESFVTKIGRECIIPPNSFALARTMEYFKIPENVLVICLGKSTYARCGIIVNVTPLEPGWEGHVTLEFSNTTPLPAKIYANEGVAQLVFIKGNEKPSITYAKRKGKYMKQKGVTLPKI

SEQ ID NO: 171282 - protein, 184 aa, Unknown
  Bacterial polypetide isolated from the Sargasso Sea
MTIMSDNWIKKKALEEGMIEPFVDGQKKEGTISFGLSSYGYDARVSEEFKIFTNVDSALVDPKNFDDKGFVDRPGKECIIPPNSFALARTVEYFRIPRDVLVVCLGKSTYARCGIIVNVTPLEPEWEGHVTLEFSNTTPLPAKIYANEGACQFLFYKGEAPPEVSYKDRKGKYMMQTGVTLLKL

SEQ ID NO: 171283 - protein, 93 aa, Unknown
  Bacterial polypetide isolated from the Sargasso Sea
EYFKIPRNVLTICLGKSTYARCGIIVNVTPLEPEWEGHVTLEFSNTTSLPAKIYANEGVAQMLFFESDELCETSYADRKGKYQGQLGVTPPKV

SEQ ID NO: 171284 - protein, 184 aa, Unknown
  Bacterial polypetide isolated from the Sargasso Sea
MSVQSDKWIKKMAKEYDMISPFEEIQVRGNKISFGTSSYGYDARVNSEFKIFTNVNSEIVDPKNFKPTSFVSKTGPECIIPPNSFALASTVEYFKIPNDVLVICLGKSTYARCGIIVNVTPLEPGWEGHVTLEFSNTTPLPAKIYANEGVAQFIFLKGNEVPEVTYADRKGKYMGQKGVTLPKV

SEQ ID NO: 171285 - protein, 138 aa, Unknown
  Bacterial polypetide isolated from the Sargasso Sea
DEFKIFTNVNSEIVDPKNFKPSNFVTKNTSECIIPPNSFVLARTVEKFKIPNNVLVICLGKSTYARCGIIVNVTPLEPGWEGYVTLEFSNTTPLPAKIYANEGVAQFIFLKGNEDPEITYADRDGKYMGQTGVTLPKV

SEQ ID NO: 171286 - protein, 161 aa, Unknown
  Bacterial polypetide isolated from the Sargasso Sea
SKQIRKGKISFGLSSYGYDARVSNDFKVFTNVNSAVVDPKNFKKDSFISKKSNTCVIPPNSFALARTVEYFKIPENVLVICLGKSTYARCGIIVNVTPLEPGWEGYVTLEFSNTTPLPAKIYANEGAAQFVFLKGNEKPEVSYSKRKGKYMKQKGVTLPKI

SEQ ID NO: 171287 - protein, 167 aa, Unknown
  Bacterial polypetide isolated from the Sargasso Sea
MSVLSDKWIKKMVKNHKIITPFIPKQTRKGKISYGLSSYGYDARVSDDFKIFTNVNSTIVDPKNFNQDGFVSKKSKICVIPPNSFALARTVEYFKIPENVLVICLGKSTYARCGIIVNVTPLEPGWEGHVTLEFSNTTPLPAKIYANEGAAQFVFIKGNEKPEVTYA

SEQ ID NO: 171288 - protein, 184 aa, Unknown
  Bacterial polypetide isolated from the Sargasso Sea
MPVQSDKWIKKMATDHKMIEPFEDKQIRGNNISYGVSSYGYDARVGNEFKIFTNVNTEIVDPKNFKPTSFITKKGSECIIPPNSFVLASTIEYFRIPDDVLVICLGKSTYARCGIIVNVTPLEPSWCGNVTLEFSNTTPLPAKIYANEGACQFIFLKGNEKPETTYSDREGKYMDQKGVTLPKV

SEQ ID NO: 171289 - protein, 184 aa, Unknown
  Bacterial polypetide isolated from the Sargasso Sea
MSVQSDKWIIKMAKDHAMISPFEDKQIREGKISFGVSSYGYDARVSNEFKIFTNVNSEIVDPKNFKPTNFVTKESDECIIPPNSFVLARTVEYFKIPSDVLVICLGKSTYARCGIIVNVTPLEPGWEGHVTLEFSNTTPLPAKIYANEGVAQFIFLKGNEKPDVSYADRNGKYMGQKGVTLPKI

SEQ ID NO: 171290 - protein, 184 aa, Unknown
  Bacterial polypetide isolated from the Sargasso Sea
MTIMSDNWIKKMSLEQGMIEPFVDGQKKDGTISFGLSSYGYDARVSEDFKIFTNVDSALVDPKNFDDKGFVDRPGKECIIPPNSFALARTVEYFRIPRDVLVVCLGKSTYARCGIIVNVTPLEPEWEGHVTLEFSNTTPLPAKIYANEGGCQFLFYKGEAPPEISYKDRKGKYMKQTGVTLPKL

SEQ ID NO: 171291 - protein, 117 aa, Unknown
  Bacterial polypetide isolated from the Sargasso Sea
STLSLKTSSECIIPPNSFVLARTVEYFKIPKNVLVICLGKSTYARCGIIVNVTPLEPGWEGHVTLEFSNTTPLPAKIYANEGVAQFVFIKGNEDPLVSYADRSGKYQGQKGVTLPKI

SEQ ID NO: 171292 - protein, 189 aa, Unknown
  Bacterial polypetide isolated from the Sargasso Sea
MTIKSDKWIRKMAVDQGMIEPFQEDQIRYSDDNSRLISYGLSSYGYDVRCANEFKVFTNIHSAIVDPKSFDEKSFVDINSDVCVIPPNSFALARTVEYFRIPRDVLTICLGKSTYARCGIIVNVTPLEPEWEGHVTLEFSNTSNLPAKIYAGEGVAQMIFHQSDEQCEVSYKDRDGKYQGQTGVTLPKT

SEQ ID NO: 171293 - protein, 189 aa, Unknown
  Bacterial polypetide isolated from the Sargasso Sea
MSIKSDKWIQKMSQEHNMIDPFSKNQVRLDSNGNKLISYGVSSYGYDVRCSNEFKVFTNIHSAIVDPKSFDEKSFVDINSDVCVIPPNSFALARTVEYFKIPRNILTVCLGKSTYARCGIIVNVTPLEPEWEGHVTLEFSNTTNLPAKIYAGEGVAQMLFFESDEECEISYKDRDGKYQGQTGVTLPKT

SEQ ID NO: 171294 - protein, 185 aa, Unknown
  Bacterial polypetide isolated from the Sargasso Sea
MSVLSDKWIKKMSKENSMISPFEEKQVRGDSISYGLSSFGYDARVSNEFKIFTNVNSEIVDPKNFKPTNFVTKKSSECIIPPNSFVLSTTVEKFKIPDDVLVICLGKSTYARCGIIVNVTPLEPGWEGYVTLEFSNTTPLPAKIYANEGVAQFIFLKGSEKPSVTYADRNGKYMGQGQEPTLPKV

SEQ ID NO: 171295 - protein, 189 aa, Unknown
  Bacterial polypetide isolated from the Sargasso Sea
MSIKSDKWIKKMSLEHEMIKPFSEGQIRLDDNGNKLISYGVSSYGYDVRCSNEFKVFTNIHSAIVDPKSFDENSFVDINSEVCIIPPNSFALARTIEYFKIPRNVLTICLGKSTYARCGIIVNVTPLEPEWEGHVTLEFSNTTNLPAKIYAGEGVAQMLFFESDEVCEVSYKDRGGKYQGQTGVTLPKT

SEQ ID NO: 171296 - protein, 63 aa, Unknown
  Bacterial polypetide isolated from the Sargasso Sea
MEPEWEGHVTLEFSNTTTLPAKIYANEGVAQMLFFESDERCEITYKDRNGKYQGQTGVTLPKP

SEQ ID NO: 171297 - protein, 136 aa, Unknown
  Bacterial polypetide isolated from the Sargasso Sea
FKIFTNVNSTIVDPKDFKQDGFVTKKAKVCVIPPNSFALARTVEYFKIPENVLVICLGKSTYARCGIIVNVTPLEPGWEGHVTLEFSNTTPLPAKIYANEGAAQFVFIKGNELPEVTYSKRKGKYMKQKGVTLPKI

SEQ ID NO: 171298 - protein, 189 aa, Unknown
  Bacterial polypetide isolated from the Sargasso Sea
MSIKSDKWIQDMSKNHNMIEPFSKNQVRLDDQGNKLISYGVSSYGYDVRCSNEFKVFTNIHSAIVDPKSFDDKSFVDINSDVCIIPPNSFALARTIEYFKIPRNILTICLGKSTYARCGIIVNVTPLEPEWEGHVTLEFSNTTNLPAKIYAGEGVAQMLFFESDEECEISYKDRKGKYQGQTGVTLPKT

SEQ ID NO: 171299 - protein, 63 aa, Unknown
  Bacterial polypetide isolated from the Sargasso Sea
LEPEWEGHVTLEFSNTTPLPAKIYANEGVAQMIFLESDEDCDESYRDRKGKYQGQTGVTLPKT

SEQ ID NO: 171300 - protein, 175 aa, Unknown
  Bacterial polypetide isolated from the Sargasso Sea
MSVLSDKWITKMVKKHKMIYPFVPKQKRKGKISYGLSSYGYDARVSSDFKIFTNVNSAVVDPKNFKKDGFVSKKSKVCIIPPNSFVLATTIEYFKIPDNVIVICLGKSTYARCGIIVNVTPLEPGWEGHVTLEFSNTTPLPAKIYANEGAAQFVFIKGNEKPQTTYSQRKGKYMK

SEQ ID NO: 171301 - protein, 189 aa, Unknown
  Bacterial polypetide isolated from the Sargasso Sea
MSIKSDKWIKLMSTNHEMIQPFSEDQIRMDENGNKLISYGVSSYGYDVRCSNEFKVFTNIHSAIVDPKSFDEKSFVDIASDVCVIPPNSFALARTVEYFKIPRNVLTICLGKSTYARCGIIVNVTPLEPEWEGHVTLEFSNTTNLPAKIYAGEGVAQMLFFESDEECDVSYKDRGGKYQGQTGVTLPKA

SEQ ID NO: 171302 - protein, 163 aa, Unknown
  Bacterial polypetide isolated from the Sargasso Sea
MKINKFEVIKYHFGVSSYGYDARVSDEFKIFTNVNSEIVDPKNFKSSNFITKNSSECIIPPNSFVLARTVEYFKIPKNVLVICLGKSTYARCGIIVNVTPLEPGWEGHVTLEFSNTTPLPAKIYANEGVAQFVFIKGNEDPSVSYADRNGKYQGQKGVTLPKI

SEQ ID NO: 171303 - protein, 184 aa, Unknown; identical to SEQ ID NO: 171173
  Bacterial polypetide isolated from the Sargasso Sea

SEQ ID NO: 171304 - protein, 114 aa, Unknown
  Bacterial polypetide isolated from the Sargasso Sea
MTIKSDKWIRKMAVDHGMIEPFQEDQIRYSDDNSRLISYGLSSYGYDVRCANEFKVFTNIHSAIVDPKSFDEKSFVDINSDVCVIPPNSFALARTVEYFRIPRDVLTICLGKST

SEQ ID NO: 171305 - protein, 184 aa, Unknown
  Bacterial polypetide isolated from the Sargasso Sea
MSVQSDKWIIQMARENDMISPFEDKQVRGDKISFGVSSYGYDARVSDEFKIFTNVNSEIVDPKNFKSSNFITKNSSECIIPPNSFVLARTVEYFKIPKNVLVICLGKSTYARCGIIVNVTPLEPGWEGHVTLEFSNTTPLPAKIYANEGVAQFVFIMGNEDPAVSYADRNGKYQGQKGVTLPKI

SEQ ID NO: 171306 - protein, 72 aa, Unknown
  Bacterial polypetide isolated from the Sargasso Sea
MWNNCHVTPLEPGWEGHVTLEFSNTTPLPAKIYANEGVAQFVFIKGNEDPAVSYADRNGKYQGQKGVTLPKI

SEQ ID NO: 171307 - protein, 184 aa, Unknown; identical to SEQ ID NO: 171173
  Bacterial polypetide isolated from the Sargasso Sea

SEQ ID NO: 171308 - protein, 69 aa, Unknown
  Bacterial polypetide isolated from the Sargasso Sea
IVNVTPLEPEWEGHVTLEFSNTSNLPAKIYAGEGVAQMIFHQSDEQCEVSYKDRDGKYQGQTGVTLPKT

SEQ ID NO: 171309 - protein, 184 aa, Unknown
  Bacterial polypetide isolated from the Sargasso Sea
MSVQSDKWIKKMVKEHGMIKPFEEEQIRGNKISFGTSSYGYDARVASEFKIFTNVNSEIVDPKNFKPTSFVSKKGSECIIPPNSFALASTVEYFKIPKDVLVICLGKSTYARCGIIVNVTPLEPEWEGHVTLEFSNTTPLPAKIYANEGVAQFIFLKGNEIPEVTYADRKGKYMGQTGVTLPKV

SEQ ID NO: 171310 - protein, 188 aa, Unknown
  Bacterial polypetide isolated from the Sargasso Sea
MTIKSDKWIKEMAANHGMIEPFAESQIRHSDGNDLISYGTSSFGYDVRCATEFKVFTNINSAIVDPKSFDENSFVNFDSDICIIPPNSFALARTIEYFRIPRNVLTICLGKSTYARCGIIVNVTPLEPEWEGHVTLEFSNTTPLPAKIYANEGVAQMIFLESDEDCEESYRDRKGKYQGQTGVTLPKT

SEQ ID NO: 171311 - protein, 188 aa, Unknown
  Bacterial polypetide isolated from the Sargasso Sea
MTIKSDKWIIDQSEKNDLIKPFEPTQVREVKGKKIVSYGVSSYGYDVRCANEFKIFTNTHSSVVDPKNFDKNSFIDVTADECIIPPNSFALARTIEYFKIPRSVLTLCLGKSTYARCGIIVNVTPLEPEWEGHVTLEFSNTTNLPAKIYANEGVAQMVFFEADEICSTSYKDRGGKYQGQKGVTLPKT

SEQ ID NO: 171312 - protein, 188 aa, Unknown
  Bacterial polypetide isolated from the Sargasso Sea
MTIKSDNWIKKMAQNHGMIEPFAESQIRHSDGKDLISYGTSSFGYDVRCATEFKVFTNINSAIVDPKSFDENSFVNFDSDVCIIPPNSFALARTIEYFRIPRNVLTICLGKSTYARCGIIVNVTPLEPEWEGHVTLEFSNTTPLPAKIYANEGVAQMIFLESDEDCDESYRDRKGKYQGQTGVTLPKT

SEQ ID NO: 171313 - protein, 82 aa, Unknown
  Bacterial polypetide isolated from the Sargasso Sea
ICLGKSTYARCGIIVNVTPLEPGWEGHVTLEFSNTTPLPAKIYANEGVAQFIFLKGNEKPDVSYADRNGKYMGQKGVTLPKI

SEQ ID NO: 171314 - protein, 188 aa, Unknown
  Bacterial polypetide isolated from the Sargasso Sea
MSIKSDKWIRRMAQEHGMIEPYVERQVRGADDSRVISYGVSSYGYDVRCADEFKVFTNIHSAIVDPKNFDEKSFVDIKSDVCIIPPNSFALARTVEYFRIPRDVLTICLGKSTYARCGIIVNVTPLEPEWEGHVTLEFSNTTNLPAKIYANEGVAQMLFFESDESCETSYRDRGGKYQGQRGVTLPRA

SEQ ID NO: 171315 - protein, 189 aa, Unknown
  Bacterial polypetide isolated from the Sargasso Sea
MSIKPDVWIKRMAESEGMIEPFSENQVRVDENGKKLISYGVSSFGYDVRCANEFKVFTNIHSATVDPKVFDDDSFVDITSDVCVIPPNSFALARTVEYFRIPRNVLTICLGKSTYARCGIIVNVTPLEPEWEGHVTLEFSNTTNLPAKIYAGEGVAQMIFFESDEDCEVSYKDRGGKYQGQTGVTLPKT

SEQ ID NO: 171316 - protein, 109 aa, Unknown
  Bacterial polypetide isolated from the Sargasso Sea
TECIIPPNSFVLASTVEYFRIPNDVLVICLGKSTYARCGIIVNVTPLEPSWCGNVTLEFSNTTPLPAKIYANEGACQFIFLKGNEKPETTYSDREGKYMDQKGVTLPKV

SEQ ID NO: 171317 - protein, 184 aa, Unknown
  Bacterial polypetide isolated from the Sargasso Sea
MPVLSDKWIKKMALSQEMIKPFEEKQIRNGNISYGLSSFGYDARVSNEFKIFTNVNSEIVDPKKFKPSNFITKNIDECIIPPNSFVLASTVEYFKIPKNVLVICLGKSTYARCGIIVNVTPLEPGWEGHVTLEFSNTTPLPAKIYANEGVAQFVFLEGNENPEVSYSDRKGKYMGQTGVTLPKV

SEQ ID NO: 171318 - protein, 130 aa, Unknown
  Bacterial polypetide isolated from the Sargasso Sea
INSATVDPKRFDEDSFVDVQSEVCVIPPNSFALASTIEYFKIPRNVLTICLGKSTYARCGIIVNVTPLEPEWEGHVTLEFSNTTSLPAKIYANEGVAQMLFLESDEECEVSYKDRGGKYQGQRGVTLPKA

SEQ ID NO: 171319 - protein, 205 aa, Unknown
  Bacterial polypetide isolated from the Sargasso Sea
MKIDKKLEEVLLTKDEELDHPLSSKETPIRKDAFNKTDDEKISLITDKVNDILHILGMDLTDDSIKGTPNRVAKMFVNEIFGGLSPKKKPKASVFDNKYKYGEMLVEKNINLYSTCEHHLLPIVGKAHVAYVSNGTVVGLSKMNRIVDYFAKRPQVQERLTLQIVEELQKVLNTQDVACVIDAKHLCVNSRGIGDIGCSTITSEF

SEQ ID NO: 171320 - protein, 326 aa, Unknown
  Bacterial polypetide isolated from the Sargasso Sea
KLARVAEVYARRLQTPDGLAHAVAHALHDVASPLGVGVMFTGVHLGPFGTRETAGRASTGCFASPNSVWWEEFSALVEHGGGPSELSRGLWGDDVRCLPCDNDENASSRGPAETFVDAAATDAAQSESVDESVRESVMNLFRELDVEKSVRDATNGKSSAEDTARQFSRLLSAMRSGSDVPFDPIEESAARDLSRRVDADDDARGDDGVVVVRNLRMSTVCEHHLLPFHGTVSVAYIANPTAGALSRDTLQALVSRHSRRLQVQERLTRDVAEEISALTGGIGVMVAARAAHLCMVSRGVEKPGSSTCTVTKLGRLAAEPALRSSV

SEQ ID NO: 171321 - protein, 201 aa, Unknown
  Bacterial polypetide isolated from the Sargasso Sea
MKLVKNENQKNLDNKVSEEEAEQAFIKIIKYIGEDPSREGLKSTPKRIVKAFREYFKGYSEDPKKILEKTFGDVLGYDDMVIQKNISLQSHCEHHMAPIIGVAHVAYIPNNKVVGLSKLARVVEVYSKRLQTQERLTMQIATTLMEALDAKGVAVSIDATHQCMTMRGIKKEQATTITNYYLGKFKEDLSYQNRYLRFISK

SEQ ID NO: 171322 - protein, 214 aa, Unknown
  Bacterial polypetide isolated from the Sargasso Sea
MLTESALVVRGALEAAGLETPMLDNGLSNDQKKQRLTELMTQVVQTLGLDLTDDSLAETPARIAKMYVDEVFSGLDYSTFPKISMIDNKMRAEEMVKVQNISFTSTCEHHFVTIDGTATVAYIPGKKIIGLSKLNRIVKFFAQRPQVQERLTQQIQVSLQALLGVKDVAVSINAVHYCVKSRGVMDTSSSTKTMALGGAFKTDAATRSEFLSSF

SEQ ID NO: 171323 - protein, 140 aa, Unknown
  Bacterial polypetide isolated from the Sargasso Sea
KPKSSTFENKYKYGEILIEKNITLYSTCEHHLLPIYGKAHVGYISNGNVVGLSKMNRIVDYFSRRPQVQERLTLQIVEELQKVLNTKDVACVIDAKHMCVNSRGINDISSSTITSEFGGKFKNKQTKREFLDFLKIETEF

SEQ ID NO: 171324 - protein, 181 aa, Unknown
  Bacterial polypetide isolated from the Sargasso Sea
AEEAFKTILKWIGENPEREGLKETPKRVVKAFKEYFSGYHQDVNKALSKTFGDVDGYDDMVLEKNISFESHCEHHMAPIIGVIHIAYIPNKKVVGLSKLARTVEVYAKRLQTQERLNMQIAKTLMSGLEAKGVAVTIDASHQCMTMRGIKKEKAMTLTNYFLGTFKEDLSLQNRYLKHIGK

SEQ ID NO: 171325 - protein, 186 aa, Unknown
  Bacterial polypetide isolated from the Sargasso Sea
MKDLNNLEQLTHSLLEEIGENPKREGLLKTPARVAKAWEFFSKGYNQNLDEVINNAIFCEDAKDMVIVRDIEFFSLCEHHLLPFFGKAHVGYIPNGKVIGLSKIPRIIDMFSRRLQVQERLTHQVAEAIQEVLNPLGVAVVMEGIHMCMQMRGVEKQNSFASTSSMLGLFRKSAETRTEFLSITSK

SEQ ID NO: 171326 - protein, 215 aa, Unknown
  Bacterial polypetide isolated from the Sargasso Sea
MPGNCSPEANLVKEALVLKGLETPTIENGLSRDEKYSRIKASMTDVVATLGLDLNDDSLAETPHRIAKMYVDEVFGGLDYRNFPKITAIANKMRVEEMIKVDNISVTSTCEHHFVTIDGASKVAYIPSDKIIGLSKINRIVRFFAQRPQVQERLTQQILVALQTLLGTNDVAVTIDATHHCVKSRGVMDTNSSTQTTALGGRFKDDHRTREEFMR

SEQ ID NO: 171327 - protein, 209 aa, Unknown
  Bacterial polypetide isolated from the Sargasso Sea
MKLQETMQNIPSKIQEEIFDEIGDSHYSTSIETPMIEGAFDIDDSQKKKVIAYHFSEIMKTMGLDLTDDSLKGTPNRVAKMFIEEIFSGLDPKNKPKVSLFENKYQYNEMLLEKDISFYSNCEHHFVPIIGKAHVAYKSSGKVIGLSKINRIVQYFARRPQVQERLTNQIADELKNILETEDIAVLIYAKHLCVASRGIKDDTSETFTA

SEQ ID NO: 171328 - protein, 197 aa, Unknown
  Bacterial polypetide isolated from the Sargasso Sea
MSTSRKESEDPTSIASGQGGATQVVDHQRIEAAVREILTAIGEDPDREGLLETPARVARMYAEMFSGLHDDPRRHLGKAFTEKYDELVLVRDIAFHSMCEHHLLPFMGHAHIGYIPNGRVLGLSKLARVVEAVSHKPQVQERMTEQIADLLEHDLGAKGVAVVLEASHTCMTIRGVRKPGSLCVTSAVKGIFRANIS

SEQ ID NO: 171329 - protein, 170 aa, Unknown
  Bacterial polypetide isolated from the Sargasso Sea
MCEDPTREGLQSTPKRLVKAFKEYFKGYYENPKKILEKTFKDVQGYDDMVIQKNISLQSHCEHHMAPIIGVAHVAYIPNNKVVGLSKLARVVEVFSKRLQTQERLTMQIASTLMEALDAKGVAVSIDATHQCMTMRGIKKEQATTVTNYYLGKFKEDLSYQNRYLRFISK

SEQ ID NO: 171330 - protein, 184 aa, Unknown
  Bacterial polypetide isolated from the Sargasso Sea
MVAEIITRLGDDPEREGLSRTPQRVKKSLEFLTSGYRTDIDNVINGALFEESHKNMVLVKQIEVYSLCEHHLLPFFGKVHIGYVPNGKIVGLSKMARIVEVFARRLQVQERLTEQIAQAVWDLIEPVGVGVVIEAQHLCMMMRGVQKQNSKTVTSAMRGTYLDDSMTRTEFLRLCGTDYSSVSS

SEQ ID NO: 171331 - protein, 166 aa, Unknown
  Bacterial polypetide isolated from the Sargasso Sea
RDGLLDTPKRVARMYEEVTSGIRCEPAEELNKCFEVNHDEMVMVRDISLYSLCEHHLVPFIGQAHIAYIPRTNGSIVGLSKLARLVDGYAKRLQVQERLTSQIADALQRKLNPIGALVVIEAEHLCMSMRGIKKPGSSTVTSAVRGIFRDDVSARSEAMRFLDHSR

SEQ ID NO: 171332 - protein, 187 aa, Unknown
  Bacterial polypetide isolated from the Sargasso Sea
MKLQELLDKEIDSIGDNHIGSDNEETPLKEGAFNVPDNEKISFIQEKVYEILDMLGMDLTDDSLRGTPRRVAKMFVNEIFSGLNPKNRPEMSTFENKYNYGEMLVEKNITLYSTCEHHLLPIVGLAHVAYISNGNVVGLSKINRIVKYYAERPQVQERLTIQIVRDLQKVLNTDDVACVIDAKHLCV

SEQ ID NO: 171333 - protein, 192 aa, Unknown
  Bacterial polypetide isolated from the Sargasso Sea
MTDSGAIDLSGVEFEDLVAEMIRRCGDSPDREGMAKTPERVAKAMSFLTKGYGETPEEVVGGAIFPEAHESMVLVKDIELYSMCEHHLLPFFGKAHVAYIPNGSVMGLSKVARLVEVFARRFQVQERLTEQIAQAVLEVSEARGVAVVIEAHHLCMMMRGVQKQNSKTLTSAMRGDFVEDRSLRDEFMWMVS

SEQ ID NO: 171334 - protein, 222 aa, Unknown
  Bacterial polypetide isolated from the Sargasso Sea
MSSLSKEAALVHEALVARGLETPLRPPVQEMDNETRKRLISGHMTEIMQLLNLDLSDDSLMETPHRIAKMYVDEIFSGLDYANFPKITVIENKMKVDEMVTVRDITLTSTCEHHFVTIDGKATVAYIPKDSVIGLSKINRIVQFFAQRPQVQERLTQQILTALQTLLGTNNVAVSIDAVHYCVKARGIRDATSATTTTSLGGLFKSSQNTRQEFLRAVRHHN

SEQ ID NO: 171335 - protein, 123 aa, Unknown
  Bacterial polypetide isolated from the Sargasso Sea
IVKNIEFYSLCEHHMIPFYGKAHIGYIPDGKIIGLSKLARITDLFSQRLQVQERLTNQIAQCLQEVLNPRGVAVVLEGKHFCMLSRGVQKQNSIATSSSMLGIFREKESTRNEFLKLIEMNNI

SEQ ID NO: 171336 - protein, 180 aa, Unknown
  Bacterial polypetide isolated from the Sargasso Sea
MNDDKRKKLEANTKNLLELLGEDPSREGLINTPKRVAKAWDFLTKGYSENLDELINNAIFEGESKDMVIVKNIEFYSLCEHHMIPFYGKAHIGYVPDGKIIGLSKLARITDLFSQRLQVQERLTMQIAQCLQEVLNPRGVAVVLEGKHFCMLSRGVQKQNSIASSSSMLGIFREKRINKK

SEQ ID NO: 171337 - protein, 173 aa, Unknown
  Bacterial polypetide isolated from the Sargasso Sea
MLQVIGEDPKREGLLDTPRRYIDAFKEFLSPPEFNMTTFDVENTDEMIVQLDIPFYSFCEHHLLPFFGKGYVAYVPNKKIVGLSKLARTLETFSRRLQNQERITNQVAEHLQSNLQAKGVAVVLKARHMCMEMRGVKTSDTHTITSKLLGSFRSDERTRAEFLNLIGNHRNLV

SEQ ID NO: 171338 - protein, 202 aa, Unknown
  Bacterial polypetide isolated from the Sargasso Sea
MKLVKDSDNKIVDIKKVSDKEAEEAFRTILSWMGEDPDREGLLETPKRVTKAFKEYFKGYSEDPKAVLDKTFGDVDGYDDMVVQKNISVQSHCEHHMAPIIGTAHVAYIPKDRVVGLSKLARVVEIFSKRLQTQERLTMQIATTLMESLDAKGVAVTIDSTHQCMTMRGIKKEQATTVTNYYLGQFKEDLSYQNRYLRFIAK

SEQ ID NO: 171339 - protein, 216 aa, Unknown
  Bacterial polypetide isolated from the Sargasso Sea
MALSEAAVKVQAALQERGLETPMLPNVFTPEERKDKIEFHMKEILTLMSLDLSDDSLVDTPRRIAKMYVDEIFSGLDYENFPKITVIDNKMGFDEMVRVQDISLTSTCEHHLVTIDGTATIAYIPRKKIIGLSKINRIVRFFSQRPQVQERLTQQVLVALQTLLETKDVAVKMDAVHYCVKSRGVMDSTSSTTTTALGGIFKSNPATRAEFLNQSK

SEQ ID NO: 171340 - protein, 186 aa, Unknown
  Bacterial polypetide isolated from the Sargasso Sea
MFENEKIADLTKLLLKEIGEDPNREGLIKTPSRVSKAWSFFSRGYNQDVDEIINDAIFNENAKDMVVVRDVEFFSLCEHHLIPFFGKAHVAYIPNGKVVGLSKIPRIIDMFSRRLQVQERLTRQIAETIQDVLEPIGVAVIMEGQHMCMQMRGVEKQNSLTTTSSMLGKFRQSDRTRAEFLSIIGL

SEQ ID NO: 171341 - protein, 187 aa, Unknown
  Bacterial polypetide isolated from the Sargasso Sea
MKDKIDDISKITKELITSIGEDLNREGLERTPMRVAKAWDYFTQGYSANIDEIINEAIFDEECNDMVVVRDIEFFSMCEHHMIPFFGKAHVGYIPNGKVIGLSKIPRIIDMFSRRLQVQERLTHQVADTIKDSLDPIGVAVVMEGRHLCMQMRGVAKQNSFATTSAMLGQFRKSRETRAEFLSFIGK

SEQ ID NO: 171342 - protein, 227 aa, Unknown
  Bacterial polypetide isolated from the Sargasso Sea
MLAKEAVIVRDALDPSISEPAQRVREALEAKGLETPMVANGLTDEQKRKRIESAMRDVMDTLGLDLTDDSLCDTPTRIAKMYVNEIFGGLDYRKFPKITAIENKMQIDQPVQVSDISLTSTCEHHFVTIDGTATVSYIPKDTVIGLSKINRLVGFFAQRPQVQERLTQQVLVALQTLTNTEDVAVSINATHYCVKARGIRDTNSYTKTSALGGRFLTDNELKREFFR

SEQ ID NO: 171343 - protein, 182 aa, Unknown
  Bacterial polypetide isolated from the Sargasso Sea
KQRLTELMTQVVHTLGLDLTDDSLAETPARIAKMYVDEVFSGLDYSTFPKISMIDNKMRAEEMVKVQNISFTSTCEHHFVTIDGTATVAYIPGKKIIGLSKLNRIVKFFAQRPQVQERLTQQIQVSLQALLGVKDVAVSIDAVHYCVKSRGVMDTSSSTKTMALGGAFKTDPATRSEFLSKF

SEQ ID NO: 171344 - protein, 214 aa, Unknown
  Bacterial polypetide isolated from the Sargasso Sea
MALSEAAVKVQAALQERGLETPMLPNVFTPEERKDKIEFHMKEILTLMSLDLSDDSLADTPRRIAKMYVDEIFSGLDYENFPKITVIDNKMGFDEMVRVQDISLTSTCEHHLVTIDGTATIAYIPRKKIIGLSKINRIVRFFSQRPQVQERLTQQVLVALQTLLETKDVAVKMDAVHYCVKSRGVMDSTSSTTTTALGGIFKSNPATRAEFLNQ

SEQ ID NO: 171345 - protein, 246 aa, Unknown
  Bacterial polypetide isolated from the Sargasso Sea
MILAGFFNANNIANPEDADLILDDIIDSGLTKKKYKKLFPKKKFIALFEKDSKVDWVNFPFEKNIEDDQSDTVVRLLQIIGENPKREGLLDTPRRYLSAFEEFLNPPVFNMTTFDAESTDEMIVQLDIPFYSFCEHHLLPFFGKGYIAYIPDKKIVGLSKLARTLETFARRLQNQERITNQVADYLQENLEAKGVAVVLKARHLCMEMRGVKTSDTNTITSKLLGYFRTDERTRAEFLNLIGNHRN

SEQ ID NO: 171346 - protein, 323 aa, Unknown
  Bacterial polypetide isolated from the Sargasso Sea
MGRQRRAGRSDAQAQAGPDSVRRQPRSARHERRESARHAVGVSRRSHQVGDSLRTRHPRQGGAHGWAQTDDQEPCEHLAAPAPAGTGLQLLPGQARRYRRGVYHPQAHHDGWSRRVIREPGTLARPLSAPYPAPIRYPTGFSMSLEQQYTAILGQLGEDVSREGLLDTPKRAAKAMQYLCRGYQQTLEEVTNGALFSSDNSEMVLVKNIELYSLCEHHLLPFIGKAHVAYIPNGKVLGLSKVARIVDMYARRLQIQENLSRQIAEAIEQVTGALGVAVVIEAQHMCMMMRGVEKQNSSMVTSVMLGEFRSNPATRGEFLNLVR

SEQ ID NO: 171347 - protein, 218 aa, Unknown
  Bacterial polypetide isolated from the Sargasso Sea
MTSLSREALLVRAALEAEGLETPLVANALDGQQKREKIEGHMRAIMETLGLDLADDSLAETPHRIAKMYVNEIFSGLDYATFPKVTVIENKMKVDEMIMVRDISLTSTCEHHFVTIDGLAHVAYIPRGKVIGLSKINRIVQFFARRPQVQERLTQQILLALQTLLGTKDVAISIKATHFCVKARGVMDSTSYTTTTSLGGVFKTQPDTRAEFLAGLKR

SEQ ID NO: 171348 - protein, 191 aa, Unknown
  Bacterial polypetide isolated from the Sargasso Sea
MNEDKRKKLEANTKNLLELLGEDPSREGLVNTPKRVAKAWDFLTKGYNENLDDLINNAIFEGESKDMVIVKNIEFYSLCEHHMIPFYGKAHIGYIPDGKIIGLSKLARITDLFSQRLQVQERLTNQIAQCLQEVLKPRGVAVVLEGKHFCMLSRGVQKQNSIATSSSMLGIFREKESTRNEFLKLIEMNNI

SEQ ID NO: 171349 - protein, 216 aa, Unknown
  Bacterial polypetide isolated from the Sargasso Sea
MSLSEAAVKVQAALQERGLETPMLPSVFTPEERKDKIEHHMKEILTLMSLDLSDDSLADTPRRIAKMYVDEIFSGLDYANFPKITVIDNKMGFDEMVRVQDISLTSTCEHHLVTIDGTATIAYLPRKKIIGLSKINRIVRFFAQRPQVQERLTQQVLVALQTLLETKDVAVKMDAVHYCVKSRGVMDSTSSTTTTALGGIFKSNPATRAEFLHQSK

SEQ ID NO: 171350 - protein, 201 aa, Unknown
  Bacterial polypetide isolated from the Sargasso Sea
MKLVKNIEKDLVKNNVSDKEAEEAFKKILKWIGEDPDREGLVETPKRLVKAFKEYFGGYDVDAISLLSKTFGDVEGYDDMVIQKNISLQSHCEHHMAPIIGVVHVAYIPKNKVVGLSKLARLVEVYAKRLQTQERLTKQIATTLMEALDAKGVAVSVDAAHQCMTMRGIKKEQATTVTNYYLGQFKEDLSFQNRYLRFISK

SEQ ID NO: 171351 - protein, 189 aa, Unknown
  Bacterial polypetide isolated from the Sargasso Sea
MENNEKLENLTYQLLQEIGEDPKREGLARTPTRVSKAWQYFSQGYGQDLEVIVNNAIFNESSKDMVVVRDVEFFSLCEHHLLPFFGKAHVGYIPDGRIIGLSKIPRIIDMFSRRLQVQERLTHQIADAIHLVLKPIGVAIVMEGRHMCMQMRGVEKQNSLATTSTMLGKFRESVRTRNEFMSLINRISV

SEQ ID NO: 171352 - protein, 202 aa, Unknown
  Bacterial polypetide isolated from the Sargasso Sea
MKSEKNKIVSFKENSKISDHEAEEAFKTILKWIGEDPSREGLLETPKRVAKAFKEYFKGYNEDPHKILDKTFGDVEGYDDMVVQKNISVQSHCEHHMAPIIGIAHVAYIPNQRVVGLSKLARVVEVFSKRLQTQERLTMQIATTLMDTLDAKGVAVTIDSTHQCMTMRGIKKEQATTVTNYYLGQFKEDLSYQNRYLRFISK

SEQ ID NO: 171353 - protein, 184 aa, Unknown
  Bacterial polypetide isolated from the Sargasso Sea
MHNELKDSYQKIITAVGEDAEREGLLDTPKRAAKAMEYLTQGYRQTLDEITNNAVFTSDADDMVLVQDIELYSMCEHHLLPFIGRCHIAYIPNGKVLGLSKFARIVDMFSRRFQIQEQLTHQIAKAVEEVTGAKGVGVIVEAKHMCMMMRGVEKQNSSMRTSVMLGNFRSDPKTRNEFLQLIKG

SEQ ID NO: 171354 - protein, 192 aa, Unknown
  Bacterial polypetide isolated from the Sargasso Sea
MQEVNISDIDKDIIESSIKAILDSLGDKIDKNGTMKTPTRVAKAYEELLEGYNTDIDSLINNALFDVEYDQIVTVKNISFYSLCEHHLLPFFGTIHIGYLPKDKIIGLSKLPRIALMFARRLQVQERLTEQIGEAIYKKTNALGAGVVVTAQHMCSSMRGVKMPGTNMVTSSLFGSFKSDSSTRNEFLDLIR

SEQ ID NO: 171355 - protein, 227 aa, Unknown
  Bacterial polypetide isolated from the Sargasso Sea
MKLQELLDKEIDAIGDDHIGSNNEETPLKEGAFDLPDPEKVSLIQKKVYEILDILGMDLTDDSLKGTPRRVAKMFVNEIFSGINPKNKPEMSTFENKYNYGEMLVEKNITLYSTCEHHLLPIVGLAHVAYISNGNVIGLSKINRIVRYFAERPQVQERLTIQIVRELQKALNTDDVACVIDAKHLCVNSRGIKDINSSTVTSEFGGKFKKEKIKREFLDYIKLESEL

SEQ ID NO: 171356 - protein, 172 aa, Unknown
  Bacterial polypetide isolated from the Sargasso Sea
MNNNIDKIKSLIAELIELIGEDVSREGIKKTPLRVAKSWDFFSQGYRQKVSDVINDAIFTEDSKDMIVVRDIEFFSLCEHHMIPFFGRAHVGYIPNGKIIGLSKIPRIVDLFSRRLQVQERLTDQIANTIQDVLNPIGVAVVMEGRHLCMQMRGVEKQNSLASTSAMLGQFR

SEQ ID NO: 171357 - protein, 226 aa, Unknown
  Bacterial polypetide isolated from the Sargasso Sea
MKLEDILKRELDSIGDDHHSSNQENPIREDAFDVSDSEKIKLIEVKVRDILEILGMDLTDDSLKGTPLRVAKMYVNEVFGGLNPEKKPVPSTFDNKYKYGEMLVEKNITLYSTCEHHLLPIIGFAHVAYVSNGTVVGLSKINRVVNYYSKRPQVQERLTIQVVKELQKILNTDDVACVIDAKHLCVNSRGINDISCSTVTAEFGGKFKDLKFRRDFLDYIKLETDI

SEQ ID NO: 171358 - protein, 191 aa, Unknown
  Bacterial polypetide isolated from the Sargasso Sea
MNEKKQKELEKNTRNLLELLGEDPDREGLINTPKRVAKAWNFLTKGYTENLDDLINNAIFEGESKDMVIVKNIEFYSLCEHHMIPFYGKAHIGYIPNGKIIGLSKLARITDLFAQRLQVQERLTNQIAQCLQEVLNPRGVAVVLEGKHFCMLSRGVQKQNSIATSSSMLGIFREKESTRNEFLKLIEMNNI

SEQ ID NO: 171359 - protein, 112 aa, Unknown
  Bacterial polypetide isolated from the Sargasso Sea
QDYQTGRILMMAWMNRESLALTASEQRAIYWSRSRGKLWRKGEESGHVQKLHELRLDCDADVIVLMVEQLGGIACHTGRESCFYRVYENGGWKTVDAVLKDPHAIYAGHSHE

SEQ ID NO: 171360 - protein, 280 aa, Unknown
  Bacterial polypetide isolated from the Sargasso Sea
SDDASDSADCDGDCDTGDDSDSVDCDGYCGSWDGYDSADCDGDCGYYDDFGSYDCDDICDYSDDSGSVDCDGDCDTWDDSLSDDCDGSCGFYDAYDSGDCNMVCEYSDDYGSEDCDGDCGSYDDSDSYDCDGYCDTWDDYDSADCDGDCGSYDDSDSYDCDGYCDTWDDYDSADCDGDCGYSDDYDSADCDEICDSGDDYDSYDCDGDCDDLDASDSYDCDGYCDAPDGYSSPDCDGDCGSWDDYGSYDCDEICDSGDESPSYDCDDYCDFDDAPDSYDC

SEQ ID NO: 171361 - protein, 118 aa, Unknown
  Bacterial polypetide isolated from the Sargasso Sea
MVPAIAQDYQSGRILMMAWMNRESLALTASEQRAIYWSRSRGKLWRKGEESGHVQKLHELRLDCDADVIVLMVEQLGGIACHTGRVSCFYRVYENGGWKTVDAVLKDPHAIYAGHSHE

SEQ ID NO: 171362 - protein, 126 aa, Unknown
  Bacterial polypetide isolated from the Sargasso Sea
MDEIKWDSDGLVPAIAQDYKTGRVLMMAWMNREALSLTAAEQRAIYWSRSRGKLWRKGEESGHVQTLHELRLDCDADVVILKVEQIGGIACHTGRHSCFYRVFENGEWKVVEPVLKDPHAIYPAGH

SEQ ID NO: 171363 - protein, 373 aa, Unknown
  Bacterial polypetide isolated from the Sargasso Sea
IQVAINPNTKPDDLRRPGHIFPLRAKKGGVLKRAGHTEAAVDIAAMSGLYPAGVICEIQNPDGSMSRLPQLKEYAKQWGMKLISIADLISYRFQTERFVFRKSDAVLPSIFGNFKAYGYVNELDGSEHVALVKQKSSKLCEPVLVRMHSECLTGDAFGSLRCDCRPQLEAALSRIEKEEEGVVVYLRQEGRGIGLINKLKAYSLQDGGLDTVEANERLGFPADLRNYGVGAQILTDLGIKKLKLLTNNPRKIAGLGGYGIEVIERVPLVICPNDNNAEYLSVKKTKLGHMIDEDNPNSRNIDPFISIFLDGKYKSIDLVPIKNKVIKFCSENNINIKLESTPRLLAFWNRPKLVWRILHDQNRTNSNITDEEI

SEQ ID NO: 171364 - protein, 278 aa, Unknown
  Bacterial polypetide isolated from the Sargasso Sea
MARPGHIFPIVGKNGGVLRRAGHTEASIDLATMAGLQPSGVICEIMADDGTMAKGKELDQFAKKHDLKIISIASLIKHLSKERDLVKKIDSIKLPTKNGEYDLHTYEGIFDGKTHLALTKGDYLSRESVLVRVHSECLTGDVFHSLRCDCGDQLDVALNLIESEGSGIVIYLRQEGRGIGLKHKIKAYKLQEEGLDTVEANEKLGFKPDLRDYGIGAQILKKLGVKKLTVLTNNPKKLIGLEGHGLEITSRRPIIVGENKNNSRYLKTKKEKLGHILR

SEQ ID NO: 171365 - protein, 321 aa, Unknown
  Bacterial polypetide isolated from the Sargasso Sea
DTQFTTSVDLMGDGVSTGISADDRFKTIKGLSDPNATRQDFKVPGHVFPLQAMDGGVLRRAGHTEAAVDLCLLADHYPVAVICEIINDDGSMARIDDLVNFSKKHDVAIGTIKDLIEYKLKLTNPVSFVSKAKVPTEFGEFTAHVYKDNNDNTEHIALTYENYLEGESSMVRVHSECLTGDVFSSNKCDCGYQLDSALETIVNNGSGVLLYMRGHEGRGIGLGNKIKAYSLQDEGADTVEANIQLGFEMDQRDYGTGALILRDLGITNMNLLTNNPSKRAGLEGFGLNIVKRTPIKGKTTPENTSYLETKENKMGHNFNEE

SEQ ID NO: 171366 - protein, 303 aa, Unknown
  Bacterial polypetide isolated from the Sargasso Sea
MGDGVSTGISADDRFKTIKGLSDPNATRQDFKVPGHVFPLQAMDGGVLRRAGHTEAAVDLCLLADHYPVAVICEIINDDGSMARIDDLVNFSKKHDVAIGTIKDLIEYKLKLTNPVSFVSKAKVPTEYGVFTAHVYKDNNDNTEHIALTYENYLEGESSMVRVHSECLTGDVFSSNKCDCGYQLDSALETIVNNGSGVLLYMRGHEGRGIGLGNKIKAYSLQDEGADTVEANIQLGFEMDQRDYGTGALILRDLGITNMNLLTNNPSKRAGLEGFGLNIVKRTPLKGKTTPENTSYLETKENK

SEQ ID NO: 171367 - protein, 243 aa, Unknown
  Bacterial polypetide isolated from the Sargasso Sea
VAVICEIINDDGSMARIDDLIEFSAKHDVAIGTIKDLIEYRLKLSNPVNLVSSAKVPTDYGEFTAHVYKDNNDNTEHIALTYKDYLQGESSMVRVHSECLTGDVFSSNKCDCGYQLNNAMETIVKNGSGVILYMRGHEGRGIGLGNKIKAYSLQDEGADTVEANLKLGFEMDQRDYGTGALILRDLGITNMNLLTNNPNKRAGLEGFGLNIVKRTPLKGKITNENSSYLDTKENKMGHNFNEE

SEQ ID NO: 171368 - protein, 196 aa, Unknown
  Bacterial polypetide isolated from the Sargasso Sea
MSDKLKFIETSKLPTDIGEFTVHAFTDENESKDHLAICMGDLLTNEPVLSRIHSQCITGESFFSMRCDCRFQLTESLKQIAQIGRGVIFYLQQEGRGIGLSNKIKAYSLQDKGLDTVEANHQLGFKDDERTYENIAGMVKYLAIKELDLMTNNPKKIKALEDMGIKVNQRVPIFSNTNKYNEKYISTKKSKLGHLI

SEQ ID NO: 171369 - protein, 289 aa, Unknown
  Bacterial polypetide isolated from the Sargasso Sea
IDDEERENEGDLVISSKYLTSDHINFMITYGKGLVCAPISSSIAKKLKLPLMEGVNNEMQTPYTHSVDLKGDGVTTGISAEDRFKTIKGLASDDSTRESFNVPGHIFPLQAMDGGVLRRAGHTEAAVDLCTISNHKQVAVICEIINEDGTMARLEDLIKFSQVHKIPIGTIKDLIQYRLDSSNPVEFVSKSKIPTDYGEFMGHVFKDNVDNTEHIALTFGDYLSGEDTMVRVHSECLTGDTLFSKKCDCGSQLSSALEAISNNKSGVLLYMRGHEGRGIGLGNKIKAYS

SEQ ID NO: 171370 - protein, 311 aa, Unknown
  Bacterial polypetide isolated from the Sargasso Sea
ICAAQFATPKQINFMATEARGLICLAMEGERLDALDLPLMVGQNTDTNQTAFTVSIDAGPEAGVSTGISAEDRARTIQVALHPQSRPQDLRRPGHIFPLRARDGGVLKRAGHTEAAVDLSRMAGLHPSGVICEIQNQDGSMARLPQLADYAEQHGLCLISIADLIRYRLENERFVVREAEAKIPSEFGDFRAIGYRNILDGGEHVALVKGHPGRQSSPVMVRVHSECLTGDAFGSLRCDCRPQLEAALRMIQAEGEGVVVYLRQEGRGIGLINKLKAYSLQESGLDTVEANEHLGFGADLRDYGVGAQIIT

SEQ ID NO: 171371 - protein, 116 aa, Unknown
  Bacterial polypetide isolated from the Sargasso Sea
AQIGRGVIFYLQQEGRGIGLSNKIKAYSLQDKGLDTVEANHQLGFKDDERTYENITGMVKYLAIKELDLMTNNPKKIKALEDMGIKVNQRVPIFSDTNKYNEKYISTKKSKLGHLI

SEQ ID NO: 171372 - protein, 196 aa, Unknown
  Bacterial polypetide isolated from the Sargasso Sea
MKDKLKFIETSKLPTDIGEFTIHAFTDEIEKKDHLAICMGDLLTNEPVLSRIHSQCITGESFFSMRCDCRFQLTESLKQIANAGRGVVFYLQQEGRGIGLSNKIKAYSLQDKGLDTVEANHQLGFKDDERTYENIADMVKYLAIKRLDLMTNNPKKIKALEDMGIEVNQRVPIFSDTNKYNEKYISTKKSKLGHLI

SEQ ID NO: 171373 - protein, 161 aa, Unknown
  Bacterial polypetide isolated from the Sargasso Sea
VKGDWNEDDPILVRVHSACLTGDVFGSYRCDCGPQLHSAMELIEREGKGVILYLPQEGRGIGLINKLHAYRLQEDGADTVEANHKLGFKDDLRDYGMGAQMLYMLGVRRMKLMTNNPRKIVGLQGHGLEVVERVPLEIECNPGNKKYLHTKKSKLGHILNI

SEQ ID NO: 171374 - protein, 280 aa, Unknown
  Bacterial polypetide isolated from the Sargasso Sea
FDSVESVIADFRRGKMVIVVDDEDRENEGDLIMAAEHATPKAINFMAKHGRGLICVPTTEDRLRQLGIERMVPRNQESFQTDFQVSVDAAKGITTGISAKDRAKTIQTMADPTAVPDDLVQPGHIFPLRARPGGVLQRAGHTEAAVDLTKLAECRPIGVICEIMDDSGNMARLPKLKRFAKAHKLKICSIEELIKYRRSREKLIEKIEVINLPSEHGDFKLHLYRSALDGQNHIALVCGDVEKTENVMVRVHSECLTGDVFGSLRCDCGPQLDDAMRQVA

SEQ ID NO: 171375 - protein, 126 aa, Unknown
  Bacterial polypetide isolated from the Sargasso Sea
MNSCKFASESKLPTRFGEFTISTFEEPCGKDHIALTIGDIQNAETVMCRVHSECLTGDALHSLRCDCGPQLQAALKMLAENKSGILLYLRQEGRGIGFGNKIRAYALQDQGHDTGEANEMLGFPAD

SEQ ID NO: 171376 - protein, 123 aa, Unknown
  Bacterial polypetide isolated from the Sargasso Sea
ALLYLRQEGRGIGLMNKIRAYHLQDGGADTVEANELLGFGADQRDYGICKPMLDHLGITSLKLLTNNPRKVKAIQGFGVEVAQRLPLQFGKNPHNAKYLATKAGKLGHMLGQLHQAETEPGDV

SEQ ID NO: 171377 - protein, 196 aa, Unknown
  Bacterial polypetide isolated from the Sargasso Sea
MSDKLKFIETSKLPTDIGEFTVHAFTDENESKDHLAICMGDLLTDEPVLSRIHSQCITGESFFSMRCDCRFQLTESLKQIAQNGRGVIFYLQQEGRGIGLSNKIKAYSLQDKGLDTVEANHQLGFKDDERTYENIAGMVKYLAIKKLDLMTNNPKKIKALEDMGIKVNQRVPIFSDINKYNERYISTKKSKLGHLI

SEQ ID NO: 171378 - protein, 225 aa, Unknown
  Bacterial polypetide isolated from the Sargasso Sea
IRLPIVAIADVIAYRMSHEKLVERGAEARLPTDYGVFTAVAYDSVVDASEHIAVYMGDIDDSEPVIVRVESECLTGHVFGSTRCDCGDQVNMALKTISDHGRGVLVYMRQEGRGIGLLNKLKAYELQDKGLDTVEANLHLGFPMDLRRYGVGAQILRDLGVRRFNLLTNNPKKVVGLQGFGLEMLEQIPLKAPINDENRFYMKTKVEKMGHDLEIDPPHKKETAN

SEQ ID NO: 171379 - protein, 319 aa, Unknown
  Bacterial polypetide isolated from the Sargasso Sea
IRNGECIIVVDDERRENEGDLICAAQFATPQQINFMATEGRGLICLAMQGEKLDSLDLPLMVDRNTDENQTAFTISIDAGPENNVSTGISAEDRAKTIQVAINPNTKPEDLRRPGHIFPLRAKKGGVLKRAGHTEAAVDIAAMSGLYPAGVICEIQNPDGSMSRLPQLKEYAKQWGMKLISIADLISYRFQTERFVFRKSDAVLPSIFGNFKAYGYINELDGSEHVALVKQKSSKLSEPVLVRMHSECLTGDAFGSLRCDCRPQLEAALSRIEKEEEGVVVYLRQEGRGIGLINKLKAYSLQDGGLDTVEANEKLGFPA

SEQ ID NO: 171380 - protein, 284 aa, Unknown
  Bacterial polypetide isolated from the Sargasso Sea
GNPENLKEPVLVRMHSECLTGDAFGSLRCDCRPQLEAALSRISEEGEGVVVYLRQEGRGIGLVNKLKAYNLQDGGLDTVEANEKLGFPADLRNYGVGAQILTDLGINRLKLLTNNPRKIAGLGGYGLQVESRVPLVICPGDHNAAYLEVKREKLGHLIDNNIQTNLTNERQNIVVYWDGKVNDSELKHFEDRACKWSENHFLNISIQTAPRLKALCENPLFIWNVRHRDIKTHLEGNFIDKRLLESLLKELSNWKNTERIGIIKTDNYERLLHPSSNISIESKK

SEQ ID NO: 171381 - protein, 268 aa, Unknown
  Bacterial polypetide isolated from the Sargasso Sea
DFVKPGHIFPLRYQKGGVLVRAGHTEGSVDLVKLSGKRPAAVICEVMNEDGTMARGDDLKKISEKYNMPIVSIEDIIAYRIAKENLVEKIAEAKLPTKYGEFKVVGFKSQVDKSEPIVLIKGEIIANKPVLVRVHSECTTGDILESIRCDCGDQLDKALEKISKSDSGVLVYMRQEGRGIGLLNKLRAYELQDEGMDTVDANLSLGFPMDLRTYGIGAQILRSLGIKKFDLLTNNPKKVIGLEGFGLEISSTIKLSTEKRPQNKKYIE

SEQ ID NO: 171382 - protein, 196 aa, Unknown
  Bacterial polypetide isolated from the Sargasso Sea
MSDKLKFIETSKLPTDIGEFTVHAFTDENESKDHLAICMGDLLTDEPVLSRIHSQCITGESFFSMRCDCRFQLTESLKQIAQNGRGVVFYLQQEGRGIGLSNKIKAYSLQDKGLDTVEANHQLGFKDDERTYENIAGMIKYLAIKKLDLMTNNPKKIKALEDMGIKVNQRVPIFSDTNKYNEKYISTKKSKLGHLI

SEQ ID NO: 171383 - protein, 117 aa, Unknown
  Bacterial polypetide isolated from the Sargasso Sea
MSKQQQERERAVRADAHLPTEHGNFRVRAFPELTSEDHCVIYTGQPWMDEAPLVRIHSECLTGDAFSSLKCDCGPQLKRALNGIQENGVGMVVYLRQEGRGIGLAAKIQAYALQDRG

SEQ ID NO: 171384 - protein, 120 aa, Unknown
  Bacterial polypetide isolated from the Sargasso Sea
LKQIAQNGRGVIFYLQQEGRGIGLSNKIKAYSLQDKGLDTVEANHQLGFKDDERTYENIAGMVKYLAIKKLDLMTNNPKKIKALEDMGIKVNQRVPIFSDTNKYNEKYISTKKSKLGHLI

SEQ ID NO: 171385 - protein, 292 aa, Unknown
  Bacterial polypetide isolated from the Sargasso Sea
MCFITSERSKELDLEPMDRRNSSLHETNFTISVDAKQNTTTGISAFDRSKTILALINDDTQSSDLARPGHIFPIVGKDGGVLRRAGHTEASIDLAMMAGLKPSGVICEIMADDGTMARGDELQKFSEKHNLKIISISDLIRHLRRKRSLVKKIETIKLPTDELDFELHLYEGLFDNQTHLALTTGNYLDSESVLVRVHSECLTGDVFKSLRCDCGKQLNAAIEAISKNESGVIVYLRQEGRGIGLKHKIKAYKLQEQGLDTVEANQELGFEPDLRDYGVGAQILKDLGANNS

SEQ ID NO: 171386 - protein, 155 aa, Unknown
  Bacterial polypetide isolated from the Sargasso Sea
LLTDEPVLSRIHSQCITGESFFSMRCDCRFQLTESLKQIAQIGRGVIFYLQQEGRGIGLSNKIKAYSLQDKGLDTVEANHQLGFKDDERTYENIAGMVKYLAIKKLDLMTNNPKKIKALEDMGIKVNQRIPIFSDTNKYNEKYISTKKSKLGHLI

SEQ ID NO: 171387 - protein, 297 aa, Unknown
  Bacterial polypetide isolated from the Sargasso Sea
AINFMPTEARGLICLAMEGKRLDELDLPLMVDRNTDANETAFTVSIDAGAEHGVSTGISAEDRARTIQVALNPKTRPAELRRPGHIFPLRAKPGGVLKRAGHTEAAVDLAQLAGLTPSGVICEIQNSDGSMARLPELRAYADTWGLKLISIAELIRYRLDNERFVRRQAHAELPSQFGSFQAIGYCNELDGSEHVALVKGDPASLREPVLVRMHSECLTGDAFGSLRCDCRPQLEAALRQIEREGEGVVVYLRQEGRGIGLINKLRAYSLQDGGLDTVEANERLGFPADLRNYGVGA

SEQ ID NO: 171388 - protein, 156 aa, Unknown
  Bacterial polypetide isolated from the Sargasso Sea
MSDKLKFIETSKLPTDIGEFTVHAFTDENESKDHLAICMGDLLTDEPVLSRIHSQCITGESFFSMRCDCRFQLTESLKQIAQNGRGVVFYLQQEGRGIGLSNKIKAYSLQDKGLDTVEANHQLGFKDDERTYENIAGMIKYLAIKKLDLMTNNPKK

SEQ ID NO: 171389 - protein, 269 aa, Unknown
  Bacterial polypetide isolated from the Sargasso Sea
EKEEEGVVVYLRQEGRGIGLINKLKAYSLQDGGLDTVEANEKLGFPADLRNYGVGAQILTDLGIKKLKLLTNNPRKIAGLGGYGIEVIERVPLVICPNDNNAEYLSVKKTKLGHMIDDDNSNSRNIDPFISIFFDGKYKSIDLVPIKNKVIKFCSEQKINIKLESSPRLLAFWNRPKLVWRILHDRNRNNSNINDEEIKNIELFIQFLSKYKNSTKIGIIVSRNIEQALHPKSSIKLINTKFTINNEILYSSTRKFNLDKETFSIVFEG

SEQ ID NO: 171390 - protein, 269 aa, Unknown
  Bacterial polypetide isolated from the Sargasso Sea
IAHQGGVLKRAGHTEAAVDLARLAGLQPGGVICEIMNEDGTMARYPQLREFADRHKMLLITIEDLIQYRKHMETLVVKKAEAALPTEFGTFRVIGFQSLLDDSDYVALVKGEWEQDEPVLVRVHSECLTGDVFGSFRCDCGPQLHAAMMMVEREGKGVILYLPQEGRGIGLLNKLKAYKLQEDGVDTVEANHRLGFKEDLRDYGMGAQMLYMLGVRNMRLMTNNPRKIVGLQGHGLQVVERVPLEIEKNPGNQRYLETKKHRLGHLLNL

SEQ ID NO: 171391 - protein, 101 aa, Unknown
  Bacterial polypetide isolated from the Sargasso Sea
MQLKRVAEAKLPTPWGDFLMVGFEELATGHDHVALVFGDITGQTPVLARVHSECLTGDALFSLRCDCGFQLEAALTHIAEEGRGILLYHRQEGRNIGLLNK

SEQ ID NO: 171392 - protein, 223 aa, Unknown
  Bacterial polypetide isolated from the Sargasso Sea
KTLFKFAKKHNLKIISIADLIRYIRKTEKLVKKVEEVNLPTKYGNFKLHLYEDIFDNNSHLALSLGDFSHEKSTLVRVHSECLTGDVFHSQRCDCGDQLETAMQMISDNKSGVIVYLKQEGRGIGLLHKIKAYRLQEGGLDTVEANEELGFLADLRDYGVGAQILKDLGITNITIMTNNPKKLVGLEGHGLNIVSRIPIKIKPNPNNKEYLKTKKSKLGHILD

SEQ ID NO: 171393 - protein, 279 aa, Unknown
  Bacterial polypetide isolated from the Sargasso Sea
PLRARAGGVLKRAGHTEAAVDLATMAGLAPAGVLCEIVSDDGTMARLPELIEFAQTYDIPIISIADMIRYRNRHERLVERFSSARIPTIYGEFSAHIYRSSLDDVEHLAFVFGDLNENEIPLVRVHSECLTGDVLGSLRCDCGSQLELAMKLVAENGSGAIIYLRGHEGRGIGLGHKMRAYALQDEGMDTVDANVALGFAPDSREYGIGAQIIADLGIQKMRILTNNPAKYGGLQGYNLEIVERVPLISDSNPENVRYLQTKEERMGHLMDKSNTSKDS

SEQ ID NO: 171394 - protein, 264 aa, Unknown
  Bacterial polypetide isolated from the Sargasso Sea
ERFVFRKSDAVLPSIFGNFKAYGYVNELDGSEHVALVKQKSSKLSEPVLVRMHSECLTGDAFGSLRCDCRPQLEAALSRIEKEEEGVVVYLRQEGRGIGLINKLKAYSLQDGGLDTVEANEKLGFPADLRNYGVGAQILTDLGIKKLKLLTNNPRKIAGLGGYGIEVIERVPLVICPNDNNAEYLSVKKTKLGHMIDHDNSNSSNIDPFISIFLDGKYKSIDLVPIKNKVIKFCSEQNINIKLESSPRLLAFWNRPKLVWRILH

SEQ ID NO: 171395 - protein, 151 aa, Unknown
  Bacterial polypetide isolated from the Sargasso Sea
STLVRVHSECLTGDVFHSQRCDCGDQLETAMQMIANNKSGVIVYLKQEGRGIGLLHKIKAYRLQEGGLDTVEANEELGFSADLRDYGVGAQILKDLGITNITIMTNNPKKLVGLEGHGLNIVSRIPIKIKPNQNNKEYLKTKKSKLGHILD

SEQ ID NO: 171396 - protein, 249 aa, Unknown
  Bacterial polypetide isolated from the Sargasso Sea
AVPEAPVLIRAAEPFDLDTARAVADPALDLAYPMKGPFAAEHIEDGDAARTAMELARLAGILPAFLVAPNQDGEAQDVSSADLAAWKDTAHLAIASRAKLPVEAAENAEIVAFRALDDLREHVALVIGTQDGDRPPLVRLHSECLTGDILGSLKCDCGPQLNAALRAMSAEAGEGGWGVLLYLRQEGRGIGLVNKLRAYALQDAGYDTVDANNRLGLPTEARDFPVAARMLDLLGVHAIRLMTNNPAKV

SEQ ID NO: 171397 - protein, 200 aa, Unknown
  Bacterial polypetide isolated from the Sargasso Sea
MGEVPADAHLPTEHGNFRIRVFHEEETGLDHVALLLGDMVGPDPVLVRVHSECLTGDAFGSLRCDCGPQLQTALRMIQDVGWGCLVYLRQEGRGIGLHAKIQAYNLQDRGVDTLDANLMLGHPADARDYGIASEILDSVGIEKVNLMTNNPDKVEQLSEYGINVVERMAIVAGVGEGNLDYLSTKATRMGHQISKDNLEK

SEQ ID NO: 171398 - protein, 290 aa, Unknown
  Bacterial polypetide isolated from the Sargasso Sea
DRAKTIQVAINPNTKPDDLRRPGHIFPLRAKKGGVLKRAGHTEAAVDIASMSGLYPAGVICEIQNPDGSMSRLPQLKDYAKQWGMKLISIADLISYRFQTERFVFRKSDAVLPSIFGNFKAYGYVNELDGSEHVALVKQKSSKLSEPVLVRMHSECLTGDAFGSLRCDCRPQLEAALSRIEKEGEGVVVYLRQEGRGIGLINKLKAYSLQDGGLDTVEANEKLGFPADLRNYGVGAQILTDLGIKKLKLLTNNPRKIAGLGGYGIEVIERVPLVICPNDNNAEYLSVKKT

SEQ ID NO: 171399 - protein, 208 aa, Unknown
  Bacterial polypetide isolated from the Sargasso Sea
YPVSVVFVAASQLPTPFGVFTMHGFLDEATGKEHVALTFGNVADGAPVLGRLHSECLTGDALFSLRCDCGAQLQAALQAIANEGRGVLLYLRQEGRGIGLLNKIRAYELQDGGADTVEANERLGFGADQRDYAICLPMLEHLGIDSLKLMTNNPRKVKALGDMGIAVDHRVPLQIAHNPYNKRYLATKAGKLGHMLGNQHQGETEESL

SEQ ID NO: 171400 - protein, 107 aa, Unknown
  Bacterial polypetide isolated from the Sargasso Sea
MTIQIRTPEEPTEIDADAFLPTEFGNFRIRVTVDEDGNEHCLVYAGDLQGADAPLIRIHSECLTGDAFSSMKCDCGPQLQASLKQIQEEGCGAVVYLRQEGRGIGLH

SEQ ID NO: 171401 - protein, 180 aa, Unknown
  Bacterial polypetide isolated from the Sargasso Sea
MGEFTVHAFTDENESKDHLAICMGDLLTDEPVLSRIHSQCITGESFFSMRCDCRFQLTESLKQIAQNGRGVIFYLQQEGRGIGLSNKIKAYSLQDKGLDTVEANHQLGFKDDERTYENIAGMIKYLAIKKLDLMTNNPKKIKALEDMGIKVNQRVPIFSDTNKYNEKYISTKKSKLGHLI

SEQ ID NO: 171402 - protein, 306 aa, Unknown
  Bacterial polypetide isolated from the Sargasso Sea
TINFMATEGRGLICLAMQGEKLDSLDLPLMVDRNTDENQTAFTISIDAGPENNVSTGISAEDRAKTIQVAINPNTKPDDLRRPGHIFPLRAKKGGVLKRAGHTEAAVDIAAMSGLYPAGVICEIQNPDGSMSRLPQLKEYAKQWGMKLISIADLISYRFQTERFVFRKSDAVLPSIFGNFKALGYINELDGSEHVALVKQKSSKLSEPVLVRMHSECLTGDAFGSLRCDCRPQLEAALSRIEKEEEGVVVYLRQEGRGIGLINKLKAYSLQDGGLDTVEANEKLGFPADLRNYGSGAQILTDLGIK

SEQ ID NO: 171403 - protein, 183 aa, Unknown
  Bacterial polypetide isolated from the Sargasso Sea
HWGDFSVIAYEDEKNAEEHLLLYMGELANDSLLRIHSQCLTGDTLYSLKCDCGSQLAMALEKIASEGKGMIIYMAQEGRGIGLVNKIRAYELQDKGMDTVEANEALGFAADERDYSYCKEILSSVNIESVRLMTNNPRKINGLEDVGIKVTERVAIQVDPNKHNEDYLKVKADKLGHMMKSSD

SEQ ID NO: 171404 - protein, 252 aa, Unknown
  Bacterial polypetide isolated from the Sargasso Sea
LCEIVNDSDGSMARLPQLREFSEKHGLKMVLISDLVRYRRKRQALVERTASARVPTNHGEFTAVSYRSKLDGIEHVAFVYGDDADAVSGDNVLVRVHSECLTGDIFHSTRCDCGNQLDMAMKKVAAEGRGVIVYLRGQEGRGIGLGHKLRAYNLQDEGRDTVQANEDLGLPVDSREYGVGAQILQDLGVRTIRLMTNNPAKYHGLKGFGLTVVGRVPLFAPITLDNKRYIETKRKKMGHMFGNESDEFNAVP

SEQ ID NO: 171405 - protein, 183 aa, Unknown
  Bacterial polypetide isolated from the Sargasso Sea
DDLDFELHLYEGLFDNQTHLALTTGNYLDSDSVLVRVHSECLTGDVFKSLRCDCGKQLNAAIEAISKNESGVIVYLRQEGRGIGLKHKIKAYKLQEQGLDTVEANQELGFEPDLRDYGVGAQILKDLGANKLTVLTNNPKKLIGLEGHGLEIVSRAPIIIKAGKENEKYLDTKQKKLGHIFNV

SEQ ID NO: 171406 - protein, 283 aa, Unknown
  Bacterial polypetide isolated from the Sargasso Sea
MSEKNNFFNTIEDAIEVFGKGEMLVVVDDEDRENEGDLVCAAETISPEKINFMAKHGRGLICLPLDSEVVKRLNIPLMVSNNNATMGTNFTISIEASTGVTTGISAADRARTIKVAIDPNSSAKDIRSPGHVFPLSALEGGVLRRAGHTEAAVDLAKMSNMLPAGVICEIMNEDGTMARVPDLKKFANYHGIKIITIKDLIKYRKRNETLVVKKAEASMPSIYGDFKVIGFQSLLDDSDYVALVKGDLDEKEPILVRVHSECLTGDVFGSYRCDCGPQLHAAM

SEQ ID NO: 171407 - protein, 200 aa, Unknown
  Bacterial polypetide isolated from the Sargasso Sea
MSDDVPSIAKLPTLWGQFDIHVYHEEETGLDHVALMLGSMAGPDPVLLRVHSECLTGDAFSSLRCDCGPQLDAAMKAIVDNGWGCLLYLRQEGRGIGLHAKIQAYHLQDKGADTLDANLILGHPADGRDYQIAATMLRDLEIEDVALLTNNPDKVKQLEQHGIVVSKTVPLVAGVGEDNLQYLQTKVERMGHTIDSTDLE

SEQ ID NO: 171408 - protein, 265 aa, Unknown
  Bacterial polypetide isolated from the Sargasso Sea
MFPLVARDGGTLVRAGHTEASVDISKLAGLRSCAVICEIMNDDGTMARLKDCEKFAKKHKIKIATIADLISYRLKKDSLVERVGECQLPTHIAKFRCFAYNSLIDGKTHIALVKGKISKSKPTLVRVHSECLTGDLFGSQRCDCGSQLDAALEMITDAGSGVLLYLAQEGRGIGIAHKIKAYSLQEKGLDTVEANEALGFKEDLREYGTGAQILRDLGVTKINLLTNNPRKIAGIEGYGIKIEKSLPIEIKPGEYNLRYLRTKKK

SEQ ID NO: 171409 - protein, 154 aa, Unknown
  Bacterial polypetide isolated from the Sargasso Sea
GSDEPVLSRIHSQCITGESFFSMRCDCRFQLTESLKQIAQNGRGVIFYLQQEGRGIGLSNKIKAYSLQDKGLDTVEANHQLGFKDDERTYENIAGMIKYLAIKKLDLMTNNPKKIKALEDMGIKVNQRVPIFSDTNKYNEKYISTKKSKLGHLI

SEQ ID NO: 171410 - protein, 192 aa, Unknown
  Bacterial polypetide isolated from the Sargasso Sea
SCKFASESKLPTKFGEFTISTFEEPCGKDHIALTIGDIQKEDTVMCRVHSECLTGDALHSLRCDCGPQLQAAMKMLAENKSGILLYLRQEGRGIGLVNKIRAYALQDQGHDTVQANEMLGFPADLREYNICLDILQHFNITSVNLLTNNPKKVSALEEVGINVTQRTSLHEGENEKNTEYLNTKRDKMGHLR

SEQ ID NO: 171411 - protein, 197 aa, Unknown
  Bacterial polypetide isolated from the Sargasso Sea
AHAYVSLLDEEEHVAYVLGDLSSVDAPLVRVHSECLTGDLLGSLRCDCGSQLDAALAQIGSEGVGLIVYLRGHEGRGIGIGHKLRAYGLQDEGLDTVDANLSQGLPVDSREYGVGAQILSDLGITHMRLMTNNPAKYGGLEGYGLEITGRVPLETAANPENVRYLETKRDRLGHNFAQRGGSGGPGSAEETAGGTGS

SEQ ID NO: 171412 - protein, 280 aa, Unknown
  Bacterial polypetide isolated from the Sargasso Sea
IALVKQKSNKLSEPVLVRMHSECLTGDAFGSLRCDCRPQLEAALSRIEKEEEGVVVYLRQEGRGIGLINKLKAYSLQDGGLDTVEANEKLGFPADLRNYGVGAQILTDLGIKKLKLLTNNPRKIAGLGGYGIEVTERVPLVICPSDHNAEYLNVKRQKLGHMLDEEKLNTRNIDPYIAIFLDGEFKSIDLVSIKNKTSEFCEQNKINIILESTPRLLAFWNRPKLVWRILHDKKRKDYTINDNEIRKIEIFIQLLSEYNKSSKVGIIISRKYRTGITPKK

SEQ ID NO: 171413 - protein, 399 aa, Unknown
  Bacterial polypetide isolated from the Sargasso Sea
MKFDTISSAIKEIKAGGMVVVLDNEDRENEGDLVMASDAATPANINFMAKEGRGLICISVSKSRVKKLDLEPMEQKNTSLHETAFTVSVDAIKGTTTGISASDRCKTIKTIVSDKTNPSDLARPGHIFPIVGRNGGVLRRAGHTEASMDLAQLAGFSRSGVICEIIGDDGEMLRGPELLKFAQQHNLKIISIEDLIRFRRKEESIIKKVEEIKLPTKFGDFDLHMYDDIYNNKVHLGLTYGKIDNKKPVLIRVHSECLTGDIFHSLMCDCGSQLDFAMKKIVEKGSGIIVYLRQEGRGIGLRNKIKAYKLQQEKNLDTVEANNALGFKADLRDYGVGAQILKDLGAKELIVMTNNPKKLIGLEGHDLKIADRVSINIDPSEHNKEYLSIKKTKLNHILD

SEQ ID NO: 171414 - protein, 399 aa, Unknown
  Bacterial polypetide isolated from the Sargasso Sea
MKFDTIPSAIKEIKAGGMVVVLDNEDRENEGDLVMASDAASPANINFMAKEGRGLICISVSKPRAKKLDLEPMEQKNTSLHETAFTVSVDAIKGTTTGISASDRYKTIKTIVSDSTNPSDLARPGHIFPIVGRNGGVLRRAGHTEASMDLAQLAGFSRSGVICEIIGDDGEMLRGPELMKFAKKHNLKIISIEDLIRFRRKQESIIKKVEEIKLPTKFGDFDLHMYDDIYNNKVHFGLTYGKIDTKKPILIRVHSECLTGDIFHSLRCDCGSQLDFAMKKIVEKGSGIIVYLRQEGRGIGIRNKIKAYKLQQEKNLDTVEANNVLGFKADLRDYGVGAQILKDLGAKELIVMTNNPKKLIGLEGHDLKIADRLPVKIKPSEYNEKYLSIKKTKLNHMLD

SEQ ID NO: 171415 - protein, 196 aa, Unknown
  Bacterial polypetide isolated from the Sargasso Sea
MDDKLKFIETSKLPTDIGEFTVHAFTDEKEKKDHLAICMGDLLTSEPVLSRIHSQCITGESFFSMRCDCRYQLTESLQQIANIGRGVVFYLQQEGRGIGLSNKIKAYSLQDKGLDTVEANHQLGFKEDERTYETVSGMIKFLAIKKLDLMTNNPKKIKALKDMGVEVNQRIPLSSDTNKYNEKYISTKIKKLGHLL

SEQ ID NO: 171416 - protein, 400 aa, Unknown
  Bacterial polypetide isolated from the Sargasso Sea
MISDIEVIIEKFKKGEMVILVDDEDRENEGDLIVSSQYLTPEHINFMITYAKGLVCAPIAKDVATKLKLSLMQGIDNEEDTQFTTSVDLMGDGVSTGISADDRFKTIKGLSDPNATRQDFKVPGHVFPLQAMDGGVLRRAGHTEAAVDLCLLADHYPVAVICEIINDDGSMARIDDLVNFSKKHDVAIGTIKDLIEYKLKLTNPVSFVSKAKVPTEYGEFTAHVYKDNNDNTEHIALTYENYLEGESSMVRVHSECLTGDVFSSNKCDCGYQLDSALETIVNNGSGVLLYMRGHEGRGIGLGNKIKAYSLQDEGADTVEANIQLGFEMDQRDYGTGALILRDLGITNMNLLTNNPSKRAGLEGFGLNIVKRTPLKGKTTPENTSYLETKENKMGHNFNEE

SEQ ID NO: 171417 - protein, 400 aa, Unknown
  Bacterial polypetide isolated from the Sargasso Sea
MISDIEVIIEKFKKGEMVILVDDEDRENEGDLVVSSQYLTPEHINFMITNAKGLVCAPIAIDVAKKLKLSLMQGIENEEDTQFTTSVDLNGDGVTTGISAEDRFKTIKGLSDPSSTRDDFKVPGHVFPLLAMDGGVLRRAGHSEAAVDLCLVADHYPVAVICEIINDDGSMARIDDLIQFSAKHDLAIGTIKDLIEYRLKLTNPVSLVSSAKIPTDFGEFTAHVYKDNNDNTEHIALTYKNYLEGESSMVRVHSECLTGDVFNSNKCDCGYQLNNAMETIVQNGSGVILYMRGHEGRGIGLGNKIKAYALQDKGDDTVEANLKLGFEMDQRDYGTGALILRDLGITNMNLLTNNPSKRAGLEGFGLNIVKRTPLKGKITNENSSYLDTKENKMGHNFNEE

SEQ ID NO: 171418 - protein, 196 aa, Unknown; identical to SEQ ID NO: 171368
  Bacterial polypetide isolated from the Sargasso Sea

SEQ ID NO: 171419 - protein, 362 aa, Unknown
  Bacterial polypetide isolated from the Sargasso Sea
MKFDSVEDAIEDIRRGRMVIVADDEDRENEGDLVMAASMITPQAVNFMAEHGRGLICVTMLPDLADQLDLPLMTDRNTDPHQTAFTISVDAHTKYGVTTGISAQDRAKTIELLASEETVPEDFRRPGHVFPLRAKPGGVLRRVGQTEASVDLALLAGLPPVGVICEILDADGTMARRPKLEEFAAEHELKFITVAQLVRYRLTRTRLVERIAVASMPTAYGDFDIIGYSTAMDGREHIALVKGNLDEVDNVLVRMHSECLTGDVFGSKRCDCGEQLQAALRQIDEEGAGAIVYLRQEGRGIGLGNKLKAYHLQDGGLDTVEANEELGFKPDLRDYGIGAQILLDLGIQSMRLLTNNPRKVVA

SEQ ID NO: 171420 - protein, 188 aa, Unknown
  Bacterial polypetide isolated from the Sargasso Sea
MDIEKLPKSKLPMPWGEFNVIGFTDHDGEEHLAIYLGDISENPLLRIHSQCLTGDALFSLRCDCGPQLAMALEKIASDGNGIVIYMAQEGRGIGLINKIRAYELQDQGMNTAEANEKLGFAADEREYAFCAEILNSLGISSVRLMTNNPSKIKGLEDAGIKVSERIAIQAKPTDENKEYLKIKSKYIG

SEQ ID NO: 171421 - protein, 205 aa, Unknown
  Bacterial polypetide isolated from the Sargasso Sea
MTIQIRTPEEPTEIDADAFLPTEFGNFRIRVTVDEDGNEHCLVYAGDLQSADAPLIRIHSECLTGDAFSSMKCDCGPQLQASLKQIQEEGCGAVVYLRQEGRGIGLHSKIQAYALQDQGYDTLDANLALGLPADARTYGIAARMLKEAGVRKVRMMTNNPLKVRGLEENGIKVEFRLPHMSGVSVQNIDYLRTKNERMGHMLELE

SEQ ID NO: 171422 - protein, 574 aa, Unknown
  Bacterial polypetide isolated from the Sargasso Sea
MKETSPKSNNGTILDINESFKIEFDPISDALAAIRNGECIIVVDDERRENEGDLICAAQFATPQQINFMATEGRGLICLAMQGEKLDSLDLPLMVDRNTDENQTAFTISIDAGPENNVTTGISAEDRAKTIQVAINPNTKPDDLRRPGHIFPLRAKKGGVLKRAGHTEAAVDIAAMSGLYPAGVICEIQNPDGSMSRLPQLKEYAKQWGMKLISIADLISYRFQTERFVFRKSDAVLPSIFGNFKAYGYVNELDGSEHVALVKQKSSNLSEPVLVRMHSECLTGDAFGSLRCDCRPQLEAALSRIEKEEEGVVVYLRQEGRGIGLINKLKAYSLQDGGLDTVEANEKLGFPADLRNYGVGAQILTDLGIKKLKLLTNNPRKIAGLGGYGIEVIERVPLVICPNDNNAEYLSVKKTKLGHMIDEDNPNSSNIDPFISIFLDGEYKSIDLVPIKNNVIKFCNENNINIKLESTPRLLAFWNRPKLVWRILHDQNRTNSNITDEEIKNIELFIQFLSNYRNSTKIGIIVSRNIEQALHPKNSIKLIHTKFTINNELLFSSTRKFNLDKETFSIVFEG

SEQ ID NO: 171423 - protein, 275 aa, Unknown
  Bacterial polypetide isolated from the Sargasso Sea
MVYFSIVGKEGGVLRRAGHTEASIDLSVLAGLKPSGVICEIMADDGTMARGKMLYNFAKKHSLKIISIEDLIRYRRKNEKLVEKIEAIRLPTEYGDFTLHLYEDKFDNSTHLALTMGSYTTQDSVLVRVHSECLTGDVFQSQRCDCGEQLEMAMHQISENKSGIIVYLRQEGRGIGLKHKIKAYKLQEKGMDTVEANNKLGFSADLRDYGVGAQILKDLDATKLTIMTNNPKKLIGLEGHGLTIVDRKPIKIPPKKKNKKYLETKKNKLGHILDL

SEQ ID NO: 171424 - protein, 194 aa, Unknown
  Bacterial polypetide isolated from the Sargasso Sea
MNSCKFASESKLPTKFGEFKISTFEEPCGKDHIALTIGDIQNEETVMCRVHSECLTGDALHSLRCDCGPQLQAALKMLSENKSGILLYLRQEGRGIGLVNKIRAYALQDQGHDTVEANEMLGFPADLREYNICLDILKHFNITSVNLLTNNPKKVSALEEVGIRVAQRTSLHEGENDKNSEYLDTKRNKMGHLR

SEQ ID NO: 171425 - protein, 228 aa, Unknown
  Bacterial polypetide isolated from the Sargasso Sea
RLKDCEKFAKKHKIKIATIADLISYRLKKESFVSLYAKCNLPTDYGEFTCYSFDSEIDNKTHLAFVMGNIKANKEYLVRVHSECLTGDLFGSKRCDCGSQLHKAMEIIQKEGEGVLLYLRQEGRGIGISKKIKAYSLQEEGLDTVEANHALGFNEDLREYGTGAQILRDLGLKKIKLLTNNPRKVAGLDGYGIKIIKTVPIETVPVKENLKYLKTKKNKLGHKLSLVE

SEQ ID NO: 171426 - protein, 322 aa, Unknown
  Bacterial polypetide isolated from the Sargasso Sea
MKFDSITSAVEDIKNGKCIIVVDNEDRENEGDLVAASELCTPDMINFMAKEGRGLICVSIEKNRAKKLNLEPMERKNSSLHETNFTTSVDANKNTTTGISAFDRSETVRALIDSSTISSDLARPGHIFPIVGKEGGVLRRAGHTEASIDLSLLAGLRPSGVICEIMADDGSMARGKELHRFALKHNLKIISIEDLIRYRRKNDQLVNKIEEISLPTDYGDFKLHLFEDVFGNASHLALTMGKINKNSSTLVRVHSECLTGDVFHSFRCDCGDQLDNALRQISQNKSGILVYLRQEGRGIGLEHKIKAYKLQEDGMDTVEANN

SEQ ID NO: 171427 - protein, 399 aa, Unknown
  Bacterial polypetide isolated from the Sargasso Sea
MNFDSISSAIKEIKKGGMVIVLDNEDRENEGDLVMASDAVSSANINFMAKEGRGLICISVSKPRAKKLDLEPMEQRNTSLHETAFTVSVDAVKGTTTGISASDRCKTIKTIVSDRTKPSDLARPGHIFPIVGRNGGVLRRAGHTEASMDLAQLAGFSRSGVICEIIGDDGEMLRGTDLMKFAKKHNLKIISIEDLIRFRRKKESIVQKLEEIKLPTKFGDFDLHMYDDIYNNKVHFGLTYGKINPKKPILTRVHSECLTGDIFHSLRCDCGSQLDFAMNKIVEKGSGIIVYLRQEGRGIGIENKIKAYKLQQEKNLDTVEANNALGFKADLRDYGVGAQILKDLGAKELIIMTNNPKKLIGLEGHDLKISERIPVKIKPTKHNEKYLSIKKTKLNHILD

SEQ ID NO: 171428 - protein, 198 aa, Unknown
  Bacterial polypetide isolated from the Sargasso Sea
MYFLRRFSSARIPTRVGEFTAHSYRNNFKNEGNIALVLGDVTDIDTPLVRVHSECLTGDLIGSLRCDCGSQLQVSLEMIGEEGVGILIYLRGHEGRGIGLGKKLRAYNLQDQGMDTVDANLEQGLPVDSRDYYFAAEILQDLGVSKIRLLTNNPKKKSELEDEGIDVVSRVPLEIAPTEENKRYLETKKTRLGHILNN

SEQ ID NO: 171429 - protein, 194 aa, Unknown
  Bacterial polypetide isolated from the Sargasso Sea
MNSCKFASKSKLPTKFGEFTISSFEEPCGKDHIALTIGDIQNEDTVMCRVHSECLTGDALHSLRCDCGPQLQAAMKMLAENKSGILLYLRQEGRGIGLVNKIRAYALQDQGHDTVEANEMLGFPADLREYNICLDILQHFNITSVNLLTNNPKKVSALEEVGISVAQRTSLHEGKNEKNTEYLNTKRDKMGHLR

SEQ ID NO: 171430 - protein, 467 aa, Unknown
  Bacterial polypetide isolated from the Sargasso Sea
VVDDERRENEGDLICAAQFATPQQINFMATEGRGLICLAMQGEKLDSLDLPLMVDRNTDENQTAFTISIDAGPENNVTTGISAEDRAKTIQVAINPNTKPDDLRRPGHIFPLRAKKGGVLKRAGHTEAAVDIAAMSGLYPAGVICEIQNPDGSMSRLPQLKEYAKQWGMKLISIADLISYRFQTERFVFRKSDAVLPSIFGNFKAYGYVNELDGSEHVALVKQKSSILSEPVLVRMHSECLTGDAFGSLRCDCRPQLEAALSRIEKEEEGVVVYLRQEGRGIGLINKLKAYSLQDGGLDTVEANEKLGFPADLRNYGVGAQILTDLGIKKLKLLTNNPRKIAGLGGYGIEVIERVPLVICPNDNNAEYLSVKKTKLGHMIDEDNPNSSNIDPFISIFLDGEYKSIDLVPIKNNVIKFCNENNINIKLESTPRLLAFWNRPKLVWRILHDQNRTNSNITDEEIKNIEL

SEQ ID NO: 171431 - protein, 197 aa, Unknown
  Bacterial polypetide isolated from the Sargasso Sea
MSSVTLVAKSKLPTPWGTFTLVGFQETGTGKDHAALVMGDITGDEPVLGRIHSECLTGDALFSLRCDCGFQLQAALENIAKAGRGVLLYVRQEGRGIGLLNKIRAYHLQDQGADTVEANVALGFAADMRDYTICADMLKQLEVKSLKLMTNNPRKMKAMESFGIPVAERVPLQEGRNPHNEFYLSTKASKLDHMFKK

SEQ ID NO: 171432 - protein, 438 aa, Unknown
  Bacterial polypetide isolated from the Sargasso Sea
MNPSSLDPANEPIAFDAISDALAAIRNGECVVVVDDEQRENEGDLICAAQFATPEAINFMATEARGLICLAMEGQRLDELDLPLMVDRNTDANETAFTVSIDAGNEHGVTTGISAEDRAATIQVALNPATRPAELRRPGHIFPLRARPGGVLKRAGHTEAAVDLAQLAGLSPSGVICEIQNSDGSMARLPELRSYADRWGLKLISIADLIRYRLENERFVRRMAQAQMPSRFGSFQAVGYRNELDGSEHVALIKGEPNALCEPVLVRMHSECLTGDAFGSLRCDCRPQLEAAMRQIEAEGEGVVVYLRQEGRGIGLINKLKAYSLQEAGLDTVEANERLGFPADLRNYGVGAQILSDLGIHRLRLLTNNPRKIAGLGGYGLQVEERVPLVMDPGAHNADYLAAKREKLGHLFESESPCVVLALAVNVGPESWPTIRQE

SEQ ID NO: 171433 - protein, 300 aa, Unknown
  Bacterial polypetide isolated from the Sargasso Sea
ISAQDRSKTIRLMVDENSKPEDFARPGHIFPILAKDGGILRRSGHTEASLELAELAGFKSSGVLCEIMAEDGTMLRGKDLQNFADEHDLKLISIAELISYVRIKKSLIEKIETTKLPTDYGDFTLHLYQDKFESKQHIALTHGKIDKKNPTLIRVHSECVTGDIFSSKRCDCGAQLDHAMKKIVEAGSGIIIYLKQEGRGIGLKHKIQAYKLQDEGLDTVEANEKLGFPPDMRDYGTGAQILKDLGVTKLNVMTNNPKKLVGLEGHGLEICERIKIKMPIEPENERYLSTKEKKLGHIFD

SEQ ID NO: 171434 - protein, 577 aa, Unknown
  Bacterial polypetide isolated from the Sargasso Sea
MKETSHKPNNGTIVDNKENFNIEFDPISDALAAIRNGECIIVVDDERRENEGDLICAAQFATPQQINFMATEGRGLICLAMQGDKLDALDLPLMVDRNTDENQTAFTISIDAGPENNVTTGISAEDRAKTIQVAINPSTKPEDLRRPGHIFPLRAKKGGVLKRAGHTEAAVDIAAMSGLYPAGVICEIQNPDGSMSRLPQLKQYAKEWGMKLISIADLISYRFQNERFVYRKSNAILPSIFGNFKAYGYINELDGSEHIALVKQKSNKLSEPVLVRMHSECLTGDAFGSLRCDCRPQLEAALARIEKEEEGVVVYLRQEGRGIGLINKLKAYSLQDGGLDTVEANEKLGFPADLRNYGVGAQILTDLGIKKLKLLTNNPRKIAGLGGYGIEVTERVPLVICPGEHNSEYLNVKRQKLGHMLEEEKLNSIDIDPYIAIFLDGDYKSIDLVPIKNKIIEFCEKHKINIMLESSPRLLAFWNRPKLVWKLLHDKNREDSTINDNEINKIEIFIQFLSEYNKISKVGIIVSKNIQQALHPKNNIKLKNTNFSIKNEELYSSTRKFNLDKETFSIIFDKKLT

SEQ ID NO: 171435 - protein, 437 aa, Unknown
  Bacterial polypetide isolated from the Sargasso Sea
MKETSPKSNNGTILDVNESFKIEFDPISDALAAIRNGECIIVVDDERRENEGDLICAAQFATPQQINFMATEGRGLICLAMQGEKLDSLELPLMVDRNTDENQTAFTVSIDAGPENNVTTGISAEDRAKTIQVAINPNTKPDDLRRPGHIFPLRAKKGGVLKRAGHTEAAVDIAAMSGLYPAGVICEIQNPDGSMSRLPQLKEYAKQWGMKLISIADLISYRFQNERFVFRKSDAVLPSIFGNFKAYGYVNELDGSEHVALVKQKSSKLSEPVLVRMHSECLTGDAFGSLRCDCRPQLEAALSRIEKEEEGVVVYLRQEGRGIGLINKLKAYSLQDGGLDTVEANERLGFPADLRNYGVGAQILTDLGIKKLKLLTNNPRKIAGLGGYGIEVIERVPLVICPNDNNAEYLSVKKTKLGHMIDEDNPNSRNIDPFISI

SEQ ID NO: 171436 - protein, 203 aa, Unknown
  Bacterial polypetide isolated from the Sargasso Sea
MSIKYVATSKLPTPWGVFAMHGFEDTETGKEHVALTFGTLSSDAPVLGRIHSECLTGDALFSLRCDCGFQLQTAMQNIAETGSGFILYLRQEGRGIGLLNKIRAYELQDKGANTVEANEQLGFPADMRKYDMIQPMLEQIGVKHVRLMTNNPRKVKAMKEIGIEVVERVPLQVGKNRYNEAYLKTKSTELGHMMSEYHFTDEE

SEQ ID NO: 171437 - protein, 203 aa, Unknown
  Bacterial polypetide isolated from the Sargasso Sea
MSIKYVATSKLPTPWGVFAMHGFEDTETGKEHVALTFGTLSSDAPVLGRIHSECLTGDALFSLRCDCGFQLQTAMQNIAETGSGFILYLRQEGRGIGLLNKIRAYELQDKGANTVEANEQLGFPADMRKYDMIQPMLEQIGVKHVRLMTNNPRKVKAMKEIGIEVVERVPLQVGKNRYNEAYLKTKSTELGHMMSEYHFTDEQ

SEQ ID NO: 171438 - protein, 201 aa, Unknown
  Bacterial polypetide isolated from the Sargasso Sea
MGEVPADAHLPTEHGNFRIRVFHEEETGLDHVALLLGDMGGPDPVLVRVHSECLTGDAFGSLRCDCGPQLQTALRMIQDVGWGCLVYLRQEGRGIGLHAKIQAYNLQDRGVDTLDANLMLGHPADARDYGIASEILDSVGIEKVNLMTNNPDKVEQLSEYGINVVERMAIVAGVGEGNLDYLSTKATRMGHQISKDNLEKQ

SEQ ID NO: 171439 - protein, 360 aa, Unknown
  Bacterial polypetide isolated from the Sargasso Sea
MRARPGGVLKRAGHTEAAVDLAQLAGLTPSGVICEIQNSDGSMARLPELRAYADTWGLKLISIAELIRYRLENERFVRRQAHAELPSQFGSFQAIGYRNELDGSEHVALVKGDPASLREPVLVRMHSECLTGDAFGSLRCDCRPQLEAALRQIEREEEGVVVYLRQEGRGIGLINKLRAYSLQDGGLDTVEANERLGFPADLRNYGVGAQILTDLGIHRLRLLTNNPRKIAGLGGYGLQVEERVPLVMDAGDHNAEYLAAKRDKLGHLMDSDGPCTVLALAVNDSTDSLPAIRARVEDLARIHGQALEALHEPRLLALWDRPQFVWKLTPDVANPMALLKAIAELESSRRIGLLRGTPNA

SEQ ID NO: 171440 - protein, 179 aa, Unknown
  Bacterial polypetide isolated from the Sargasso Sea
MNSCKFVSEASLPTKFGDFTISAFEEPNGKDHIALTIGDIYNKDTVMCRIHSECLTGDALHSLRCDCGPQLQSALKMLAENKSGILLYLRQEGRGIGLVNKIRAYALQDQGHDTVEANELLGFPADLREYNICLDIMQHFNINSVNLLTNNPKKVDALEEVGIKVEKRTSLHEGANEKD

SEQ ID NO: 171441 - protein, 196 aa, Unknown
  Bacterial polypetide isolated from the Sargasso Sea
MSDKLKFIETSKLPTDIGEFTVHAFTDENESKDHLAICMGDLLTDEPVLSRIHSQCITGESFFSMRCDCRFQLTESLKQIAQIGRGVIFYLQQEGRGIGLSNKIKAYSLQDKGLDTVEANHQLGFKDDERTYENIAGMVKYLAIKELDLMTNNPKKIKALENMGIKVNQRVPIFSDTNKYNEKYISTKKSKLGHLI

SEQ ID NO: 171442 - protein, 406 aa, Unknown
  Bacterial polypetide isolated from the Sargasso Sea
MDNKPPASKQIKSVETAIEYFKKGKMVIIVDDEGRENEGDLALPAQDCTPDNINFMATIARGLICTPLDGDIIDNLELEPMVTRNTESMGTAFTVSVDASSGIESGISAKDRSNTVRKLSDTKSTREDFVKPGHIFPLRYQKGGVLVRAGHTEGSVDLVKLSGKRPAAVICEVMNEDGTMARIDDLKKVSGKYNLPIVSIEDIIAYRIAKENLVSIVSEAKLPTKFGEFTAYGFKSEVDKSEPIALVKGNIDKNKPTLVRVHSECATGDLLGSLRCDCGDQLELALEKISKAEAGVFVYMRQEGRGIGLINKLRAYNLQDEGLDTVDANLSLGFPMDLRNYGIGAQILRNLGVKKFDLLTNNPKKVVGLEGFGLEINSTVNISAEKRPENKKYLETKKTKMGHEIE

SEQ ID NO: 171443 - protein, 204 aa, Unknown
  Bacterial polypetide isolated from the Sargasso Sea
MSSKQPKYEYVSTAKLPTRMGDFKIHGFVEASGQEHVALSYGEWKEDDVVPIRIHSECLTGDSLFSTRCDCGFQLEKAMQNIVDNGHGVLLYLRQEGRGIGLLNKIRAYNLQDSGMDTVEANEHLGFDADLRSYDICKLMLDTLNVKHVELMTNNPKKLAALKALGIDVVARKPIDHGITKDNKHYLKTKTEKLGHAFDPHVFK

SEQ ID NO: 171444 - protein, 167 aa, Unknown
  Bacterial polypetide isolated from the Sargasso Sea
MSDKLKFIETSKLPTDIGEFTVHAFTDENESKDHLAICMGDLLTDEPVLSRIHSQCITGESFFSMRCDCRFQLTESLKQIAQNGRGVIFYLQQEGRGIGLSNKIKAYSLQDKGLDTVEANHQLGFKDDERTYENIAGMVKYLAIKKLDLMTNNPKKIKALEGMGIKV

SEQ ID NO: 171445 - protein, 338 aa, Unknown
  Bacterial polypetide isolated from the Sargasso Sea
AEIVKRLNIPLMVSNNNATLGTNFTISIEASTGVTTGISAADRARTIKVAIDTDSSAKDIRSPGHVFPLSSLEGGVLRRAGHTEAAVDLAKLANMLPAGVICEIMNEDGTMARVPDLKKFADHHGIKIITIKDLIQYRKRNETLVVKKAEASMPSIYGDFQVIGFQSLLDESDYVALVKGDWDEEEPVHVRVHSECLTGDVFGSYRCDCGPQLHAAMELVEREGKGVILYLPQEGRGIGLINKLNAYRLQEDGADTVEANHKLGFKDDLRDYGMGAQMLYMLGVRRMLLMTNNPRKIVGLQGHGLEVVERVPLEIESNPGNKKYLHTKKSKLGHMLNV

SEQ ID NO: 171446 - protein, 308 aa, Unknown
  Bacterial polypetide isolated from the Sargasso Sea
ALAERNRVDLPYNSVEELRQAYQFTNLQSFLDIYYEGARVLLVEQDFYDLTWAYLTRMQEQNVKHVEIFFDPQTHTERGVAFSTVIEGIDSALKDARREYGISSYLILCFLRHLSEDDAFKTLEEALPFREKIIGVGLDSSEVGHPPEKFQRVFQRASEEGFRRVAHAGEEGPPEYIIGALDLLGVERIDHGVQCEKDPELLRRLAESRMPLTVCPLSNTRLCVFEKMKDHNLKRLLDAGLCVTVNSDDPAYFGGYMNENLNAVQQGLNLSKEDLVELVKNGFRASFLPKTAIESRVQAVNDYASKNP

SEQ ID NO: 171447 - protein, 251 aa, Unknown
  Bacterial polypetide isolated from the Sargasso Sea
MEPGFIEGIPKAELHLHIEGSLEPELMFALAERNRVDLPYNSVEELRQAYQFTNLQSFLDIYYAGARVLLVEQDFYDLTWAYLTRMQEQNVKHVEIFFDPQTHTERGVAFSTVIEGIDSALKNARREYGISSYLILCFLRHLSEDDAFKTLEEALPFREKIIGVGLDSSEVGHPPEKFQRVFQHASEEGFRRVAHAGEEGPPDYIIGALDLLGVERIDHGVQCEKDPELLRRLAESKMPLTVCPLSNTRLC

SEQ ID NO: 171448 - protein, 275 aa, Unknown
  Bacterial polypetide isolated from the Sargasso Sea
GAEVLKKTEDFFDLTWAYLNRIHNENVRHVEIFFDPQTHTDRGISFKTVITGIHKALEAAREKFGITSFLILCFLRHLSEEAALETLEEALPFRDWIEGVGLDSSEVGFPPENFENAFAKAEKNGFRKVAHAGEEGPPEYIWNSLDILGVSRIDHGVKCTEDKKLLERIVREQIPLTVCPLSNIKLCVFDKMENHNLKKMLDHGIRVTINSDDPAYFGGYINQNFIATQRALKLSENEIIEIAKNGFRSSFLPQDSINYHIENIDEFVRKMKSSA

SEQ ID NO: 171449 - protein, 306 aa, Unknown
  Bacterial polypetide isolated from the Sargasso Sea
HIEGTLEPELMFSLAKRNNIKIPFKNINDVKKAYNFSNLDSFLKIYYEGAKVLIKEQDFFDLTWAYILKCREDNIVHTEIFFDPQTHTDRGIDFDTVINGIFNALKKGEKEFGLSFKIIMCFLRHLNEDECFKILDKALAHKNKIFGVGLDSSETGNPPKKFKNLFKKAIENEFITVAHAGEEGPPEYIWEALNFLNVHRIDHGVQCLKDDKLVRILSESQIPLTVCPLSNVKLKVFNKLEEHNLKKMLDKKLMVMVNSDDPAYFGGYLNKNLTETQAALNLSYEQVKTLLVNSFKSSFLKDTEKK

SEQ ID NO: 171450 - protein, 291 aa, Unknown
  Bacterial polypetide isolated from the Sargasso Sea
FIKKTPKTELHLHIEGSLEPELMFKLSKRNKVEIPFKSVDEIRSAYNFSNLDSFLKIYYQGSNVLITEEDFFDLTWEYILRCKQDNIVHTEIFFDPQSHLPRGVSFKTIINGINKALNKARDELNISSKIIMCFLRHLDEESCFEVLKQACNHKDKIIGVGLDSSEKGNPPTKFKRLFEKAIKEGFLTVAHAGEEGPPEYISDSLDILKVKRIDHGVQCLNDEKLVNRLSSEKIPLTVCPLSNVKLCIFDKLENHSLKKMLDKGLRVMVNSDDPAYFGGYLNENLIEISKA

SEQ ID NO: 171451 - protein, 283 aa, Unknown
  Bacterial polypetide isolated from the Sargasso Sea
MEPGFIEGIPKAELHLHIEGSLEPELMFALAERNGVDLPYNSVEELRQAYQFTNLQSFLDIYYAGARVLLVEQDFYDITWAYLTRMQEQNVKHVEIFFDPQTHTERGVAFSTLIEGIDSALRDARREYGISSYLILCFLRHLSEDDAFKTLEEALPFREKIIGVGLDSSEVGHPPEKFQRVFQRASKEGFRRVAHAGEEGPPEYIIGALDLLGVERIDHGVQCEKDPELLRRLAVSRMPLTVCPLSNTRLCVFEKMKDHNLKRLLDAGLCVTVNSDDPAYFGG

SEQ ID NO: 171452 - protein, 226 aa, Unknown
  Bacterial polypetide isolated from the Sargasso Sea
MEKLIRGIPKAELHLHIEGSLEPELMFELAERNGVDIPYSSVEEIRTAYEFSDLQSFLDIYYAGAEVLKNTEDFFDLTWAYLNRINNENVRHVEIFFDPQTHTDRGIPFKTIITGIHKALEAAREKFGITSYLILCFLRHLSEEAALETLEEALPFRDWIEGVGLDSSEIGFPPENFETAFAKAAKNGFRKVAHAGEEGPPEYIWNSLDILGVSRIDHGVKCTENE

SEQ ID NO: 171453 - protein, 263 aa, Unknown
  Bacterial polypetide isolated from the Sargasso Sea
DLTLAYLKKMYNENVKHVEIFFDPQTHTDRGIPFRTVVTGIHDALEAGKEKYGISSFLILCFLRHLSEEASLNTLEEALPFKDWIEGVGLDSSEVGFPPENFTRTFSVAAENGLRKVAHAGEEGPPEYIWSSLDSLGVSRIDHGVRCTEDQKLVERIIKEQIPLTVCPLSNIKLCVFDKMEDHNLKKMLDQGIRVTINSDDPAYFGGYINQNFISVQQALNLSENEIIEIAKNGFRSSFLPQQTINSHIESIEEFSRQVNKSA

SEQ ID NO: 171454 - protein, 279 aa, Unknown
  Bacterial polypetide isolated from the Sargasso Sea
EGSLEPELLFALAERNQIALPWADVETLRAAYAFNNLQEFLDLYYAGANVLRTEQDFYDLTWAYLQRCKAQNVIHVEPFFDPQTHTDRGIPFEVVLRGIQQALLDGEKQLGISHGLILSFLRHLPEEEAFKTLEQAMPFRDAFIGVGLDSSEKGFPPRLFERVFAKARSEGLHAVAHAGEEGPPEYIWEALDLLKIKRIDHGVRAIEDERLMQRIIDEQIPLTVCPLSNIKLCVFEHMGQHNILEMLERGVKVTVNSDDPAYFGGYVGENFAALHEHLG

SEQ ID NO: 171455 - protein, 232 aa, Unknown
  Bacterial polypetide isolated from the Sargasso Sea
FFDPQTHTNRGISFDIVINGIYKALKKAEKKFGLSFKIIMCFLRHLSEEECFKILDEALAHKDKIFGVGLDSSEMGNPPKKFEKLFKKAAENNFITVAHAGEEGPPEYIWEAINLLNVKRIDHGVQCLKDEKLVEKLSTNKVPLTVCPLSNIKLKVFDKLHDHNLKKMLDKKLMVTINSDDPAYFGGYLNQNLIETQAALNLSFEEIKTLLINSFKSSFLSEERKKECINKI

SEQ ID NO: 171456 - protein, 314 aa, Unknown
  Bacterial polypetide isolated from the Sargasso Sea
MHLHIEGTLEPEQMFSLAKRNNIQIPFKNINEAKKAYNFSNLESFLKIYYEGAKVLLKEKDFFELTWAYALKCKQDNIVHTEIFFDPQTHTNRGISFDIVINGIYKALKKAENEFGLSFKIIMCFLRHLSEEECFKILDQALVHKDKIFGVGLDSSEMGNPPKKFEKLFKKAVESNFITVAHAGEEGPPEYMWEALNLLKVKRIDHGVQCLKDEKLVEKLSINQVPLTVCPLSNIKLKVFDKLYDHNLKKMLDKKLLVTINSDDPAYFGGYLNQNLIETQSALNLSFEDIKTLLINSFKSSFLSEERKKNIFNK

SEQ ID NO: 171457 - protein, 170 aa, Unknown
  Bacterial polypetide isolated from the Sargasso Sea
ETLDQALPFRDAFVAVGLDSSEMGHPPSKFQRVFDRARHEGFLTVAHAGEEGPPEYIWEAIDLLKIQRIDHGVRAIEDERLMQRIIDEQIPLTVCPLSNTKLCVFDDMAQHNILDMLERGVKVTVNSDDPAYFGGYVTENFHALHTSLGMTQDQAKRLAQNSLDARLVKP

SEQ ID NO: 171458 - protein, 285 aa, Unknown
  Bacterial polypetide isolated from the Sargasso Sea
PEQMFSLAKRNNVQIPFKNINEAKKAYNFSNLESFLKIYYEGAKVLLKEKDFFDLTWAYALKCKEDNIVHTEIFFDPQTHTNRGISFDIVINGIYKALKKAEKEFGLSFKIIMCFLRHLSEEECFKILDQALAHKDKIFGVGLDSSEMGNPPKKFEKLFKKAVENNFITVAHAGEEGPPEYIWEALNLLNVKRIDHGVQCLKDEKLVEKLSTNQVPLTVCPLSNIKLKVFDKLYDHNLKKMLDKKLMVTINSDDPAYFGGYLNQNLIETQAALNLSFEDIKTLLI

SEQ ID NO: 171459 - protein, 235 aa, Unknown
  Bacterial polypetide isolated from the Sargasso Sea
MEPGFIEGIPKAELHLHIEGSLEPELMFALAERNRVDLPYNSVEELRQAYQFTNLQSFLDIYYAGARVLLVEQDFYDLTWAYLTRMQEQNVKHVEIFFDPQTHTERGVAFSTVIEGIDSALKDARREYGISSYLILCFLRHLGEDDAFKTLEEALPFREKIIGVGLDSSEVGHPPEKFQRVFQRASEEGFRRVAHAGEEGPPDYIIGALDLLGVERIDHGVQCEKDPELLRRLVE

SEQ ID NO: 171460 - protein, 334 aa, Unknown
  Bacterial polypetide isolated from the Sargasso Sea
MNNLNTNIDFIKKSPKTELHLHIEGSLEPELMFKLSKRNKIEIPFKSVDEIRSAYNFTNLDSFLKIYYEGSNVLIREEDFFDLTWEYVLRCKQDNIVHTEIFFDPQSHLPRGISFETVINGIDKALKKAEKDFGISSKIIMCFLRHLDEESCFDVLKKAFDHKDKIIGVGLDSSEKGNPPSKFKRLFEQAVKEGFITVAHAGEEGPPEYIWDSLDILKVKRIDHGVQCLNDEKLVNKLVKEQIPLTVCPLSNVKLCVFDKLENHNLKKMLDKGLRVMVNSDDPAYFGGYLNKNLIETSRALNLNLVDIKKLIENSFKSSFLEKEKKENWLKKIN

SEQ ID NO: 171461 - protein, 333 aa, Unknown
  Bacterial polypetide isolated from the Sargasso Sea
MNNIDNIINFINKTPKSELHLHIEGSLEPELMFKLSKRNKIEIPFKSVEDIKSAYNFSNLDSFLKIYYEGSNVLITEEDFFDLTWEYILRCKKDNIVHTEIFFDPQSHTSRGIKFDIIINGIHKALAKANDEFGITSKIIMCFLRHLDEKLCFDVLKDAIQHKDKIIGVGLDSSEKGNPPKKFKRLFEEAIKEGFLTVAHAGEEGPPEYIWDSLNLLKVKRIDHGVQCLKDDDLVKNLKENNIPLTVCPLSNIKLCVFDKLENHNLKKMLEKGLRVMVNSDDPAYFGGYLNKNLIEISKALNLNLEQVKVLIQNSFKSSFLDKKSKSKWLSKV

SEQ ID NO: 171462 - protein, 302 aa, Unknown
  Bacterial polypetide isolated from the Sargasso Sea
MFSLAKRNNIKIPFKNINDVKKAYDFSNLDSFLKIYYEGSKVLIKEQDFFDLTWAYILKCREDNIVHTEIFFDPQTHTDRGIDFDIVINGIFNALKKAEKEFGLSFKIIMCFLRHLSEDECFKILDKALAHKDKIFGVGLDSSETGNPPKKFKNLFKKAIENEFITVAHAGEEGPPEYIWEALNFLNVHRIDHGVQCLKDDKLVGMLSESQIPLTVCPLSNVKLKVFNKLEDHNLKKMLDKKLMVMVNSDDPAYFGGYLNKNLTETQAALDLSYEQVKTLLVNSFKSSFLNDTEKKKWISKI

SEQ ID NO: 171463 - protein, 341 aa, Unknown
  Bacterial polypetide isolated from the Sargasso Sea
MTPTFKDKIARAPKAELHIHIEGSLEPELIFALAQRNGVKLAYDSIDALRAAYAFTDLQSFLDIYYAGASVLLTEQDFYDMTAAYCERALADNVVHTELFFDPQTHTERGVSIETVVAGIERALADAEQRGLSSKLILCFLRHLSEEDALATFESALPLFERYRHRLIGVGLDSSELGHPPTKFARVFEKARALGLKLVAHAGEEGPPAYIYEALDVLKVDRIDHGVRSIEDEALVERLAKTRTALTVCPLSNLKLCVFDDMAKHTLKALLDRGVAVTINSDDPAYFGGYVNENYFATAEGLQLTDAEVHAVIRNGFEASFIEPAQRDALYARLDAYWQAA

SEQ ID NO: 171464 - protein, 325 aa, Unknown
  Bacterial polypetide isolated from the Sargasso Sea
MDNFIAGLPKLELHLHIEGSLEPELMFALGQRNGVALPWPDVASVRAAYEFDCLQSFLDLYYLGASVLITEQDFFDLTWAYLERCAADKVVHVEIFFDPQTHTARGVPFATVLGGIERALQRGEWEFGISWRLIMSFLRHLSEEDAFATLAEATPFLSRIHGIGLDSGEKGNPPSKFARVFARCRELGLPVVAHAGEEGPADYIWQAIRELEVRRIDHGVRCVDDPDLLRYLADTRLPLTVCPLSNTRLKVFDQMAHHNVLALLEQGLCVTINSDDPAYFGGYMNANFHALAHELGASMNQLCRLSLNAVEASWLSLADKARLTR

SEQ ID NO: 171465 - protein, 267 aa, Unknown
  Bacterial polypetide isolated from the Sargasso Sea
YEGAKVLIKEQDFFDLTWAYILKCKEDNIVHTEIFFDPQTHTDRGIDFDIIINGIFNALKKAEKEFGLSFKIIMCFLRHLTEDECFQILDKALAHKDKIYGVGLDSSEKGNPPKKFEKLFKKASENEFITVAHAGEEGPPEYIWEALNLLNVSRIDHGVQCLKDEKLVEILTKNQIPLTVCPLSNIKLKVFNTLEDHNLKKMLEKKLMVMVNSDDPAYFGGYLNKNFIEIQKALNLSYEEIKTLLANSFKSSFMKDTKKEEWISKII

SEQ ID NO: 171466 - protein, 255 aa, Unknown
  Bacterial polypetide isolated from the Sargasso Sea
KMHSENVRHVEIFFDPQTHTDRGIPFKTVITGIHKALEAAREKFGITSFLILCFLRHLSEEAALETLEEALPFKDWIEGVGLDSSEVGFPPDNFETAFAKAAENGFRKVAHAGEEGPPEYIWNSLDILGVSRIDHGVKCTEDKKLLERIVREQIPLTVCPLSNIKLCVFDKMEDHNLKKMLDHGIRVTINSDDPAYFGGYINQNFIATQRALKLSENEIIEIAKNGFRSSFLPQDSINYHIETIDEFVLKMKNSA

SEQ ID NO: 171467 - protein, 331 aa, Unknown
  Bacterial polypetide isolated from the Sargasso Sea
MINTSIPLVDLHRHLDGNVRVNTIWELGHQHGIALPADSLETLAPFVQIQGKETSLVAFLKKLDWMVAVLADLDAVKRVAYENVADAALSGLDYAELRFSPYYMAMNHKLPIEGVVEAVIDGVKAGLKDYQVKINLIGIMSRSFGQAACTQELEGLLAHKQHLVAMDLAGDELGFPGELFNEHFKRVRDAGLAITAHAGEAAGSQSMWQAIQELGATRIGHGVNAIHDPKLMEYLAKHRIGIESCPTSNLHTSTVSSYAEHPFRTFMDAGVLISLNTDDPGVSAIDIKHEYRIAKSELGLSDAELAQVQRNGVEMAFLSESERKALYAAKA

SEQ ID NO: 171468 - protein, 331 aa, Unknown
  Bacterial polypetide isolated from the Sargasso Sea
MINTSIPLVDLHRHLDGNVRVNTIWELGHQHGIALPADSLETLAPFVQIQGKETSLVAFLKKLDWMVAVLADLDAVKRVAYENVADAALSGLDYAELRFSPYYMAMNHKLPIEGVVEAVIDGVKAGLKDYQVKINLIGIMSRSFGQAACTQELEGLLAHKQHLVAMDLAGDELGFPGELFNEHFKRVRDAGLAITAHAGEAAGSQSMWQAIQELGATRIGHGVNAIHDPKLMEYLAKHRIGIESCPTSNLHTSTVSSYAEHPFRTFMDAGVLISLNTDDPGVSAIDIKHEYRIAKSELGLSDIELTQVQRNGVEMAFLSESERKALYAAKA

SEQ ID NO: 171469 - protein, 350 aa, Unknown
  Bacterial polypetide isolated from the Sargasso Sea
MNTTTATSLSLVEKTARAPKAELHIHIEGSLEPELIFALAERNGVKLAYDSIDALRAAYAFTDLQSFLDIYYAGASVLLHEQDFYDMTMAYVERCLADNVIHSEIFFDPQTHTERGVPIATAVAGIERALADAEKRGMTSKLILCFLRHLSEEDALATFEEARPLFEQYKHRLIGVGLDSSERGHPPSKFERVFAKARALDLKLVAHAGEEGPPSYIYEALDLLNVDRVDHGVRSIEDPALVTRLADTRVALTVCPLSNLKLCVFDDMTQHTLKDLLDRGVAVTVNSDDPAYFGGYVNANYFAIIDALKLNDAEVYTIIRNSFEASFVTPEQRSELIAKLDAHWHPGGPH

SEQ ID NO: 171470 - protein, 260 aa, Unknown
  Bacterial polypetide isolated from the Sargasso Sea
MRLIPLNTAEQVGKWAARHIVNRINAFKPTADRPFVLGLPTGGTPLTAYKALVEMHKAGQVSFKHVVTFNMDEYVGLPKEHPESYHSFMHRNFFDHVDIPAENINLLNGNAPDIDAECRQYEEKIRSYGKIHLFMGGVGNDGHIAFNEPASSLASRTRIKTLTHDTRVANSRFFDGDVSQVPKYALTVGVGTLLDAEEVMILVLGHQKAQALQAAVEGNVNHMWTISCLQLHPKAVVVCDEPSTMELKVKTLKYFNELEA

SEQ ID NO: 171471 - protein, 266 aa, Unknown
  Bacterial polypetide isolated from the Sargasso Sea
MRLIPLKSASQVGLWSARYIVDRINGFKPTAERPFVLGLPTGGTPLNTYKRLIELHKAGEVSFQNVVTFNMDEYVGLPEDHPESYHSFMHNNFFSHIDIRPENINILNGNAPDLVAECKRYEDKIKSYGKIHLFMGGVGNDGHIAFNEPASSLSSRTRVKTLTEDTRIANSRFFGGDMEQVPKLALTVGVGTLMDAEEIMILVTGHGKAQALQAAVEGSVNHMWTISTLQLHPKGMMVCDEPSTMELKVKTVRYFQQLEAANIGRL

SEQ ID NO: 171472 - protein, 235 aa, Unknown
  Bacterial polypetide isolated from the Sargasso Sea
PHEDAVYDRVGNILMTRLMGADSRLVSDGFDIGIRKSWEDAIQSVKDSGGKPYAIPAGASVHKYGGLGYVGFAEEVRMQEKEMSLKFDYIIVCVVTGSTQAGMIVGFAEDDRAHRVIGIDGSGTPDKLAKQVREIVDNTADLVELGRTIRDDEIIIIPDYAYPAYGVPSKETNEAIRMAAKTEAMITDPVYEGKSMQGMIDLARKGYFKKGSKILYAHLGGVPAINGYSYTYRNG

SEQ ID NO: 171473 - protein, 234 aa, Unknown
  Bacterial polypetide isolated from the Sargasso Sea
MNLEKFEKYSLTFGITPIEHLPRLTAAIDADIQIFAKREDCNSGLALGGNKLRKLEYIVPDILASGADTLVSIGGVQSNHTRMVAAVAAKLGLKCLVIQESWVPHSDAVYDRVGNILVTRLMGAQSQIVESGFDIGIRESWEDAIQSVIDSGGKPYAIPAGASVHKFGGLGYVGFAQEVKKQEAEMGLKFDYIVLCSVTGSTQAGMIVGFADDNRADTVIGVDGSGTPKQLLRK

SEQ ID NO: 171474 - protein, 150 aa, Unknown
  Bacterial polypetide isolated from the Sargasso Sea
MKCVLVQEHWVNYEDPVYDRVGNIQLSRMMGADVRLVSDGFDIGIRRSWEEAMESVRQAGGKPYPIPAGCSEHPLGGLGFVGFAEEVRAQEAQLGFRFDYIVVCSVTGSTQAGMVVGFAADGRADRVIGIDASATPERTHEQITRIARHT

SEQ ID NO: 171475 - protein, 207 aa, Unknown
  Bacterial polypetide isolated from the Sargasso Sea
GFDIGIRRSWEEAMESVRQAGGKPYPIPAGCSEHPLGGLGFVGFAEEVRAQEAQLGFRFDYIVVCSVTGSTQAGMVVGFAADGRADRVIGIDASATPERTHEQITRIARHTAELVDLGRPITAADVVLDTRYAGPEYGLPNDGTLEAIRLCARLEGMLTDPVYEGKSMHGMIDKVRLGEFEPGSKVLYAHLGGVPALSAYSGIFREG

SEQ ID NO: 171476 - protein, 272 aa, Unknown
  Bacterial polypetide isolated from the Sargasso Sea
CDTLVSIGGIQSNQTRQVAAVAAHLGMKCVLVQENWVNYSDAVYDRVGNIQMSRILGADVRLVSDGFDIGFRKSWEDALASVRAAGGKPYAIPAGCSDHPLGGLGFVGFAEEVRRQEVELGFKFDYIVVCSVTGSTQAGMVVGFAADGRAERVIGIDASAKPAQTREQIIRIAKQTAEKVALERDITSKDVVLDERYGGPEYGLPNDGTLEAIRLCARLEGVLTDPVYEGKSMHGMIDMVRNGEFPDGSRVLYAHLGGVPALNGYSFLFRNG

SEQ ID NO: 171477 - protein, 268 aa, Unknown
  Bacterial polypetide isolated from the Sargasso Sea
VSIGGVQSNHTRMVAATAVKIGMKCRLVQEKWVPQNDAVYDRVGNILLTRLMGADSRLVDDGFDIGIRKSWEEAMQSVRDEGGKPYGIPAGASVHKYGGLGYVGFAEEVRQQEKELGFMFDYIIVCVVTGSTMAGMVVGFAEDNRANKVIGIDASGTPKQTWAQVRKIVSDTAELVELGKKVEDEEIIIKNEYAYPAYGVPSEETNNAIRLAARTEAMITDPVYEGKSMQGLIDLANKNFFPENSKILYAHLGGAPALNGYSYYYKDG

SEQ ID NO: 171478 - protein, 264 aa, Unknown
  Bacterial polypetide isolated from the Sargasso Sea
GVQSNHTRMVAATAAKIGMKCVVVQESWVPHEDAVYDRVGNILMTRLMGADSRLVPDGFDIGIRKSWEDAIQSVKDKGGKPYAIPAGASVHKYGGLGYVGFAEEVRMQEKELSLKFDYIIVCVVTGSTQAGMIVGFAEDDRAHRVIGIDGSGTPDKLAKQVREIVDNTADLVELGRTIRDDEIIIIPDYAYPAYGVPSEETNEAIRMAAKTEAMITDPVYEGKSMQGMIDLARKGYFKKGSRILYAHLGGVPAINGYSYTYRNG

SEQ ID NO: 171479 - protein, 317 aa, Unknown
  Bacterial polypetide isolated from the Sargasso Sea
IAFLPRLSKEIKGNLKVFAKRDDCNSGLAFGGNKLRKLEYIIPDAIASGADTLVSIGGVQSNHTRMVAAVAAKIGMKCRLVQEKWVPQNDAVYDRVGNILLTRIMGADSRLVDDGFDIGIRKSWEQALQSVRDEGGIPYGIPAGASVHKYGGLGYVGFAEEVREQEKKLGFKFDYIIVCVVTGSTMGGMVVGFAKDNRADKVIGIDASGTPKKTREQVKLIIERTSELVEIEKKIKDEEIIIKNDYAYPAYGIPSEETNNAIRLAARTEAMITDPVYEGKSMQGLIDLAKKNFFPENSKILYAHLGGAPAINGYSYY

SEQ ID NO: 171480 - protein, 343 aa, Unknown
  Bacterial polypetide isolated from the Sargasso Sea
YQIYIMNLKKFKRYPLTFGPTPIEFLPRLTKALGSDVQIYAKRDDCNSGLAMGGNKLRKLEYIVPEAISSGADTLVSIGGVQSNHTRMVAATAAKIGMKCVVVQESWVPHDDAVYDRVGNILLTRLMGADSRLVDEGFDIGIRKSWEDALQSVRDKGGVPYAIPAGASVHKYGGLGYVGFAEEVREQEAQMGIKFDYIIVCVVTGSTQAGMIVGFAEDNRADRVIGIDGSGTPEKLKKQVKEIVNNTAKLVELGRKVRDDEIIINPDYAYPAYGVPSNETNEAIRLAARTEAMITDPVYEGKSMQGMIDLAKKGFFPKGSKILYAHLGGAPAINGYSYTYRNG

SEQ ID NO: 171481 - protein, 338 aa, Unknown
  Bacterial polypetide isolated from the Sargasso Sea
MNLKKFKRYPLTFGVTPIEHLPRLSKELEGNLEIYAKRDDCNSGLAFGGNKLRKLEYIVPDAIESGADTLVSIGGVQSNHTRMVAATAAKIGMKCRLVQEKWVPHFDGVYDRVGNILLTRLMGADSRLVDDGFDIGIRKSYEEAIQAVKDEGGKPYGIPAGASVHKYGGLGYVGFAEEVKEQEKELGFKFDYIIVCVVTGSTQAGMIVGFADDNRADRVIGIDASATYEQTRSQVKQIASDTAKLVELGREIKDDEIIINPDYAYPSYGVPSEETNDAIRLAAKTEGMITDPVYEGKSMQGLIDLAKKQFFPEGSRILYAHLGGAPALNGYSYYYKDG

SEQ ID NO: 171482 - protein, 244 aa, Unknown
  Bacterial polypetide isolated from the Sargasso Sea
MNLDKFEKYPLTYGPTPIEYLPRLTEAIGADVEIYAKRDDCNSGLAMGGNKLRKLEYIVPDAIASGADTLVSIGGVQSNHTRMVAATAAKIGMKCVVVQESWVPHEDAVYDRVGNILMTRLMGADSRLVADGFDIGIRKSWEDAIQSVKDSGGKPYAIPAGASVHKYGGLGYVGFAEEVRMQEKEMSLKFDYIIVCVVTGSTQAGMIVGFAEDDRAHRVIGIDGSGTPDKLVKQVREIVDNTAD

SEQ ID NO: 171483 - protein, 338 aa, Unknown
  Bacterial polypetide isolated from the Sargasso Sea
MNLQRFSRYPLTFGPTPIQPLKRLSAHLGGKVELYAKREDCNSGLAFGGNKTRKLEYLVPDALAQGADTLVSIGGVQSNQTRQVAAVAAHLGMKCVLVQEHWVNYEDPVYDRVGNIQLSRMMGADVRLVSDGFDIGIRRSWEEAMESVRQAGGKPYPIPAGCSEHPLGGLGFVGFAEEVRAQEAQLGFRFDYIVVCSVTGSTQAGMVVGFAADGRADRVIGIDASATPERTHEQITRIARHTAELVDLGRPITAADVVLDTRYAGPEYGLPNDGTLEAIRLCARLEGMLTDPVYEGKSMHGMIDKVRLGEFEPGSKVLYAHLGGVPALSAYSGIFREG

SEQ ID NO: 171484 - protein, 338 aa, Unknown
  Bacterial polypetide isolated from the Sargasso Sea
MNLQRFARYPLTFGPTPIQPLKRLSDHLGGKVHLYAKREDCNSGFAFGGNKTRKLEYLIPEALAQGCDTLVSIGGIQSNQTRQVAAVAAHLGMKCVLVQENWVNYSDAVYDRVGNIQMSRILGADVRLVSDGFDIGFRKSWEDALASVRAAGGKPYAIPAGCSDHPLGGLGFVGFAEEVRRQEVELGFKFDYIVVCSVTGSTQAGMVVGFAADGRAERVIGIDASAKPAQTREQIIRIAKQTAEKVALERDITSKDVVLDERYGGPEYGLPNDGTLEAIRLCARLEGVLTDPVYEGKSMHGMIDMVRNGEFPDGSRVLYAHLGGVPALNGYSFLFRNG

SEQ ID NO: 171485 - protein, 338 aa, Unknown
  Bacterial polypetide isolated from the Sargasso Sea
MNLKKFKRYPLTFGVTPIEHLPRLSRELQGNLEIYAKRDDCNSGLAFGGNKLRKLEYIVPDAIDSGADTLVSIGGVQSNHTRMVAATAAKIGMKCRLVQEKWVPHYDGVYDRVGNILLTRLMGADSRLVNDGFDIGIRKSYEEAIQAVKDEGGKPYGIPAGASVHKYGGLGYVGFAEEVKEQEKELGFKFDYIIVCVVTGSTQAGMIVGFADDNRADRVIGIDASATYEQTRSQVKQIVSNTAKLVELGREIKDDEIIINPDYAYPSYGVPSEETNDAIRLAAKTEGMITDPVYEGKSMQGLIDLTKKKFFPDGSKILYAHLGGAPAINGYSYYYKDG

SEQ ID NO: 171486 - protein, 159 aa, Unknown
  Bacterial polypetide isolated from the Sargasso Sea
MNLDKFEKYSLTFGPTPIEYLPRLTKEIGADVEIYAKRDDCNSGLAMGGNKLRKLEYIVPDAIASGADTLVSIGGVQSNHTRMVAATAAKIGMKCVVVQESWVPHEDAVYDRVGNILMTRLMGADSRLVSDGFDIGIRKSWEDAIQSVKDSGGKPYAIP

SEQ ID NO: 171487 - protein, 110 aa, Unknown
  Bacterial polypetide isolated from the Sargasso Sea
AVITPVIVGFSFGAETLGGLLAGVTVSGVLMAIFQSNAGGAWDNAKKMIEEGVNIDEEVLKKGSEAHKASVVGDTVGDPFKDTSGPSLNILIKLMSVVSLVIAPLLKSFS

SEQ ID NO: 171488 - protein, 302 aa, Unknown
  Bacterial polypetide isolated from the Sargasso Sea
MPIGLGLFGLFTAVFVFLNIKKSPAGDGKLKEIADAIHLGAMVFMNSEYKRLAIFCVICISAIWFSELGPNTALAFLLGAICSGSAGYWGMYTATHANVRTAVAANTKGASEALNIAFFGGSIMGLTVASMGLFGIGILYYFFAGDSHTIHAIEGFAMGASSVALFSRVGGGIFTKSADVGADLVGKVEAGIPEDDPRNPGVIADNVGDNVGDVAGMGSDIFESYCGSMIATMALAATMTSTKIFDLAPIGGQEILTFMPLALASIGLICSMIGIYSVKLFSSKSPEVALRIGTMGSSIIFI

SEQ ID NO: 171489 - protein, 206 aa, Unknown
  Bacterial polypetide isolated from the Sargasso Sea
SKVAGSNLEGIVVTFDLSNPFVVVGLLVGGMLPYLFGSMGMQAVGRAGGAVVIEVRRQFKKIPGIMKGKAKPDYGKLVDLLTRAAIKEMIVPSLLPVLSPIVLYFIILPIGGQVAALSSVGAMLLGVIITGLFVAISMTAGGGAWDNAKKYIEDGNYGGKGSEAHKAAVTGDTVGDPYKDTAGPAVNPMIKITNIVALLLLAVIAG

SEQ ID NO: 171490 - protein, 53 aa, Unknown
  Bacterial polypetide isolated from the Sargasso Sea
MVNFGGKGSEAHKAAVTGDTVGDPYKDTAGPAVNPMIKITNIVALLLLAVIAG

SEQ ID NO: 171491 - protein, 275 aa, Unknown
  Bacterial polypetide isolated from the Sargasso Sea
WGAMVFMRREYTYLALFVAVLIVLSYLFLGLNTALAVTAGALSSSLAGWLGMFSATKANVRTATAASESGAQAALSVAFYGGSIMGLCVASLGLVGLGGLYFYFGGDPDTARAIEGFGMGASCVALFSRVGGGIYTKSADVGADLVGKVEAGIPEDDPRNPGVIADNVGDNVGDVAGMGSDIFESYCGAMIASIAIAATIDNTGMMALPLALASLGLLASILGIIIVRVFSKADPGTALRTGTIGSAILFITAAYFLIQMILTENAVNTWLAVLA

SEQ ID NO: 171492 - protein, 351 aa, Unknown
  Bacterial polypetide isolated from the Sargasso Sea
GSITYSSMGVFYATIIGLAAGLGIGIITEHYTGTGTSPVKSITDQSVTGAATNIIAGLGVGMQSTAIPILILAVAIISAHYLAGLYGVAMAALGMLANTGIQLAVDAYGPISDNAGGIAEMAELPADVRERTDKLDAVGNTTAAIGKGFAIGSAALTTLALFAAYMVQSGIIDVGINIAEPAVMAGLFIGGMLPFLFSSMAMGAVGRAAMSMIEEVRRQFRDIPELKTALKILNKEKNESKLSKKDREAYELGMSKADHGRCVEISTQAAIREMVMPGLLAVITPVIFGFGPGLLGSDLGPQILGGLLAGVTVCGVLMAIFQSNAGGAWDNAKKMIEEGVVVDGKSYGKGS

SEQ ID NO: 171493 - protein, 334 aa, Unknown
  Bacterial polypetide isolated from the Sargasso Sea
TGNLKMQEMASAIQIGAKAYLARQYKTIAIVGVVVLVIVSYAFSLLVGLGYLIGAVLSGIAGYVGMLVSVQANVRTAEASRKGLASGLSVAFKSGAVTGMLVAGLALLAIAVYYYLLLKFSVDEREIVNALVALGFGASLISIFARLGGGIFTKGADVGADLVGKVEAGIPEDDPRNPAVIADNVGDNVGDCAGMAADLFETYAVTIVATMVLSSIFFPGDMLMMIYPLTIGGACILTSILGTFFVKLGKSKNVMGALYKGFVVSALASLVILYPVTDFVLGLENTYNLNNKSFSGMDLYYCGIIGLIITGLLIWITEYYTGTNYRPVRSVLTL

SEQ ID NO: 171494 - protein, 214 aa, Unknown
  Bacterial polypetide isolated from the Sargasso Sea
MALFSAFLTRADLLDPEANIMESINLLDPLVLTGLFVGAMLPFLFSAMTMKSVGKAAFDMIEEVRRQFRTIPGIMDGKAEPDYEKCVGISTTAALREMIPPGILIMGTPLLVGFLFGVPAVAGILAGSLVSGGVLAISSANSGGAWDNAKKYIEKGNFGGKGTETHKAAVVGDTVGDPFKDTSGPSLNILIKLSAILSLVFVPFFINYGGLLTG

SEQ ID NO: 171495 - protein, 344 aa, Unknown
  Bacterial polypetide isolated from the Sargasso Sea
PEDDPRNPAVIADNVGDNVGDCAGMAADLFETYAVTIVATMVLSSIFFHGDLNMMIYPLSIGGACILTSIFGTFFVKLGKSKNIMAALYKGFVVTAITSLIILYPITDKVLGLDSTYSVSDKSFSGMSLYICGIIGLVITGLLIWVTEYYTGTNYRPVKSVASSSTTGHGTNVIQGLAVSMEATAIPALIIVGGILLTNYIAGLFGIAIAVTTMLALAGMVVALDAYGPVTDNAGGIAEMSNLPKNVRKTTDALDAVGNTTKAVTKGYAIGSAGLGALVLFAAYTEDIKHFSKVAGSQLEGIIVTFDLSNPFVVVGLLVGGMLPYLFGSMGMQAVGRAGGAVVV

SEQ ID NO: 171496 - protein, 308 aa, Unknown
  Bacterial polypetide isolated from the Sargasso Sea
MVYPLSIGGACILTSIVGTFFVKLGKSKNIMAALYKGFVVTAITSLIILYPITDYVLGLDNTYTISDKTFTGMSLYICGIIGLIITGLIIWVTEYYTGTNYRPVKSVASSSTTGHGTNVIQGLAVSMEATAVPALIIVAGILLTNYIAGLFGIAIAVTTMLALAGMVVALDAYGPVTDNAGGIAEMSNLPKNVRKTTDALDAVGNTTKAVTKGYAIGSAGLGALVLFAAYTEDIKHFSKVAGSNLEGIVVTFDLSNPFVVVGLLVGGMLPYLFGSMGMQAVGRAGGAVVVEVRRQFRKIPGIMKRKAK

SEQ ID NO: 171497 - protein, 69 aa, Unknown
  Bacterial polypetide isolated from the Sargasso Sea
MTAGGGAWDNAKKYIEDGNFGGKGSEAHKSAVTGDTVGDPYKDTAGPAVNPMIKITNIVALLLLAVIAH

SEQ ID NO: 171498 - protein, 306 aa, Unknown
  Bacterial polypetide isolated from the Sargasso Sea
MSSTVETILLYTIAAGLLSIVYGFFTGKNILNSSAGNAKMQEIASAIQIGAKAYLARQYKTIAIVGVVVLVIVSIAFSPLVGVGYLIGAALSGIAGYVGMLVSVEANVRTAEASRKGLAQGLSVAFKSGAVTGMLVAGLALLSISVYYFLLLKLNVDEREIVNALVALGFGASLISIFARLGGGIFTKGADVGADLVGKVEAGIPEDDPRNPAVIADNVGDNVGDCAGMAADLFETYAVTIVATMVLSSIFFVGDLNMMIYPLSIGGACILTSILGTFFVKLGKDKNVMNALYKGFIVSAVASLVI

SEQ ID NO: 171499 - protein, 356 aa, Unknown
  Bacterial polypetide isolated from the Sargasso Sea
LPQLSKFGAKAYLARQYKTIAIVGVVVLVIVSIAFSPLVGLGYLIGAALSGIAGYVGMLVSVEANVRTAEASRKGLAEGLSVAFKSGAVTGMLVAGLALLAIAVYYFLLLKFEVDEREIVNALVALGFGASLISIFARLGGGIFTKGADVGADLVGKVEAGIPEDDPRNPAVIADNVGDNVGDCAGMAADLFETYAVTIVATMVLSSIFFIGDLNMMVYPLTIGAACLITSIIGTFFVKLGTNNNVMNALYKGFIVSAVASLLILWPVTDYVIGFSNEYTVNDKTFNGKDLYYCGVIGLVITGLLIWITEYYTGTGYRPVKSVALSSTTGHGTNVIQGLAVSMEATAIPALIIVAG

SEQ ID NO: 171500 - protein, 251 aa, Unknown
  Bacterial polypetide isolated from the Sargasso Sea
PVADNAGGIAEMAGMPAETRVITDELDEQGNTTAAIGKGFAIGAAALAALAIISAFVETVSANRSEPLQLILSDPTVLIGVFIGGAIPFLIASITMTAVGDAAFEMINEIRRQFKEIPGLLEGNAEPDTAKCVDIATAAALKKMLLPGVIAVSAPPLVGLGIGAEALGGMLAGGLLVCVLMALFMANAGGAWDNAKKYIEKGNLGGKGTDTHSAAVVGDTVGDPFKDTSGPSMNILINVMAIVSLVIAPLL

SEQ ID NO: 171501 - protein, 316 aa, Unknown
  Bacterial polypetide isolated from the Sargasso Sea
AICSSVAGFIGMYAATKANVRTATAAQKDGPAAALSVSFYGGSIMGLCVASLGLIGLGGLYYFYIPAEIDPHKLEGFAMGASVVALFSRVGGGIFTKSADVGADLVGKIEAGIPEDDPRNPGVIADNVGDNVGDVAGMGSDIFESYCGSMIASIAIAYTLGNQDMMMLPLALAATGLIASIIGIFIVKLQSAKAPASALRSGTLLAPVIFVAMAYFIIDSFDGVGMNVWWCVIAGAVGGVLIGLITEYYTGGGPVKKIAESGETGSATVMISGLSVGMQSVVIPIVILAGIILASTQLSGIYGVGIAAVGMLATVG

SEQ ID NO: 171502 - protein, 269 aa, Unknown
  Bacterial polypetide isolated from the Sargasso Sea
MSGTVETILLYTIGAGLLSIVYGFLTGKNILNSSAGNAKMQDIASAIQIGAKAYLARQYKTIAIVGVVVLVIVSIAFSPLVGLGYLIGAALSGIAGYVGMLVSVEANVRTAEASRKGLAQGLSVAFKSGAVTGMLVAGLALLSIAVYYYILLKSNVDEREIVNALVALGFGASLISIFARLGGGIFTKGADVGADLVGKVEAGIPEDDPRNPAVIADNVGDNVGDCAGMAADLFETYAVTIVATMVLSSIFFVGDLNMMIYPLSIGAAC

SEQ ID NO: 171503 - protein, 58 aa, Unknown
  Bacterial polypetide isolated from the Sargasso Sea
KKYIEDGKFGGKGSEAHKAAVTGDTVGDPYKDTAGPAVNPMIKITNIVALLLLAVIAG

SEQ ID NO: 171504 - protein, 97 aa, Unknown
  Bacterial polypetide isolated from the Sargasso Sea
YSRSSAALSCLGALLLGVIITGLFVAISMTAGGGAWDNAKKYIEDGNHGGKGSEAHKAAVTGDTVGDPYKDTAGPAVNPMIKITNIVALLLLASIAL

SEQ ID NO: 171505 - protein, 231 aa, Unknown
  Bacterial polypetide isolated from the Sargasso Sea
GYAIGSAGLGALVLFAAYTEDIKFFSNVSGSNLENISVSFDLSNPFVVVGLLIGGMLPYLFGSMSMQAVGRAGGAVVVEVRRQFKQIPGIMKRKRKPDYGKLVDLLTKAAIKEMIIPSLLPVLSPIILYLIIYMIGGIEAALSAVGAMLLGVIVTGLFVAISMTAGGGAWDNAKKYIEDGKYGGKGSEAHKAAVTGDTVGDPYKDTAGPAVNPMIKITNIVALLLLAVIAH

SEQ ID NO: 171506 - protein, 303 aa, Unknown
  Bacterial polypetide isolated from the Sargasso Sea
GLIITAFVSIILIYIVTDIFVGADKLIINSDLFIESFLGIDLFYCAIIGLSVTGLIVWITEYYTSTEFGPVKSVARSSQSGHATNIIQGLAVSMQSTALPTFVIILGIVLSYKFAGLYGISIAATTMLALAGMIVALDAYGPVTDNAGGIAEMSNLPEDVRKTTDALDAVGNTTKAVTKGYAIGSAGLASLVLFGAYTQDLKYYFPNLDIKFALDDPYVVVGLLIGGMLPYLFGSMGMTAVGKTAEKIVNEVRRQFSENKGIMTGKSKPEYGKAVDILTKEAIYAMILPSMLPVLAPFITYYL

SEQ ID NO: 171507 - protein, 286 aa, Unknown
  Bacterial polypetide isolated from the Sargasso Sea
SIFKVDDKGFTGLDLYYCGVVGLAVTGLIIWVTEYYTGTNYRPVKSVAKSSTTGHGTNVIQGLAVSMEATALPALIIVAGIIITNQLAGLFGIAIAVTAMLALTGMVVALDAYGPVTDNAGGIAEMSKLPKNVRKTTDALDAVGNTTKAVTKGYAIGSAGLGALVLFAAYTEDIKFFSTVSGSKLEGINVSFDLSNPFVVIGLLVGGMLPYLFGSMGMQAVGRAGGAVVVEVRRQFKKIPGIMKGKRKPDYGRLVDLLTKAAIKEMIVPSLLPVLSPIVLYFIIYF

SEQ ID NO: 171508 - protein, 292 aa, Unknown
  Bacterial polypetide isolated from the Sargasso Sea
LAGGTVDDPIMGLYGIALASVGMLSTLAITLSTDSFGPVSDNAGGIAEQAGLDPEVRERTDALDSLGNTTAATGKGISVTSAVLTSLALLATYATVAGIDSLNLLNPKILVGAIIGGLLPFIFAGLTMAAVGRAAGAMIEEVRRQFREIKGLKEGKKGVKPDVAKAVEISTNGALKEMIVPGTLAILAPIAVGIIPFLGPEALGSMLAGSIISGFLLAIFLNNFGGAADNAKKYIELGNHGGKGSDAHEAGVIGDTVGDPTKDTSGPALNILLKLMAMVSIVFGPLFLGLGG

SEQ ID NO: 171509 - protein, 324 aa, Unknown
  Bacterial polypetide isolated from the Sargasso Sea
GIIVSILGTFLVSVKEGGNPKRALNIGEFGSSILMIIIIYLLIETLLPSSFKLNGLTYTSMGVFWSTVIGLAAGLGIGLITEYYTGTHTSPTRSITKQSVTGAATNIISGLGVGMQSTAIPTLIIAATIIGAYELAGLYGIAMSALGMLANTGIQLAVDAYGPISDNAGGIAEMAELPREVRERTDKLDAVGNTTAAIGKGFAIGSAALTTLALFAAYRTTVYNVRLNEGIPETSAFVAIDLTNAWVMSGLFVGAMLPFVFSSMAMGAVGRAAMSMIEEVRRQFNEIPELKKALEVMNLKEEDNWDENDKEIYKTAISKAEYGK

SEQ ID NO: 171510 - protein, 356 aa, Unknown
  Bacterial polypetide isolated from the Sargasso Sea
DGVGMNVWWCVIAGAVGGVLIGLITEYYTGGGPVKKIAESGETGSATVMISGLSVGMQSVVIPIVILAGIILTSTQLSGIYGVGIAAVGMLATVGITMAIDAYGPVADNAGGIAEMSGMGEEVREITDSLDELGNTTAAIGKGFAIGAAALAALAIISAFSAVVGVANPEFSLALTEPIVLVGMFIGVCIPFLVSSITMTAVGDAAFEMINEIRRQFKEISGLMEGTAEPDSEKCVEIATKAALKKMMLPGVIAVSMPAIVGFGLGAQALGGMLAGGLLGCVSLALMMANAGGAWDNAKKYVEKGNLGGKGSDTHAAAVVGDTVGDPFKDTSGPSMNILINVMAIVSLVIAPLLSI

SEQ ID NO: 171511 - protein, 365 aa, Unknown
  Bacterial polypetide isolated from the Sargasso Sea
LQESMMLYPLAIGGACIVTSVIGTFFVRLGRSQKIMPALYKGFIVSAVLSGIAFWPITEWVVGWDTQFMVGGVSSSGSDLFLCGLIGLVVTGLMVWITEYYTSTDFKPVKSIAKASETGDATNIIQGLAVSMQACAVPAIIIAAGIILAYLCAGLFGIAVAVTAMLALAGMVVALDAYGPVTDNAGGIAEMAELPDDVRKTTDALDAVGNTTKAVTKGYAIASAGLAALVLFAAYTQDLKKYFPDVPVEFSLSNPYVVVGLFFGGMLPFLFGSMAMLSVGRAAASVVIEVRRQFKEISGIMEGTAKPEYGRAVDLLTKSAIREMIIPSLLPVVAPILLYIVIWAIAGQSAGFSALGACLMGTNCN

SEQ ID NO: 171512 - protein, 246 aa, Unknown
  Bacterial polypetide isolated from the Sargasso Sea
MENLYLIIFVGLLAVLYSYFLSKQIISSSPGNSKMQEIAEAIQIGAKAYLNRQYKTIAVVGIIVLFIISYFFSILVGLGYFIGALLSGVAGYVGMLISVKANVRTAEASRTSLQNGLTMAFKSGAITGLLVAGLALLAISIYYLALLSFNVESRELINALIALGFGASLISIFARLGGGIFTKGADVGADLVGKVEAGIPEDDPRNPAVIADNVGDNVGDCAGMAADLFETYAVTIVATMVLASFF

SEQ ID NO: 171513 - protein, 279 aa, Unknown
  Bacterial polypetide isolated from the Sargasso Sea
FGSGAVMTVVSYFLIGRLIENPVALADGYQNVQALDLFLATVVGLVSGILIGVLTEYYTSDHQKPSQNVAASSETGSATNIISGLANGMFSTALPVLVIALSILGAYHFAHLYGIALAALGMLSTIGIQLAVDAYGPIADNAGGIAEMAELPKEVRERTDKLDAVGNTTAAIGKGFAIGSAALTSLALFAAFRETVGGLTLDINNPQVMAGLLIGSSLPFVFSALAMQAVGDAAFEMIEEVRRQFREIKGLLDGKAKADYAKCVDIATTAAINKMVLPG

SEQ ID NO: 171514 - protein, 329 aa, Unknown
  Bacterial polypetide isolated from the Sargasso Sea
VGKVEAGIPEDHPLNPATIADNVGDNVGDVAGMGADLFESYVGSIIGSMVLGSSIWIASTSSEAVNFVLLPLYIAGAGVLVSIIGTFMVSVKEGGDPQKSLNRGEFGSAFIMVGIIYFLTQEFLPENLKWQDKEGVKFAISSIGVFYATAIGLAAGLGIGLITEHYTGTGTSPVKSIVEQSITGPATNIIAGLGVGMQSTAIPILIIAAGITGAYYFAGLYGIAMAALGMLANTGIQLAVDAYGPISDNAGGIAEMAELPSEVRERTDKLDAVGNTTAAIGKGFAIGSAALTALALFAAFMVQTGIKGINISEPQVMAGLFVGGMLPFL

SEQ ID NO: 171515 - protein, 309 aa, Unknown
  Bacterial polypetide isolated from the Sargasso Sea
GGIYTKAADVGADLVGKVEAGIPEDDPRNPATIADNVGDNVGDVAGMGADLFESYAGSLIATISLAILVGVDNVSTTSLVMLPLIISAIGIIASIIGTFLVRTKPDASMNSLLWSFRIGIFGAAILALAGIYLANSLLFNDPLPTSLFFVVLTGLAVGQVIGTATEYFTSYEYFPVKWISKQSLTGHPSNIIAGISVGLYSTAIPALSIVVGILIAFNLAGLYGVGLAAVGMLSTLGITLSTDAYGPVADNAGGLAEQAGLKPEVRERTDALDALGNTTAATGKGFAIGSAILTALALLAAYGLVTGVT

SEQ ID NO: 171516 - protein, 352 aa, Unknown
  Bacterial polypetide isolated from the Sargasso Sea
TGLIIWVTEYYTGTNYRPVKSVAKSSTTGHGTNVIQGLAVSMEATALPALIIVAGIIITNQLAGLFGIAIAVTAMLALTGMVVALDAYGPVTDNAGGIAEMSKLPKNVRKTTDALDAVGNTTKAVTKGYAIGSAGLGALVLFAAYTEDIKFFSTVSGSKLEGINVSFDLSNPFVVIGLLVGGMLPYLFGSMGMQAVGRAGGAVVVEVRRQFKRIPGIMKGKRKPDYGRLVDLLTKAAIKEMIVPSLLPVLSPIALYFIIYNIGGLEAALSSVGAMLLGVIVTGLFVAISMTAGGGAWDNAKKFIEDGNYGGKGSETHKAAVTGDTVGDPYKDTAGPAVNPMIKITNIVALLL

SEQ ID NO: 171517 - protein, 227 aa, Unknown
  Bacterial polypetide isolated from the Sargasso Sea
ASASNILQIIILSGLLSIVYGFFTGKNILSSSAGNSKMQEIASAIQVGAKAYLNRQYKTIAIVGVVVLVIISFSFSILVGLGYLIGAALSGIAGYVGMLVSIQANVRTAEASRKGLSQGLAIAFKSGAVTGMLVAGLALLAIAVYYYLLLSYGVEEREIVNALVALGFGASLISIFARLGGGIFTKGADVGADLVGKVEAGIPEDDPRNPAVIADNVGDNVGDCAGM

SEQ ID NO: 171518 - protein, 301 aa, Unknown
  Bacterial polypetide isolated from the Sargasso Sea
GADVGSDLVGKIEAGIPEDDPRNAGVIADNVGDNVGDCAGMAADLFETYAVTLVGTMLLGAIYFSGPAQEAMMLLPLIIGAACIIASVVATWFVKLGSSQSIMGALYKGFIASAIISAVLIAGVVSQFIGWDTVYEMSGSQVTGTALFTCAIVGLVVTGLIIWITEYYTGTDYRPVRSVAAASETGHGTNVIQGLAVSMEATALPVIVICGGIIISYLQAGLFGISIAATAMLALAGMVVALDAFGPVTDNAGGIAEMAELPDEVRNTTDALDAVGNTTKAVTKGYAIGSAGLAALVLFGA

SEQ ID NO: 171519 - protein, 352 aa, Unknown
  Bacterial polypetide isolated from the Sargasso Sea
TLYSNFYVVGAICSSVAGFIGMYAATKANVRTATAAQKDGPAAALSVSFYGGSIMGLCVASLGLIGLGGLYYFYIPAEIDPHKLEGFAMGASVVALFSRVGGGIFTKSADVGADLVGKIEAGIPEDDPRNPGVIADNVGDNVGDVAGMGSDIFESYCGSMIASIAIAYTLGNQDMMMLPLALAATGLIASIIGIFIVKLQSAKAPASALRSGTLLAPVIFVAMAYFIINSFDGVGMNVWWCVIAGAVGGVLIGLITEYYTGGGPVKKIAESGETGSATVMISGLSVGMQSVVIPIVILAGIILTSTQLSGIYGVGIAAVGMLATVGITMAIDAYGPVADNAGGIAEMSGMGE

SEQ ID NO: 171520 - protein, 216 aa, Unknown
  Bacterial polypetide isolated from the Sargasso Sea
MNLSPETILHYTILAGILSVVYGYFTGKYILNSSSGNSKMQEIAHAIQVGAKAYLNRQYKTIAIVGIVVLIIISYAFSILVGLGYLIGATLSGLAGYVGMLVSVQANVRTAEASRKGLSQGLSIAFKSGAVTGMLVAGLALLSISVYYYFLIKTNVEERELINALIALGFGASLISIFARLGGGIFTKGADVGADLVGKVEAGIPEDDPRNPAVIA

SEQ ID NO: 171521 - protein, 312 aa, Unknown
  Bacterial polypetide isolated from the Sargasso Sea
VTDEKVEELSASIREGSMAFLKRMYSWISVFVVVLAVLISTLTEWGYPWGSIAFVAGAFLSSLAGFIGMRIATAANGRTTEAARDGGTLKALPVAFRGGAVMGFTVAGLGLLGVSVGYWVFIDILELPNGYDVLAAIGLGGSSIALFARVGGGIYTKAADVGADLVGKVEAGIPEDDPRNPATIADNVGDNVGDVAGMGADLFESYVGSLVAPLAYAAIVFSGQNVLPSLLFFPLAVGTIGMGASIVSSFLVKPKEGKLAQALHRGTYSAAALTTLGVYFLSDSMFSSYTENSIGLFFAVIIGLAVGLLVGQ

SEQ ID NO: 171522 - protein, 244 aa, Unknown
  Bacterial polypetide isolated from the Sargasso Sea
LDAVGNTTKAVTKGYAIGSAGLGALVLFAAYTEDIKYFSTVKGSALEGVNVTFDLSNPFVVAGLLIGGMLPYLFGSMGMQAVGRAGGAVVIEVRRQFKKIPGIMKGKRKPDYGRLVDLLTKAAIKEMIIPSLLPVLSPIILYFIILQIGGLEAALSSLGAMLLGVIITGLFVAVSMTAGGGAWDNAKKYIEDGNFGGKGSEAHKSAVTGDTVGDPYKDTAGPAVNPMIKITNIVALLLLAVIAH

SEQ ID NO: 171523 - protein, 162 aa, Unknown
  Bacterial polypetide isolated from the Sargasso Sea
GRAGGAVVIEVRRQFKKIPGIMKGKRKPDYGRLVDLLTKAAIKEMIIPSLLPVLSPIILYLVIYSIGGIEAALSSVGAMLLGVIVTGLFVAISMTAGGGAWDNAKKFIEDGNYGGKGSESHKAAVTGDTVGDPYKDTAGPAVNPMIKITNIVALLLLAVISH

SEQ ID NO: 171524 - protein, 197 aa, Unknown
  Bacterial polypetide isolated from the Sargasso Sea
NVSVNFDLSNPYVVVGLLIGGMLPYLFGSMSMQAVGRAGGAVVIEVRRQFKKIPGIMKRKRKPDYGKLVDLLTKAAIKEMIIPSLLPVLSPIVLYFIILYVGGIEAALSSVGAMLLGVIITGLFVAISMTAGGGAWDNAKKFIEDGKYGGKGSEAHKAAVTGDTVGDPYKDTAGPAVNPMIKITNIVALLLLATIAH

SEQ ID NO: 171525 - protein, 288 aa, Unknown
  Bacterial polypetide isolated from the Sargasso Sea
TGTSPVRSIAQQSLTGPATNIIAGLGVGMQSTAIPILIIASAIIGAYHFAGLYGIAMAALGMLANTGIQLAVDAYGPISDNAGGIAEMAELPEEVRNRTDKLDAVGNTTAAIGKGFAIGSAALTALALFAAFMVQTDIQSIDIADPWVMAGLFVGGMLPFLFSSMAMGAVGRAAMAMIEEVRRQFREIPELKKALELMNLKNENDWDEDDRNVYEDALTKAEHGRCVEISTQSAIKEMVAPGVLAVITPVVVGFAFGPQTLGGLLAGVTVSGVLMAIFQSNAGGAWDN

SEQ ID NO: 171526 - protein, 272 aa, Unknown
  Bacterial polypetide isolated from the Sargasso Sea
AYGPVTDNAGGIAEMSNLDENVRKTTDALDAVGNTTKAVTKGYAIGSAGLGALVLFAAYTEDLDHFAKDPKSSLYGIEVSFDLSNPYVVVGLLLGGLLPFLFGALSMTAVGRAAGSVVLEVRRQFKEIPGIMEGKGKPEYGTCVDILTKSAIKEMIIPSMLPVLSPIVVYFVILFIAGQSAALSCLGALLLGVIITGLFVAISMTAGGGAWDNAKKYIEDGNHGGKGSEAHKAAVTGDTVGDPYKDTAGPAVNPMIKITNIVALLLLAAISL

SEQ ID NO: 171527 - protein, 145 aa, Unknown
  Bacterial polypetide isolated from the Sargasso Sea
FPGIMKRKQKPDYAKLVDLLTVAAIKEMIIPSLLPVLSPIVLYFVIFAIGGQVAALASVGAMLLGVIITGLFVAVSMTAGGGAWDNAKKFIEDGNHGGKGSEAHKAAVTGDTVGDPYKDTAGPAVNPMIKITNIVALLLLAAIAG

SEQ ID NO: 171528 - protein, 101 aa, Unknown
  Bacterial polypetide isolated from the Sargasso Sea
IILSIGGQVAALAAVGAMLLGVIITGLFVAVSMTAGGGAWDNAKKYIEDGNHGGKGSEAHKAAVTGDTVGDPYKDTAGPAVNPMIKITNIVALLLLAVIAG

SEQ ID NO: 171529 - protein, 216 aa, Unknown
  Bacterial polypetide isolated from the Sargasso Sea
MENLYLIIFTGLLAVAYSYLLSGQILSSSSGNDRMREIAEAIQIGAKAYLNRQYKTIAVVGIIVLIIVSYFFNILVGLGYFIGAALSGVAGYVGMLISVQANVRTAEASRNSLQSGLSIAFKSGAITGLLVAGLALLAISIYYIILININADKREIINALVALGFGASLISIFARLGGGIFTKGADVGADLVGKVEAGIPEDDPRNPAVIADNVGD

SEQ ID NO: 171530 - protein, 231 aa, Unknown
  Bacterial polypetide isolated from the Sargasso Sea
NYTIYNKSFTGMSLYICGVIGLIITGLLIWVTEYYTGTNYRPVKSVASSSTTGHGTNVIQGLAVSMEATAIPALIIVGGILLTNYIAGLFGIAIAVTTMLALAGMVVALDAYGPVTDNAGGIAEMSNLPKNVRKTTDALDAVGNTTKAVTKGYAIGSAGLGALVLFAAYTEDIKHFSKVTGSKLEGIVVTFDLSNPFVVVGLLVGGMLPYLFGSMGMQAVRRAGSAVVVEV

SEQ ID NO: 171531 - protein, 323 aa, Unknown
  Bacterial polypetide isolated from the Sargasso Sea
GIPEDHPLNPATIADNVGDNVGDVAGMGADLFESYVGSIIGSMVLGSSIVVAGAVGGFDINFILLPLMIAASGIIVSIAGTFMVSVKEGGDPQTALNRGEFGSAFIMVAIIYLLIQNFLPAVFSQGGETFSNMGIFYATVIGLMAGLGIGMITEHYTGTGTSPVRSIAQQSLTGPATNIIAGLGVGMQSTAIPILIIASAIIGAYHFAGLYGIAMAALGMLANTGIQLAVDAYGPISDNAGGIAEMAELPEEVRNRTDKLDAVGNTTAAIGKGFAIGSAALTALALFAAFMVQTDIQSIDIADPWVMAGLFVGGMLPFLFSSM

SEQ ID NO: 171532 - protein, 281 aa, Unknown
  Bacterial polypetide isolated from the Sargasso Sea
MAGMVVALDAYGPVTDNAGGIAEMSNLPKNVRKTTDALDAVGNTTKAVTKGYAIGSAGLGALVLFAAYTEDIKHFSKEAGSKLEGIVVTFDLSNPFVVVGLLIGGMLPYLFGSMGMQAVGRAGGAVVIEVRRQFKKIPGIMKRKAKPDYGKLVDLLTKAAIKEMVIPSLLPVLSPIVLYLIILPIGGQVAALSSVGAMLLGVIITGLFVAVSMTAGGGAWDNAKKYIEDGKFGGKGSEAHKAAVTGDTVGDPYKDTAGPAVNPMIKITNIVALLLLAVIAG

SEQ ID NO: 171533 - protein, 271 aa, Unknown
  Bacterial polypetide isolated from the Sargasso Sea
MLVAGLALLAIAVYYYLLLKFNIEEREIVNALVALGFGASLISIFARLGGGIFTKGADVGADLVGKVEAGIPEDDPRNPAVIADNVGDNVGDCAGMAADLFETYAVTIVATMVLSSIFFHGDLNMMVYPLTIGGACIVTSILGTYFVKLGKSKNVMNALYKGFVVTALASLAILYPVTDYVIGFTTEYSVNGKNFDGMSLYYCGIIGLVITGLLIWVTEYYTGTNYRPVKSVAASSTTGHGTNVIQGLAVSMEATAVPALIIVGGILFTNQ

SEQ ID NO: 171534 - protein, 322 aa, Unknown
  Bacterial polypetide isolated from the Sargasso Sea
KNIMRAMYKGFVITAISSLVILYPITKYVIGFTTEYIVNEKTFTGLSLYFCGIIGLIITGLIIWITEYYTGTDYRPVKSVAQSSTTGHGTNVIQGLAVSMEATAIPALIIVGGILLTNHIAGLYGIAIAVTTMLALAGMVVALDAYGPVTDNAGGIAEMSNLPKNVRKTTDALDAVGNTTKAVTKGYAIGSAGLGALVLFAAYTEDIKHFSKVAGSNLEGIIVTFDLSNPFVVVGLLIGGMLPYLFGSMGMQAVGRAGGAVVIEVRRQFKKIPGIMKRKAKPDYGRLVDLLTKAAIKEMIIPSLLPVLSPNSFVCDYLLYRR

SEQ ID NO: 171535 - protein, 312 aa, Unknown
  Bacterial polypetide isolated from the Sargasso Sea
VGLGYLIGAALSGIAGYVGMLVSVEANVRTAEASRRGLAEGLSVAFKSGAVTGMLVAGLALLAIAVYYFLLLKFEIDEREMVNALVALGFGASLISIFARLGGGIFTKGADVGADLVGKVEAGIPEDDPRNPAVIADNVGDNVGDCAGMAADLFETYAVTIVATMVLSSIFFVGDLNMMVYPLSIGAACLITSIIGTFFVKLGKNKNVMNALYKGFIVSAVASLLVLWPVTDYVIGFSNTYTVNNKSFNGMDLYYCGVIGLVITGLLIWITEYYTGTGYRPVKSVALSSTTGHGTNVIQGLAVSMEATAIPA

SEQ ID NO: 171536 - protein, 297 aa, Unknown
  Bacterial polypetide isolated from the Sargasso Sea
LIALGIFRVVLSYSEGNPEVKKIGDMIHSGAMSFMKTEYMYLVVFVLILAFLVFFALGWETATAVLVGASSSALAGFIGMFAATKANTRTAAAAQDSGAAAALSISFYGGSIMGLCVASLGLLGLGGLFYFLGEGHYLEGFGMGASVVALFSRVGGGIFTKSADVGADLVGKVEAGIPEDDPRNPGVIADNVGDNVGDVAGMGSDIFESYCGSMIATIAIAYTMTEANNGPLMSLPLALASIGLISSILGILIVRAQSAKAPAAALRTGTIGSPVIFIALAFGLITYLDISLKRLVL

SEQ ID NO: 171537 - protein, 197 aa, Unknown
  Bacterial polypetide isolated from the Sargasso Sea
GINVSFDLSNPFVVIGLLVGGMLPYLFGSMGMQAVGRAGGAVVIEVRRQFKKIPGIMKGKRKPDYGKLVDLLTKAAIKEMIVPSLLPVLSPIVLYFVIYSIGGLEAALSSVGAMLLGVIVTGLFVAISMTAGGGAWDNAKKYIEDGNYGGKGSETHKAAVTGDTVGDPYKDTAGPAVNPMIKITNIVALLLLAVISH

SEQ ID NO: 171538 - protein, 172 aa, Unknown
  Bacterial polypetide isolated from the Sargasso Sea
LFGSMGMQAVGRAGGAVVVEVRRQFKKYPGIMKRKQKPDYAKLVDLLTVAAIKEMIIPSLLPVLSPVVLYFIILSIGGQVAALAAVGAMLLGVIITGLFVAVSMTAGGGAWDNAKKYIEDGNHGGKGSEAHKAAVTGDTVGDPYKDTAGPAVNPMIKITNIVALLLLAVIAG

SEQ ID NO: 171539 - protein, 207 aa, Unknown
  Bacterial polypetide isolated from the Sargasso Sea
YGFLTGKNILNSNAGNKKMQEIASAIQIGAKAYLARQYKTIAIVGVVVLVIVSIAFSPLVGVGYLIGAALSGIAGYVGMLVSVEANVRTAEASRKGLAQGLSVAFKSGAVTGMLVAGLALLSIAVYYYLLLKLNVDEREIVNALVALGFGASLISIFARLGGGIFTKGADVGADLVGKVEAGIPEDDPRNPAVIADNVGDNVGDCAG

SEQ ID NO: 171540 - protein, 259 aa, Unknown
  Bacterial polypetide isolated from the Sargasso Sea
MSKLPNNVRKTTDALDAVGNTTKAVTKGYAIGSAGLGALVLFAAYTEDIKHFSKVAGSKLEGVVVTFDLSNPYVVVGLLIGGMLPYLFGSMGMQAVGRAGGAVVIEVRRQFKKFPGIMKRKQKPDYAKLVDLLTVAAIKEMIIPSLLPVLSPIVLYFVIFAIGGQVAALASVGAMLLGVIITGLFVAVSMTAGGGAWDNAKKYIEDGNYGGKGSEAHKAAVTGDTVGDPYKDTAGPAVNPMIKITNIVALLLLAVVAGH

SEQ ID NO: 171541 - protein, 186 aa, Unknown
  Bacterial polypetide isolated from the Sargasso Sea
VALGFGASLISIFARLGGGIFTKGADVGADLVGKVEAGIPEDDPRNPAVIADNVGDNVGDCAGMAADLFETYAVTIVATMVLSSIFFPTDYNLMIYPLAIGGSCIITSIIGTWFVKLGNSKNIMGALYKGFVVTAVTSLLILYPVTDSVLGLNEIYTSDEKSFSGLNLYTCGVVGFVITGLLIWIN

SEQ ID NO: 171542 - protein, 248 aa, Unknown
  Bacterial polypetide isolated from the Sargasso Sea
LLYPITKYVIGFSTEYLANEKIFTGLSLYYCGIIGLVITGLLIWVTEYYTGTNYRPVKSVAQSSTTGHGTNVIQGLAVSMEATAIPALIIVSGILVTNYIAGLYGIAIAVTTMLALAGMVVALDAYGPVTDNAGGIAEMSNLPKNVRKTTDALDAVGNTTKAVTKGYAIGSAGLGALVLFAAYTEDIKHFSKVAGSNLEGIVVTFDLSNPYVVVGLLIGGMLPYLFGSMGMQAVGRAGGAVVIEVRRQ

SEQ ID NO: 171543 - protein, 278 aa, Unknown
  Bacterial polypetide isolated from the Sargasso Sea
MTIMQIFIVLCGLAAVLYGFITSRQILSLNSGNEKMQEIAKAIQEGAKAYLNRQYLTIAIVGVVIFFLIWIIFDLFSAIGFLIGAFFSGAAGYVGMNISVRSNVRTTQAASSSLAEGLSVSFKAGAVTGMLVAGFALLSVAVYYFILDNSGNFEGRDIVAPLVSLGFGASLISIFARLGGGIFTKGADVGADLVGKVEAGIPEDDPRNPAVIADNVGDNVGDCAGMAADLFETYVVTVVATMVLASIFFTGDLVTTMMMYPLSIAGVCTIASIIGTYF

SEQ ID NO: 171544 - protein, 281 aa, Unknown
  Bacterial polypetide isolated from the Sargasso Sea
MFAGLYGVGMAAVGMLATVGITMAIDAYGPVADNAGGIAEMAEMGPETREITDSLDEVGNSTAAIGKGFAISAAALAALALISAYIAKVSNGDPDFVLAINDPMVLVGMFIGGVFPFIVSAMTMTAVGDAAFEMIVEVRRQFKEIPGLLEGKAKPDTARCVDIATRAALRRMILPGSLAVLAPVVIGFGLGPKALGGMLGGALICCVMMALMMANAGGAWDNAKKYVEKGNLGGKGSDVHKAAVVGDTVGDPLKDTSGPSMNILINVMAIVSLVIAPLLIG

SEQ ID NO: 171545 - protein, 256 aa, Unknown
  Bacterial polypetide isolated from the Sargasso Sea
MSGMLNLIIIAGLIAILYGYIVGKQILSADSGNKKMQEIASAIQEGARAYLYRQYKTIAIVGVVILVIITFALGVWVGLGYFIGAFLSGAAGYVGMLISVQANVRTAEASRKGLAAGLNIGFKSGAVTGMLVAGLALLSISIYYFVLLNLNVESREVINALVGLGFGASLISIFARLGGGIFTKGADVGADLVGKVEAGIPEDDPRNPAVIADNVGDNVGDCAGMAADLFETYAVTIVATMVLSSIFFVNNLNMMI

SEQ ID NO: 171546 - protein, 285 aa, Unknown
  Bacterial polypetide isolated from the Sargasso Sea
NMPAFIPPLLGLIGLLIALGIFRVVLSYPEGNPEVKKIGDMIHSGAMSFMKTEYMYLVVFVLVLAVLVFFALGWQTATAVLVGASSSALAGFIGMYAATKANTRTAAAAQNSGAAAALSISFYGGSIMGLCVASLGLLGLGGLFYFLGEGHYLEGFGMGASVVALFSRVGGGIFTKSADVGADLVGKVEAGIPEDDPRNPGVIADNVGDNVGDVAGMGSDIFESYCGSMIATIAIAYTMTEANNGPLMSLPLALASIGLISSILGILIVRAQSAKAPAAALRTGT

SEQ ID NO: 171547 - protein, 324 aa, Unknown
  Bacterial polypetide isolated from the Sargasso Sea
KAADVGADLVGKVEAGIPEDDPRNPATIADNVGDNVGDVAGMGADLFGSYVATMLAAMVLGNYVISDMGGADYSDSFRNMGPILMPVLIAGVGLVFSIIGTWVIRIKNNDAKEKEVQGAFNLGNWGSIILTGVASFFIINWMLPESISMTFFGENSGDPIAIERIRVFYAVLIGLAVGGLIAMLTEYYTAMGKKPVMGIIKNSSTGAATNIIAGLSLGMMSTFAPIILFAGAIWGAYACAGFYGVAIAASAMMATTAMQLAIDAFGPIADNAGGIAEMSELEPEVRERTDILDAVGNTTAAVGKGFAIASAALTALALFAALCH

SEQ ID NO: 171548 - protein, 293 aa, Unknown
  Bacterial polypetide isolated from the Sargasso Sea
KVKKIGDQIHLGAMTFMKTEYTYLSIFALVVIVLVYFSLTPNTALAVLAGALSSSIAGWIGMYSATKANVRTATAASESGAESALSVAFYGGSIMGLCVASLGLIGLGSLYYILSGDAHSIEGFAMGASIVALFSRVGGGIYTKSADVGADLVGKVEAGIPEDDPRNPGVIADNVGDNVGDIAGMGSDIFESYCGSMVACIAIASTYVITSEFSQTQKEGMMFLPLALASIGLIASILGIVIVRLFSKSSPANAMRWGTMGAPLIFIIAAYYLTGTLVGDGGFNVWLAVVCGS

SEQ ID NO: 171549 - protein, 310 aa, Unknown
  Bacterial polypetide isolated from the Sargasso Sea
AHFFQEQQGNVGMNISVRSNVRTTQAASSSLAEGLSVSFKAGAVTGMLVAGFALLSVAIYYFVLDNSGQFPGREIVAPLVSLGFGASLISIFARLGGGIFTKGADVGADLVGKVEAGIPEDDPRNPAVIADNVGDNVGDCAGMAADLFETYVVTVVATMVLSSIFFAEISSMMVYPLAIAGVCTIASIIGTYFVKLGKSENIMAALYKGFAVSALLSAVLLYFITDHVIGLGSIFSVEDKSFTGMSLFYCGLFGLIITGLIIWVTEYYTGTNYRPVQSIAEASTTGHGTNVIQGLAISLEATALPAIIIV

SEQ ID NO: 171550 - protein, 255 aa, Unknown
  Bacterial polypetide isolated from the Sargasso Sea
AGNNKMQEIASAIQIGAKAYLNRQYKTIAIVGVAVLIIISYAFSILVGLGYLIGAALSGIAGYVGMLVSVQANVRTAEASRKGLSQGLSIAFKSGAVTGMLVAGLALLAIAVYYYLLLSFEVEEREIVNALVALGFGASLISIFARLGGGIFTKGADVGADLVGKVEAGIPEDDPRNPAVIADNVGDNVGDCAGMAADLFETYAVTIVATMVLSSIFFHGDLNMMIYPLSIGGACILTSIIGTFFVKLGKSKNIM

SEQ ID NO: 171551 - protein, 307 aa, Unknown
  Bacterial polypetide isolated from the Sargasso Sea
IGLVTEYYTSGDFSPVKKIAEAGKTGSATNIIQGLAVGMYSCIIPTLIICLTIYFAYHFAGLYGIGIAAVGMLATTGVTMTVDAYGPISDNAGGIAEMSELGPEVRAITDGLDSIGNTTAAIGKGFAIGSAALTALAMFSAYASAVGLESINIMTPQVVIGLFIGGVLPFFVGANTMNSVGSAAAMMVQEVRRQFKEIPGIMEGKGTPDTERCVAIATEASLKEMIAPGIVAVVAPIAVGFLLGKEALGGTLAGATVTGVLLALFMANAGGAWDNAKKAIEQGQVEGEKKGTEAHAAAVTGDTVGDH

SEQ ID NO: 171552 - protein, 66 aa, Unknown
  Bacterial polypetide isolated from the Sargasso Sea
GGGAWDNAKKYIEDGKFGGKGSEAHKAAVTGDTVGDPYKDTAGPAVNPMIKITNIVALLLLAVIAG

SEQ ID NO: 171553 - protein, 229 aa, Unknown
  Bacterial polypetide isolated from the Sargasso Sea
MIYPLAIGGGCIIASIIGTFFVRLGKSKNIMGALYKGFIVTALISLVLLYPITSHVIGLENTFKVSDKSFTGMDLYYCGVVGLAVTGLIIWVTEYYTGTNYRPVKSVAKSSTTGHGTNVIQGLAVSMEATALPAIIIVAGIIITNQLAGLFGIAIAVTAMLALTGMVVALDAYGPVTDNAGGIAEMSKLPKNVRKTTDALDAVGNTTKAVTKGYAIGSAGLGALVLFAA

SEQ ID NO: 171554 - protein, 145 aa, Unknown
  Bacterial polypetide isolated from the Sargasso Sea
KPGIMTGEDKPDYSSAVDLLTKSAIKEMIVPSLLPLLSPIVLFYTVNFIATKSDAFSALGAMLLGVIVTGLFVALSMTAGGGAWDNAKKYIEDGNYGGKGSEAHKAAVTGDTVGDPYKDTAGPAVNPMIKITNIVALLLLAVLAH

SEQ ID NO: 171555 - protein, 288 aa, Unknown
  Bacterial polypetide isolated from the Sargasso Sea
FFFKVKAIPYIGEASKTGSATNAIAGLAVGMQSVFIPVLLMAAGIFGANHVMDGGDPGLYGIAMAAMGMLGTVGVTMTVDAYGPVADNAGGIAEMSGLGDDVREITDGLDSIGNTTAAIGKGFAIGSAALTALALFAAFKTSADLEAADLSLTEPMVVIGLLIGAALPFVVAAMTMKSVGRAAEDMITEIRRQFKEIDGLLEGREGVEPDSATCVDISTKAALREMVLPGVVAVSSPVVIGVLLGSAALGGTLAGATASGVLMALFMANAGGAWDNAKKAIEQGHIEG

SEQ ID NO: 171556 - protein, 285 aa, Unknown
  Bacterial polypetide isolated from the Sargasso Sea
LAVSMEATAIPALIIVSGILLTNYIAGLFGIAIAVTTMLALAGMVVALDAYGPVTDNAGGIAEMSNLPKNVRKTTDALDAVGNTTKAVTKGYAIGSAGLGALVLFAAYTEDIKHFSKVTGSKLEGIVVTFDLSNPFVVVGLLVGGMLPYLFGSMGMQAVGRAGGAVVIEVRRQFKKIPGIMKGKAKPDYGKLVDLLTRAAIKEMVIPSLLPVLSPIVLYFIILPIGGQVAALSSVGAMLLGVIITGLFVAISMTAGGGAWDNAKKYIEDGNFGGKGSEAHKAAVT

SEQ ID NO: 171557 - protein, 113 aa, Unknown
  Bacterial polypetide isolated from the Sargasso Sea
MQFDNIPAGKNPPEDIYVAIEIPANSSPVKYELDKDMGALLVDRFMATPMFYPANYGFIPHTLADDGDPLDVLVVTPYPIQAGSVIRCRPVGVLNMEDEAGGDAKLVAVPTTS

SEQ ID NO: 171558 - protein, 288 aa, Unknown
  Bacterial polypetide isolated from the Sargasso Sea
GLSIAFKSGAVTGMLVAGLALLAVAVYYYVLTNFWEPQNERVVIDALVALGFGSSLISIFARLGGGIFTKGADVGGDLVGKVEAGIPEDDPRNPATIADNVGDNVGDCAGMAADLFETYAVTVVATMVLASIFFAGNETMMIYPLSICGACVITSILGTYFVKLGKNNSIMGALYRGFIATAILSLIILYFVTDLVVGFDTVLSVAGQSFSGLDLYICGVMGLAITGLIIWITEYYTGVDYRPVKSIAKSSETGHGTNVIQGLAISMESTALPALVIVFGIIVTYSLA

SEQ ID NO: 171559 - protein, 288 aa, Unknown
  Bacterial polypetide isolated from the Sargasso Sea
AEGMRSAAFSVVVVVIGVGGAYTSGAWALGESGGIYGVAVAAIGVLATLGITVAVDAYGPIADNAGGIAEMAHLDPEVRKATDELDSLGNTTAAIAKGFAIGSAAVTALALFSAFVQSAGLTELDITQVEVTAGLFLGGMFPFLFAAMTINAVGRAAFKMIEEVRRQFREIPGLREGKEGVTPEYEECVDIATTAALKEMLLPGGLAIVSPLVIGFWNKEALGGFLAGALVTGFLLAIFMANSGGAWDNAKKYIEAGGGAGKGSEEHKAAVIGDTIGDPFKDTSGPAM

SEQ ID NO: 171560 - protein, 279 aa, Unknown
  Bacterial polypetide isolated from the Sargasso Sea
PRNPAVIADNVGDNVGDCAGMAADLFETYAVTIVATMVLSSIFFVGDLKMMIYPLTIGGACILTSILGTFFVKLGKTNNVMNALYKGFIVSAVASLAILYPVTDYVIGFTNEYTVNNKTFNGMSLYYCGVIGLIITGLLIWITEYYTGTNYRPVRSVAASSTTGHGTNVIQGLAISMEATAIPAVIIVGGILLTNYIAGLFGIAIAVTTMLALAGMVVALDAYGPVTDNAGGIAEMSNLDKKVRKTTDALDAVGNTTKAVTKGYAIGSAGLGALVLFAA

SEQ ID NO: 171561 - protein, 290 aa, Unknown
  Bacterial polypetide isolated from the Sargasso Sea
ETILLYTIGAGLLSIVYGFLTGKNILNSSAGNAKMQDIASAIQIGAKAYLARQYKTIAIVGAVVLVIVSVAFSPLVGLGYLIGAALSGIAGYVGMLVSVEANVRTAEASRKGLAQGLSVAFKSGAVTGMLVAGLALLSIAVYYFLLLKYGVDEREIVNALVALGFGASLISIFARLGGGIFTKGADVGADLVGKVEAGIPEDDPRNPAVIADNVGDNVGDCAGMAADLFETYAVTIVATMVLSSIFFVGDLNMMIYPLTIGAACLLTSIVGTFLVKLGKNKNVMNALYKG

SEQ ID NO: 171562 - protein, 270 aa, Unknown
  Bacterial polypetide isolated from the Sargasso Sea
GLIITGLIIWVTEYYTGTNYRPVQSIAESSTTGHGTNVIQGLAISLEATALPALIIVAGIISTYSLAGLFGIAIAVTTMLALAGMVVALDAYGPVTDNAGGIAEMSNLDENVRKTTDALDAVGNTTKAVTKGYAIGSAGLGALVLFAAYTEDLDHFAKDSSSPLYGIEVSFDLSNPYVVVGLLLGGLLPFLFGALSMTAVGRAAGSVVLEVRRQFKEIPGIMEGKGKPEYGTCVDILTKSAIKEMIIPSMLPVLSPIVVYFVILFIAGQS

SEQ ID NO: 171563 - protein, 275 aa, Unknown
  Bacterial polypetide isolated from the Sargasso Sea
LGLAGMVVALDAYGPVTDNAGGIAEMSNLDESVRKTTDALDAVGNTTKAVTKGYAIGSAGLGALVLFAAYVNDLKTDHLSHITPNFSLENPYVVVGLLIGGLLPYLFGSMGMMAVGRAGGAVVEEVRQQFADNPGIMTGDSKPDYSKSVDLLTKSAIKEMILPSMLPVLSPIVLYFLVSFVADQNAAVSALGAMLLGVIVTGVFVAISMTAGGGAWDNAKKYVEDGNYGGKGSEAHKAAVTGDTVGDPYKDTAGPAVNPMIKITNIVALLLLAAL

SEQ ID NO: 171564 - protein, 309 aa, Unknown
  Bacterial polypetide isolated from the Sargasso Sea
IVSIAFSPLVGLGYLIGAALSGIAGYVGMLVSVEANVRTAEASRKGLAQGLSVAFKSGAVTGMLVAGLALLSIAVYYYILLKSNVDEREIVNALVALGFGASLISIFARLGGGIFTKGADVGADLVGKVEAGIPEDDPRNPAVIADNVGDNVGDCAGMAADLFETYAVTIVATMVLSSIFFVGDLNMMIYPLSIGAACLLTSIVGTFFVKLGRSNNVMNALYKGFVVSAVASLVILWPVTDHVIGFTNEYTVNDKTFNGMDLYYCGVIGLVITGLLIWITEYYTGTSYRPVKSVALSSTTGHGTNVIQG

SEQ ID NO: 171565 - protein, 224 aa, Unknown
  Bacterial polypetide isolated from the Sargasso Sea
AFMVQSGITTIDIANPLVMAGLFVGGMLPFLFSSMAMGAVGRAAMAMIEEVRRQFNEIPELRKALELMNLKNEDDWSDSDRVLYEDALSKAEHGRCVEISTQSAIREMVAPGLLAVVSPVVVGFIFGPETLGGLLAGVTVSGVLMAIFQSNSGGAWDNAKKMIEEGFSIGGESLNKGSDAHKAAVVGDTVGDPFKDTSGPSLNILIKLMSVVSLVIAPLLKDIS

SEQ ID NO: 171566 - protein, 309 aa, Unknown
  Bacterial polypetide isolated from the Sargasso Sea
YTGGSPVKKIAESGETGSATVMISGLSVGMQSVVIPIVILAGIILASTQLSGIYGVGIAAVGMLATVGITMAIDAYGPVADNAGGIAEMSGMGEEVREITDSLDELGNTTAAIGKGFAIGAAALAALAIISAFSAVVADANPEFSLALTEPIVLVGMFIGVCIPFLVSSITMTAVGDAAFEMINEIRRQFKEIPGLMEGSAEPDSEKCVEIATTAALKKMMLPGVIAVSMPAIVGFGLGAQALGGMLAGGLLGCVSLALMMANAGGAWDNAKKYVEKGNLGGKGSDTHAAAVVGDTVGDPFKDTSGPSM

SEQ ID NO: 171567 - protein, 291 aa, Unknown
  Bacterial polypetide isolated from the Sargasso Sea
YTVNDKIFNGMSLYYCGVIGLIITGLIIWVTEYYTGTNYRPVKSVASSSITGHGTNVIQGLAVSMEATAIPALIIVSGILLTNYIAGLFGIAIAVTAMLALAGMVVALDAYGPVTDNAGGIAEMSNLPKNVRKTTDALDAVGNTTKAVTKGYAIGSAGLGALVLFAAYTEDIKFFSQLKGSNLENVVVSFDLSNPFVVVGLLVGGMLPYLFGSMGMQAVGRAGGAVVIEVRRQFKKIPGIMKRKAKPDYGKLVDLLTRAAIKEMIIPSLLPVLSPIILYLIIYQIWWTGCS

SEQ ID NO: 171568 - protein, 275 aa, Unknown
  Bacterial polypetide isolated from the Sargasso Sea
IIVAGILTTNYIAGLFGIAIAVTSMLALAGMVVALDAYGPVTDNAGGIAEMSKLPNNVRKTTDALDAVGNTTKAVTKGYAIGSAGLGALVLFAAYTEDIKHFSKIAGSNLEGIVVTFDLSNPFVVVGLLVGGMLPYLFGSMGMQAVGRAGAAVVIEVRRQFKKFPGIMKRKQKPDYAKLVDLLTIAAIKEMIIPSLLPVLSPIVLYFAIYAIGGQVAALASVGAMLLGVIITGLFVAISMTAGGGAWDNAKKYIEDGNYGGKGSEAHKAAVTGDT

SEQ ID NO: 171569 - protein, 225 aa, Unknown
  Bacterial polypetide isolated from the Sargasso Sea
MEASVTNILQLIILAGLLSIVYGFFTGKNILSASAGSTKMQEIASAIQIGARAYLNRQYKTIGIVGIVVLVIISYAFSILVGIGYLIGAALSGIAGYVGMLVSVQANVRTAEASRKGLSQGLSIAFKSGAVTGMLVAGLALLAIAVYYFLLLSFGVDEREIVNALVALGFGASLISIFARLGGGIFTKGADVGADLVGKVEAGIPEDDPRNPAVIADNVGDNVGD

SEQ ID NO: 171570 - protein, 286 aa, Unknown
  Bacterial polypetide isolated from the Sargasso Sea
IFFQNDLMMMVYPLTIGGACIVTSILGTFFVRLGSSRNIMLALYKGFVVTAITSLLILYPLTDYVLGLEKVYSVGDKQFSGLSLYYCSVIGLIITGLLIWVTEYYTGTNYRPVKSVASSSTTGHGTNVIQGLAVSMEATAIPALIIVGGILLTNYIAGLYGIAIAVTAMLALAGMVVALDAYGPVTDNAGGIAEMSNLPKNVRKTTDALDAVGNTTKAVTKGYAIGSAGLGALVLFAAYTEDIKFFSDLPGSKLENVVVSFDLSNPFVVVGLLVGGMLPYLFGSNG

SEQ ID NO: 171571 - protein, 232 aa, Unknown
  Bacterial polypetide isolated from the Sargasso Sea
GACILTSIIGTFFVKLGKSKNVMGALYKGFIVSALASLAILYPVTDFVLGLDNYYNLNNKSFSGMSLYYCGVIGLIITGLLIWVTEYYTGTNYRPVRSVANSSTTGHGTNVIQGLAISLEATAIPALIIVTGILLTNHIAGLYGIAIAVTTMLALAGMVVALDAYGPVTDNAGGIAEMSKLPNNVRKTTDALDAVGNTTKAVTKGYAIGSAGLGALVLFAAYTEDIKHFSKV

SEQ ID NO: 171572 - protein, 267 aa, Unknown
  Bacterial polypetide isolated from the Sargasso Sea
YKGFVVTAISSLLVLYPVTDYVIGLSSEYSIENKIFNGMDLYLCGIVGLIITGLLIWVTEYYTGTNYRPVKSVAESSTTGHGTNVIQGLAVSMEATAVPALIIVAGILLTNSIAGLYGIAIAVTTMLALAGMVVALDAYGPVTDNAGGIAEMSNLPKNVRKTTDALDAVGNTTKAVTKGYAIGSAGLGALVLFAAYTEDIKYFSTVAGSKLEGISVTFDLSNPFVVVGLLIGGMLPYLFGSMGMQAVGRAGGAVVIEVRRQFKKIPG

SEQ ID NO: 171573 - protein, 220 aa, Unknown
  Bacterial polypetide isolated from the Sargasso Sea
MTDNIALWLSISAGGLAILYGIFSAQWIVKQSAGNEKMQQIAGFIQEGANAYMNRQYRTIGIVGLVLFILLSVYLDIATGIGFAIGAIFSGLAGYIGMFVSVRANVRTAEAARIGVNPALNIAFKGGAITGLLVVGLGLFGVAGYYLILMNMGMTSEDAIHSLVGLAFGGSLISIFARLGGGIFTKGADVGADLVGKVEAGIPEDDPRNPGVIADNVGDN

SEQ ID NO: 171574 - protein, 315 aa, Unknown
  Bacterial polypetide isolated from the Sargasso Sea
FRATAIPALIIVSGILLTNNIAGLYGIAIAVTTMLALAGMVVALDAYGPVTDNAGGIAEMSKLPNNVRKTTDALDAVGNTTKAVTKGYAIGSAGLGALVLFAAYTEDIKHFSKVAGSKLEGIIVTFDLSNPYVVVGLLIGGMLPYLFGSMGMQAVGRAGGAVVIEVRRQFKKYPGIMKKKQKPDYAKLVDLLTVAAIKEMIIPSLLPVLSPIVLYFIILSIGGQVAALASVGAMLLGVIITGLFVAVSMTAGGGAWDNAKKYIEDGNYGGKGSEAHKAAVTGDTVGDPYKDTAGPAVNPMIKITNIVALLLLAVI

SEQ ID NO: 171575 - protein, 298 aa, Unknown
  Bacterial polypetide isolated from the Sargasso Sea
LFETYVVTVVATMLLASIFFVQNSYTMMIFPLAIAGVCALTSIIGTYFVRLGKNNNIMAALYRGFAVSAILSAVLLYFVTDYIVGLNNVLVVEGTSTQFTGMSLFICGLLGLIITGLIIWVTEYYTGTNYRPVQSIAQSSTTGHGTNVIQGLAISLEATALPALIIVAGIISTYSLAGLFGIAIAVTTMLALAGMVVALDAYGPVTDNAGGIAEMSNLDENVRKTTDALDAVGNTTKAVTKGYAIGSAGLGALVLFAAYTEDLDHFAKDPSSPLYGIEVSFDLSNPYVVVGLLLGGLL

SEQ ID NO: 171576 - protein, 237 aa, Unknown
  Bacterial polypetide isolated from the Sargasso Sea
TKAVTKGYAIGSAGLGALVLFAAYTEDIKHFSKVAGSKLEGIVVTFDLSNPYVVVGLLIGGMLPYLFGSMGMQAVGRAGGAVVIEVRRQFKKYPGIMKRKQKPDYAKLVDLLTVAAIKEMIIPSLLPVLSPIVLYFIIFAIGGQVAALASVGAMLLGVIITGLFVAVSMTAGGGAWDNAKKYIEDGNHGGKGSEAHKAAVTGDTVGDPYKDTAGPAVNPMIKITNIVALLLLAVIAG

SEQ ID NO: 171577 - protein, 245 aa, Unknown
  Bacterial polypetide isolated from the Sargasso Sea
DNAGGIAEMSKLPKNVRKTTDALDAVGNTTKAVTKGYAIGSAGLGALVLFAAYTEDIKFFSTVSGSPLQGVNVSFDLSNPFVVIGLLVGGMLPYLFGSMGMQAVGRAGGAVVIEVRRQFKKIPGIMKGKRKPDYGRLVDLLTKAAIKEMIVPSLLPVLSPIILYLVIYSIGGLEAALSSVGAMLLGVIVTGLFVAISMTAGGGAWDNAKKYIEDGNYGGKGSDSHKAAVTGDTVWRSYKIQLGPQ

SEQ ID NO: 171578 - protein, 145 aa, Unknown
  Bacterial polypetide isolated from the Sargasso Sea
YELGMSKADHGRCVEISTQAAIREMVMPGLLAVITPVIFGFGPSLFGSDLGPQILGGLLAGVTVCGVLMAIFQSNAGGAWDNAKKMIEEGVVVDGKSYGKGSDVHKAAVVGDTVGDPFKDTSGPSLNILIKLMSVVSLVIAPLIA

SEQ ID NO: 171579 - protein, 254 aa, Unknown
  Bacterial polypetide isolated from the Sargasso Sea
MENLFYIILVSVLAVVYSYFLSKQIISSSPGNRRMQEIAEAIQIGAKAYLNRQYKTIAIVGFIVLLIISYFFSLLVGLGYLIGALLSGVAGYIGMLISVQANVRTAEASRSSLQKGLTMAFKSGAITGLLVAGLALLAISIYYLALLSFDVDSRESINALIALGFGASLISIFARLGGGIFTKGADVGADLVGKVEAGIPEDDPRNPAVIADNVGDNVGDCAGMAADLFETYAVTIVATMVLASIFFLDNQKYD

SEQ ID NO: 171580 - protein, 227 aa, Unknown
  Bacterial polypetide isolated from the Sargasso Sea
MNSNVETILLYTIAAGFLSIVYGYFTGKNILSSSAGNSKMQEIASAIQIGAKAYLARQYKTIAIVGVVVLVIVSIAFSPLVGLGYLIGAALSGIAGYVGMLVSVEANVRTAEASRKGLASGLSVAFKSGAVTGMLVAGLALLSIAVYYYLLLKFNVDEREIVNALVALGFGASLISIFARLGGGIFTKGADVGADLVGKVEAGIPEDDPRNPAVIADNVGDNVGDCA

SEQ ID NO: 171581 - protein, 213 aa, Unknown
  Bacterial polypetide isolated from the Sargasso Sea
AIGSAGLAALVLFACYVYEFKIKGAGETISFELSDVNVIIGLFIGGLLPYLFASVAMNAVGRAGGAVVEEVRRQFREIPGIMEYKAKPDYRSIVDIVTKFALKEMILPALLPVVAPIVVGLLLGKVALGGMLIGSIVTGLFVALSMTTGGAAWDNAKKYIEDGNLGGKGSEAHKAAVTGDTVGDPYKDTAGPAVNPMIKILNVVALLLVPFLI

SEQ ID NO: 171582 - protein, 121 aa, Unknown
  Bacterial polypetide isolated from the Sargasso Sea
IREMIVPSMLPVLSPIVVYFIILFIAGQSAALSCLGALLLGVIITGLFVAISMTAGGGAWDNAKKYIEDGNHGGKGSEAHKAAVTGDTVGDPYKDTAGPAVNPMIKITNIVALLLLASIAL

SEQ ID NO: 171583 - protein, 264 aa, Unknown
  Bacterial polypetide isolated from the Sargasso Sea
YFYFYTLFDLYGVCIAAVGMLATVGITMAIDAYGPVADNAGGIAEMSGMGEDVREITDSLDELGNTTAAIGKGFAIGAAALAALAIIAAFVQVVGVNNDGFQLILSDPIVLVGMFIGGSIPFLVSSITMTAVGDAAFEMINEIRRQFREIPGILEGTGEPDTDKCVEIATRAALQRMLLPGVIAVSMPPLVGFLLGAKALGGMLAGGLLGCVLLALMMANAGGAWDNAKKYIEKGNLGGKGSDTHAAAVVGDTVGDPFKDTSGP

SEQ ID NO: 171584 - protein, 205 aa, Unknown
  Bacterial polypetide isolated from the Sargasso Sea
KEAGSALEGIVVTFDLSNPYVVVGLLIGGMLPYLFGSMGMQAVGRAGGAVFIEVRRQFKKYPGIMKRKQKPDYAKLVDLLTVAAIKEMIIPSLLPVLSPIVLYFFIFAIGGQVAALASVGAMLLGVIITGLFVAVSMTAGGGAWDNAKKYIEDGNHGGKGSEAHKAAVTGDTVGDPYKDTAGPAVNPMIKITNIVALLLLAVIAG

SEQ ID NO: 171585 - protein, 272 aa, Unknown
  Bacterial polypetide isolated from the Sargasso Sea
SSIFFPGDMSMMIYPLTIGGACILTSILGTFFVKLGKSKNVMNALYKGFVVSAVTSLIILYPVTDYVLGLENTYILKDNSFSGMSLYYCGAIGLVITGLLIWVTEYYTGTNYRPVKSVASSSTTGHGTNVIQGLAISLEATAIPAIIIVAGILLTNYIAGLYGIAIAVTTMLALAGMVVALDAYGPVTDNAGGIAEMSKLPNKVRKTTDALDAVGNTTKAVTKGYAIGSAGLGALVLFAAYTEDIKHFSKEVGSNLEGIVVTFDLSNPYIVV

SEQ ID NO: 171586 - protein, 282 aa, Unknown
  Bacterial polypetide isolated from the Sargasso Sea
MEASALNILQVIILAGLLSIVYGFFTGKNILSASAGNSKMQEIASAIQIGAKAYLNRQYKTIAIVGIVVLVIISFAFSILVGIGYLIGAALSGIAGYVGMLVSVQANVRTAEASRKGLSQGLAIAFKSGAVTGMLVAGLALLAIAVYYYLLLSFGVDEREIVNALVALGFGASLISIFARLGGGIFTKGADVGADLVGKVEAGIPEDDPRNPAVIADNVGDNVGDCAGMAADLFETYAVTIVATMVLSSIFFHGDLNMMVYPLSIGGACILTSIIGTFFVKL

SEQ ID NO: 171587 - protein, 160 aa, Unknown
  Bacterial polypetide isolated from the Sargasso Sea
QVELLVVEVRRQFKKFPGIMKRKQKPDYAKLVDLLTVAAIKEMIIPSLLPVLSPIVLYFVIFAIGGQVAALASVGAMLLGVIITGLFVAVSMTAGGGAWDNAKKYIEDGNHGGKGSEAHKAAVTGDTVGDPYKDTAGPAVNPMIKITNIVALLLLAVIAG

SEQ ID NO: 171588 - protein, 332 aa, Unknown
  Bacterial polypetide isolated from the Sargasso Sea
MAALYKGFIVTALTSLVILYPITDYVLGLKNVYTISDKSFTGMSLYICGVIGLVITGLLIWVTEYYTGTNYRPVKSVASSSTTGHGTNVIQGLAVSMEATAIPALIIVGGILLTNYIAGLFGIAIAVTTMLALAGMVVALDAYGPVTDNAGGIAEMSNLPKNVRKTTDALDAVGNTTKAVTKGYAIGSAGLGALVLFAAYTEDIKHFSKVAGSKLEGIVVTFDLSNPFVVVGLLVGGMLPYLFGSMGMQAVGRAGGAVVVEVRRQFKKIPGIMKRKSKPDYGRLVDLLTKAAIKEMIVPSLLPVLSPIVLYLFILPIGGQVAALSSVGAMLL

SEQ ID NO: 171589 - protein, 267 aa, Unknown
  Bacterial polypetide isolated from the Sargasso Sea
GADVGADLVGKVEAGIPEDDPRNPAVIADNVGDNVGDCAGMAADLFETYAVTIVATMVLSSIFFHDDLNMMIYPLTIGGACILTSIIGTFFVKLGKDKNVMNALYKGFVVSAITSLIILYPVTDYVIGFTKEYSVNGKNFNGINLYFCGVIGLVITGLLIWVTEYYTGTNYRPVKSVASSSTTGHGTNVIQGLAVSMEATAIPALIIVAGILITNSIAGLFGIAIAVTTMLALAGMVVALDAYGPVTDNAGGIAEMSNLDKKVRKTT

SEQ ID NO: 171590 - protein, 60 aa, Unknown
  Bacterial polypetide isolated from the Sargasso Sea
NAKKYIEDGNYGGKGSEAHKAAVTGDTVGDPYKDTAGPAVNPMIKITNIVALLLLAVIAH

SEQ ID NO: 171591 - protein, 299 aa, Unknown
  Bacterial polypetide isolated from the Sargasso Sea
FSRVGGGIFTKSADVGADLVGKIEAGIPEDDPRNPGVIADNVGDNVGDVAGMGSDIFESYCGSMIASIAIAYTLGNQDMMMLPLALAATGLIASIIGIFIVKLQSAKAPASALRSGTLLAPVIFVAMAYFIINFFDGVGMNVWWCVIAGAVGGVLIGLITEYYTGGNPVKKIAESGETGSATVMISGLSVGMQSVVIPIAILAGIILTSTQLSGIYGVGIAAVGMLATVGITMAIDAYGPVADNAGGIAEMSGMGEEVREITDSLDELGNTTAAIGKGFAIGAAALAALAIISAFSAVV

SEQ ID NO: 171592 - protein, 54 aa, Unknown
  Bacterial polypetide isolated from the Sargasso Sea
YVEDGNFGGKGSEAHKAAVTGDTVGDPYKDTAGPAVNPMIKITNIVALLLLAGL

SEQ ID NO: 171593 - protein, 289 aa, Unknown
  Bacterial polypetide isolated from the Sargasso Sea
YLNRQYKTIAIVGVVVLVIISFSFSILVGIGYLIGAALSGIAGYVGMLVSVQANVRTAEASRKGLSQGLAIAFKSGAVTGMLVAGLALLAIAVYYYLLLSFGVEEREIVNALVALGFGASLISIFARLGGGIFTKGADVGADLVGKVEAGIPEDDPRNPAVIADNVGDNVGDCAGMAADLFETYAVTIVATMVLSSIFFHGDLNMMVYPLSIGGACILTSIIGTFFVKLGKSKNIMAALYKGFIVTAVTSLVILYPITDYVLGLENIYTISDKSFTGMSLYTCGVIGLV

SEQ ID NO: 171594 - protein, 247 aa, Unknown
  Bacterial polypetide isolated from the Sargasso Sea
MEASASNILQIIILTGLLSIVYGYFTGKNILSSSPGSSKMQEIASAIQIGAKAYLNRQYKTIAIVGVVVLFIISYAFSILVGIGYLIGATLSGIAGYVGMLVSVQANVRTAEASKKGLSQGLAIAFKSGAVTGMLVAGLALLAIAVYYYLLLSFGVDEREIVNALVALGFGASLISIFARLGGGIFTKGADVGADLVGKVEAGIPEDDPRNPAVIADNVGDNVGDCAGMAADLFETYAVTIVATMVL

SEQ ID NO: 171595 - protein, 275 aa, Unknown
  Bacterial polypetide isolated from the Sargasso Sea
MLALAGMVVALDAYGPVTDNAGGIAEMSELDDGVRKTTDALDAVGNTTKAVTKGYAIGSAGLGALVLFAAYTEDVSHYGLEVSFDLSNPYVVVGLLLGGLLPYLFGAMSMTAVGRAAGSVVEEVRRQFREIPGIMEGKGKPEYGKCVDILTKAAIKEMIIPSMLPVLSPIIVYFVILFIAGQTAALACLGALLLGVIITGLFVAISMTAGGGAWDNAKKYIEDGNHGGKGSEAHKAAVTGDTVGDPYKDTAGPAVNPMIKITNIVALLLLASLSL

SEQ ID NO: 171596 - protein, 104 aa, Unknown
  Bacterial polypetide isolated from the Sargasso Sea
FISNYFFIGGLEAALSSVGAMLLGVIVTGLFVAISMTAGGGAWDNAKKFIEDGNYGGKGSDSHKAAVTGDTVGDPYKDTAGPAVNPMIKITNIVALLLLAVIAH

SEQ ID NO: 171597 - protein, 175 aa, Unknown
  Bacterial polypetide isolated from the Sargasso Sea
MSYSKIPAGKDLPNDIYVAIEIPANHAPIKYEIDKDSDCLFVDRFMATPMFYPANYGFIPNTLADDGDPLDVLVVTPYPVTPGSVIRARPVGILNMTDDGGGDAKVIAVPHDKLSQLYVDVKEYTDLPPLLLEQIKHFFENYKDLEKGKWVKIDGWGNADAARAEIMKSVAAYKG

SEQ ID NO: 171598 - protein, 322 aa, Unknown
  Bacterial polypetide isolated from the Sargasso Sea
MAADLFETYAVTIVATMVLSSIFFHGDLNMMIYPLSIGGACILTSIIGTFFVKLGKSKNIMSALYKGFVVTAITSLMILYPVTDYVLGLESNYSIADKSFTGKSLYICGVIGLVITGLLIWVTEYYTGTNYRPVKSVASSSTTGHGTNVIQGLAVSMEATAIPALIIVSGILLTNYIAGLFGIAIAVTTMLALAGMVVALDAYGPVTDNAGGIAEMSNLPNNVRKTTDALDAVGNTTKAVTKGYAIGSAGLGALVLFAAYTEDIKHFSKVAGSKLEGIVVTFDLSNPFVVVGLLVGGMLPYLFGFMGMQAVGRAGGSCLYLS

SEQ ID NO: 171599 - protein, 285 aa, Unknown
  Bacterial polypetide isolated from the Sargasso Sea
YLNAGLFGISIAATAMLALAGMVVALDAFGPVTDNAGGIAEMAELPDDVRNTTDALDAVGNTTKAVTKGYAIGSAGLAALVLFGAYIEDLSYYFPNVEVTFNLQDPFVVVGLFIGGMLPYLFGGMGMMAVGRAGGAVVIEVRRQFKEIPGIMEGTAKPEYGKCVDILTKAAIKEMIIPSLLPLLAPVVIYFVVNAIAGQSAAFSAVGASLLGTIVTGLFVALSMTAGGGAWDNAKKYIEDGNHGGKGSDAHHAAVTGDTVGDPYKDTAGPAVNPMIKIMNIVAIL

SEQ ID NO: 171600 - protein, 218 aa, Unknown
  Bacterial polypetide isolated from the Sargasso Sea
LFAAYTEDIKFFSKVKGSALENINVSFDLSNPFVVVGLLVGGMLPYLFGSMGMQAVGRAGGAVVIEVRRQFKKIPGIMKGKKKPDYGKLVDLLTKAAIKEMIIPSLLPVLSPIVLYLIILPIGGLEAALSSLGAMLLGVIVTGLFVAVSMTAGGGAWDNAKKYIEDGNFGGKGSEAHKAAVTGDTVGDPYKDTAGPAVNPMIKITNIVALLLLAVIAH

SEQ ID NO: 171601 - protein, 312 aa, Unknown
  Bacterial polypetide isolated from the Sargasso Sea
FSIFARLGGGIFTKGADVGADLVGKVEAGIPEDDPRNPAVIADNVGDNVGDCAGMAADLFETYAVTIVATMVLASIFSPQDYNLMIYPLAIGGACIITSIIGTWFVKLGKSKNIMGALYKGFIVTAVTSLLIMYPVTDSIVGINETYNNNSGSIFNGLDLYICGVVGFIITGLLIWVTEYYTGTNYRPVKTVAKSSTTGHGTNVIQGLAISMEATAIPALIIVAGILYTNSLAGLYGIAIAVTAMLALTGMVVALDAYGPVTDNAGGIAEMSKLPKNVRKTTDALDAVGNTTKAVKKGYAIGSAGLGALVLL

SEQ ID NO: 171602 - protein, 239 aa, Unknown
  Bacterial polypetide isolated from the Sargasso Sea
MSETIETILLYTIGAGLLSIVYGFLTGKNILNSSAGNAKMQDIASAIQIGAKAYLARQYKTIAIVGAVVLVIVSIAFSPLVGLGYLIGAALSGIAGYVGMLVSVEANVRTAEASRKGLAQGLSVAFKSGAVTGMLVAGLALLAIAVYYFLLLKYEVDEREIVNALVALGFGASLISIFARLGGGIFTKGADVGADLVGKVEAGIPEDDPRNPAVIADNVGDNVGDCAGMAADLFETYAV

SEQ ID NO: 171603 - protein, 315 aa, Unknown
  Bacterial polypetide isolated from the Sargasso Sea
FGIISYFFSLLVGLGYFIGALLSGVAGYIGMLISVQANVRTAEASRTSLQKGLTMAFKSGAITGLLVAGLALLSISIYYWVLLTSDVESRELINALIALGFGASLISIFARLGGGIFTKGADVGADLVGKVEAGIPEDDPRNPAVIADNVGDNVGDCAGMAADLFETYAVTIVATMVLASIFFQDNLSMMIYPLAIGGGCIIASIIGTFFVKLGKSKNIMGALYKGFIVTAIISLILLYPITSNVIGLDNTFNVGDKSFTGFDLYYCGVIGLAVTGLIIWVTEYYTGTNYRPVRSVAKSSTTGHGTNVIQGLAVS

SEQ ID NO: 171604 - protein, 264 aa, Unknown
  Bacterial polypetide isolated from the Sargasso Sea
LGFQTAFAFLCGALASAAAGYIGMNTATRANVRTTVAAHNRGVAEALTVAFFGGSIMGLAVASLGLLGLGTLYLFFGGDPETAHTIHGFGMGASTVALFSRVGGGIFTKSADIGADLVGKVEAGIPEDDPRNPGVIADNVGDNVGDVAGMGSDIFESYCGSIIASIAIASTMIIDIMDPLGERPALMFLPLGLASAGLLCSIAGIFLVRVYSNRSPEVALRIGTISASALFIILSFIVINASDIRLAVWGAVLVGAIGGIVIGL

SEQ ID NO: 171605 - protein, 305 aa, Unknown
  Bacterial polypetide isolated from the Sargasso Sea
CFCVASLIILWPVTDHVIGFANEYTVNDKTFNGMDLYYCGVIGLVITGLLIWITEYYTGTSYRPVKSVALSSTTGHGTNVIQGLAVSMEATAIPALIIVAGILITNSIAGLFGIAIAVTTMLALAGMVVALDAYGPVTDNAGGIAEMSNLDKKVRKTTDALDAVGNTTKAVTKGYAIGSAGLGALVLFAAYTEDIKHFSKEAGSALEGIVVTFDLSNPYVVVGLLIGGMLPYLFGSMGMQAVGRAGGAVVVEVRRQFKKFPGIMKRKQKPDYAKLVDLLTVAAIKEMIIPSLLPVLSPVVLYFII

SEQ ID NO: 171606 - protein, 79 aa, Unknown
  Bacterial polypetide isolated from the Sargasso Sea
IITGLFVAISMTAGGGAWDNAKKYIEDGNHGGKGSEAHKAAVTGDTVGDPYKDTAGPAVNPMIKITNIVALLLLAAISL

SEQ ID NO: 171607 - protein, 264 aa, Unknown
  Bacterial polypetide isolated from the Sargasso Sea
ALVFGGIAIKTIFSASDGSAKMREISLAIQEGASAYLNRQYKTIAVVGIAIAIILAITLNTLSALGFCIGALLSGLTGYIGMHVSVRANVKTANAAQSSLQQALTIAFRSGAVTGMLVVGLGLLGVAGYYFFLLGYFGVSTEQNTRHILESLVSLSFGASLISIFARLGGGIFTKGADVGADLVGKIEAGIPEDDPRNPAVIADNVGDNVGDCAGMAADLFETYAVTVVASMLLASIFFPGSDSMMIYPLLIGAVCILSSIFGT

SEQ ID NO: 171608 - protein, 285 aa, Unknown
  Bacterial polypetide isolated from the Sargasso Sea
MSVEFFIVFICSILSLIYGGITIKKILEEPQGSDRMKEIASAIQEGAQAYLNRQYITISIVGLLIAVILFYLMENSFVSIGFVIGAFLSGLAGYIGMFVSVRANVRTTEAATVSLEKALDISFKSGAITGFLVVGLGLLGLISYYFFLENFTSLEGRKIIEGMVALSFGASLISIFARLGGGIFTKGADVGADLVGKIEAGIPEDDPRNPAVIADNVGDNVGDCAGMAADLFETYAVTIVGTMVLGLILFQGSDQQIFMMYPLLIAGVCIISSLVGAYYVKLGES

SEQ ID NO: 171609 - protein, 212 aa, Unknown
  Bacterial polypetide isolated from the Sargasso Sea
MTNYLELLYLISFTGILAVAYSYLLSGQIISSNPGNSRMQEIAEAIQIGAKAYLNRQYKTIAIVGIIVLAIVTYFFNYLVGLGYFVGAFLSGVAGYVGMLISVKANVRTAEASRQSLQSGLTIAFKSGAITGLLVAGLALLAITIYYIILINLNVDSREIINALVALGFGASLISIFARLGGGIFTKGADVGADLVGKVEAGIPEDDPRNPA

SEQ ID NO: 171610 - protein, 243 aa, Unknown
  Bacterial polypetide isolated from the Sargasso Sea
MNSSIETILYYTIFAGLLSIVYGFFTGAGIIKSSSGNNKMQEIASAIQVGAKAYLNRQYKTIAIVGFVVLIIISFAFSFLVGVGYLVGATLSGIAGYVGMLVSVQANVRTAEASRKGLAHGLSIAFKSGAITGMLVAGLALLSIAVYYFILLKLGIDEREIVNALVALGFGASLISIFARLGGGIFTKGADVGADLVGKVEAGIPEDDPRNPAVIADNVGDNVGDCAGMAADLFETYAVTIVA

SEQ ID NO: 171611 - protein, 297 aa, Unknown
  Bacterial polypetide isolated from the Sargasso Sea
IFFPGDMSMMIYPLSIGGACILTSIIGTFFVKLGKSKNVMNALYKGFVVSAFSSLIILYPVTDYVLGLDNVYNLKNKSFTGMSLYYCGIIGLVITGLLIWVTEYYTGTNYRPVRSVAGSSTTGHGTNVIQGLAISLEATAIPALIIVVGILTTNNIAGLYGIAIAVTTMLALAGMVVALDAYGPVTDNAGGIAEMSKLPNNVRKTTDALDAVGNTTKAVTKGYAIGSAGLGALVLFAAYTEDIKHFSKVAGSNLEGIIVTFDLSNPYVVVGLLIGGMLPYLFGSMGMQAVGRAGGAV

SEQ ID NO: 171612 - protein, 293 aa, Unknown
  Bacterial polypetide isolated from the Sargasso Sea
IIITILFSPLVGLGYLIGATLSGIAGYVGMLVSVQANVRTAEASRKSLASGLSIAFKSGAVTGMLVAGLALLSIAVYYYFLVKAGIEEREIVNALVALGFGASLISIFARLGGGIFTKGADVGADLVGKVEAGIPEDDPRNPAVIADNVGDNVGDCAGMAADLFETYAVTIVATMVLSSIFFVNDLNMMIYPLAIGGACILTSILGTFFVTLGSDKNIMKAMYKGFVITAISSLVILFPITKHVIGFTTEYVANGKSFNGLGLYFCGIIGLIITGLIIWITEYYTGTDYRPVK

SEQ ID NO: 171613 - protein, 275 aa, Unknown
  Bacterial polypetide isolated from the Sargasso Sea
MGALYKGVIISGLLAAIAFYPITGMMGMSMGLFWSAIIGLALTAFMVIVTEYYTSTEYNPVKKIAEASETGHATNIIAGLGVSMKATALPVLAVCLSIWGAYMLGGLYGIAIAATSMLSLTGMIVALDAFGPITDNAGGIAEMAELPPEIRGITDPLDAVGNTTKAVTKGYAIGSAGLAALVLFADFTANLEAEGKMVQFMLNDPAVIIGLFIGGMVPYLFAALAMEAVERAATSVVEEVERQFEEPGIMEGTVKPDYSKAVDLLTKSAIKEMIV

SEQ ID NO: 171614 - protein, 159 aa, Unknown
  Bacterial polypetide isolated from the Sargasso Sea
AFEMIEEVRRQFREIEGLLDGKAEADFARCVDISTQAAIKRMVAPGLLAVSTPVIFAVILPATGLVSDNDGMQMLAGVLAGVTVCGVLMAIFMSNAGGAWDNAKKHIEGGAHGGKGSDAHKAAVVGDTVGDPFKDTAGPSLNILIKLMSVVSLVLAGML

SEQ ID NO: 171615 - protein, 265 aa, Unknown
  Bacterial polypetide isolated from the Sargasso Sea
MLVAGFALLSIALYYFVLDNSGLFPGREIVAPLVSLGFGASLISIFARLGGGIFTKGADVGADLVGKVEAGIPEDDPRNPAVIADNVGDNVGDCAGMAADLFETYVVTVVATMVLSSIFFSDLSSMMMYPLAIAGVCTLASIIGTYFVKLGKSENIMAALYKGFAVSAILSAILLYFITDHVIGLGSVFTVDDKSFSGMSLFYCGLLGLIITGLIIWVTEYYTGTNYRPVQSIAQASTTGHGTNVIQGLAISLEATALPAIIIVA

SEQ ID NO: 171616 - protein, 207 aa, Unknown
  Bacterial polypetide isolated from the Sargasso Sea
FSKVSGSALEGIDVSFDLSNPFVVIGLLIGGMLPYLFGSMGMQAVGRAGGAVVIEVRRQFKKIPGIMKGKRKPDYGRLVDLLTKAAIKEMIIPSLLPVLSPIILYLVIYSIGGLEAALSSVGAMLLGVIVTGLFVAISMTAGGGAWDNAKKFIEDGNYGGKGSESHKAAVTGDTVGDPYKDTAGPAVNPMIKITNIVALLLLAVISH

SEQ ID NO: 171617 - protein, 306 aa, Unknown
  Bacterial polypetide isolated from the Sargasso Sea
FILVIITFALGFWVGLGFFIGSFLSGVAGYVGMLVSVQANVRTAEASKKGLAAGLNIGFKSGAVTGMLVAGLALLSIAVYYLILIKINVDDREIINALVGLGFGASLISIFARLGGGIFTKGADVGADLVGKVEAGIPEDDPRNPAVIADNVGDNVGDCAGMAADLFETYAVTIVATMVLSSIFFTNDLNMMIYPLSIGASCIITSIAGTFFVRLGKSKNIMGALYKGFIATAIFSILILYPVTDKIIGLNNIYSSSNAQFSGFDLYLCGIVGLIITGLIIWVTEYYTGTKFRPVISVANSSTTGH

SEQ ID NO: 171618 - protein, 313 aa, Unknown
  Bacterial polypetide isolated from the Sargasso Sea
FIFSCLAGIIAILYGFITARKIINMPAGTTKMQEISNAIQVGASAYLKRQYFTIAIVGACIFIIIGFFLDIYVAIGFLIGAILSGVAGFIGMHISVRANVRTTEAAKKGLNEGLGVAFKSGAVTGMLVAGLALLSICLTYYFLISIGAEGRELIDPLVALGFGASLISIFARLGGGIFTKGADVGADLVGKVEAGIPEDDPRNPAVIADNVGDNVGDCAGMAADLFETYAVTVVATMVLASIFFTGSFETMLMNLPLAIGGICIISSIIGTFFVKLSKNGTVMGALYKGFIVSAILSIIGIYLIIDYFMGMNT

SEQ ID NO: 171619 - protein, 295 aa, Unknown
  Bacterial polypetide isolated from the Sargasso Sea
STTGHGTNVIQGLAISLEATALPAIIIIAGIIITYSLAGLFGIAIAVTTMLALAGMVVALDAYGPVTDNAGGIAEMSNLDESVRKTTDALDAVGNTTKAVTKGYAIGSAGLGALVLFAAYTEDVSHYGLEISFDLSNPYVVVGLLLGGLLPYLFGAMSMTAVGRAAGSVVEEVRRQFKEIPGIMEGKGKPEYGTCVDILTKAAIKEMIIPSMLPVLSPIIVYFVILLIAGQSAALACLGALLLGVIITGLFVAISMTAGGGAWDNAKKYIEDGNFGGKGSEAHKAAVTGDTVGDP

SEQ ID NO: 171620 - protein, 294 aa, Unknown
  Bacterial polypetide isolated from the Sargasso Sea
VAGILVTNSIAGLFGIAIAVTTMLALAGMVVALDAYGPVTDNAGGIAEMSNLDKKVRKTTDALDAVGNTTKAVTKGYAIGSAGLGALVLFAAYTEDIKHFSKEAGSALEGIVVTFDLSNPYVVVGLLIGGMLPYLFGSMGMQAVGRAGGAVVVEVRRQFKKYPGIMKRKQKPDYAKLVDLLTVAAIKEMIIPSLLPVLSPVVLYFIILSIGGQVAALASVGAMLLGVIITGLFVAVSMTAGGGAWDNAKKYIEDGNHGGKGSEAHKAAVTGDTVGDPYKDTAGPAVNPMIKLQI

SEQ ID NO: 171621 - protein, 248 aa, Unknown
  Bacterial polypetide isolated from the Sargasso Sea
ATAVPALIIVGGILLTNYIAGLFGIAIAVTTMLALAGMVVALDAYGPVTDNAGGIAEMSNLPKNVRKTTDALDAVGNTTKAVTKGYAIGSAGLGALVLFAAYTEDIKHFSKVAGSKLEGIVVTFDLSNPFVVVGLLVGGMLPYLFGSMGMQAVGRAGGAVVVEVRRQFKKIPGIMKRKSKPDYGKLVDLLTKAAIKEMIVPSLLPVLSPIVLYLLILPIGGQVAALSSVGAMLLGVIITGLFVAISMT

SEQ ID NO: 171622 - protein, 295 aa, Unknown
  Bacterial polypetide isolated from the Sargasso Sea
AVLSGAAGYIGMNVSVRANVRTAEAARSKGLAEGLNVAFKSGAITGMLVAGLALLGVVVYWLVLRDVLDVKTPDGLRHALVALVALGFGASLISIFARLGGGIFTKGADVGSDLVGKIEAGIPEDDPRNAGVIADNVGDNVGDCAGMAADLFETYAVTVVATMLLGAAFFSGTDRDAMMMFPLLIGAVCIVGSVIATFFVKLGPSQSIMGALYKGFFASAIVSAVLIAGVIAWQFGFESTFKASGRDISGMDLFVSAMVGLVVTALIVWITEYYTGTNYRPVKSVAKASETGHAT

SEQ ID NO: 171623 - protein, 118 aa, Unknown
  Bacterial polypetide isolated from the Sargasso Sea
YQPHPCLWTATPVDVLVPTPYPLEPGSVIRCRPVGVLKMTDESGEDAKLVAVPHTKLSKEYDHIKDVNDLPELLKAQITHFFEHYKDLEKGKWVKVDGWDNAEAAKAEIIASFERAKK

SEQ ID NO: 171624 - protein, 262 aa, Unknown
  Bacterial polypetide isolated from the Sargasso Sea
FLSKQIMSSSPGNNKMQEIAEAIQIGAKAYLNRQYKTIAIVGVIVLVIISYFFSLLVGLGYFIGALLSGAAGYIGMLISVEANVRTAEASRTSLQNGLTMAFKSGAITGLLVAGLALLAISIYYWVLITLNIESRELINALIALGFGASLISIFARLGGGIFTKGADVGADLVGKVEAGIPEDDPRNPAVIADNVGDNVGDCAGMAADLFETYAVTIVATMVLASIFFQDNSSMMIYPLAIGGGCIIASIIGTFFVRLGKSK

SEQ ID NO: 171625 - protein, 187 aa, Unknown
  Bacterial polypetide isolated from the Sargasso Sea
MNNFLELLYLISFTGIIAVAYSYLLSGQILAANPGNSRMQEIAEAIQIGAKAYLNRQYKTIAVVGVIVLAIVTYFFNYLVGLGYFIGAFLSGVAGYVGMLISVKANVRTAEASRQSLQSGLTIAFKSGAITGLLVAGLALLAITIYYIILINLNTDSREIINALVALGFGASLISIFARLGGGIFTK

SEQ ID NO: 171626 - protein, 140 aa, Unknown
  Bacterial polypetide isolated from the Sargasso Sea
KRKQKPDYAKLVDLFTVAAIKEMIIPSLLPVLSPVVLYFVILSIGGQVAALASVGAMLLGVIITGLFVAVSMTAGGGAWDNAKKFIEDGNHGGKGSEAHKAAVTGDTVGDPYKDTAGPAVNPMIKITNIVALLLLAVIAG

SEQ ID NO: 171627 - protein, 265 aa, Unknown
  Bacterial polypetide isolated from the Sargasso Sea
GGGIFTKSADVGADLVGKIEAGIPEDDPRNPGVIADNVGDNVGDVAGMGSDIFESYCGSMIASIAIAYTLGNQDMMMLPLALAATGLIASIIGIFIVKLQSAKAPASALRSGTLLAPVIFVAMAYFIINSFDGVGMNVWWCVIAGAVGGVLIGLITEYYTGGGPVKKIAESGETGSATVMISGLSVGMQSVVIPIVILAGIILASTQLSGIYGVGIAAVGMLATVGITMAIDAYGPVADNAGGIAEMSGMGEEVREITDSLDELG

SEQ ID NO: 171628 - protein, 308 aa, Unknown
  Bacterial polypetide isolated from the Sargasso Sea
IMGLGVASLGLIGLGSLYYILSGNAHSIEGFAMGASIVALFSRVGGGIYTKSADVGADLVGKVEAGIPEDDPRNPGVIADNVGDNVGDIAGMGSDIFESYCGSMVACIAIASTLTILDREGMMFLPLALASIGLISSVLGIIIVRLFSSSSPALAMRIGTIGAPIIFVIAAYFVINLLVQETGTNIWLAVVCGSAGGIAIGLITEYYTGSTPIVKIAESGQTGPATVMITGLSVGMQSVVAPIACLALIIFISTQLTGLYGVGIAAVGMLSTVGITMAIDAYGPVADNAGGIAEMAGMPSETREITEN

SEQ ID NO: 171629 - protein, 299 aa, Unknown
  Bacterial polypetide isolated from the Sargasso Sea
IPEDDPRNPAVIADNVGDNVGDCAGMAADLFETYVVTVVATMVLSSIFFSDLSSMMMYPLAIAGVCTLASIIGTYFVKLGKSNNIMAALYKGFAVSAILSAILLYFITDHVIGLSSVFSVEEKTFTGMSLFYCGLLGLIITGLIIWVTEYYTGTNYRPVQSIAQASTTGHGTNVIQGLAVSLEATALPAIIIVAGIIITHSLAGLFGIAIAVTTMLALAGMVVALDAYGPVTDNAGGIAEMSELDDNVRKTTDALDAVGNTTKAVTKGYAIGSAGLGALVLFAAYTEDLEHFAKDPGSS

SEQ ID NO: 171630 - protein, 254 aa, Unknown
  Bacterial polypetide isolated from the Sargasso Sea
MLFGPITDNAGGIAEMSELPSEVRNITDQLDAVGNTTKAVTKGYAIGSAGLAALVLFADYTNALETNNILVSFDLSDHLVIIGLFLGGLVPFIFGSMAMEAVGRAASSVVTEVRRQFKDMPGIMEGTEKPEYDKAVDLLTKAAIKEMVVPSLLPILVPIAVGLILGPEALGGVLLGSILTGLFVAISMTTGGGAWDNAKKYVEDGNCGGKGSDAHKAAVTGDTVGDPYKDTAGPAINPLIKIINIVALLIVPLM

SEQ ID NO: 171631 - protein, 291 aa, Unknown
  Bacterial polypetide isolated from the Sargasso Sea
IISYAFSILVGLGYLIGATLSGIAGYVGMLVSVQANVRTAEASKKGLSQGLSIAFKSGAVTGMLVAGLALLAIAVYYYLLLSFNIEEREIVNALVALGFGASLISIFARLGGGIFTKGADVGADLVGKVEAGIPEDDPRNPAVIADNVGDNVGDCAGMAADLFETYAVTIVATMVLSSIFFHGDLNMMIYPLSIGGACILTSIIGTFFVKLGKSKNIMTALYKGFVVTAVTSVIILYPVTDYVLGLDNVYTVSDKTFSGLNLFMCGVIGLVITGLIIWDTEYYTGTNYRPV

SEQ ID NO: 171632 - protein, 266 aa, Unknown
  Bacterial polypetide isolated from the Sargasso Sea
ILSLVVLYPVTDYVIGLDASYSFGDTTFTGMSLYYCGVVGLIITGLLIWITEYYTGTDYRPVKTVAASSTTGHGTNVIQGLAISMEATAIPALIIVAGILITNAIAGLFGIAIAVTTMLALAGMVVALDAYGPVTDNAGGIAEMSNLPKNVRKTTDALDAVGNTTKAVTKGYAIGSAGLGALVLFAAYTEDIKYFSKEAGSKLEGIVVSFDLSNPFVVVGLLIGGMLPYLFGSMGMQAVGRAGGAVVVEVRRQFKKIPGIMKRKAK

SEQ ID NO: 171633 - protein, 250 aa, Unknown
  Bacterial polypetide isolated from the Sargasso Sea
SGAVTGMLVAGLALLSIAVYYFLLLKLNVDEREIVNSLVALGFGASLISIFARLGGGIFTKGADVGADLVGKVEAGIPEDDPRNPAVIADNVGDNVGDCAGMAADLFETYAVTIVATMVLSSIFFVGDLNMMIYPLSIGGACILTSILGTFFVKLGRDKNVMNALYKGFIVSAVASLVILWPVTDYVIGFAKEYTVNGKTFNGLNLYYCGVVGLVITGLLIWITEYYTGTNYRPVKSVALSSTTGHGTNV

SEQ ID NO: 171634 - protein, 92 aa, Unknown
  Bacterial polypetide isolated from the Sargasso Sea
AALSSVGAMLLGVIITRLFVAVSMTAGGGAWDNAKKYIEDGKFGGKGSEAHKAAVTGDTVGDPYKDTAGPAVNPMIKITNIVALLLLAVIAG

SEQ ID NO: 171635 - protein, 273 aa, Unknown
  Bacterial polypetide isolated from the Sargasso Sea
IGILAVAYSYLLSGQIISSSAGNSRMQEIAEAIQIGAKAYLNRQYKTIAVVGVIVLGIVSYFFSFLVGLGYFIGAFLSGVAGYVGMLISVKANVRTAEASRQSLQAGLTIAFKSGAITGLLVAGLALLAITIYYIILISFNVENREIINALVALGFGASLISIFARLGGGIFTKGADVGADLVGKVEAGIPEDDPRNPAVIADNVGDNVGDCAGMAADLFETYAVTIVATMVLASIFSPQDYNLMIYPLAIGGACILTSIIGTWFVKLGKNKN

SEQ ID NO: 171636 - protein, 285 aa, Unknown
  Bacterial polypetide isolated from the Sargasso Sea
TMLALAGMVVALDAYGPVTDNAGGIAEMSKLPNNVRKTTDALDAVGNTTKAVTKGYAIGSAGLGALVLFAAYTEDIKHFSKEAGSKLEGIVVTFDLSNPYVVVGLLIGGMLPYLFGSMGMQAVGRAGGSVVIEVRRQFKKFPGIMKRTQKPDYAKLVDLLTVAAIKEMIIPSLLPVLSPIVLYFIIFAIGGQVAALASVGAMLLGVIITGLFVAVSMTAGGGAWDNAKKYIEDGNFGGKGSEAHKAAVTGDTVGDPYKDTAGPAVNPMIKITNIVALLLLAVIAS

SEQ ID NO: 171637 - protein, 279 aa, Unknown
  Bacterial polypetide isolated from the Sargasso Sea
LFGIAIAVTTMLALAGMVVALDAYGPVTDNAGGIAEMSELDDKVRKTTDALDAVGNTTKAVTKGYAIGSAGLGALVLFAAYTEDVSHYGLEVSFDLSNPYVVVGLLLGGLLPYLFGAMSMTAVGRAAGAVVEEVRRQFKEIPGIMEGKGKPEYGKCVDILTKAAIKEMIIPSMLPVLSPIIVYYIILFIAGQTAALACLGALLLGVIITGLFVAISMTAGGGAWDNAKKYIEDGNHGGKGSEAHKAAVTGDTVGDPYKDTAGPAVNPMIKITNIVALLL

SEQ ID NO: 171638 - protein, 84 aa, Unknown
  Bacterial polypetide isolated from the Sargasso Sea
IVNGLFVAISMTSGGGAWDNAKKSFEDGFVDADGVTHEKGSEAHKASVTGDTVGDPYKDTAGPAVNPAIKITNIMALLLLAVLA

SEQ ID NO: 171639 - protein, 278 aa, Unknown
  Bacterial polypetide isolated from the Sargasso Sea
SELTIYPLLIAGSSILASIIGSKFVSISTPKSSIMGALYKGFFMTLFISVILFALITQYSIGFDQFFQLGNKWYNGMDLFLCAVYGLIITLALVFITEYYTSTEYRPVKSVAEASQTGHATNIIQGLAMGMESTAIPVLIICAGIGLTFSTAGLFGIAIAVTSMLALAGMVVALDAYGPVTDNAGGIAEMSGLNKRVRERTDALDAVGNTTKAVTKGYAIGSAGLGALVLFAAYTEDLKFFNQETGNNAFNVSFDLSEPYVIIGLLLGGLLPFLFSAL

SEQ ID NO: 171640 - protein, 201 aa, Unknown
  Bacterial polypetide isolated from the Sargasso Sea
NVGDNVGDCAGMAADLFETYAVTIVATMVLSSIFFHGDLNMMVYPLSIGGACILTSILGTYFVKLGKSKNIMAALYKGFIATAITSLIILYPITDYVLGLENNYSVANKSFSGMSLYICGVIGLVITGLLIWVTEYYTGTNYRPVKSVASSSTTGHGTNVIQGLAVSMEATAIPALIIVGGILLTNHIAGLYGIAIAVTTM

SEQ ID NO: 171641 - protein, 227 aa, Unknown
  Bacterial polypetide isolated from the Sargasso Sea
GSAGLGALVLFAAYTEDIKHFSKEAGSKLEGIVVTFDLSNPYVVVGLLIGGMLPYLFGSMGMQAVGRAGGAVVIEVRRQFKKFPGIMKRKQKPDYARLVDLLTVAAIKEMIIPSLLPVLSPIVLYFIIFAIGGQVAALASVGAMLLGVIITGLFVAVSMTAGGGAWDNAKKYIEDGNYGGKGSEAHKAAVTGDTVGDPYKDTAGPAVNPMIKITNIVALLLLAVIAG

SEQ ID NO: 171642 - protein, 277 aa, Unknown
  Bacterial polypetide isolated from the Sargasso Sea
ASAALTALALFAAYVTFTGIDGINIFKADVLAALFIGGMIPVIFSALAMESVGKAAMKMVQEVRRQFKEIPGILEGKSKPDYEKCVEISTNAALKEMLLPGVLTIVTPVIIGFLMGPESLGSYMAGVAVSGVLWAIFQNNAGGAWDNAKKSFEAGVEINGKIEKKGSDAHKAAVTGDTVGDPFKDTSGPSMNILIKLTCLVGLVIAPILGDHGSDMSAFNDYDNINKSVILELNEENPDESTLVITTKSNLNGVIVEDTEKCYGSKAELLLKVAQIR

SEQ ID NO: 171643 - protein, 158 aa, Unknown
  Bacterial polypetide isolated from the Sargasso Sea
GAVVIEVRRQFKKIPGIMKRKRKPDYGRLVDLLTKAAIKEMIVPSLLPVLSPILLYIIIFFIGGLEAALSALGAMLLGVIITGLFVAISMTAGGGAWDNAKKYIEDGKFGGKGSEAHKAAVTGDTVGDPYKDTAGPAINPMIKITNIVALLLLAVISH

SEQ ID NO: 171644 - protein, 173 aa, Unknown
  Bacterial polypetide isolated from the Sargasso Sea
YLFVPMGMQAVGRAGGAVVIEVRRQFKKIPGIMKRKAKPDYGKLVDLLTRAAIKEMVIPSLLPILSPIVLYIVIYFIGGQVAALSSLGAMLLGVIITGLFVAVSMTAGGGAWDNAKKYIEDGKFGGKGSEAHKAAVTGDTVGDPYKDTAGPAVNPMIKITNIVALLLLAVIAG

SEQ ID NO: 171645 - protein, 253 aa, Unknown
  Bacterial polypetide isolated from the Sargasso Sea
KNVRKTTDALDAVGNTTKAVTKGYAIGSAGLGALVLFAAYTEDIKYFSNVKESSLAGVNVTFDLSNPFVVAGLLIGGMLPYLFGSMGMQAVGRAGGSVVIEVRRQFKKIPGIMKGKRKPDYGRLVDLLTKAAIKEMIIPSLLPVLSPIVLYFVILQIGGIEAALSSLGAMLLGVIITGLFVAVSMTAGGGAWDNAKKYIEDGNFGGKGSEAHKSAVTGDTVGDPYKDTAGPAVNPMIKITNIVALLLLAVIAH

SEQ ID NO: 171646 - protein, 274 aa, Unknown
  Bacterial polypetide isolated from the Sargasso Sea
MTVLTLTIACGLCALIYGFWASQRIISSDAGSDKMQEIASAIQEGAAAYLNRQYSTITVVGIIVAVILFFTLGAYVAVGFLIGAILSGIAGYIGMNVSVRANVRTTQAAKEGLVPALDIAFKSGAITGLLVVGLGLLGVAGYYWYLRFSEIELRLMIESLVALSFGASLISIFARLGGGIFTKGADVGADLVGKVEAGIPEDDPRNPAVIADNVGDNVGDCAGMAADLFETYAVTIVATMLIATITFSGNLLLPSIELTLLIGGVCIIASIIGS

SEQ ID NO: 171647 - protein, 192 aa, Unknown
  Bacterial polypetide isolated from the Sargasso Sea
FDLSNPYVVVGLLIGGMLPYLFGSMGMQAVGRAGGAVVVEVRRQFKKYPGIMKRKQKPDYAKLVDLLTVAAIKEMIIPSLLPVLSPVVLYFIILAIGGQVAALAAVGAMLLGVIITGLFVAVSMTAGGGAWDNAKKYIEDGNHGGKGSEAHKAAVTGDTVGDPYKDTAGPAVNPMIKITNIVALLLLAVIAG

SEQ ID NO: 171648 - protein, 224 aa, Unknown
  Bacterial polypetide isolated from the Sargasso Sea
GYAIGSAGLASLVLFGAYTQDLKYYFPNLDVKFSLDDPYVVIGLLIGGMLPYLFGSMGMTAVGKTATKIVNEVRRQFKENKGIMTGSSKPEYGKAVDILTKAAIIEMIIPSLLPVLAPFITYFIIYFISGTESAAFTALGAMLLGTIVTGLFVAISMTSGGGAWDNAKKYIEDGNFGGKNSDAHKAAITGDTVGDPYKDTAGPAINPMIKIINIVSILLLSMLA

SEQ ID NO: 171649 - protein, 216 aa, Unknown
  Bacterial polypetide isolated from the Sargasso Sea
MEASASNILQLIILSGLLSIVYGFFTGKNILSSSAGNNKMQEIASAIQVGAKAYLNRQYKTIAVVGVVVLVIISFSFSILVGLGYLIGAALSGIAGYVGMLVSVQANVRTAEASRKGLSQGLSIAFKSGAVTGMLVAGLALLSISVYYYLLLSYGIDEREIVNALVALGFGASLISIFARLGGGIFTKGADVGADLVGKVEAGIPEDDPRNPAVIA

SEQ ID NO: 171650 - protein, 312 aa, Unknown
  Bacterial polypetide isolated from the Sargasso Sea
GWYDFTALPIIFICAAILLSYEFAGLYGIAIAAVGMLANTGIQLAVDAYGPISDNAGGIAEMAELDPKVRERTDKLDAVGNTTAAIGKGFAIASAALTALALFAAFMQTAEISAIDISKPVVMAGLLLGAMLPFVFSALSMNAVGKAAMSMIEEVRRQFRDLPKLKAALEIMRKYDSDLSKASKEDLKIFNDADGVAEYSKCVEISTQAALREMVLPGLMAISVPVIIGFTGGAEMLGGLLAGVTSCGVLMAIFQSNAGGAWDNAKKMIEEDGRKGSEAHKAAVVGDTVGDPFKDTSGPSLNILLKLLLLLR

SEQ ID NO: 171651 - protein, 316 aa, Unknown
  Bacterial polypetide isolated from the Sargasso Sea
GEGRVKEISDEIHLGAMVFMASEYKRLAIFCLICIAALYWGLGADTAISFTLGAFCSGVAGYIGMYSATKANVRTAVAANTEGAAAALNVAFFGGSIMGLTVASMGLLGIGILYHFMGGTAHGVEAIEGFAMGGSSVALFSRVGGGIFTKSADVGADLVGKVEAGIPEDDPRNPAVIADNVGDNVGDVAGMGSDIFESYCGSMIASIALAASMSMESVNRLGGDQNALQFMPLALASTGIVCSLIGILAVKMFSHKSADVALRFGTIGSAVIFIAAAYAVIQAMGATSGVWFAVLVGAIGGIIVGLVTEYYTGGAP

SEQ ID NO: 171652 - protein, 289 aa, Unknown
  Bacterial polypetide isolated from the Sargasso Sea
TAGLYGLSIAATSMLALPGMVVALDAFGPVTDNAGGIAEMADLPNEVRNTTDALDAVGNTTKAITKGYAIGSAGLAALVLFTAFTQDQQLLFPDIKVDFSLSNPFVVIGLFIGGLIPFLFAAMGMMAVGRAGGAVVEEVRRQFKEIPGIMEGKAKPEYGKCVDLLTKAAIREMIIPSLLPIVAPVVIYYVIYSFAGQSAAFAALGASLMGVIVTGLFVALSMTSGGGAWDNAKKYIEDGNHGGKGSEAHHAAVTGDTVGDPYKDTAGPAVNPLIKIMNIVAILLLAILA

SEQ ID NO: 171653 - protein, 282 aa, Unknown
  Bacterial polypetide isolated from the Sargasso Sea
VSYFLIGRLIENPVALADGYQNVQALDLFLATVVGLVSGILIGVLTEYYTSDHQKPSQNVAASSETGSATNIISGLANGMFSTALPVLVIALSILGAYHFAHLYGIALAALGMLSTIGIQLAVDAYGPIADNAGGIAEMAELPKEVRERTDKLDAVGNTTAAIGKGFAIGSAALTSLALFAAFRETVGGLTLDINNPQVMAGLLIGSSLPFVFSALAMQAVGDAAFEMIEEVRRQFREIKGLLDGKAKADYAKCVDIATTAAINKMVLPGALAVFTPIIFGL

SEQ ID NO: 171654 - protein, 255 aa, Unknown
  Bacterial polypetide isolated from the Sargasso Sea
VEAGIPEDDPRNPAVIADNVGDNVGDCAGMAADLFETYAVTVVATMVLAMIFFPGSSALLIYPMAICGSCLLASIIGTFFVRLGKSASIMGALYKGFIASAVLSLVFMYPVTQKVIGFENINTTNFSGMSLYICAVIGLVITGLLIWITEYYTGTNYRPVQSIAKASSTGHGTNVIQGLAVSMEATALPAIVIVIGIVLTFQLAGLFGIAIAVTSMLGLAGMVVALDAYGPVTDNAGGIAEMSNLDESVRKTTDA

SEQ ID NO: 171655 - protein, 95 aa, Unknown
  Bacterial polypetide isolated from the Sargasso Sea
NGFAALGALLLGVIVSGLFVAISMTSGGGAWDNAKKYIEDGHHGGKGSEAHKAAVTGDTVGDPYKDTAGPAVNPMIKITNIVALLLLAALAHGGM

SEQ ID NO: 171656 - protein, 246 aa, Unknown
  Bacterial polypetide isolated from the Sargasso Sea
LASIFFPNSANMMVYPLAIGGSCIITSIIGTWFVKLGKSKNIMGALYKGFIATAILSLLILYPLTNATLGLSENYSYSNISFSGFDLYICAVIGLIITGLIIWITEYYTGTNFRPVKSVAQSSTTGHGTNVIQGLAISMEATAVPALIIVIGIISTYNFAGLFGIAIAVTSMLALTGMVVALDAYGPVTDNAGGIAEMSKLPKNVRKTTDALDAVGNTTKAVTKGYAIGSAGLGALVLFAAYTEDI

SEQ ID NO: 171657 - protein, 261 aa, Unknown
  Bacterial polypetide isolated from the Sargasso Sea
NVRTAEASRKGLSNGLSIAFKSGAVTGMLVAGLALLSIAVYYYLLLKFNVDKRELINALIALGFGASLISIFARLGGGIFTKGADVGADLVGKVEAGIPEDDPRNPAVIADNVGDNVGDCAGMAADLFETYAVTIVATMVLSSIFFQNDLMMMVYPLTIGGACIVTSILGTFFVRLGSSKNIMLALYKGFVVTAITSLLVLYPLTDYVLGLDKLYEIDDKQFSGLSLYYCSVIGLVITGLLIWVTEYYTGTNYRPVKSVAS

SEQ ID NO: 171658 - protein, 278 aa, Unknown
  Bacterial polypetide isolated from the Sargasso Sea
AGAVTGMLVAGLALLSISVYYAILDSYSVSEETLKHALVALGFGASLISIFARLGGGIFTKGADVGADLVGKVEAGIPEDDPRNPAVIADNVGDNVGDCAGMAADLFETYAVTIVATMVLATIFFSGEIAHMMTIYPMAIGGSCLVASIIGTFFVRLGSSQSIMGALYKGFIASAILSLIFIYPVTQIVLGDMSKEFTFGDTTFSGTSLYICSIIGIVITGLLIWITEYYTGTNYRPVQSVAKASTTGHGTNVIQGLAVYMEATALPALVIVIGIVMT

SEQ ID NO: 171659 - protein, 246 aa, Unknown
  Bacterial polypetide isolated from the Sargasso Sea
MESNLILPPLFGIFGLAVAFILYLLVMRYDGGTDKVKKIGDQIHLGAMVFMRREYTYLAMFVAVLIVLSYLFLGLNTALAVTAGALSSSLAGWLGMFSATKANVRTATAASESGAQAALSVAFYGGSIMGLCVASLGLVGLGGLYFYFGGDPDTARAIEGFGMGASCVALFSRVGGGIYTKSADVGADLVGKVEAGIPEDDPRNPGVIADNVGDNVGDVAGMGSDIFESYCGAMIASIAIAATIDN

SEQ ID NO: 171660 - protein, 313 aa, Unknown
  Bacterial polypetide isolated from the Sargasso Sea
KMQEIASAIQVGARAYLNRQYKTIAIVGLVVLIIISYAFSILVGLGYLIGAALSGLAGYVGMLVSVQANVRTAEASRKGLPQGLSIAFKSGAVTGMLVAGLALLSIAVYYYLLLSFGIDEREIVNALVALGFGASLISIFARLGGGIFTKGADVGADLVGKVEAGIPEDDPRNPAVIADNVGDNVGDCAGMAADLFETYAVTIVATMVLSSIFFQGDLNMMVYPLSIGGACILTSIIGTFFVKLGKSKNIMAALYKGFIVTAITSLIILYPITDYVLGLENSYSVSNKSFTGMSLYICGAIGLVITGLIIWVT

SEQ ID NO: 171661 - protein, 222 aa, Unknown
  Bacterial polypetide isolated from the Sargasso Sea
VRANVRTAQAAHQGMNAALSMAFRGGAVTGLLVVGLGLLSIAGYYLILTSSGVSVDDSLHALIGLAFGGSLISIFARLGGGIFTKGADVGADLVGKIEAGIPEDDPRNPAVIADNVGDNVGDCAGMAADLFETYAVTIIATMLLGGLVFSGAEATNAVMYPLVLGAVSIVASVIGALFVKAKEGGSVMGALYKGVIISGLLAAIAFYPITGMMGMDMGLFWS

SEQ ID NO: 171662 - protein, 218 aa, Unknown
  Bacterial polypetide isolated from the Sargasso Sea
NIQSIDIADPWVMSGLFVGGMLPFLFSSMAMGAVGRAAMAMIEEVRRQFREIPELKKALELMNLKNENDWDENERNLYEGALAKAEHGRCVEISTQSAIKEMVAPGVLAVITPVVVGFVFGPQTLGGLLAGVTVSGVLMAIFQSNAGGAWDNAKKMIEEGINIDGEVLKKGSEAHKASVVGDTVGDPFKDTSGPSLNILIKLMSVVSLVIAPLLKSFS

SEQ ID NO: 171663 - protein, 283 aa, Unknown
  Bacterial polypetide isolated from the Sargasso Sea
KYLTMFMAVIVLLAWYALGPYTAIAVVVGALCSSIAGFIGMYAATKANVRTATAAQKDGSAAALTVSFYGGSIMGLCVASLGLIGLGGLYFFYIPAEVDPHKLEGFAMGASVVALFSRVGGGIFTKSADVGADLVGKIEAGIPEDDPRNPGVIADNVGDNVGDVAGMGSDIFESYCGSMIASIAIAYTLGNKDMMLLPLALASTGLIASIIGIFIVKLQSAKAPASALRSGTLLAPVIFVAMAYFIIDSFEGVGMNVWWCVIAGAVGGVLIGLITEYYTGGNP

SEQ ID NO: 171664 - protein, 238 aa, Unknown
  Bacterial polypetide isolated from the Sargasso Sea
MSSTVETILLYTIAAGLLSIVYGFFTGKNILNSSAGNKKMQEIASAIQIGAKAYLARQYKTIAIVGVVVLVIVSIAFSPLVGLGYLIGAALSGIAGYVGMLVSVEANVRTAEASRKGLAQGLSVAFKSGAVTGMLVAGLALLSIAVYYYLLLKLNVDEREIVNALVALGFGASLISIFARLGGGIFTKGADVGADLVGKVEAGIPEDDPRNPAVIADNVGDNVGDCAGMAADLLKHMQ

SEQ ID NO: 171665 - protein, 297 aa, Unknown
  Bacterial polypetide isolated from the Sargasso Sea
GGACILTSIIGTFFVKLGKSKNIMAALYKGFIVTAITSLIILYPITDYVLGLENTYSTSNKSFTGMSLYICGVIGLVITGLLIWVTEYYTGTNYRPVKSVASSSTTGHGTNVIQGLAVSMEATAIPALIIVGGILLTNYIAGLFGIAIAVTTMLALAGMVVALDAYGPVTDNAGGIAEMSNLPKNVRKTTDALDAVGNTTKAVTKGYAIGSAGLGALVLFAAYTEDIKHFSKVAGSKLEGIVVTFDLSNPFVVVGLLVGGMLPYLFGSMGMQAVGRAGGAVVVEVRRQFKKIPGIMK

SEQ ID NO: 171666 - protein, 240 aa, Unknown
  Bacterial polypetide isolated from the Sargasso Sea
GNTTKAVTKGYAIGSAGLGALVLFAAYTEDIKHFSKVAGSKLEGIVVTFDLSNPFIVVGLLVGGMLPYLFGSMGMQAVGRAGGAVVVEVRRQFKKIPGIMKRKAKPDYGKLVDLLTKAAIKEMIVPSLLPVLSPIVLYLFILPIGGQVAALSSVGAMLLGVIITGLFVAISMTAGGGAWDNAKKYIEDGNFGGKGSEAHKAAVTGDTVGDPYKDTAGPAVNPMIKITNIVALLLLAVIAG

SEQ ID NO: 171667 - protein, 265 aa, Unknown
  Bacterial polypetide isolated from the Sargasso Sea
MVLSSIFFPGDMSMMIYPLTIGGACILTSILGTFFVKLGRSKNVMNALYKGFVVSAVASLAILYPVTDYVLGLENTYNLNNKSFSGMSLYYCGIIGLVITGLLIWVTEYYTGTNYRPVRSVASSSTTGHGTNVIQGLAISLEATAIPALIIVAGILFTNHIAGLFGIAIAVTTMLALAGMVVALDAYGPVTDNAGGIAEMSKLPNNVRKTTDALDAVGNTTKAVTKGYAIGSAGLGALVLFAAYTEDIKHFSKEAGSKLEGIVVT

SEQ ID NO: 171668 - protein, 141 aa, Unknown
  Bacterial polypetide isolated from the Sargasso Sea
MKRKAKPDYGRLADLLTKAAIKEMIIPSLLPILSPIVLYIVIYFIGGQVAALSSLGAMLLGVIITGLFVAVSMTAGGGAWDNAKKYIEDGKFGGKGSEAHKAAVTGDTVGDPYKDTAGPAVNPMIKITNIVALLLLAVIAG

SEQ ID NO: 171669 - protein, 233 aa, Unknown
  Bacterial polypetide isolated from the Sargasso Sea
MYPITKYVIGFTTEYIVNEKSFTGLSLYFCGIIGLVITGLIIWITEYYTGTDYRPVKSVAQSSTTGHGTNVIQGLAVSMEATAIPALIIVGGILLTNHIAGLYGIAIAVTTMLALAGMVVALDAYGPVTDNAGGIAEMSNLPKNVRKTTDALDAVGNTTKAVTKGYAIGSAGLGALVLFAAYTEDIKHFSKVAGSNLEGIVVTFDLSNPFVVVGLLIGGMLPYLFGSMGMQAV

SEQ ID NO: 171670 - protein, 286 aa, Unknown
  Bacterial polypetide isolated from the Sargasso Sea
MGLDNSYTISNKSFTGMSLYICGVIGLVITGLLIWVTEYYTGTNYRPVKSVAASSTTGHGTNVIQGLAVSMEATAIPAMIIVGGIILTNFIAGLFGIAIAVTTMLALAGMVVALDAYGPVTDNAGGIAEMSNLPKNVRKTTDALDAVGNTTKAVTKGYAIGSAGLGALVLFAAYTEDIKHFSQTAGSKLEGIVVTFDLSNPFVVVGLLVGGMLPYLFGSMGMQAVGRAGGAVVVEVRRQFKKIPGIMKRKSKPDYGRLVDLLTRAAIKEMIVPSLLPVLSPIVLYL

SEQ ID NO: 171671 - protein, 256 aa, Unknown
  Bacterial polypetide isolated from the Sargasso Sea
MNTSIETILYYTIFAGLLSIVYGFVTGVGIIKSSSGNNKMQEIASAIQVGAKAYLNRQYKTIAIVGFVVLIIISFAFSFLVGIGYLVGATLSGIAGYVGMLVSVQANVRTAEASRKGLAQGLSIAFKSGAITGMLVAGLALLAIAVYYFILLKLGVDEREIVNALVALGFGASLISIFARLGGGIFTKGADVGADLVGKVEAGIPEDDPRNPAVIADNVGDNVGDCAGMAADLFETYAVTIVATMVLSSIFFSGDM

SEQ ID NO: 171672 - protein, 191 aa, Unknown
  Bacterial polypetide isolated from the Sargasso Sea
MTNYLELLYLIAFIGVLAVAYSYLLSGQIISSSAGNTRMQEIAEAIQIGAKAYLNRQYKTIAVVGIIVLAIVTYFFSYLVGIGYFIGAFLSGVAGYVGMLISVKANVRTAEAARHSLQSGLTIAFKSGAITGLLVAGLALLAITFYYIVLINLNVDNREIINALVALGFGASLISIFARLGGGIFTKGADV

SEQ ID NO: 171673 - protein, 51 aa, Unknown
  Bacterial polypetide isolated from the Sargasso Sea
NHGGKGSEAHKAAVTGDTVGDPYKDTAGPAVNPMIKITNIVALLLLASIAL

SEQ ID NO: 171674 - protein, 287 aa, Unknown
  Bacterial polypetide isolated from the Sargasso Sea
VAIPVITICAIIFIASHFTGLYGVGVAAVGMLSTVGITMAIDAYGPVADNAGGIAEMAELGKDTREITDSLDEVGNTTAAIGKGFAIGAAALAALALISAYIEKVSLGNEDFILRINDPLVLSGMFLGAIFPYLVSSITMTAVGDAAFDMIKEIRRQFKEIPGLMEGTGKPDTARCVDIATRAALRRMILPGSLAVLAPVVVGFGLGPQALGGMLGGALICCVMMALMMANAGGAWDNAKKYVEKGNLGGKGSDVHKAAVVGDTVGDPLKDTSGPSMNILINVMAIG

SEQ ID NO: 171675 - protein, 298 aa, Unknown
  Bacterial polypetide isolated from the Sargasso Sea
GIVVSILGTFMVSVKEGGDPQKGLNQGEFGSGLIMVVVIYVLIVKILPESYFQGGVSYNSTGVFYATIIGLFGGLGIGKITEHYTGTGTKPVKSIAEQSMTGPATNIIAGLGVGMESTAIPMIIISASIMGAYYFAGLYGIAMAALGMLANTGIQLAVDAYGPISDNAGGIAEMAELPSEVRERTDKLDAVGNTTAAIGKGFAIGSAALTALALFAAYMVKTGISTIDISNPMVMAGLFIGGMLPFLFSSMAMGAVGRAAMAMIEEVRRQFREIPELKKALEIMNLKDKEAWTKKITE

SEQ ID NO: 171676 - protein, 296 aa, Unknown
  Bacterial polypetide isolated from the Sargasso Sea
ITGLLIWVTEYYTGTNYRPVKSVASSSTTGHGTNVIQGLAVSMEATAIPALIIVGGILLTNYIAGLFGIAIAVTTMLALAGMVVALDAYGPVTDNAGGIAEMSNLPKNVRKTTDALDAVGNTTKAVTKGYAIGSAGLGALVLFAAYTEDIKHFSKVTGSKLEGIVVTFDLSNPFVVVGLLVGGMLPYLFGSMGMQAVGRAGGAVVVEVRRQFKKIPGIMKRKAKPDYGRLVDLLTKAAIKEMIVPSLLPVLSPIVLYLFILPIGGQVAALSSVGAMLLGVIITGLFVAISMTAGEG

SEQ ID NO: 171677 - protein, 119 aa, Unknown
  Bacterial polypetide isolated from the Sargasso Sea
EMIIPSMLPVLSPIAVYFIILIIAGQSAALSCLGALLLGVIITGLFVAISMTAGGGAWDNAKKYIEDGNHGGKGSEAHKAAVTGDTVGDPYKDTAGPAVNPMIKITNIVALLLLAAISI

SEQ ID NO: 171678 - protein, 283 aa, Unknown
  Bacterial polypetide isolated from the Sargasso Sea
MSVDTILIYTIFAGILSIVYGFVTGSSILNASAGNAKMQEIASAIQIGAKAYLNRQYKTIAIVGVVVLVIISFAFSLLVGIGYLIGAALSGIAGYVGMLVSVQANVRTAEASRKGLSQGLSIAFKSGAITGMLVAGLALLAIAVYYYILLLAGVDEREIVNALVALGFGASLISIFARLGGGIFTKGADVGADLVGKVEAGIPEDDPRNPAVIADNVGDNVGDCAGMAADLFETYAVTIVATMVLSSIFFVSDLNMMVYPLSIGAACILTSIVGTFFVKLGQS

SEQ ID NO: 171679 - protein, 284 aa, Unknown
  Bacterial polypetide isolated from the Sargasso Sea
GFSLGAESIALFARVGGGIYTKAADVGADLVGKVEAGIPEDDPRNPATIADNVGDNVGDVAGMGADLFGSYVATVLAAMVLGNYVIKDMGGMINDAFGGIGPILLPMAIAGFGILFSIIGTMLVSISSDDAKEAQVQGALNKGNWVSIVLTAISCYFLVKFMLPELMTMNFYGEGLKEISSMRVFYATIVGLVVGGVISSVTEYYTGLGTKPVLAIVQKSSTGAGTNVIAGLATGMISTFPTVLLFAGAIWASYAFAGFYGVALAASAKMATTAMQLAIDAFGP

SEQ ID NO: 171680 - protein, 282 aa, Unknown
  Bacterial polypetide isolated from the Sargasso Sea
NEGLDVAFKSGAVTGMLVAGLALLSIAVYYYLLLSFNVDEREIVNALVALGFGASLISIFARLGGGIFTKGADVGADLVGKVEAGIPEDDPRNPAVIADNVGDNVGDCAGMAADLFETYAVTIVATMVLSSIFFVGDLNMMIYPLTIGGACILTSILGTYFVKLGNSKNIMTALYKGFVVTALTSLIVLYPLTDYVLGLDTSYNIGSKEFTGLSLYYCGVIGLIITGLIIWVTEYYTGTGYRPVKSVALSSTTGHGTNVIQGLAVSLEATAVPALIIVSGIL

SEQ ID NO: 171681 - protein, 270 aa, Unknown
  Bacterial polypetide isolated from the Sargasso Sea
NESLGKGLNVAFKAGAVTGMLVAGLALLSISVYYVILESYSVSDETLKHALVSLGFGASLISIFARLGGGIFTKGADVGADLVGKVEAGIPEDDPRNPAVIADNVGDNVGDCAGMAADLFETYAVTIVATMVLATIFFTGPAAEMMTIYPMAIGGSCLVASIIGTFFVRLGRSQSIMGALYKGFIASAILSLIFIYPVTQVILGDMSKEFSFGTTSFTGMSLYTCAFVGIIITGLLIWITEYYTGTNYRPVQSVAKASNTGHGTNVIQGL

SEQ ID NO: 171682 - protein, 319 aa, Unknown
  Bacterial polypetide isolated from the Sargasso Sea
ISGFSLGASSIALLPRVGGGIYTKAADVGADLVGKVKAGIPEDHPLNPATIADNVGDNVGDVAGMGADLFESFVGSIIGAMVLGAAFVGLSEFSGIEINAVLLPLYIAASGIIMSIIGTFFVKVKEGGDPHKALNTGEFLSAGFMIAVTFFLIKNLLPETWVFNGVEFTSIGVFYATISGLIAGLLVGKVTEYYTATGKKPVLSIVEQSETGPATTIISGLGVGMISTALPIIFICAAILVSYNYAGLYGIAIAAVGMLANTGIQLAVDAYGPISDNAGGIAEMAELDPKVRERTDKLDAVGNTTAAIGKGFAIASAAL

SEQ ID NO: 171683 - protein, 237 aa, Unknown
  Bacterial polypetide isolated from the Sargasso Sea
MNRHCLFHFFGGSIMGLCVASMGLVGLGGLYFYFSGAMDDPDKIAKALEGFGVGASAVALFSRVGGGIFTKSADVGADLVGKIEAGIPEDDPRNPGVIADNVGDNVGDIAGMGSDIFESYCGAMIASIAIAASVGNTDLMFLPLWLASLGLFCSLIGIGIVRTQVSRSPSVALRLGTFFSPIVFLIIAGMSISMSPNIEMSVFYSVLTGAVGGILIGLITEYYTGGSTENSPVGKIA

SEQ ID NO: 171684 - protein, 251 aa, Unknown
  Bacterial polypetide isolated from the Sargasso Sea
DLVGKVEAGIPEDDPRNPGVIADNVGDNVGDVAGMGSDIFESYCGSMIATIAIAYTMTEANNGPLMSLPLALASIGLISSILGILIVRAQSAKAPAAALRTGTIGSPVIFIALAFGLITYLDISLNVWFCVLTGAVGGVLIGLITEYYTGSTPVEKIAKSGETGSATVMISGLSVGMQSVVIPILILATIIFISTTLFDLYGVGIAAVGMLATVGITMAIDAYGPVADNAGGIAEMSGMGEDVREITDSLN

SEQ ID NO: 171685 - protein, 304 aa, Unknown
  Bacterial polypetide isolated from the Sargasso Sea
YVTRQDQGSEVMIDLGQQIHDGAMAFLRREYTVLAVFVVIVAGLLGWTIGWNSAVAYVFGSLSSVAAGFAGMKAATRSNTRTSAAANSEGQGKALRIAFFGGAVMGLAVAALGMVGLGVLYFIFGASAASAVDYESYAQLVSGFAMGASTIALFARVGGGIYTKAADVGADLVGKVEAGIPEDDPRNPATIADNVGDNVGDVAGMGADIFESYVGSMVATIAIGASAPMLAGSRAEAIALPLTTAMVGLISSLVGISFMKVLEKQNPSHALHGTTWIAGGLFLVLMHPVVTSMGINFSGESYPV

SEQ ID NO: 171686 - protein, 295 aa, Unknown
  Bacterial polypetide isolated from the Sargasso Sea
GALYKGFIATAIFSVIILYPVTDKIIGLNNIYSSSNAEFTGFALYQCGVVGLIITGLIIWVTEYYTGTKFRPVISVAKSSITGHGTNVIQGLAVSLEATALPALIIVGGILLTNHIAGLFGIAIAVTTMLALAGMVVALDAYGPVTDNAGGIAEMSNLPKNVRKTTDALDAVGNTTKAVTKGYAIGSAGLGALVLFAAYTEDIKFFSNVSGSSLENIVVNFDLSNPFVVVGLLIGGMLPYLFGSMSMQAVGRAGGAVVIEVRRQFKKIPGIMKRKRKPDYGKLVDLLTKAAIKEM

SEQ ID NO: 171687 - protein, 230 aa, Unknown
  Bacterial polypetide isolated from the Sargasso Sea
YAIGSAGLGALVLFAAYTEDIKHFSKETGSALEGIVVTFDLSNPYVVVGLLIGGMLPYLFGSMGMQAVGRAGGAVVVEVRRQFKKFPGIMKRKQKPDYAKLVDLLTVAAIKEMIIPSLLPVLSPVVLYFIILSIGGQVAALAAVGAMLLGVIITGLFVAVSMTAGGGAWDNAKKYIEDGNHGGKGSEAHKAAVTGDTVGDPYKDTAGPAVNPMIKITNIVALLLLAVIAA

SEQ ID NO: 171688 - protein, 232 aa, Unknown
  Bacterial polypetide isolated from the Sargasso Sea
KGYAIGSAGLGALVLFAAYTEDIKFFSTVSGSALEGINVSFDLSNPFVVIGLLVGGMLPYLFGSMGMQAVGRAGGAVVIEVRRQFKKIPGIMKGKRKPDYGRLVDLLTKAAIKEMIIPSLLPVLSPIVLYLIIYYIGGLEAALSSVGAMLLGVIVTGLFVAISMTAGGGAWDNAKKFIEDGNYGGKGSESHKAAVTGDTVGDPYKDTAGPAVNPMIKITNIVALLLLAVISH

SEQ ID NO: 171689 - protein, 273 aa, Unknown
  Bacterial polypetide isolated from the Sargasso Sea
MTVLTITIACGVCALIYGLWASQSILTSSAGSEKMQEIAGAIQEGAAAYLNRQYTTITVVGVIVAIILFLTLGLYVSIGFLIGAVLSGIAGYIGMNVSVRANVRTTQAATEGLQPALDIAFKSGAITGLLVVGLGLLGVAGYYAFLLSVNVETRLLIESLVALSFGASLISIFARLGGGIFTKGADVGADLVGKVEAGIPEDDPRNPAVIADNVGDNVGDCAGMAADLFETYAVTIVATMLIGTIMFSGQTNYVELPLFIGGVCIIASIVGAF

SEQ ID NO: 171690 - protein, 293 aa, Unknown
  Bacterial polypetide isolated from the Sargasso Sea
EDDPRNPAVIADNVGDNVGDCAGMAADLFETYAVTIVATMVLSSIFFVGDLNMMIYPLTIGGACLLTSILGTFFVKLGKGKNVMNALYKGFIVSAVASLVILWPVTDHVIGFTNLYTVNGNTFNGMDLYYCGVIGLVITGLLIWITEYYTGTSYRPVKSVALSSTTGHGTNVIQGLAVSMEATAIPALIIVAGILITNSIAGLFGIAIAVTTMLALAGMVVALDAYGPVTDNAGGIAEMSNLDKKVRKTTDALDAVGNTTKAVTKGYAIGSAGLGALVLFAAYTEDIKHFSKE

SEQ ID NO: 171691 - protein, 291 aa, Unknown
  Bacterial polypetide isolated from the Sargasso Sea
AKAYLNRQYKTIAIVGVVVLIIISFAFSFLVGLGYLVGATLSGIAGYVGMLVSVQANVRTAEASRKGLANGLSVAFRSGAITGMLVAGLALLSIAVYYFILIKMNVDEREIVNALVALGFGASLISIFARLGGGIFTKGADVGADLVGKVEAGIPEDDPRNPAVIADNVGDNVGDCAGMAADLFETYAVTIVATMVLSSIFFHGDMNMMVYPLTIGGACIITSIIGTFFVKLSKSKNVMNALYKGFIATAIISLIILYPVTDYVIGFDSSYNVGDKSFNGMSLYYCGIIGL

SEQ ID NO: 171692 - protein, 186 aa, Unknown
  Bacterial polypetide isolated from the Sargasso Sea
YVVVGLWIGGMLPYLFGSMGMQAVGRAGGAVVVEVRRQFKKYPGIMKRKQKPDYAKLVDLLTVAAIKEMIIPSLLPVLSPVVLYFVIFSIGGQVAALASVGAMLLGVIITGLFVAVSMTAGGGAWDNAKKYIEDGNHGGKGSEAHKAAVTGDTVGDPYKDTAGPAVNPMIKITNIVALLLLAVIAG

SEQ ID NO: 171693 - protein, 309 aa, Unknown
  Bacterial polypetide isolated from the Sargasso Sea
LFETYAVTIVATMVLATIFFTGPIAEMMTIYPMAIGGSCLVASIIGTFFVRLGRSQSIMGALYKGFIASAILSLIFIYPVTQIILGDMSTEFTFGTTTFNGMSLYVCAFVGIIITGLLIWITEYYTGTNYRPVQSVAKASTTGHGTNVIQGLAVSMEATALPAIVIVVGIVFTYQLAGLFGIAIAVTAMLALAGMVVALDAYGPVTDNAGGIAEMANLDESVRKTTDALDAVGNTTKAVTKGYAIGSAGLGALVLFAAYVEDLKLIPEITPDFSLENPYVVVGLLIGGFMPYLFASMGMMAVGRAGGAV

SEQ ID NO: 171694 - protein, 225 aa, Unknown
  Bacterial polypetide isolated from the Sargasso Sea
MSETVETILLYTIGAGLLSIVYGFLTGKNILNSSAGNAKMQDIASAIQIGAKAYLARQYKTIAIVGAVVLVIVSIAFSPLVGLGYLIGAALSGIAGYVGMLVSVEANVRTAEASRKGLAQGLSVAFKSGAVTGMLVAGLALLAIAVYYYILLKSNVEEREIVNALVALGFGASLISIFARLGGGIFTKGADVGADLVGKVEAGIPEDDPRNPAVIADNVGDNVGD

SEQ ID NO: 171695 - protein, 244 aa, Unknown
  Bacterial polypetide isolated from the Sargasso Sea
ATNIISGLANGMFSTALPVLVIAMSILGAYHFAHLYGIALAALGMLSTIGIQLAVDAYGPIADNAGGIAEMAELPKEVRERTDKLDAVGNTTAAIGKGFAIGSAALTSLALFAAFRETVGGLTLDINNPYVMVGLLIGSALPFVFSALAMQAVGDAAFEMIEEVRRQFREIKGLLDGKAKADYAKCVDIATSAAINKMVLPGALAVFTPIVFGLVLGQKEMLGGILAGVTVTGVLLAIFMSNAG

SEQ ID NO: 171696 - protein, 287 aa, Unknown
  Bacterial polypetide isolated from the Sargasso Sea
VTTMLALAGMVVALDAYGPVTDNAGGIAEMSNLDKKVRKTTDALDAVGNTTKAVTKGYAIGSAGLGALVLFAAYTEDIKHFSKEAGSALEGIVVTFDLSNPYVVVGLLIGGMLPYLFGSMGMQAVGRAGGAVVVEVRRQFKKFPGIMKRKQKPDYAKLVDLLTVAAIKEMIIPSLLPVLSPVVLYFVILSIGGQVAALAAVGAMLLGVIITGLFVAVSMTAGGGAWDNAKKYIEDGNHGGKGSEAHKAAVTGDTVGDPYKDTAGPAVNPMIKITNIVALLLLAVIAG

SEQ ID NO: 171697 - protein, 249 aa, Unknown
  Bacterial polypetide isolated from the Sargasso Sea
MNNFLELLYLVSFTGILAVAYSYLLSGQILAASPGNARMQEIAEAIQIGAKAYLNRQYKTIAVVGIIVLAIVTYFFNYLVGLGYFIGAFLSGVAGYVGMLISVKANVRTAEASRKSLQAGLTIAFKSGAITGLLVAGLALLAITIYYIILIKLEVDSREIINALVALGFGASLISIFARLGGGIFTKGADVGADLVGKVEAGIPEDDPRNPAVIADNVGDNVGDCAGMAADLFETYAVTIVATMVLSSI

SEQ ID NO: 171698 - protein, 160 aa, Unknown
  Bacterial polypetide isolated from the Sargasso Sea
TGGAVVVEVRRQFKKFPGIMKRKQKPDYAKLVDLLTVAAIKEMIIPSLLPVLSPVVLYFIILSIGGQVAALAAVGAMLLGVIITGLFVAVSMTAGGGAWDNAKKYIEDGNHGGKGSEAHKAAVTGDTVGDPYKDTAGPAVNPMIKITNIVALLLLAVIAG

SEQ ID NO: 171699 - protein, 112 aa, Unknown
  Bacterial polypetide isolated from the Sargasso Sea
MSLSQVAAGKNLPDEINVIIEIPANADPIKYEVDKDTGTVWVDRFMSTPMFYPCNYGFVNHTLSLDGDPVDVLVPTPYPLVPGAVIKCRPVAVLKMADEAGEDAKVLAVPIS

SEQ ID NO: 171700 - protein, 136 aa, Unknown
  Bacterial polypetide isolated from the Sargasso Sea
NLDYAKLVDLLTVAAIKEMIIPSLLPVLSPVVLYFIILSIGGQVAALAAVGAMLLGVIITGLFVAVSMTAGGGAWDNAKKYIEDGNHGGKGSEAHKAAVTGDTVGDPYKDTAGPAVNPMIKITNIVALLLLAVIAG

SEQ ID NO: 171701 - protein, 208 aa, Unknown
  Bacterial polypetide isolated from the Sargasso Sea
LAALVLFADFTNNLDADIVFSLSDPAVIIGLFIGGMVPYLFAALAMEAVGRAAGSVVTEVRRQFKEIPGIMDGSSKPDYSKAVDLLTQSAIKEMVIPSILPIAVPIVLAVVMSFLFENGGVLALGGLLIGTIVTGLFVAISMTVGGGAWDNAKKYVEDGNCGGKGSEAHNASITGDTVGDPYKDTAGPAINPLIKIINLVALLLIPFL

SEQ ID NO: 171702 - protein, 308 aa, Unknown
  Bacterial polypetide isolated from the Sargasso Sea
CSIIWYSRLCRYACFCSANVRTAEASRKSLSSGLSIAFKSGAVTGMLVAGLALLAIAVYYYYLVKTGVEEREIVNALVALGFGASLISIFARLGGGIFTKGADVGADLVGKVEAGIPEDDPRNPAVIADNVGDNVGDCAGMAADLFETYAVTIVATMVLSSIFFINDLNMMIYPLAIGGACILTSILGTFFVTLGSDKNIMKAMYKGFVITAVSSLIILFPITKHVIGFTTEYVANGKSFNGLSLYFCGIIGLIITGLIIWITEYYTGTDYRPVKSVAKSSTTGHGTNVIQGLAVSMEATAVPALIIV

SEQ ID NO: 171703 - protein, 244 aa, Unknown
  Bacterial polypetide isolated from the Sargasso Sea
TNIISGLANGMFSTALPVLVIAMSILGAYHFAHLYGIALAALGMLSTIGIQLAVDAYGPIADNAGGIAEMAELPKEVRERTDKLDAVGNTTAAIGKGFAIGSAALTSLALFAAFRETVGGLTLDINNPYVMAGLLIGSALPFVFSALAMQAVGDAAFEMIEEVRRQFREIKGLLDGKAKADYAKCVDIATSAAINKMVLPGALAVFTPIVFGLVLGQKEMLGGILAGVTVTGVLLAIFMSNAGG

SEQ ID NO: 171704 - protein, 281 aa, Unknown
  Bacterial polypetide isolated from the Sargasso Sea
FFSDLSSMMMYPLAIAGVCTLASIVGTYFVRLGKSKNIMAALYKGFAVSAILSALLLYFITDHVIGLSSIFSIDDKSFTGLSLFYCGLLGLIITGLIIWVTEYYTGTNYRPVQSIAQASTTGHGTNVIQGLAISLEATALPAIIIVAGIIITHSLAGLFGIAIAVTTMLALAGMVVALDAYGPVTDNAGGIAEMAELDDNVRKTTDALDAVGNTTKAVTKGYAIGSAGLGALVLFAAYTEDLEHFANDPNSSLSYEKIGHVTFDLSNPYVVVGLLIGGLLP

SEQ ID NO: 171705 - protein, 288 aa, Unknown
  Bacterial polypetide isolated from the Sargasso Sea
GMLVAGLALLAIALYYFILLKLGIDEREIVNALVALGFGASLISIFARLGGGIFTKGADVGADLVGKVEAGIPEDDPRNPAVIADNVGDNVGDCAGMAADLFETYAVTIVATMVLSSIFFQGDMNMMIYPLTIGGACILTSIIGTFFVKLGNSKNVMNALYKGFIATAVLSLIILYPVTDYVIGFNSNYSVGSSSFTGKSLYFCGIIGLIITGLLIWVTEYYTGTNYRPVKSVASSSTTGHGTNVIQGLAVSMEATAIPALIIVSGILLTNHIGGLYGIAIAVTTMLA

SEQ ID NO: 171706 - protein, 318 aa, Unknown
  Bacterial polypetide isolated from the Sargasso Sea
AVFSGLAGYIGMSISVRANVRTAQAAHQGMNAALSMAFRGGAVTGLLVVGLGLLSIAGYYLILTSSGVSVDDSLHALIGLAFGGSLISIFARLGGGIFTKGADVGADLVGKIEAGIPEDDPRNPAVIADNVGDNVGDCAGMAADLFETYAVTIIATMLLGGLVFSGAEATNAVMYPLVLGAVSIVASVIGAIFVKAKEGGSVMGALYKGVIISGLLAAIAFYPITGMMGMDMGLFWSAIIGLVLTAFMVLVTEFYTSTEYSPVQKIAEASTTGHATNIIAGLGVSMKSTALPVLAVCLSIWGAYALGGLYGIAIAATS

SEQ ID NO: 171707 - protein, 272 aa, Unknown
  Bacterial polypetide isolated from the Sargasso Sea
KMQEIASAIQIGAKAYLNRQYKTIAIVGFVVLVIISYAFSILVGLGYLIGATLSGIAGYVGMLVSVQANVRTAEASRKGLSQGLSIAFKSGAVTGMLVAGLALLAIAVYYYLLITYEVEEREIVNALVALGFGASLISIFARLGGGIFTKGADVGADLVGKVEAGIPEDDPRNPAVIADNVGDNVGDCAGMAADLFETYAVTIVATMVLSSIFFHGDLNMMIYPLSIGGACILTSILGTFFVKLGKSKNIMAALYKGFIATAVTSLIILYPN

SEQ ID NO: 171708 - protein, 189 aa, Unknown
  Bacterial polypetide isolated from the Sargasso Sea
MDASIETILYYTIFAGFLSIIYGFFTGSNIIKSSPGNSKMQEIASAIQIGAKAYLNRQYKTIAIVGVFVLIIITFAFNYLVGLGYLIGATLSGIAGYVGMLVSVQANVRTAEASRKGLASGLSVAFKSGAITGMLVAGLALLSIAVYYFVLLKFGIDEREIVNALVALGFGASLISIYARLGGGIFTKR

SEQ ID NO: 171709 - protein, 296 aa, Unknown
  Bacterial polypetide isolated from the Sargasso Sea
NIFPTDYNMMVYPLAIGASCILTSIIGTWFVKLGKSKNIMGALYKGFVVTAISSLIILYPVTDAILGLDKFYSNNEKNFSGLDLYLCGVVGFIITGLLIWITEYYTGTNFRPVQSVAKSSTTGHGTNVIQGLAVSMEATAIPALIIVAGILYTNNLAGLYGIAIAVTAMLALTGMVVALDAYGPVTDNAGGIAEMSKLPKNVRKTTDALDAVGNTTKAVTKGYAIGSAGLGALVLFAAYTEDIKYFSSVKGSALENVVVTFDLSNPFVVAGLLIGGMLPYLFGSMGMQAVEEQAEL

SEQ ID NO: 171710 - protein, 214 aa, Unknown
  Bacterial polypetide isolated from the Sargasso Sea
MLEIASAIQEGARAYLNRQYKTIALVGIVVLIIITILFSPLVGLGYLIGATLSGIAGYVGMLVSVQANVRTAEASRKNLASGLSIAFKSGAVTGMLVAGLALLSIAVYYYFLVKAGVDEREIVNALVALGFGASLISIFARLGGGIFTKGADVGADLVGKVEAGIPEDDPRNPAVIADNVGDNVGDCAGMAADLFETYAVTIVATMVLSSIFFV

SEQ ID NO: 171711 - protein, 355 aa, Unknown
  Bacterial polypetide isolated from the Sargasso Sea
LQIGGGILLKGADVGADLVGKVEAGIPEDDPRNPAVIADNVGDNVGDCAGMAADLFETYAVTIVATMVLATIFFTGEIAQMMTIYPMAIGGSCLVASIIGTFFVRLGSSQSIMGALYKGFIASAILSLIFIYPVTQVVLGDMSKEFTFGDTTFSGTSLYICSIIGVVITGLLIWITEYYTGTNYRPVQSVAKASTTGHGTNVIQGLAVSMEATALPALVIVIGIIMTFQLAGLFGIAIAVTAMLALAGMVVALDAYGPVTDNAGGIAEMSNLDENVRKTTDALDAVGNTTKAVTKGYAIGSAGLGALVLFAAYVEDLKLISDLTPNFSLENPYVVVGLLIGGLLPYLFASMGMMA

SEQ ID NO: 171712 - protein, 230 aa, Unknown
  Bacterial polypetide isolated from the Sargasso Sea
YAIGSAGLGALVLFAAYTEDIKYFSTVKGSALEGVIVTFDLSNPFVVAGLLIGGMLPYLFGSMGMQAVGRAGGAVVVEVRRQFKKIPGIMKGKRKPDYGKLVDLLTKAAIKEMIVPSLLPVLSPVILYFVILQIGGMEAALSSLGAMLLGVIITGLFVAVSMTAGGGAWDNAKKYIEDGNFGGKGSEAHKSAVTGDTVGDPYKDTAGPAVNPMIKITNIVALLLLAVIAH

SEQ ID NO: 171713 - protein, 270 aa, Unknown
  Bacterial polypetide isolated from the Sargasso Sea
MLQVFLSQILIAGLFGIAIAVTTMLALAGMVVALDAYGPVTDNAGGIAEMSNLDKKVRKTTDALDAVGNTTKAVTKGYAIGSAGLGALVLFAAYTEDIKHFSKEAGSALEGIVVTFDLSNPYVVVGLLIGGMLPYLFGSMGMQAVGRAGGAVVVEVRRQFKKFPGIMKRKQKPDYAKLVDLLTVAAIKEMIIPSLLPVLSPVVLYFIILSIGGQVAALAAVGAMLLGVIITGLFVAVSMTAGGGAWDNAKKYIEDGNHGGKGSEAHKAAV

SEQ ID NO: 171714 - protein, 282 aa, Unknown
  Bacterial polypetide isolated from the Sargasso Sea
MEATAIPAIIIVAGILLTNSIAGLFGIAIAVTTMLALAGMVVALDAYGPVTDNAGGIAEMSNLPKNVRKTTDALDAVGNTTKAVTKGYAIGSAGLGALVLFAAYTEDIKHFSKEAGSKLEGIVVTFDLSNPFVVVGLLIGGMLPYLFGSMGMQAVGRAGGAVVIEVRRQFKKIPGIMKRKAKPDYGKLVDLLTKAAIKEMVIPSLLPVLSPIVLYLIILPIGGQVAALSSVGAMLLGVIITGLFVAVSMTAGGGAWDNAKKYIEDGKFGGKGSEAHKAAVTG

SEQ ID NO: 171715 - protein, 219 aa, Unknown
  Bacterial polypetide isolated from the Sargasso Sea
TIDISNPMVMAGLFIGGMLPFLFSSMAMGAVGRAAMAMIEEVRRQFKEIPELKKALEIMNLKDKNDWNEKDHKVYNEALGKAEHGRCVEISTESAIKEMITPGLLAVITPVLVGFAPRVFGSNQGPEILGGLLAGVTVTGVLMAIFQSNSGGAWDNAKKMIEEGILINGQEINKGSEAHKAAVVGDTVGDPFKDTSGPSLNILIKLMSVVSLVIAPLIK

SEQ ID NO: 171716 - protein, 271 aa, Unknown
  Bacterial polypetide isolated from the Sargasso Sea
FLWAEYRLLTGFILIVAIAILLGGEENGLGMETMVAFIIGALCSVAAGFSGMRSATSANGRTAQAAADGGQSAALTTSYNGGAVMGLAVGGLGLAGISLMYYLTKTESLGLALDVDNIAGFGMGASSIALFARVGGGIYTKAADVGADLVGKVEAGIPEDDPRNPGVIADNVGDNVGDVAGMGADIFESFVGSIIAAMVIAAASDSLGSDYVMIPIVLAVVGYIASIIGVFSITAMQNMDPGAALRNTTFIGAGLFIAGGFLALDYLDLDT

SEQ ID NO: 171717 - protein, 269 aa, Unknown
  Bacterial polypetide isolated from the Sargasso Sea
ITALVSIVLIYFVTDFFIGTDKLIINSDLFIESFLGIDLFYCSIIGLAVTGLIVWITEYYTSTEFNPVKSVAKSSQSGHATNIIQGLAVSMQSTALPTIVIILGILLSYKFAGLYGISVAATTMLALAGMIVALDAYGPVTDNAGGIAEMSNLSENVRKTTDALDAVGNTTKAVTKGYAIGSAGLASLVLFGAYTQDLKYYFPNLDVKFSLDDPYVVVGLLIGGMLPFLFGSMGMTAVGKTAEKIVNEVRRQFAENKGIMTGKSKPEYG

SEQ ID NO: 171718 - protein, 214 aa, Unknown
  Bacterial polypetide isolated from the Sargasso Sea
YTEDIKYFSGVSGSALEGVDVTFDLSNPFVVAGLLIGGMLPYLFGSMGMQAVGRAGGAVVIEVRRQFKKIPGIMKGKRKPDYGKLVDLLTKAAIKEMILPSLLPVLSPIILYFVIFQIGGLEAALSSLGAMLLGVIITGLFVALSMTAGGGAWDNAKKYIEDGNFGGKGSEAHKSAVTGDTVGDPYKDTAGPAVNPMIKITNIVALLLLAVIAH

SEQ ID NO: 171719 - protein, 233 aa, Unknown
  Bacterial polypetide isolated from the Sargasso Sea
MSAFIPPLLGLIGLLIALGLFRVVLSYPEGNPEVKKIGDMIHSGAMSFMKTEYTYLVVFVLVLAVLVFFALGWETATAVLVGASSSALAGFIGMYAATKANTRTAAAAQEDGAASALSISFYGGSIMGLCVASLGLLGLGGLFYFLGEGHYLEGFGMGASVVALFSRVGGGIFTKSADVGADLVGKVEAGIPEDDPRNPGVIADNVGDNVGDVAGMGSDIFESYCGSMIATIA

SEQ ID NO: 171720 - protein, 307 aa, Unknown
  Bacterial polypetide isolated from the Sargasso Sea
LLYPLTDYVIGFSTQYNVNNVSFNGKSLYYCGVIGLVITGLIIWVTEYYTGTSYRPVKSVANSSTTGHGTNVIQGLAVSLEATAIPALIIVTGILLTNYIAGLYGIAIAVTTMLALAGMVVALDAYGPVTDNAGGIAEMSKLPNNVRKTTDALDAVGNTTKAVTKGYAIGSAGLGALVLFAAYTEDIKHFSKVAGSKLEGIVVTFDLSNPYVVVGLLIGGMLPYLFGSMGMQAVGRAGGAVVIEVRRQFKKFPGIMKKKQKPDYAKLVDLLTVAAIKEMIVPSLLPVLSPIILYFVIFAIGGQIAAL

SEQ ID NO: 171721 - protein, 282 aa, Unknown
  Bacterial polypetide isolated from the Sargasso Sea
ETGHGTNVIQGLAISLEATAIPAIIIAVGILVSFQLNGIYGIAISATTMLALAGMVVALDAYGPVTDNAGGIAEMCDLDQEVRKTTDALDAVGNTTKAVTKGYAIGSAGLAALVLFSAYTYDLKYYFPNLDINFSLSDPYVVVGLLIGGMLPYLFGALGMTAVGRAGGDVVKEVRRQFKEIPGIMTGKGKPDYSKAVDLLTKSAIKEMILPSLLPVLAPIILYFLISLFDQKSALIAVGAMLLGTIVTGLYVAISMTAGGGAWDNAKKYIEDGNHGGKGSEA

SEQ ID NO: 171722 - protein, 286 aa, Unknown
  Bacterial polypetide isolated from the Sargasso Sea
METSALNILQLIILAGLLSIVYGFFTGKDILNSSAGNNKMQEIASAIQVGAKAYLNRQYKTIAIVGLVVLVIISYAFSILVGLGYLIGASLSGIAGYVGMLVSVQANVRTAEASRKGLSKGLSIAFKSGAVTGMLVAGLALLAIAVYYYLLLSFDVEEREIVNALVALGFGASLISIFARLGGGIFTKGADVGADLVGKVEAGIPEDDPRNPAVIADNVGDNVGDCAGMAADLFETYAVTIVATMVLSSIFFHGNLNMMIYPLSIGGACILTSIIGTFFVRLGKSK

SEQ ID NO: 171723 - protein, 245 aa, Unknown
  Bacterial polypetide isolated from the Sargasso Sea
MDITLVAAGAAVVGLVVALFLYKKNDSMEIEDKRVAEITQEIQDGAMAFLFAEYRILAGFVVVVAGLLYWDSGDIYTPGAFLAGAAASVLAGFSGMRAATSANGRTAMAAKSGGQPAALEVSYNGGAVMGLSVGGLGLLGISLVAYWLGTGESNHIESAAGFGMGASSIALFARVGGGIYTKAADVGADLVGKVEAGIPEDDPRNPGVIADNVGDNVGDVAGMGADIFESFVGSIIAAMVIANGT

SEQ ID NO: 171724 - protein, 235 aa, Unknown
  Bacterial polypetide isolated from the Sargasso Sea
DAVGNTTKAVTKGYAIGSAGLAALVLFAAYTEDLGHYFPQLEISFELQSPYVVIGLFLGGLLPYLFGALGMMAVGRAGGQVVVEVRRQFKEIPGIMEGTARPEYGKAVDLLTKAAIKEMIIPSLLPVLAPIVVYLVIWAVAGQGEAFTTLGAMLLGTIVTGIFVAISMTSGGGAWDNAKKYIEDGNHGGKASEAHKASVTGDTVGDPYKDTAGPAVNPMIKIINIVALLLLAVLG

SEQ ID NO: 171725 - protein, 261 aa, Unknown
  Bacterial polypetide isolated from the Sargasso Sea
VAGILITNSIAGLFGIAIAVTTMLALAGMVVALDAYGPVTDNAGGIAEMSNLEKKVRKTTDALDAVGNTTKAVTKGYAIGSAGLGALVLFAAYTEDIKHFSKEAGSALEGIVVTFDLSNPYVVVGLLIGGMLPYLFGSMGMQAVGRAGGAVVVEVRRQFKKFPGIMKRKQKPDYAKLVDLLTVAAIKEMIIPSLLPVLSPVVLYFIILSIGGQVAALAAVGAMLLGVIITGLFVAVSMTAGGGAWDNAKKYIEDGNHGGKG

SEQ ID NO: 171726 - protein, 251 aa, Unknown
  Bacterial polypetide isolated from the Sargasso Sea
ADLFETYAVTIFATMVLSSIFFHGDLNMMIYPLSIGGACILTSIIGTFFVKLGKSKNIMAALYKGFVVTAVTSLIILYPVTDYVLGLESNYTISDKSFTGMSLYLCGAIGLIITGLLIWVTEYYTGTNYRPVKSVASSSTTGHGTNVIQGLAVSMEATAIPAIIIVAGILVTNHIAGLFGIAIAVTTMLALAGMVVALDAYGPVTDNAGGIAEMSNLPKNVRKTTDALDAVGNTTKAVTKGYAIGSAGLGA

SEQ ID NO: 171727 - protein, 305 aa, Unknown
  Bacterial polypetide isolated from the Sargasso Sea
MYTATKANVRTAVAANVKGASEALNVAFFGGSIMGLTVASMGLFGVGILFYYFGGDIKTIHSIEGFAMGASSVALFSRVGGGIFTKSADVGADLVGKVEAGIPEDDPRNPGVIADNVGDNVGDVAGMGSDIFESYCGSMIASIALAASMTSATITKLGGDQYMLQLMPLALASLGLICSIIGILMVRLFSDKSPEIALRFGTIGSAVVFILASFFLVKYLGVSSGVWAAVLIGSIGGIIVGLVTEYYTGGAPVKKIAKGGETGPATIMITGLATGMQSVAIPVFTIVCIIFTANYFAGLYGVGIA

SEQ ID NO: 171728 - protein, 313 aa, Unknown
  Bacterial polypetide isolated from the Sargasso Sea
VAGGIFTKSADVGADLVGKMRLGIPEDDPRNPGVIADNVGDNVGDVAGMGSDIFESYCGSMIASIAIAYTLGSKEMMMYPLALTSIGLIASIIGIIIVKLQSAKAPASALRSGTLLAPVIFIIMAYFLTNSMVGVSMNVWWAVVCGAVGGVLIGLITEYYTGGAPVKKIAESGETGSATVMISGLSVGMQSVVIPILVLATIILISTSLSGVYGVGVAAVGMLSTVGITMAIDAYGPVADNAGGIAEMAGMGEDVREITDSLDELGNTTAAIGKGFAIGAAALAALAIISAFSAVVSLNFGEAFTLSLGQPIV

SEQ ID NO: 171729 - protein, 279 aa, Unknown
  Bacterial polypetide isolated from the Sargasso Sea
IGAKAYLNRQYKTIAIVGIIVLAIVTYFFSYLVGIGYFIGAFLSGVAGYVGMLISVKANVRTAEAARKSLQSGLTIAFKSGAITGLLVAGLALLAITFYYIILINLNVDNREIINALVALGFGASLISIFARLGGGIFTKGADVGADLVGKVEAGIPEDDPRNPAVIADNVGDNVGDCAGMAADLFETYAVTIVATMVLASIFSPQDFNLMIYPLAIGGACIITSIIGTWFVKLGKSKNIMVALYKGFIVTAVTSLLILYPVTDSVVGIKSTYNNNAGA

SEQ ID NO: 171730 - protein, 184 aa, Unknown
  Bacterial polypetide isolated from the Sargasso Sea
VVGLLIGGMLPYLFGSMGMQAVGRAGGAVVIEVRRQFKKIPGIMKRKSKPDYGKLVDLLTQAAIKEMIVPSLLPVLSPILLYIIIFSIGGQVAALASVGAMLLGVIITGLFVAVSMTAGGGAWDNAKKYIEDGKFGGKGSEAHKAAVTGDTVGDPYKDTAGPAVNPMIKITNIVALLLLAVIAG

SEQ ID NO: 171731 - protein, 238 aa, Unknown
  Bacterial polypetide isolated from the Sargasso Sea
NVGDNVGDCAGMAADLFETYAVTIVATMVLASIFSPQDYNLMIYPLAIGGACIITSIIGTWFVKLGKTKSIMGALYKGFIVTAITSLIIMYPITESIIGLKSNYNNNAGAIFTGLDLYICGVVGFIITGLLIWVTEYYTGTNYRPVRTVAKSSTTGHGTNVIQGLAISMEATAIPALIIVAGILYTNSLAGLYGIAIAVTAMLALTGMVVALDAYGPVTDNAGGIAEMSKLPKNVRKT

SEQ ID NO: 171732 - protein, 313 aa, Unknown
  Bacterial polypetide isolated from the Sargasso Sea
MKAMYKGFVITAISSLVILFPITKHVIGFTTEYVANGKSFNGLSLYFCGIIGLVITGLIIWITEYYTGTDYRPVKSVAQSSTTGHGTNVIQGLAVSMEATAVPALIIVGGILWTNHIAGLYGIAIAVTTMLALAGMVVALDAYGPVTDNAGGIAEMSNLPKNVRKTTDALDAVGNTTKAVTKGYAIGSAGLGALVLFAAYTEDIKHFSKVAGSNLEGITVTFDLSNPYVVVGLLIGGMLPYLFGSMGMQAVGRAGGAVVIEVRRQFKKIPGIMKRKAKPDYGKLVDLLTRAAIKEMVIPSLLPILSPIVLYIV

SEQ ID NO: 171733 - protein, 139 aa, Unknown
  Bacterial polypetide isolated from the Sargasso Sea
GTGKPEYGRCVDILTKSAIREMIIPSMLPVLSPIVVYFVILLIAGQSAALSCLGALLLGVIITGLFVAISMTAGGGAWDNAKKYIEDGNHGGKGSEAHKAAVTGDTVGDPYKDTAGPAVNPMIKITNIVALLLLASIAI

SEQ ID NO: 171734 - protein, 246 aa, Unknown
  Bacterial polypetide isolated from the Sargasso Sea
MEDSVSNILQLIILSGLLSIVYGFFTGKNILNASAGSTKMQEIASAIQIGAKAYLNRQYKTIAIVGVVVLIIISFAFSILVGIGYLIGATLSGIAGYVGMLVSVQANVRTAEASRKGLAHGLSIAFKSGAVTGMLVAGLALLSIAVYYYLLLSNGIDEREIVNALVALGFGASLISIFARLGGGIFTKGADVGADLVGKVEAGIPEDDPRNPAVIADNVGDNVGDCAGMAADLFETYAVTIVATMV

SEQ ID NO: 171735 - protein, 286 aa, Unknown
  Bacterial polypetide isolated from the Sargasso Sea
MGASVVALFSRVGGGIFTKSADVGADLVGKIEAGIPEDDPRNPGVIADNVGDNVGDVAGMGSDIFESYCGSMIASIAIAYTLGNQDMMMLPLALAATGLIASIIGIFIVKLQSAKAPASALRSGTLLAPVIFVAMAYFIIDSFDDVGMNVWWCVIAGAVGGVLIGLITEFYTGGSPVRKIAESGETGSATVMISGLSVGMQSVVIPIVILALIILVSTYLSDIYGVGIAAVGMLATVGITMAIDAYGPVADNAGGIAEMSGMGEEVREITDSLDELGNTTAAIGKG

SEQ ID NO: 171736 - protein, 303 aa, Unknown
  Bacterial polypetide isolated from the Sargasso Sea
IGGACILTSIIGTFFVRLGKSKNIMTALYKGFIVTAISSLIVLYPITDWVIGFDTVYNVNDKSFNGMSLYYCGIIGLIITGLIIWVTEYYTGTNFRPVKSVASSSTTGHGTNVIQGLAVSMEATAIPALIIVAGILFTNSIAGLYGIAIAVTTMLALAGMVVALDAYGPVTDNAGGIAEMSNLPKNVRKTTDALDAVGNTTKAVTKGYAIGSAGLGALVLFAAYTEDIKFFSQVKGSNLENVIVTFDLSNPFVVVGLLVGGMLPYLFGSMGMQAVGRAGGAVVVEVRRQFKKIPGIRKEKQNL

SEQ ID NO: 171737 - protein, 314 aa, Unknown
  Bacterial polypetide isolated from the Sargasso Sea
SNTRTAAAAQDKGPATALSISFYGGSIMGLCVASLGLLGLGGLFFFLGEGHYLEGFGMGASVVALFSRVGGGIFTKSADVGADLVGKVEAGIPEDDPRNPGVIADNVGDNVGDVAGMGSDIFESYCGSMIATIAIAYTIQSADSESLMMLPLLLASIGLVASLVGIFIVRTQSSQSPAAALRFGTMGSPVIFIVMAYFLVQSMSITDGVWVWGCVLTGAVGGVLIGLITEYYTGSTPVRKIAKSGETGSATVMITGLSVGMQSVVIPIFVLASIIFVSTSFYGLYGVGIAAVGMLATVGITMAIDAYGPVADNA

SEQ ID NO: 171738 - protein, 277 aa, Unknown
  Bacterial polypetide isolated from the Sargasso Sea
KASTTGHGTNVIQGLAVSMEATALPAIVIVIGIVLTYQLAGLFGIAIAVTAMLALAGMVVALDAYGPVTDNAGGIAEMSNLDENVRKTTDALDAVGNTTKAVTKGYAIGSAGLGALVLFAAYVEDLKLIPKLTPNFSLENPYVVVGLLIGGLLPYLFASMGMMAVGRAGGAVVEEVRKQFADNPGIMTGDSKPDYSKSVDMLTRSAIKEMIVPSMLPVLSPIVLFFIVSFVADQNAAVSSVGAMLLGVIVTGIFVAISMTAGGGAWDNAKKFVEDGN

SEQ ID NO: 171739 - protein, 323 aa, Unknown
  Bacterial polypetide isolated from the Sargasso Sea
VAGLALLSISVYYLILDLYSVSEETLKHALVALGFGASLISIFARLGGGIFTKGADVGADLVGKVEAGIPEDDPRNPAVIADNVGDNVGDCAGMAADLFETYAVTIVATMVLATIFFSGEIAHMMTIYPMAIGGSCLVASIIGTFFVRLGSSQSIMGALYKGFIASAILSLIFIYPVTQIVLGDMSKEFTFGDTTFSGTSLYICSIIGIVITGLLIWITEYYTGTNYRPVQSVAKASTTGHGTNVIQGLAVSMEATALPALVIVIGIVMTFQLAGLFGIAIAVTAMLALAGMVVALDAYGPVTDNAGGIAEMSNLDENVRKTT

SEQ ID NO: 171740 - protein, 175 aa, Unknown
  Bacterial polypetide isolated from the Sargasso Sea
MSYSKIPAGKDLPNDIYVAIEIPANHAPIKYEIDKDSDTLFVDRFMATPMFYPANYGFIPNTLADDGDPLDVLVVTPYPVAPGSVIRARPVGVLNMTDDGGGDAKVVAVPHDKLSQLYVDVKEYTDLPALLIQQIEHFFANYKDLEKGKWVKIEGWEGADAARAAITKSVAAYKG

SEQ ID NO: 171741 - protein, 317 aa, Unknown
  Bacterial polypetide isolated from the Sargasso Sea
MLVAGFALLSIAIFYFVLHNSGSFPGREIVAPLVSLGFGASLISIFARLGGGIFTKGADVGADLVGKVEAGIPEDDPRNPAVIADNVGDNVGDCAGMAADLFETYVVTVVATMVLASIFFMENSYTMMIFPLAIAGVCALTSIIGTYFVRLGKSNNIMAALYRGFAVSAILSAVLLYFVTDYIVGLNNVLVVEGTSTKFTGMSLFICGLLGLIITGLIIWVTEYYTGTNYRPVQSIAQSSTTGHGTNVIQGLAISLEATALPALIIVAGIISTYSLAGLFGIAIAVTTMLALAGMVVALDAYGPVTDNAGGIAEMSN

SEQ ID NO: 171742 - protein, 175 aa, Unknown
  Bacterial polypetide isolated from the Sargasso Sea
LPYWFGSMGMQAVGRAGGAVVVEVRRQFKKYPGIMKRKQKPDYAKLVDLLTVAAIKEMIVPSLLPVLSPVVLYFIILAIGGQVAALAAVGAMLLGVIITGLFVAVSMTAGGGAWDNAKKYIEDGNHGGKGSEAHKAAVTGDTVGDPYKDTAGPAVNPMIKITNIVALLLLAVIAG

SEQ ID NO: 171743 - protein, 234 aa, Unknown
  Bacterial polypetide isolated from the Sargasso Sea
SLGFGASLISIFARLGGGIFTKGADVGADLVGKVEAGIPEDDPRNPAVIADNVGDNVGDCAGMAADLFETYVVTVVATMVLASIFFVDNSYTMMFYPLAIAGVCALTSIIGTYFVRLGKNNNIMAALYRGFAVSAILSAVLLYFVTDYVVGLDTNLFVDGTNINFTGLSLFFCGLLGLIITGLIIWVTEYYTGTNYRPVQSIAQSSTTGHGTNVIQGLAISLEATALPALIIVA

SEQ ID NO: 171744 - protein, 267 aa, Unknown
  Bacterial polypetide isolated from the Sargasso Sea
YVGMNISVRSNVRTTQAASSSLAEGLSVSFKAGAVTGMLVAGFALLSIALYYFVLDNSGLFPGREIVAPLVSLGFGASLISIFARLGGGIFTKGADVGADLVGKVEAGIPEDDPRNPAVIADNVGDNVGDCAGMAADLFETYVVTVVATMVLSSIFFSDLSSMMMYPLAIAGVCTLASIIGTYFVKLGKSENIMVALYKGFAVSAVLSAILLYFITDHVIGLGSVFTVEDKSFSGMSLFYCGLLGLIITGLIIWVTEYYTGTNYRPV

SEQ ID NO: 171745 - protein, 250 aa, Unknown
  Bacterial polypetide isolated from the Sargasso Sea
MGASVVALFSRVGGGIFTKSADVGADLVGKIEAGIPEDDPRNPGVIADNVGDNVGDVAGMGSDIFESYCGSMIASIAIAYTLGNQDMMMLPLALAATGLIASIIGIFIVKLQSAKAPASALRSGTLLAPVIFVAMAYFIINSFDGVGMNVWWCVIAGAVGGVLIGLITEYYTGGGPVKKIAESGETGSATVMISGLSVGMQSVVIPIVILAGIILTSTQLSGIYGVGIAAVGMLATVGITMAIDAYGPVA

SEQ ID NO: 171746 - protein, 187 aa, Unknown
  Bacterial polypetide isolated from the Sargasso Sea
PFVVAGLLIGGMLPYLFGSMGMQAVGRAGGAVVIEVRRQFKKIPGIMKGKRKPDYGRLVDLLTRAAIKEMIIPSLLPVLSPIILYFIILQIGGLEAALSSLGAMLLGVIITGLFVAVSMTAGGGAWDNAKKYIEDGNYGGKGSEAHKSAVTGDTVGDPYKDTAGPAVNPMIKITNIVALLLLAVIAH

SEQ ID NO: 171747 - protein, 310 aa, Unknown
  Bacterial polypetide isolated from the Sargasso Sea
TKGADVGADLVGKVEAGIPEDDPRNPAVIADNVGDNVGDCAGMAADLFETYAVTIVATMLIATITFSGNLLLPSIELPLLIGGVCIIASIIGSFFVRLGSNNNIMGALYKGFIASAAFSALFIYFSVDYLFGDTEHATPFFLCCIVGLLVTALIIWVTEYYTSTEYRPVKSIAKSSETGHGTNVIQGLAISMEATAIPAIIIAIGIVVSFNIAGIYGISLAATTMLALAGMVVALDAYGPVTDNAGGIAEMSELDENVRKTTDALDAVGNTTKAVTKGYAIGSAGLAALVLFAAYTYDLNHYFSDLQISL

SEQ ID NO: 171748 - protein, 171 aa, Unknown
  Bacterial polypetide isolated from the Sargasso Sea
FWFMGMQAVGRAGGAVVVEVRRQFKKFPGIMKRKQKPDYAKLVDLLTVAAIKEMIIPSLLPVLSPVVLYFIILSIGGQVAALAAVGAMLLGVIITGLFVAVSMTAGGGAWDNAKKYIEDGNHGGKGSEAHKAAVTGDTVGDPYKDTAGPAVNPMIKITNIVALLLLAVIAG

SEQ ID NO: 171749 - protein, 271 aa, Unknown
  Bacterial polypetide isolated from the Sargasso Sea
LILAVLVFFALGWETATAVLVGASSSALAGFIGMYAATKANTRTAAAAQDSGAASALSISFYGGSIMGLCVASLGLLGLGGLFYFLGEGHYLEGFGMGASVVALFSRVGGGIFTKSADVGADLVGKVEAGIPEDDPRNPGVIADNVGDNVGDVAGMGSDIFESYCGSMIATIAIAYTMTEANNGPLMSLPLALASIGLVSSILGILIVRAQSAKAPAAALRTGTIGSPVIFIALAFGLISYLDISLNVWFCVLTRCCRRCINRTNNRILYW

SEQ ID NO: 171750 - protein, 310 aa, Unknown
  Bacterial polypetide isolated from the Sargasso Sea
NVRTAEASRKGLAQGLSVAFKSGAVTGMLVAGLALLSIAVYYYILLKSNVDEREIVNALVALGFGASLISIFARLGGGIFTKGADVGADLVGKVEAGIPEDDPRNPAVIADNVGDNVGDCAGMAADLFETYAVTIVATMVLSSIFFVGDLNMMIYPLTIGAACLLTSIIGTFFVKLGKNNNVMNALYKGFIVSALTSLVILWPVTDHVIGFTNEYTVNDKNFNGMDLYYCGVIGLVITGLLIWITEYYTGTSYRPVKSVALSSTTGHGTNVIQGLAVSMEATAIPAIIIVAGILITNSIAGLFGIAMQYH

SEQ ID NO: 171751 - protein, 271 aa, Unknown
  Bacterial polypetide isolated from the Sargasso Sea
MLVAGLALLSFQFYYLLLVSYSVDENILKNSLVGLGFGASLISIFARLGGGIFTKGADVGADLVGKVEAGIPEDDPRNPAVIADNVGDNVGDCAGMAADLFETYAVTVVATMVLAMIFFPGSSSLLIYPMAICGCCLVASIIGTFFVRLGKSESIMGALYKGFIGSSILSLLFMYPITQSVIGFGDISNASFTGMSLYICAIIGLVITGLLIWITEYYTGTNYRPVQSIAKASTTGHGTNVIQGLAVSMEATALPALVIVIGIVLTFQLAG

SEQ ID NO: 171752 - protein, 293 aa, Unknown
  Bacterial polypetide isolated from the Sargasso Sea
MYLAISSGIIAMLFAFWKTSWINKQDQGTEKMERIGKDISDGAMAFLKAEYRILAIFVLVVALLLGFANYNKDGSSSLVALSFIIGALTSGLAGFLGMRVATKANNRTTHAARTGLAPALNVAFTGGSVMGLSVVGLGVIGLSILFMFYLSYFSSDYDKILNVISGFSLGASSIALFARVGGGIYTKAADVGADLVGKVEAGIPEDHPLNPATIADNVGDNVGDVAGMGADLFESYVGSIIGSMVLGATILSFGSFDTSFVILPLVIASSGIIVSIIGTFLVSVKEGGNPQKA

SEQ ID NO: 171753 - protein, 97 aa, Unknown
  Bacterial polypetide isolated from the Sargasso Sea
SVVADQNAAVSAVGAMLLGVIVTGIFVAISMTAGGGAWDNAKKYVEDGNFGGKGSEAHKAAVTGDTVGDPYKDTAGPAVNPMIKITNIVALLLLAAL

SEQ ID NO: 171754 - protein, 136 aa, Unknown
  Bacterial polypetide isolated from the Sargasso Sea
ESKPDYSRSVDMLTRSAIKEMIIPSMLPVLSPIILFFIVSIVTDQNAAVSAVGAMLLGVIVTGIFVAISMTAGGGAWDNAKKYVEDGNFGGKGSEAHKAAVTGDTVGDPYKDTAGPAVNPMIKITNIVALLLLAAL

SEQ ID NO: 171755 - protein, 216 aa, Unknown
  Bacterial polypetide isolated from the Sargasso Sea
MEVLIYAFKSGAITGMLVVGLALLGLAGYYTILREFVDPNSSDGMRHILEALVALGFGASLISIFARLGGGIFTKGADVGSDLVGKIEAGIPEDDPRNAGVIADNVGDNVGDCAGMAADLFETYAVTLVGTMLLGAIYFSGSAQETMMLLPLIIGAACILASVIATSFVKLGANNSIMGALYKGFIASAAISAALIAGIISQIIGWDTAYQTDGGE

SEQ ID NO: 171756 - protein, 282 aa, Unknown
  Bacterial polypetide isolated from the Sargasso Sea
MVYPLSIGGACIITSIIGTFFVKLGNSKNIMAALYKGFIVTAVTSVAILYPITDYVLGLENSYIISEKSFTGMSLYICGIIGLAITGLIIWVTEYYTGTNYRPVKSVASSSTTGHGTNVIQGLAVSMEATAVPALIIVSGILLTNYIAGLFGIAIAVTTMLALAGMVVALDAYGPVTDNAGGIAEMSNLPKNVRKTTDALDAVGNTTKAVTKGYAIGSAGLGALVLFAAYTEDIKHFSKVAGSQLEGIVVTFDLSNPFVVVGLLVGGMLPYLFGSNGYAGSW

SEQ ID NO: 171757 - protein, 280 aa, Unknown
  Bacterial polypetide isolated from the Sargasso Sea
MSGTVETILLYTIGAGLLSIVYGFLTGKNILNSSAGNAKMQDIASAIQIGAKAYLARQYKTIAIVGAVVLVIVSIAFSPLVGLGYLIGAALSGIAGYVGMLVSVEANVRTAEASRKGLAQGLSVAFKSGAVTGMLVAGLALLAIAVYYYILLKSNVEEREIVNALVALGFGASLISIFARLGGGIFTKGADVGADLVGKVEAGIPEDDPRNPAVIADNVGDNVGDCAGMAADLFETYAVTIVATMVLSSIFFVGDLNMMIYPLSNGAACLLTSMLEHFLL

SEQ ID NO: 171758 - protein, 311 aa, Unknown
  Bacterial polypetide isolated from the Sargasso Sea
MAADLFETYAVTIVATMVLSSIFFPNDMTMMIYPLTIGGACILTSIIGTFFVKLGKSKNVMNALYKGFVVSAISSLIILYPVTDYVLGLENSYNLNNKSFSGMSLYYCGVIGLVITGLLIWVTEYYTGTGYRPVRSVANSSTTGHGTNVIQGLAISLEATAIPALIIVAGILLTNHIAGLYGIAIAVTTMLALAGMVVALDAYGPVTDNAGGIAEMSKLPNNVRKTTDALDAVGNTTKAVTKGYAIGSAGLGALVLFAAYTEDIKHFSKVAGSKLEGIVVTFDLSYPYVVVGLLIGGMLPYLFGSMGMQAV

SEQ ID NO: 171759 - protein, 278 aa, Unknown
  Bacterial polypetide isolated from the Sargasso Sea
MVVALDAYDPVTDNAGGIAEMSKLPKNVRKTTDALDAVGNTTKAVTKGYAIGSAGLGALVLFAAYTEDIKFFSTVSGSRLEGINVSFDLSNPFVVIGLLVGGMLPYLFGSMGMQAVGRAGGAVVVEVRRQFKKIPGIMKGKRKPDYGKLVDLLTKAAIKEMIIPSLLPVLSPIILYLIIYSIGGLEAALSSVGAMLLGVIVTGLFVAISMTAGGGAWDNAKKFIEDGNYGGKGSESHKAAVTGDTVGDPYKDTAGPAVNPMIKITNIVALLLLAVIAH

SEQ ID NO: 171760 - protein, 303 aa, Unknown
  Bacterial polypetide isolated from the Sargasso Sea
YPLIIAGVCIVSSLVGTFYVKLGESQNIMGALYKGLIITAIASVILIYFATEFLINMDKVIVNKDLFIESFSGIDLFYCSLVGLTVTGLIVWITEYYTSTEFKPVKSVANSSQSGHATNIIQGLAVSMQSTALPTFVIILGIIFSYKFAGLYGISIAATTMLALAGMIVALDAYGPVTDNAGGIAEMSNLSEEVRKTTDALDAVGNTTKAVTKGYAIGSAGLASLVLFGAYTQDLKYYFPDLDVKFSLDDPYVVVGLLIGGMLPYLFGSMGMTAVGKTATKIVNEVRRQFSENKGIMTGSSKR

SEQ ID NO: 171761 - protein, 303 aa, Unknown
  Bacterial polypetide isolated from the Sargasso Sea
DVGADLVGKVEAGIPEDDPRNPAVIADNVGDNVGDCAGMAADLFETYAVTIVATMVLSSIFFIGDLNMMIYPLTIGAACLITSIIGTFFVKLGNNNNVMNALYKGFIVSALASLAILWLVTDYVIGFNNEYTVNEKTFNGMDLYYCGVIGLVITGLLIWITEYYTGTGYRPVKSVALSSTTGHGTNVIQGLAVSMEATAIPALIIVAGILTTNTIAGLFGIAIAVTTMLALAGMVVALDAYGPVTDNAGGIAEMSNLDKKVRKTTDALDAVGNTTKAVTKGYAIGSARFGSFSFICSIYRRYK

SEQ ID NO: 171762 - protein, 279 aa, Unknown
  Bacterial polypetide isolated from the Sargasso Sea
GAAGYVGMLISVQANVRTAEASRKGLASGLNIGFKSGAVTGMLVAGLALLSISIYYLILLKLSIDSREIINALVGLGFGASLISIFARLGGGIFTKGADVGADLVGKVEAGIPEDDPRNPAVIADNVGDNVGDCAGMAADLFETYAVTIVATMVLSSIFFENNLAMMIYPLAIGGACVLTSIAGTFFVKLGSSKNIMGALYKGFIATAIFSVIILYPVTDKIIGLDSIYTSTNAEFTGFGLYTCGIIGLIITGLIIWVTEYYTGTKFRPVLSVARSSTT

SEQ ID NO: 171763 - protein, 246 aa, Unknown
  Bacterial polypetide isolated from the Sargasso Sea
LAGMVVALDAYGPVTDNAGGIAEMSNLDKKVRKTTDALDAVGNTTKAVTKGYAIGSAGLGALVLFAAYTEDIKHFSKEAGSSLEGIVVTFDLSNPYVVVGLLIGGMLPYLFGSMGMQAVGRAGGAVVVEVRRQFKKFPGIMKRKQKPDYAKLVDLLTVAAIKEMIIPSLLPVLSPVVLYFIILSIGGQVAALAAVGAMLLGVIITGLFVAVSMTAGGGAWDNAKKYIEDGNHGGKGSEAHKAAVTG

SEQ ID NO: 171764 - protein, 85 aa, Unknown
  Bacterial polypetide isolated from the Sargasso Sea
AMLLGVIITGLFVAVSMTAGGGAWDNAKKYIEDGKFGGKGSEAHKAAVTGDTVGDPYKDTAGPAVNPMIKITNIVALLLLAVIAG

SEQ ID NO: 171765 - protein, 265 aa, Unknown
  Bacterial polypetide isolated from the Sargasso Sea
MAGGIAEMSNLDENVRKTTDALDAVGNTTKAVTKGYAIGSAGLGALVLFAAYTEDLDHFAKDPASPLYGIEVSFDLSNPYVVVGLLLGGLLPFLFGALSMTAVGRAAGSVVLEVRRQFKEIPGIMEGKGKPEYGTCVDILTKSAIKEMIVPSMLPVLSPIVVYFVILFIAGQAAALSCLGALLLGVIITGLFVAISMTAGGGAWDNAKKYIEDGNHGGKGSEAHKAAVTGDTVGDPYKDTAGPAVNPMIKITNIVALLLLAAISI

SEQ ID NO: 171766 - protein, 283 aa, Unknown
  Bacterial polypetide isolated from the Sargasso Sea
GLFVLVIVTYFLGIWVGLGYFIGAFLSAVAGYVGMLVSVQANVRTAEASRKGLSEGLAISFKSGAVTGMLVAGLALLSISIYYLLLVTLNIDEREIINALVGLGFGASLISIFARLGGGIFTKGADVGADLVGKVEAGIPEDDPRNPAVIADNVGDNVGDCAGMAADLFETYAVTIVATMVLASIFFMNDFSMIIYPLAIGGSCIITSIIGTFFVKLGKSKNIMGALYKGFIATAILSLIILYPVTDKIIGIDNIYKSSNASFTGLGLYFCGAIGLAITGLII

SEQ ID NO: 171767 - protein, 189 aa, Unknown
  Bacterial polypetide isolated from the Sargasso Sea
SNPFVVVGLFLGGMLPYLFGSMGMQAVGRAGGAVVLEVRRQFKKIPGIMKRKSKPDYGKLVDLLTKAAIKEMIVPSLLPVLSPIVLYIFILPIGGKEAALSAVGAMLLGVIITGLFVAISMTAGGGAWDNAKKYIEDGNYGGKGSEAHKAAVTGDTVGDPYKDTAGPAVNPMIKITNIVALLLLAVIAG

SEQ ID NO: 171768 - protein, 231 aa, Unknown
  Bacterial polypetide isolated from the Sargasso Sea
GRKKVIFNFQGSIIASICGLLLAFYFARNVLAIPVKNEEVNNLSLAIREGSMAFLRRQYTWVSIFVVVLAILISTLTEWGMPWGSVAFLIGAIFSGLAGFIGMRIATAANGRTAEAAKNGGTLEALPVAFRGGAVMGFTVAGLGLLGVSAGYWIFVEVLQVPNSYDVLAAIGLGGSSIALFARVGGGIYTKAADVGADLVGKVEAGIPEDDPRNPATIADNVGDNVGDVAG

SEQ ID NO: 171769 - protein, 266 aa, Unknown
  Bacterial polypetide isolated from the Sargasso Sea
MDYINLIPLAGIIALIFVFIKNASVSKKEVGNAKMAKIAKNIADGAMAFLKAEYKILSVFVIITAVLLAFKGINEGSSWLVAVSFVVGALCSGLAGFIGMQVATKANVRTTNAAQHSLGKALEIAFSGGSVMGMGVVGLGVLGVGSLFIIYRPMFDDINTVIQVLSGFSLGASSIALFARVGGGIYTKAADVGADLVGKVEAGIPEDHPLNPATIADNVGDNVGDVAGMGADLFESFVGSIIGAMVLGAAFISLSEFSGIEINAVL

SEQ ID NO: 171770 - protein, 313 aa, Unknown
  Bacterial polypetide isolated from the Sargasso Sea
MAADLFETYAVTIVATMVLSSIFFVGDIKMMIYPLTIGGACILTSIIGTFFVKLGSTNNVMNALYKGFVVSAITSLAILYPVTDYVIGFTNEYTVNDKTFNGMSLYYCGVIGLLITGLLIWITEYYTGTNYRPVRSVAASSTTGHGTNVIQGLAISMEATAIPALVIVSGILLTNYIAGLFGIAIAVTTMLALAGMVVALDAYGPVTDNAGGIAEMSNLDKKVRKTTDALDAVGNTTKAVTKGYAIGSAGLGALVLFAAYTEDIKHFSKEAGSALEGIVVTFDLSNPYVVVGLLIGGMLPYLFWFMGMQAVGR

SEQ ID NO: 171771 - protein, 301 aa, Unknown
  Bacterial polypetide isolated from the Sargasso Sea
VGMQSVVLPIACIILIIYISTELTGLYGVGIAAVGMLSTVGITMAIDAYGPVADNAGGIAEMAGMPSETRVITDELDEQGNTTAAIGKGFAIGAAALAALAIISAFVETVSANRAEPLQLVLSNPTVLIGIFIGGAIPFLIASITMTAVGDAAFEMINEIRRQFKEIPGLLEGNAEPDTAKCVDIATAAALKKMLLPGVIAVSAPPLVGLGIGAEALGGLLAGGLLVCVLMALFMANAGGAWDNAKKYIEKGNLGGKGTDTHSAAVVGDTVGDPFKDTSGPSMNILINVMAIVSLVIAPLL

SEQ ID NO: 171772 - protein, 316 aa, Unknown
  Bacterial polypetide isolated from the Sargasso Sea
GNGRTAMAAQKDGQAGALAISYNGGAVMGLSVGGLGLLGISLVAYFLGAGESGSTNISHAAGFGMGASSIALFARVGGGIYTKAADVGADLVGKVEAGIPEDDPRNPGVIADNVGDNVGDVAGMGADIFESFVGSIIAAMVIADNYDTMNADYVILPIFLGLIGYLASLIGVFSMEFLKNSEPGAALRNTTFIAAGLFWIAGWLGIEILGLDTGTEPMIAVIIGSIVGILIGLVTEYYTGIEDVMGLKTKAIPHIGQMSKTGPATNAIAGLSVGMMSTFIPIILICFGIFGANHFMMDGHFQDDPGGYMPEFGLYG

SEQ ID NO: 171773 - protein, 289 aa, Unknown
  Bacterial polypetide isolated from the Sargasso Sea
IAVTSMLALTGMVVALDAYGPVTDNAGGIAEMSKLPKNVRKTTDALDAVGNTTKAVTKGYAIGSAGLGALVLFAAYTEDIKFYALDKTSSLYNMEVSFDLSNPYVVIGLLIGGLLPYLFGSMGMQAVGRAGGAVVIEVRRQFKKIPGIMKGKRKPDYGRLVDLLTKAAIKEMIVPSLLPVLSPIFLYIVILLIAGKEAALAALGAMLLGVIVTGLFLAISMTAGGGAWDNAKKYIEDGNFGGKGSDAHKAAVTGDTVGDPYKDTAGPAVNPMIKITNIVALLLLSIIAH

SEQ ID NO: 171774 - protein, 246 aa, Unknown
  Bacterial polypetide isolated from the Sargasso Sea
MAADLFETYAVTIVATMLLATISFSGSEVVKGMEYPLLIGGVCILASIIGTFFVKLGSSNNIMAALYKGFLATAIISAILIFFVSKYTFTTGFMSYFYCALVGLIVTGLLVWITEYYTSTEYRPVKSIAQSSETGHGTNVIQGLAVSLEATAIPAIIIAVGILVSFQLNGIYGIAVSATTMLALAGMVVALDAYGPVTDNAGGIAEMCELDEEVRKTTDALDAVGNTTKAVTKGYAIGSAGLAAIS

SEQ ID NO: 171775 - protein, 81 aa, Unknown
  Bacterial polypetide isolated from the Sargasso Sea
MGASVVALFSRVGGGIFTKSADVGADLVGKIEAGIPEDDPRNPGVIADNVGDNVGDVAGMGSDIFESYCGSMIASIAIAYT

SEQ ID NO: 171776 - protein, 222 aa, Unknown
  Bacterial polypetide isolated from the Sargasso Sea
MSILNLVIFSGILSIIYGFWAGNSVLKSNAGSEKMQEISSAIQVGAQAYLNRQYTTIAIVGAVICVLLYLFFRDFWVVGGFLIGAILSGAAGYIGMIISVRANVRTAQAASESLGKGLNVAFKAGAVTGMLVAGLALLSISVYYAILDSYLVSDETLKHALVALGFGASLISIFARLGGGIFTKGADVGADLVGKVEAGIPEDDPRNPAVIADNVGDNVGDC

SEQ ID NO: 171777 - protein, 280 aa, Unknown
  Bacterial polypetide isolated from the Sargasso Sea
HILLNFGNSKNIMLALYKGFVVTAITSLIVLYPITDYVLGLDKIYNIGTKQFTGLNLYHCGVIGLVITGLIIWVTEYYTGTSYRPVKSVAHSSTTGHGTNVIQGLAVSLEATAIPALIIVAGILVTNYIAGLFGIAIAVTSMLALAGMVVALDAYGPVTDNAGGIAEMSKLPKNVRKTTDALDAVGNTTKAVTKGYAIGSAGLGALVLFAAYTEDIKHFSKIAGSNLEGIVVTFDLSNPFVVVGLLVGGMLPYLFGSMGMQAVGRAGGAVVIEVRRQFKK

SEQ ID NO: 171778 - protein, 285 aa, Unknown
  Bacterial polypetide isolated from the Sargasso Sea
VLSLSRRKTYSGLTLFYCGIIGLLITGALIWVTEYYTGTQYKPVQSVAKASTTGHGTNVIQGLAVSMEATAIPAIIIVAGIISTYLLAGIFGIAIAVTTMLALAGVVVALDAYGPVTDNAGGIAEMAELDSDVRDTTDALDAVGNTTKAVTKGYAIGSAGLAALVLFAAYTEDLHLYFPDITVDFSLSNPFVVVGLFIGGLLPYLFGALSMTAVGRAAGSVVNEVRRQFKEIDGIMEGTGKPDYSKAVDLLTRSAIKEMIIPSLLPVLAPILLYVIILLIADQGS

SEQ ID NO: 171779 - protein, 109 aa, Unknown
  Bacterial polypetide isolated from the Sargasso Sea
MVLPGLLAVLVPILVGFVGGKEMLGGLLAGVTACGVLMAIFQSNSGGAWDNAKKTIEEEGRKGTDAHKAAVVGDTVGDPFKDTSGPSLNILIKLMSVVALVIASSISGI

SEQ ID NO: 171780 - protein, 51 aa, Unknown
  Bacterial polypetide isolated from the Sargasso Sea
MANFGGKGSEAHKAAVTGDTVGDPYKDTAGPAVNPMIKITNIVALLLLAAL

SEQ ID NO: 171781 - protein, 267 aa, Unknown
  Bacterial polypetide isolated from the Sargasso Sea
WIFTKGADVGADLVGKVEAGIPEDDPRNPAVIADNVGDNVGDCAGMAADLFETYAVTIVATMVLASIFFQDNASLMIYPLAIGGGCIIASIIGTFFVKLGKSKNIMGALYKGFIVTAIISLILLYPITSNIIGLDSTFKVNDQNFTGLDLYYCGVIGLVVTGLIIWVTEYYTGTNYRPVRSVAKSSTTGHGTNVIQGLAVSMEATALPALIIVAGIIITNQLAGLFGIAIAVTAMLALTGMVVALDAYGPVTDNAGGIAEMSKLPKN

SEQ ID NO: 171782 - protein, 149 aa, Unknown
  Bacterial polypetide isolated from the Sargasso Sea
MIEEVRRQFREIPGLREGAEGVIPDSARCVAISTSASLKEMLAPGILAVVIPLILGFVSIDSLGGFLAGALVAGFCLAIFMANAGGAWDNAKKYIESGELGGKGSEPHKAAVVGDTVGDPFKDTSGPSMNILIKVMTIVSLVFASAFVG

SEQ ID NO: 171783 - protein, 269 aa, Unknown
  Bacterial polypetide isolated from the Sargasso Sea
YKTIGVVGIIVLGIVTYFFSYLVGLGYFIGAFLSGVAGYVGMLISVKANVRTAEASRKSLQAGLTIAFKSGAITGLLVAGLALLAITIYYIILIRLDIDNREIINALVALGFGASLISIFARLGGGIFTKGADVGADLVGKVEAGIPEDDPRNPAVIADNVGDNVGDCAGMAADLFETYAVTIVATMVLSSIFFPTDFNLMIYPLAIGGSCIITSIIGTWFVKLGKSKNIMGALYKGFVVTAITSLLILYPVTDSIVGLSEIYNNNEKV

SEQ ID NO: 171784 - protein, 277 aa, Unknown
  Bacterial polypetide isolated from the Sargasso Sea
KGLAAVLYGIITSRQILSLNAGNEKMQEIAKAIQEGAKAYLNRQYLTIAIVGIVIFILIWIIFDLFSAIGFLIGAFFSGAAGYVGMNISVRSNVRTTQAASSSLAEGLSVSFKAGAVTGMLVAGFALLSVAAYYFVLDNSGNFEGRLIVAPLVSLGFGASLISIFARLGGGIFTKGADVGADLVGKVEAGIPEDDPRNPAVIADNVGDNVGDCAGMAADLFETYVVTVVATMVLASIFFTGELTSKMMMYPLSIAGVCTIASIIGNLFCKDWVIVKI

SEQ ID NO: 171785 - protein, 283 aa, Unknown
  Bacterial polypetide isolated from the Sargasso Sea
LALAGMVVALDAYGPVTDNAGGIAEMSNLDKKVRKTTDALDAVGNTTKAVTKGYAIGSAGLGALVLFAAYTEDIKHFSKEAGSALEGIVVTFDLSNPYVVVGLLIGGMLPYLFGSMGMQAVGRAGGAVVVEVRRQFKKYPGIMKKKQKPDYAKLVDLLTVAAIKEMIIPSLLPVLSPVVLYFIILSIGGQVAALASVGAMLLGVIITGLFVAVSMTAGGGAWDNAKKYIEDGNHGGKGSEAHKAAVTGDTVGDPYKDTAGPAVNPMIKITNIVALLLLAVIAG

SEQ ID NO: 171786 - protein, 247 aa, Unknown
  Bacterial polypetide isolated from the Sargasso Sea
MSTSIETILLYTIGAGFLSIVYGFFTGKNILNSSAGNTKMQDIASAIQIGAKAYLARQYKTIALVGVVVLIIVSVAFSPMVGLGYLIGAALSGIAGYVGMLVSVEANVRTAEASRKGLAQGLSVAFKSGAVTGMLVAGLALLSIAVYYFMLLKFNVDEREIVNALVALGFGASLISIFARLGGGIFTKGADVGADLVGKVEAGIPEDDPRNPAVIADNVGDNVGDCAGMAADLFETYAVTIVATMVL

SEQ ID NO: 171787 - protein, 308 aa, Unknown
  Bacterial polypetide isolated from the Sargasso Sea
NNYRPVKSVASSSTTGHGTNVIQGLAVSMEATAIPALIIVGGILLTNYIAGLFGIAIAVTTMLALAGMVVALDAYGPVTDNAGGIAEMSNLPKNVRKTTDALDAVGNTTKAVTKGYAIGSAGLGALVLFAAYTEDIKHFSKVAGSKLEGIVVTFDLSNPFVVVGLLVGGMLPYLFGSMGMQAVGRAGGAVVVEVRRQFKKIPGIMKRKAKPDYGKLVDLLTKAAIKEMIVPSLLPVLSPIVLYLFILPIGGQVAALSSVGAMLLGVIITGLFVAISMTAGGGAWDNAKKYIEDGNFGGKGSEAHKAAV

SEQ ID NO: 171788 - protein, 226 aa, Unknown
  Bacterial polypetide isolated from the Sargasso Sea
MYLEYSIVFICSILSLAYGAITIKKILEAPEGSDRMKEIAGAIQEGAQAYLTRQYLTISIVGVVITLVLFYLIDNPFVAVGFIIGAFLSGLAGFIGMFVSVRANVRTTEAATQSLSGALDISFKSGAITGFLVVGLGLFGLVSYYCFLNNHFGLSQGRETVEAMVALSFGASLISIFARLGGGIFTKGADVGADLVGKIEAGIPEDDPRNPAVIADNVGDNVGDCA

SEQ ID NO: 171789 - protein, 292 aa, Unknown
  Bacterial polypetide isolated from the Sargasso Sea
VSMEATAIPALIIVGGILLTNYIAGLFGIAIAVTTMLALAGMVVALDAYGPVTDNAGGIAEMSNLPKNVRKTTDALDAVGNTTKAVTKGYAIGSAGLGALVLFAAYTEDIKHFSKVAGSQLEGIIVTFDLSNPFVVVGLLVGGMLPYLFGSMGMQAVGRAGGAVVVEVRRQFKKIPGIMKRKAKPDYGRLVDLLTKAAIKEMIVPSLLPVLSPIVLYLFILPIGGQVAALSAVGAMLLGVIITGLFVAVSMTAGGGAWDNAKKYIEDGNFGGKGSEAHKAAVTGDTVGDPYK

SEQ ID NO: 171790 - protein, 283 aa, Unknown
  Bacterial polypetide isolated from the Sargasso Sea
GGACILTSIIGTFFVKLGNSKNIMLALYKGFIVTAVTSLILLYPLTDYVLGLEKTYNISEKTFTGMSLYYCGVIGLVITGLLIWVTEYYTGTNYRPVKSVASSSTTGHGTNVIQGLAVSMEATAIPALIIVGGILLTNYIAGLFGIAIAVTTMLALAGMVVALDAYGPVTDNAGGIAEMSNLPKNVRKTTDALDAVGNTTKAVTKGYAIGSAGLGALVLFAAYTEDIKHFSKVSGSKLENIVVTFDLSNPFVVVGLLVGGMLPYLFGSMGMQAVGRAGGAVVL

SEQ ID NO: 171791 - protein, 276 aa, Unknown
  Bacterial polypetide isolated from the Sargasso Sea
DCAGMAADLFETYAVTIVATMVLSSIFFIGDLNMMVYPLTIGAACLITSIIGTFFVKLGKNNNVMNALYKGFIVSAIASLLILWPVTDYVIGFSNEYTVNDKTFNGKDLYYCGVIGLVITGLLIWITEYYTGTGYRPVKSVALSSTTGHGTNVIQGLAVSMEATAIPAIIIVAGILITNSIAGLFGIAIAVTTMLALAGMVVALDAYGPVTDNAGGIAEMSNLDKKVRKTTDALDAVGNTTKAVTKGYAIGSAGLGALVLFAAYTEDIKHFSKEAG

SEQ ID NO: 171792 - protein, 214 aa, Unknown
  Bacterial polypetide isolated from the Sargasso Sea
YTEDIKHFSKVAGSNLEGIIVTFDLSNPFVVVGLLVGGMLPYLFGSMGMQAVGRAGGAVVVEVRRQFRKIPGIMKRKAKPDYGKLVDLLTKAAIKEMILPSLLPVLSPIVLYLFILPIGGQVAALSSVGAMLLGVIITGLFVAISMTAGGGAWDNAKKYIEDGNFGGKGSEAHKAAVTGDTVGDPYKDTAGPAVNPMIKITNIVALLLLAVIAG

SEQ ID NO: 171793 - protein, 300 aa, Unknown
  Bacterial polypetide isolated from the Sargasso Sea
VRLGKSKNIMGALYKGFIATSVLSLIIFYPVTDSVIGLDKVFTTEKNSFTGYSLYICGVAGLVITGLIIWVTEYYTGTNYRPVKSVANSSRTGHGTNVIQGLAVSMEATAIPALIIVVGILFTNHLAGLFGIAIAVTSMLALTGMVVALDAYGPVTDNAGGIAEMSKLPKNVRKTTDALDAVGNTTKAVTKGYAIGSAGLGALVLFAAYTEDIKFFSTVKGSKLENISVSFDLSNPFVVIGLLVGGMLPYLFGSMGMQAVGRAGGAVVIEVRRQFKKIPGIMKGKRKPDYGKLVDLLTKA

SEQ ID NO: 171794 - protein, 245 aa, Unknown
  Bacterial polypetide isolated from the Sargasso Sea
NVGDCAGMAADLFETYVVTVVATMVLSSIFFADISAMMMYPLAIAGVCTLASIVGTYFVKLGKSENIMAALYKGFAVSAILSAILLYFITDHVISLDAIFTVDDKSFSGMSLFYCGILGLIITGLIIWVTEYYTGTNYRPVQSIAQSSTTGHGTNVIQGLAISLEATALPAIIIVAGIIITHSLAGLFGIAIAVTTMLALAGMVVALDAYGPVTDNAGGIAEMSELDDKVRKTTDALDSVGNTTK

SEQ ID NO: 171795 - protein, 258 aa, Unknown
  Bacterial polypetide isolated from the Sargasso Sea
VTTMLALAGMVVALDAYGPVTDNAGGIAEMSNLPKNVRKTTDALDAVGNTTKAVTKGYAIGSAGLGALVLFAAYTEDIKHFSKVAGSNLEGIAVTFDLSNPYVVVGLLIGGMLPYLFGSMGMQAVGRAGGEVVIEVRRQFKKIPGIMKRKAKPDYGKLVDLLTKAAIKEMIIPSLLPILSPIVLYIVIYFIGGQVAALSSLGAMLLGVIITGLFVAVSMTAGGGAWDNAKKYIEDGKFGGKGSEAHKAAVTGDTVGDP

SEQ ID NO: 171796 - protein, 298 aa, Unknown
  Bacterial polypetide isolated from the Sargasso Sea
VFYVTFVVYFGVIYGVWATTQILKAPSGSKKMLEIASSIQIGAKAYLNRQYSTISIVGIVVTVLLFLTLGIFVAFGFVIGAVLSGVAGYIGMNISVRANVRTTEAAKTGLVPALDIAFKSGAITGMLVVGLGLLGVAGYYFFLKESGTDTRTLIEALVALSFGASLISIFARLGGGIFTKGADVGADLVGKVEAGIPEDDPRNPAVIADNVGDNVGDCAGMAADLFETYAVTIVATMLLATITFSGTNNIIQGMEYPLLIGGVCIIASIIGTFFVKLGSNNNIMRALYKGFIATAVIS

SEQ ID NO: 171797 - protein, 124 aa, Unknown
  Bacterial polypetide isolated from the Sargasso Sea
KAAIKEMIIPSLLPVLSPIVLYIIILPIGGQVAALSSVGAMLLGVIITGLFVAVSMTAGGGAWDNAKKYIEDGKFGGKGSEAHKAAVTGDTVGDPYKDTAGPAVNPMIKITNIVALLLLAVIAG

SEQ ID NO: 171798 - protein, 287 aa, Unknown
  Bacterial polypetide isolated from the Sargasso Sea
MDNNIIYVLVAGFLALIFSFWKTSWIEKQDQGTKKMVVIGSSIADGAMAFLRAEYRVLSVFVIAVAIILGVANKDNPESSMFIAFSFLIGAVASGLAGFLGMRVATKSNNRTTNAARDNLERALNVAFSGGSVMGLSVVGLGVLGLGGLFLLYTNMYGSDFESIGTVLNVLSGFSLGASSIALFARVGGGIYTKAADVGADLVGKVEAGIPEDHPLNPATIADNVGDNVGDVAGMGADLFESYVGSIIGSMVLGASILVSGSFDLNFVLLLMMIAASGILVSIIGDF

SEQ ID NO: 171799 - protein, 259 aa, Unknown
  Bacterial polypetide isolated from the Sargasso Sea
ADVGADLVGKVEKDIPEDDPRNPAVIANNVGDNVRDCAGMAADLFETYVVSIVATMVLAIIFQGAVTDLTIYPLLLAGSSIIASIIGSQFVSISTPKSSIMGALYKGFFMTLIISVVLFAVITHYSIGFDQYFQIGSKWYNGMDLFLCAVYGLLITLTLVFITEYYTSTEYRPVKSVAEASQTGHATNIIQGLAMGMESTAIPVLIIVAGIGLTFATAGLFGIAIAVTSMLALAGMVVALDAYGPVTDNACGIAEMSGL

SEQ ID NO: 171800 - protein, 309 aa, Unknown
  Bacterial polypetide isolated from the Sargasso Sea
MQDLGGGIFTKGADVGADLVGKVEAGIPEDDPRNPAVIADNVGDNVGDCAGMAADLFETYVVTVVATMVLASIFFIESSYTMMIFPLAIAGVCALTSIIGTYFVRLGKNNNIMSALYRGFAVSAILSAILLYFVTDYIVGLNSVLVVEGTSTQFTGMSLFICGILGLIITGLIIWVTEYYTGTNYRPVQSIAQSSTTGHGTNVIQGLAISLEATALPALIIVAGIISTYSLAGLFGIAIAVTTMLALAGMVVALDAYGPVTDNAGGIAEMSNLDENVRKTTDALDAVGNTTKAVTKGYAIGSAGLGALV

SEQ ID NO: 171801 - protein, 211 aa, Unknown
  Bacterial polypetide isolated from the Sargasso Sea
CGAYTEDLRYYFPDVETNFQLNDPYIVVGLFIGGLLPYLFGSMGMMAVGRAGSAVVVEVRRQFKEIPGIMEGTSKPEYGKCVDLLTKAAIKEMILPSMLPLFAPIVIYFIINAISGQAAAFSALGAMLMGTIVTGLFVALSMTAGGGAWDNAKKYIEDGNHGGKNSDAHHAAVTGDTVGDPYKDTAGPAVNPMIKIINIVAILLLAILSKF

SEQ ID NO: 171802 - protein, 214 aa, Unknown
  Bacterial polypetide isolated from the Sargasso Sea
YTEDIKHFSKVAGSELEGIVVTFDLSNPFVVVGLLVGGMLPYLFGSMGMQAVGRAGGAVVVEVRRQFKKIPGIMKRKSKPDYGKLVDLLTKAAIKEMIVPSLLPVLSPIVLYLFILPIGGQVAALSSVGAMLLGVIITGLFVAISMTAGGGAWDNAKKYIEDGNYGGKGSDAHKAAVTGDTVGDPYKDTAGPAVNPMIKITNIVALLLLAAIAG

SEQ ID NO: 171803 - protein, 65 aa, Unknown
  Bacterial polypetide isolated from the Sargasso Sea
GGAWDNAKKYIEDGNFGGKGSEAHKAAVTGDTVGDPYKDTAGPAVNPMIKITNIVALLLLAVIAG

SEQ ID NO: 171804 - protein, 279 aa, Unknown
  Bacterial polypetide isolated from the Sargasso Sea
TIVATMVLSSIFFPGDMSMMIYPLTIGGACILTSIIGTFFVKLGKSKNVMGALYKGFIVSALASLAVLYPVTDFVLGLENTYNLNDKSFSGMSLYYCGIIGLIITGLLIWVTEYYTGTNYRPVRSVAGSSTTGHGTNVIQGLAISLEATAIPALIIVAGILLTNHIAGLYGIAIAVTTMLALAGMVVALDAYGPVTDNAGGIAEMSKLPNSVRKTTDALDAVGNTTKAVTKGYAIGSAGLGALVLFAAYTEDIKHFSKVAGSKLEGIVVTFDLSNPYVV

SEQ ID NO: 171805 - protein, 276 aa, Unknown
  Bacterial polypetide isolated from the Sargasso Sea
VALDAYGPVTDNAGGIAEMSNLPKNVRKTTDALDAVGNTTKAVTKGYAIGSAGLGALVLFAAYTEDIKHFSKVTGSKLEGIVVTFDLSNPFVVVGLLIGGMLPYLFGSMGMQAVGRAGGAVVLEVRRQFKKIPGIMKRKAKPDYGKLVDLLTKAAIKEMIIPSLLPVLSPIVLYIIILPIGGQVAALSSVGAMLLGVIITGLFVAVSMTAGGGAWDNAKKYIEDGKFGGKGSEAHKAAVTGDTVGDPYKDTAGPAVNPMIKITNIVALLLLAVIAG

SEQ ID NO: 171806 - protein, 271 aa, Unknown
  Bacterial polypetide isolated from the Sargasso Sea
VKSVALSSTTGHGTNVIQGLAVSMEATAIPALIIVAGILITNSIAGLFGIAIAVTTMLALAGMVVALDAYGPVTDNAGGIAEMSNLNKKVRKTTDALDAVGNTTKAVTKGYAIGSAGLGALVLFAAYTEDIKHFSKEAGSALEGIVVTFDLSNPYVVVGLLIGGMLPYLFGSMGMQAVGRAGGAVVVEVRRQFKKFPGIMKRKQKPDYAKLVDLLTVAAIKEMIIPSLLPVLSPVVLYFVIFSIGGQVAALASVGDMLLGVIITGLFVAVS

SEQ ID NO: 171807 - protein, 277 aa, Unknown
  Bacterial polypetide isolated from the Sargasso Sea
ISVQANVRTAEASRKSLQSGLSIAFKSGAITGLLVAGLALLSIAIYYLVLINLNTESRDIINALVALGFGASLISIFARLGGGIFTKGADVGADLVGKVEAGIPEDDPRNPAVIADNVGDNVGDCAGMAADLFETYAVTIVATMVLASIFFPDTSNMMIYPLAIGGSCIITSIIGTWFVRLGNSKNIMGALYKGFIATAVLSLLILYPLTNATLGLNNNYSYSNINFTGFDLYVCAVIGLIITGLIIWITEYYTGTNFRPVKSVAQSSTTGHGTNVI

SEQ ID NO: 171808 - protein, 293 aa, Unknown
  Bacterial polypetide isolated from the Sargasso Sea
RDLYYCGVIGLVITGLLIWVTEYYTGTNYRPVRSVANSSTTGHGTNVIQGLAISLEATAIPALIIVAGILLTNNIAGLYGIAIAVTTMLALAGMVVALDAYGPVTDNAGGIAEMSKLPNNVRKTTDALDAVGNTTKAVTKGYAIGSAGLGALVLFAAYTEDIKHFSKVAGSKLEGIIVTFDLSNPYVVVGLLIGGMLPYLFGSMGMQAVGRAGGAVVIEVRRQFKKYPGIMKRKQKPDYAKLVDLLTVAAIKEMILPSLLPVLSPNNFIFYNSVNWGSSCCFSLCWSYVVRSY

SEQ ID NO: 171809 - protein, 296 aa, Unknown
  Bacterial polypetide isolated from the Sargasso Sea
MKTATNASARTASACQTSLNNGLKVSFRAGSIMGLMVVGFGLLDLSIWFVILNIFYDLNLFGVSNSIANTISMTWTPELLNNAQFEALKLREICNALLTYAMGASVMALFARVGGGIFTKAADVGADLVGKVEAGIPEDDPRNPATIADNVGDNVGDVAGMGADLYESYCGSILAATAIGSSLALTFTNIGINAIIAPMLIAGGGIIFSLIGIFLVKTKENATQKNLLTSLLIGTGITSVLIIIYIAILANLNIISWGNFGSIIIGLIAGFIIGQATEYYTSDTYKPTQLISEAAK

SEQ ID NO: 171810 - protein, 332 aa, Unknown
  Bacterial polypetide isolated from the Sargasso Sea
IFSLIILYPVTDSIVGLDQSYSVGNSSFTGFSLYICGVSGLIITGLLIWITEYYTGTNYRPVKTVAKSSITGHGTNVIQGLAVSMEATAIPALIIIVGILFTNHLAGLFGIAIAVTSMLALTGMVVALDAYGPVTDNAGGIAEMSKLPKSVRKTTDALDAVGNTTKAVTKGYAIGSAGLGALVLFAAYTEDIKFFSNVAGSRLENVNVSFDLSNPFVVVGLLVGGMLPYLFGSMGMQAVGRAGGAVVIEVRRQFKKIPGIMKGKRKPDYGRLVDLLTKAAIKEMIIPSLLPVLSPIVLYFVILPIGGLEAALSSLGAMLLGVIITGLFVAIS

SEQ ID NO: 171811 - protein, 296 aa, Unknown
  Bacterial polypetide isolated from the Sargasso Sea
FTKGADVGADLVGKVEAGIPEDDPRNPAVIADNVGDNVGDCAGMAADLFETYAVTIVATMVLSSIFFPGDLSMMIYPLTIGGACILTSIIGTFFVKLGKSKNVMGALYKGFIVSALSSLVILYPVTDFVLGLENNYDLNNKSFSGISLYYCGVIGLIITGLLIWVTEYYTGTNYRPVRSVANSSTTGHGTNVIQGLAISLEATAIPALIIVAGILLTNHIAGLYGIAIAVTTMLALAGMVVALDAYGPVTDNAGGIAEMSKLPNSVRKTTDALDAVGNTTKAVTKGYAIGSAGLGA

SEQ ID NO: 171812 - protein, 299 aa, Unknown
  Bacterial polypetide isolated from the Sargasso Sea
MSIYPLVLGAISIVASIIGTFFVKTSDGGKVMGALYKGMIVAGVLAAIAFYPITNMMMSVTGNVSGIYGSALIGLALTAAMVIITEYYTSTDYKPVQEIAEASLSGDATNIIAGLGISMKSTAMPVIAVCASIWGAFELAPDGDAMAGLYNIAIAATSMLSMTGVVVALDAFGPITDNAGGIAEMSELPSEVRNITDQLDAVGNTTKAVTKGYAIGSAGLAALVLFADYTNALEKNNILVSFDLSDHLVIIGLFLGGLVPFIFGSMAMEAVGRAASSVVTEVRRQFKDMPGIMEGTQKP

SEQ ID NO: 171813 - protein, 233 aa, Unknown
  Bacterial polypetide isolated from the Sargasso Sea
MKIDAVGNTTKAVTKGFAIASAALAALAMIQAFQFEASHYFQDMVIDYGLSNPSVIIGLLVGGLIPFIITGQLISGVERAAKKMVYEVRRQFKEDPEILTGKSKPDYAKCVDVATLASIGELWKSASVAVAAPIIVGVLLGPSAVAGLLMGAVVSGIFLAYHLANTGGAWDNAKKLIEMKGEKGTEEHKVAVVGDIIGDPYKDTAGPALNTVIKLLNTIAIVFVPVFFAIIVL

SEQ ID NO: 171814 - protein, 260 aa, Unknown
  Bacterial polypetide isolated from the Sargasso Sea
MEFIPIYAGILGIFIAVGLFILVLTKDSGSGKIEDISNKIHLGAMTFIKREYSILFMFVAIVAILIFFSNLGPNTMYAFLLGAFCSALAGFFGMYTATKANSRTTQAAHINGLSDALNISFFGGAIMGMSVAALGVLGLGILYIFFGKDPSTAHIIHGFGMGASSVALFSRVGGGIFTKSADVGADLVGKVEAGIPEDDPRNPGVIADNVGDNVGDVTGMGSDIFESYCGAIIATIAIASSLGSDYPTEEMMFIPLMWRQ

SEQ ID NO: 171815 - protein, 303 aa, Unknown
  Bacterial polypetide isolated from the Sargasso Sea
VGDCAGMAADLFETYAVTIVGTMVLGLILFDSGDQQTFMMFPLLIAGVCIISSLVGAYYVKLGEGSKNIMGALYKGLIITALVSVLLIYMVTDFFIGADKLIINSDLFIESFLGIDLFYCAIIGLSVTGLIVWITEYYTSTEFNPVKSVARSSQSGHATNIIQGLAVSMQSTALPTLVIILGILFSYKFAGLYGISIAATTMLALAGMIVALDAYGPVTDNAGGIAEMSNLSEDVRKTTDALDAVGNTTKAVTKGYAIGSAGLASLVLFGAYTQDLKYYFPNLDIKFALDDPYVVVGLLIGGM

SEQ ID NO: 171816 - protein, 322 aa, Unknown
  Bacterial polypetide isolated from the Sargasso Sea
NIIAGLGVGMESTAVPMIIISTSIMGAYYFAVLYGMHLAALGMLANTGIQLAVDAYGPISDNAGGIAEMAELPSEVRERTDKLDAVGNTTAAIGKGFAIGSAALTALALFAAYMVKTGISTIDISNPMVMAGLFIGGMLPFLFSSMAMGAVGRAAMAMIEEVRRQFREIPELKNALEIMNLKDKEDWNEEDNIVYNDALGKAEHGRCVEISTESAIKEMIFPGLLAVITPVLVGFVPRLFGSDQGAEILGGLLAGVTVTGVLMAIFQSNSGGAWDNAKKMIEEGIVVNGQEIKKGSEAHKAAVVGDTVGDPFKDTSGPSLNI

SEQ ID NO: 171817 - protein, 289 aa, Unknown
  Bacterial polypetide isolated from the Sargasso Sea
IAVTSMLALAGMVVALDAYGPVTDNAGGIAEMANLPKNVRKTTDALDAVGNTTKAVTKGYAIGSAGLGALVLFAAYTEDIKFFSKLSGSNLENITVTFDLSNPFVVVGLLVGGMLPYLFGSMGMQAVGRAGGAVVVEVRRQFKKIPGIMKRKAKPDYGKLVDLLTKAAIKEMIIPSLLPVLSPIVLYFAILPIGGQVAALSSVGAMLLGVIITGLFVAISMTAGGGAWDNAKKYIEDGNFGGKGSDAHKAAVTGDTVGDPYKDTAGPAVNPMIKITNIVALLLLAVLAG

SEQ ID NO: 171818 - protein, 176 aa, Unknown
  Bacterial polypetide isolated from the Sargasso Sea
MLPYLFGSMSMQAVGRAGGAVVVEVRRQFKKIPGIMKRKRKPDYGRLVDLLTKAAIKEMIVPSLLPVLSPIILYFIILAIGGIEAALSSVGAMLLGVIITGLFVAISMTAGGGAWDNAKKYIEDGKFGGKGSEAHKAAVTGDTVGDPYKDTAGPAVNPMIKITNIVALLLLAVIAH

SEQ ID NO: 171819 - protein, 116 aa, Unknown
  Bacterial polypetide isolated from the Sargasso Sea
MIVPSMLPVLSPIILFLIVSVVADQNAAVSAVGAMLLGVIVTGIFVAISMTAGGGAWDNAKKYVEDGNFGGKGSEAHKAAVTGDTVGDPYKDTAGPAVNPMIKITNIVALLLLAAL

SEQ ID NO: 171820 - protein, 288 aa, Unknown
  Bacterial polypetide isolated from the Sargasso Sea
MAAGAGNERMQEIAAAIQEGAQAYLKRQYTTIAIVGVVVAVLVFLFLGIIPAIGFVIGAILSGVAGFIGMNISVRSNVRTAAAAQSGLQQGLTLAFRAGAITGLLVAGLALLAIAVFFWYLVGPAGHAANSREVIDGLVGLAFGASLISIFARLGGGIFTKAADVGADLVGKVEAGIPEDDPRNPAVIADNVGDNVGDCAGMAADLFETYVVTVGATMVLTALLLKGLGDLLLPMMALPLLIGGACILTSIIGTYFVKLSKGGTNVMGAMYKGFVITAILSIPLIGVA

SEQ ID NO: 171821 - protein, 184 aa, Unknown
  Bacterial polypetide isolated from the Sargasso Sea
QEIAEAIQIGAKAYLNRQYKTIAIVGVIVFAIVTYFFNYLVGLGYFIGAFLSGVAGYVGMLISVKANVRTAEASRKSLQAGLTIAFKSGAITGLLVAGLALLAITIYYIVLIKLQIDNREIINALVALGFGASLISIFARLGGGIFTKGADVGADLVGKVEAGIPEDDPRNPAVIADNVGDNVG

SEQ ID NO: 171822 - protein, 309 aa, Unknown
  Bacterial polypetide isolated from the Sargasso Sea
MVYSSGLVTYFFSYLVGFGYFIGAFLSGVAGYVGMLISVKANVRTAEASRNSLQSGLTIAFKSGAITGLLVAGLALLAITIYYIILITLNVENREIINALVALGFGASLISIFARLGGGIFTKGADVGADLVGKVEAGIPEDDPRNPAVIADNVGDNVGDCAGMAADLFETYAVTIVATMVLASIFSPQDYNLMIYPLAIGGACIITSIVGTWFVKLGKSKSIMGALYKGFIVTAVTSLIIMYPVTESIIGMKSTYNNNAGAIFSGLDLYICGVVGFAITGLLIWVTEYYTGTDYRPVRTVAKSSTTGH

SEQ ID NO: 171823 - protein, 306 aa, Unknown
  Bacterial polypetide isolated from the Sargasso Sea
GLAGFLGMRVATKSNNRPTNAARDNLEKALNVAFSGGSVMGLSVVGLGVLGLGGLFLLYTNMYGSDFDNIGTVLNVLSGFSLGASSIALFARVGGGIYTKAADVGADLVGKVEAGIPEDHPLNPATIADNVGDNVGDVAGMGADLFESYVGSIIGSMVLGASIIVSGSFDLNFVLLPLMIAASGILVSIIGTFMVVVKEGGDPQKALNRGEFGSAAIMVVVVFYLINMFLPDTFSQGGSDFSSIGVFYATVIGLAAGLGIGMITEHYTGTGTGPVNSIVKQSITGPATNIIAGLGVGMQSTAVPIL

SEQ ID NO: 171824 - protein, 301 aa, Unknown
  Bacterial polypetide isolated from the Sargasso Sea
TIAAGILISFTLAGGTVDDPIMGLYGIALASVGMLSTLAITLSTDSFGPVSDNAGGIAEQAGLDPEVRERTDALDSLGNTTAATGKGISVTSAVLTSLALLATYATVAGIDSLNLLNPKILVGAIIGGLLPFIFAGLTMAAVGRAAGAMIEEVRRQFREIKGLKEGKKGVKPDVAKAVEISTNGALKEMIVPGTLAILAPIAVGIIPFLGPEALGSMLAGSIISGFLLAIFLNNFGGAADNAKKYIELGNHGGKGSDAHEAGVIGDTVGDPTKDTSGPALNILLKLMAMVSIVFGPLFLGL

SEQ ID NO: 171825 - protein, 188 aa, Unknown
  Bacterial polypetide isolated from the Sargasso Sea
MENPYVVVGLLIGGLLPYLFASMGMMAVGRAGGAVVEEVRKQFADNPGIMTGDSKPDYSRSVDMLTRSAIKEMIIPSMLPVLSPIILFFIVSIVANQNAAVSAVGAMLLGVIVTGIFVAISMTAGGGAWDNAKKYVEDGNFGGKGSEAHKAAVTGDTVGDPYKDTAGPAVNPMIKITNIVALLLLAAL

SEQ ID NO: 171826 - protein, 286 aa, Unknown
  Bacterial polypetide isolated from the Sargasso Sea
ADVGADLVGKVEAGIPEDDPRNPAVIADNVGDNVGDCAGMAADLFETYAVTIVATMVLSSIFFVNDLNMMIYPLAIGGACILTSILGTFFVTLGSDKNIMKAMYKGFVITAISSLIILFPITKHVIGFTTEYVANGKTFNGLSLYFCGIIGLVITGLIIWITEYYTGTDYRPVKSVAESSTTGHGTNVIQGLAVSMEATAVPALIIVGGILFTNHIAGLYGIAIAVTTMLALAGMVVALDAYGPVTDNAGGIAEMSNLPKNVRKTTDALDAVGNTTKAVTKGYAIG

SEQ ID NO: 171827 - protein, 303 aa, Unknown
  Bacterial polypetide isolated from the Sargasso Sea
GFSVAGLALLGISFNYLLWVTWLGVDSAFQVVAAFGLGASSIALFARIGGGIYTKAADVGGDLVGKVEAGIPEDDPRNPATIADAVGDNVGDVAGMGADLFESYAGSVVAPIVLVSLLLSGVFIQGDELQVFGDYESLLMYPILIGALGMIASIVGALLTRGKEGQSLSTQLHTGQYIAMGLTIIFTIVGTQWLFGGTDIVTTPIYLSLTIIIGLLGGWAIGFVSEYFTSEHYKPVKGIAAQSETGAATVTIEGIAQGKLSTLPSVALVVAMIGLSYWLGGAAFGNAGDVIGLYGVSLAAIGM

SEQ ID NO: 171828 - protein, 312 aa, Unknown
  Bacterial polypetide isolated from the Sargasso Sea
YLIGAALSGIAGYVGMLVSVEANVRTAEASRKGLAEGLSVAFKSGAVTGMLVAGLALLAIAVYYFLLLKFEVDEREIVNALVALGFGASLISIFARLGGGIFTKGADVGADLVGKVEAGIPEDDPRNPAVIADNVGDNVGDCAGMAADLFETYAVTIVATMVLSSIFFIGDLNMMVYPLTIGAACLITSIIGTFFVKLGKNNNVMNALYKGFIVSAVASLLILWPVTDHVIGFSNEYTVNNKTFNGKDLYYCGVIGLVITGLLIWITEYYTGTGYRPVKSVALSSTTGHGTNVIQGVSSIYGSDCHSPHKLL

SEQ ID NO: 171829 - protein, 280 aa, Unknown
  Bacterial polypetide isolated from the Sargasso Sea
VAGFIGMYAATKANVRTATAAQKDGPAAALSVSFYGGSIMGLCVASLGLIGLGGLYYFYIPSEIDPHKLEGFAMGASVVALFSRVGGGIFTKSADVGADLVGKIEAGIPEDDPRNPGVIADNVGDNVGDVAGMGSDIFESYCGSMIASIAIAYTLGNQDMMMLPLALAATGLIASIIGIFIVKLQSAKAPASALRSGTLLAPVIFVAMAYFIINTFDGVGMNVWWCVIAGAVGGVLIGLITEYYTGGDPVKKIAESGETGSATVMISGLSVGMQSVVIPM

SEQ ID NO: 171830 - protein, 335 aa, Unknown
  Bacterial polypetide isolated from the Sargasso Sea
DPRNPAVIADNVGDNVGDCAGMAADLFETYAVTIVATMVLSSIFFHGDLNMMIYPLSIGGACILTSIIGTFFVKLGKSKNIMAALYKGFIVTALTSLIILYPVTDYVLGLENTYTIANKSFSGMSLYICGAIGLVITGLLIWVTEYYTGTNYRPVKSVASSSTTGHGTNVIQGLAVSMEATAIPALIIVGGILLTNYIAGLFGIAIAVTTMLALAGMVVALDAYGPVTDNAGGIAEMSNLPKNVRKTTDALDAVGNTTKAVTKGYAIGSAGLGALVLFAAYTEDIKHFSKVAGSNLEGIVVTFDLSNPFVVVGLLVGGMLPYLFGSHGNASCRKS

SEQ ID NO: 171831 - protein, 84 aa, Unknown
  Bacterial polypetide isolated from the Sargasso Sea
VTVCGVLMAIFQSNAGGAWDNAKKMVEEGLNIDGESYGKGSEAHKAAVVGDTVGDPFKDTSGPSLNILIKLMSVVSLVIAPLIA

SEQ ID NO: 171832 - protein, 170 aa, Unknown
  Bacterial polypetide isolated from the Sargasso Sea
PAIIIVAGIIITHSLAGLFGIAIAVTTMLALAGMVVALDAYGPVTDNAGGIAEMSELDDNVRKTTDALDAVGNTTKAVTKGYAIGSAGLGALVLFAAYTEDLEHFAKDPNSPLSYEKIGNVTFDLSNPYVVVGLLIGGLLPFLFGAMSMTAVGRAAGSVVVEVRRQFKEI

SEQ ID NO: 171833 - protein, 217 aa, Unknown
  Bacterial polypetide isolated from the Sargasso Sea
MSAETILGYTILAGLLSIVYGFITGKNILKSSAGNSKMQEIASAIQIGAKAYLNRQYKTIAIVGIVVLVIISYAFSILVGLGYLIGAALSGIAGYVGMLVSVQANVRTAEASRKGLNEGLNVAFKSGAVTGMLVAGLALLSIAVYYYLLLSFNIDEREIVNALVALGFGASLISIFARLGGGIFTKGADVGADLVGKVEAGIPEDDPRNPAVIADNV

SEQ ID NO: 171834 - protein, 273 aa, Unknown
  Bacterial polypetide isolated from the Sargasso Sea
KAGAVTGMLVAGLALLSISVYYLLLVSYSVDENILKNSLVGLGFGASLISIFARLGGGIFTKGADVGADLVGKVEAGIPEDDPRNPAVIADNVGDNVGDCAGMAADLFETYAVTVVATMVLAMIFFPGSSSLLIYPMAICGCCLVASIIGTFFVRLGKSESIMGALYKGFIASSILSLVFMYPITQSVIGFGDISDASFTGMSLYVCAIIGLVITGLLIWITEYYTGTNYRPVQSIAKASTTGHGTNVIQGLAVSMEATALPALVIVIGIVLT

SEQ ID NO: 171835 - protein, 252 aa, Unknown
  Bacterial polypetide isolated from the Sargasso Sea
MSGTVETILLYTIGAGLLSIVYGFLTGKNILNSSAGNAKMQDIASAIQIGAKAYLARQYKTIAIVGAVVLVIVSIAFSPLVGLGYLIGAALSGIAGYVGMLVSVEANVRTAEASRKGLAQGLSVAFKSGAVTGMLVAGLALLSIAVYYYILLKSNVDEREIVNALVALGFGASLISIFARLGGGIFTKGADVGADLVGKVEAGIPEDDPRNPAVIADNVGDNVGDCAGMAADLFETYAVTIVATYGFIFNFL

SEQ ID NO: 171836 - protein, 288 aa, Unknown
  Bacterial polypetide isolated from the Sargasso Sea
AEAIQIGAKAYLNRQYKTIAVVGLIVLVIISYFFSLLVGLGYFIGALLSAVAGYVGMLISVEANVRTAEASRSSLQKGLTMAFKSGAITGLLVAGLALLSISVYYWILLSFNVESRELINALIALGFGASLISIFARLGGGIFTKGADVGADLVGKVEAGIPEDDPRNPAVIADNVGDNVGDCAGMAADLFETYAVTIVATMVLASIFFQNNMDLMIYPLAIGGGCIIASIIGTFFVKLGKSKNIMGALYKGFIVTAIISLVLLYPITSKIIGLDELFKVGSKTFSGL

SEQ ID NO: 171837 - protein, 304 aa, Unknown
  Bacterial polypetide isolated from the Sargasso Sea
ALYKGFIVTAITSLVIMYPVTEKIIGMNNTYENNAGAIFNGFDIYVCGVVGFVITGLLIWVTEYYTGTDYRPVKTVAKSSTTGHGTNVIQGLAISMEATAIPALIIVAGILYTNSLAGLYGIAIAVTAMLALTGMVVALDAYGPVTDNAGGIAEMSKLPKNVRKTTDALDAVGNTTKAVTKGYAIGSAGLGALVLFAAYTEDINYFSKVKGSALEGINVTFDLSNPFVVAGLLIGGMLPYLFGSMGMQAVGRAGGSVVVEVRRQFKKIPGIMKGKRKPDYGRLVDLLTKAAIKEMIIPSLLPVL

SEQ ID NO: 171838 - protein, 282 aa, Unknown
  Bacterial polypetide isolated from the Sargasso Sea
AVSMEATAIPALIIVAGILITNSIAGLFGIAIAVTTMLALAGMVVALDAYGPVTDNAGGIAEMSNLDKKVRKTTDALDAVGNTTKAVTKGYAIGSAGLGALVLFAAYTEDIKHFSKEAGSALEGIVVTFDLSNPYVVVGLLIGGMLPYLFGSMGMQAVGRAGGAVVVEVRRQFKKFPGIMKRKQKPDYAKLVDLLTVAAIKEMIIPSLLPVLSPVVLYFIILSIGGQVAALAAVGAMLLGVIITGLFVAVSMTAGGGAWDNAKKYIEDGNHGGKGSEAHKAA

SEQ ID NO: 171839 - protein, 141 aa, Unknown
  Bacterial polypetide isolated from the Sargasso Sea
MKRKAKPDYGKLVDLLTKAAIKEMVIPSLLPILSPIVLYIIIYFIGGQVAALSSLGAMLLGVIITGLFVAVSMTAGGGAWDNAKKYIEDGKFGGKGSEAHKAAVTGDTVGDPYKDTAGPAVNPMIKITNIVALLLLAVIAG

SEQ ID NO: 171840 - protein, 229 aa, Unknown
  Bacterial polypetide isolated from the Sargasso Sea
FAMGASVVALFSRVGGGIFTKSADVGADLVGKIEAGIPEDDPRNPGVIADNVGDNVGDVAGMGSDIFESYCGSMIASIAIAYTLKNTDMMILPLVLASAGLIASILGIFIVKMQAAKSPASALRSGTLLAPVIFVVMAYFIVDSLEGVDINVWWCVISGAVGGVLIGLITEYYTGGKPVKKIAESGETGSATVMISGLSVGMQSVVIPIVILAGIILVSTKLADIYGVG

SEQ ID NO: 171841 - protein, 288 aa, Unknown
  Bacterial polypetide isolated from the Sargasso Sea
FIASAILSLIFIYPVTQFILGDMSTEFSFGTTAFTGFSLYICAFVGIVITGLLIWITEYYTGTNYRPVQSVAKASTTGHGTNVIQGLAVSMEATALPAIVIVIGIVFTYQLAGLFGIAIAVTAMLALAGMVVALDAYGPVTDNAGGIAEMANLDESVRKTTDSLDAVGNTTKAVTKGYAIGSAGLGALVLFAAYVEDLKLIPEITPDFSLENPYVVVGLLIGGLLPYLFASMGMMAVGRAGGAVVEEVRKQFSENPGIMTGETKPDYSKSVDMLTRSAIKEMIIPSML

SEQ ID NO: 171842 - protein, 294 aa, Unknown
  Bacterial polypetide isolated from the Sargasso Sea
GDLSMMIYPLTIGGACILTSIIGTFFVKLGRSKNVMGALYKGFVVSALASLVILYPVTDYVLGLENSYDLNNKSFSGMSLYYCGVIGLVITGLLIWVTEYYTGTNYRPVKSVASSSTTGHGTNVIQGLAISLEATAIPALIIVAGILLTNHIAGLYGIAIAVTTMLALAGMVVALDAYGPVTDNAGGIAEMSKLPNNVRKTTDALDAVGNTTKAVTKGYAIGSAGLGALVLFAAYTEDIKHFSKEVGSKLEGIVVTFDLSNPYVVVGLLIGGMLPYLFGSMGMQACWKSQVVLL

SEQ ID NO: 171843 - protein, 301 aa, Unknown
  Bacterial polypetide isolated from the Sargasso Sea
AVIADNVGDNVGDCAGMAADLFETYAVTIVATMVLSTIFFPTDYNLMVYPLAIGGSCIITSIIGTWFVKLGNSKNIMGALYKGFVVTAITSLLILYPVTDSILGLDKIYNNNEKSFSGLNLYICGVVGFVITGLLIWVTEYYTGTNYRPVQSVAKSSTTGHGTNVIQGLAVSMEATAIPALIIVIGILYTNNLAGLYGIAIAVTAMLALTGMVVALDAYGPVTDNAGGIAEMSKLPKNVRKTTDALDAVGNTTKAVTKGYAIGSAGLGALVLFAAYTEDIKYFSTVKNSALEGVNVTFDLS

SEQ ID NO: 171844 - protein, 204 aa, Unknown
  Bacterial polypetide isolated from the Sargasso Sea
AALALISAYIVKVSNGNPDFVLAINDPIVLVGMFIGGIFPFLVSSITMTAVGDAAFEMIIEVRRQFKEIPGLMEGKAKPDTARCVDIATRAALRKMILPGSLAVLAPVVIGFGLGPKALGGMLGGALICCVMMALMMANAGGAWDNAKKYVEKGNYGGKGSDVHKAAVVGDTVGDPLKDTSGPAMNILINVMAIVSLVIAPLLI

SEQ ID NO: 171845 - protein, 297 aa, Unknown
  Bacterial polypetide isolated from the Sargasso Sea
GGIAEMSPDVPEEVRDRTDRLDALGNTTAATGKGFAIGSAVLTALSLMNAFVKDVPYELGASSRGLAQAMLLTDAYVLSGVIIGAMLPFLFAALTMLSVRKAAGAIIVEVQRQFRDIPGLLEGKEGVVCDHMACVTMCTKASIDEMLLPGILAVMTPISVGLLIGAKCLGGLLAGSIASGFMLAVMMSNAGGAWDNSKKYIENEKVYGGKKSETHKACVVGDTVGDPFKDTSGPALNILIKLMTIFSLTMAPVFRSDWKTYWYGLIVLGVEIIMVGVAYWHVWVVNGEKCVPPEEEK

SEQ ID NO: 171846 - protein, 187 aa, Unknown
  Bacterial polypetide isolated from the Sargasso Sea
FVFSALSMNAVGKAAMSMIEEVRRQFRELPKLKAALEIMRKHNSDLSKASKADMKIFNDADGVAEYSKCVEISTKAALREMVLPGLMAISVPVIIGLSGGAEMLGGLLAGVTSSGVLMAIFQSNAGGAWDNAKKMIEEAGQKGTDAHKAAVVGDTVGDPFKDTSGPSLNILLKLISVVALVIAPLLI

SEQ ID NO: 171847 - protein, 99 aa, Unknown
  Bacterial polypetide isolated from the Sargasso Sea
LSIGGQVAALAAVGAMLLGVIITGLFVAVSMTAGGGAWDNAKKYIEDGNHGGKGSEAHKAAVTGDTVGDPYKDTAGPAVNPMIKITNIVALLLLAVIAG

SEQ ID NO: 171848 - protein, 247 aa, Unknown
  Bacterial polypetide isolated from the Sargasso Sea
GGIAEMAEMEESVRAVTDPLDAVGNTTKAVTKGYAIGSAGLAALVLFACYVYEFKIKGAGETISFELSDVNVIIGLFIGGLLPYLFASVAMNAVGRAGGAVVEEVRRQFKEIPGIMEYKATPDYRSIVDIVTKFALKEMILPALLPVVAPIVVGLLLGKVALGGMLIGSIVTGLFVALSMTTGGAAWDNAKKYIEDGNLGGKGSEAHKAAVTGDTVGDPYKDTAGPAVNPMIKILNVVALLLVPFLI

SEQ ID NO: 171849 - protein, 152 aa, Unknown
  Bacterial polypetide isolated from the Sargasso Sea
EPVKYEVDKETGAIFVDRILSTPMRYPCNYGYVPSTLCGDGDPADVLVVLPLPLVPGSVVRCRPVGVLKMSDEAGSDEKILAVPVSKIFSGYAHVEDIAQVSSHWLERIGHFFEHYKDLEKGKWVKLDGWGGAAEAKQILIEAHQRHLDSKA

SEQ ID NO: 171850 - protein, 260 aa, Unknown
  Bacterial polypetide isolated from the Sargasso Sea
MALFYCGLLGLIITGLIIWVTEYYTGTNYRPVQSIAQSSTTGHGTNVIQGLAISLEATALPAIIIVAGIIITHSLAGLFGIAIAVTTMLALAGMVVALDAYGPVTDNAGGIAEMSELDDNVRKTTDALDSVGNTTKAVTKGYAIGSAGLGALVLFAAYTEDLEHFAKDSSSSLYGIDVSFDLSNPYVVVGLLLGGLLPFLFGAMSMTAVGRAAGSVVIEVRRQFKEIPGIMEGTGKPEYGKCVDILTKSAIREMIFHRYC

SEQ ID NO: 171851 - protein, 296 aa, Unknown
  Bacterial polypetide isolated from the Sargasso Sea
GADVGADLVGKVEAGIPEDDPRNPAVIADNVGDNVGDCAGMAADLFETYAVTIVATMVLSSIFFVSDLNMMVYPLSIGAACILTSIVGTFFVKLGQSKNIMNALYKGFVATAILSLIILYPITDYVIGLNTNYSVNGVSFNGMSLYYCGVIGLIITGLLIWITEYYTGTDYRPVKSVAESSTTGHGTNVIQGLAISMEATAIPAIIIVAGILLTNSIAGLFGIAIAVTTMLALAGMVVALDAYGPVTDNAGGIAEMSNLPKNVRKTTDALDAVGNTTKAVTKGYAIGSAGLGALVL

SEQ ID NO: 171852 - protein, 141 aa, Unknown
  Bacterial polypetide isolated from the Sargasso Sea
MKRKQKPDYAKLVDLLTVAAIKEMIIPSLLPVLSPIILYLIIFAIGGQVAALASVGAMLLGVIITGLFVAVSMTAGGGAWDNAKKYIEDGNHGGKGSEAHKAAVTGDTVGDPYKDTAGPAVNPMIKITNIVALLLLAVIAG

SEQ ID NO: 171853 - protein, 217 aa, Unknown
  Bacterial polypetide isolated from the Sargasso Sea
MEASASNILQLIILSGLLSIVYGFFTGKNILSSSAGNSKMQEIASAIQVGAKAYLNRQYKTIAIVGVVVLVIISFSFSILVGLGYLIGATLSGIAGYVGMLVSVQANVRTAEASRKGLSQGLSIAFKSGAVTGMLVAGLALLSIAVYYYLLLSYGVDEREIVNALVALGFGASLISIFARLGGGIFTKGADVGADLVGKVEAGIPEDDPRNPAVIAD

SEQ ID NO: 171854 - protein, 276 aa, Unknown
  Bacterial polypetide isolated from the Sargasso Sea
MLKLGKSKNVMGALYKGFIVSAITSLVILYPVTDFVLGLDNEYDLSGKSFSGMNLYYCGVIGLIITGLLIWVTEYYTGTNYRPVRSVASSSTTGHGTNVIQGLAISLEATAIPALIIVAGILLTNHIAGLYGIAIAVTTMLALAGMVVALDAYGPVTDNAGGIAEMSKLPNNVRKTTDALDAVGNTTKAVTKGYAIGSAGLGALVLFAAYTEDIKHFSKEAGSKLEGIVVTFDLSNPYVVVGLLIGGMLPYLFGSMGMQAVGRDRWCCCYRSKKTI

SEQ ID NO: 171855 - protein, 172 aa, Unknown
  Bacterial polypetide isolated from the Sargasso Sea
EVRRQFRDIPELKKALELMNLKNESEWSDTDKATYEEALSKAEHGRCVEISTQSAIKEMILPGLLAVSSPVLVGFVFGPETLGGLLAGVTVSGVLMAIFQSNSGGAWDNAKKMIEEGVTFDGVQIGKGSEAHKASVVGDTVGDPFKDTSGPSLNILIKLMSVVSLVIAPLIA

SEQ ID NO: 171856 - protein, 306 aa, Unknown
  Bacterial polypetide isolated from the Sargasso Sea
NKKMQEIASAIQIGAKAYLARQYKTIAIVGVVVLVIVSIAFSPLVGVGYLIGAALSGIAGYVGMLVSVEANVRTAEASRKGLAQGLSVAFKSGAVTGMLVAGLALLSIAVYYYLLLKLNVDEREIVNALVALGFGASLISIFARLGGGIFTKGADVGADLVGKVEAGIPEDDPRNPAVIADNVGDNVGDCAGMAADLFETYAVTIVATMVLSSIFFVGDLNMMIYPLSIGAACLLTSILGTFFVKLGNTKNVMNALYKGFVVSAVASLVILWPVTDHVIGFANEYTVNGKSFNGMNLYYCGVIGLL

SEQ ID NO: 171857 - protein, 103 aa, Unknown
  Bacterial polypetide isolated from the Sargasso Sea
YFIIFAIGGQVAALASVGAMLLGVIITGLFVAISMTAGGGAWDNAKKYIEDGNFGGKGSEAHKAAVTGDTVGDPYKDTAGPAVNPMIKITNIVALLLLAVLAG

SEQ ID NO: 171858 - protein, 71 aa, Unknown
  Bacterial polypetide isolated from the Sargasso Sea
ISMTAGGGAWDNAKKFIEDGNYGGKGSESHKAAVTGDTVGDPYKDTAGPAVNPMIKITNIVALLLLAVIAH

SEQ ID NO: 171859 - protein, 190 aa, Unknown
  Bacterial polypetide isolated from the Sargasso Sea
LSNPFVVVGLLVGGMLPYLFGSMGMQAVGRAGGAVVIEVRRQFKKIPGIMKRKSKPDYGKLVDLLTKAAIKEMVIPSLLPVLSPIVLYLFILPIGGQVAALSSVGAMLLGVIITGLFVAISMTAGGGAWDNAKKYIEDGNFGGKGSDAHKAAVTGDTVGDPYKDTAGPAVNPMIKITNIVALLLLAVIAG

SEQ ID NO: 171860 - protein, 221 aa, Unknown
  Bacterial polypetide isolated from the Sargasso Sea
ALVLFAAYTEDIKHFSKEAGSALEGIVVTFDLSNPYVVVGLLIGGMLPYLFGSMGMQAVGRAGGAVVVEVRRQFKKYPGIMKRKQKPDYAKLVDLLTVAAIKEMIVPSLLPVLSPVVLYFVILSIGGQVAALAAVGAMLLGVIITGLFVAVSMTAGGGAWDNAKKFIEDGNHGGKGSEAHKAAVTGDTVGDPYKDTAGPAVNPMIKITNIVALLLLAVIAA

SEQ ID NO: 171861 - protein, 248 aa, Unknown
  Bacterial polypetide isolated from the Sargasso Sea
MTIMQIFILLCGIAAVLYGVITSRQILALSPGNEKMQEIALAIQEGAKAYLNRQYLTISIVGIFIFFLIWIIFDLYSAIGFLIGAFFSGAAGYVGMNISVRSNVRTTQAANSSLADGLSVSFKAGAVTGMLVAGFALLSVAAYYFILDNSGNFQGRLIVAPLVSLGFGASLISIFARLGGGIFTKGADVGADLVGKVEAGIPEDDPRNPAVIADNVGDNVGDCAGMAADLFETYVVTVVATMVLASIF

SEQ ID NO: 171862 - protein, 291 aa, Unknown
  Bacterial polypetide isolated from the Sargasso Sea
AFRGGAVMGFSVAGLALGGLALVYILFVLVAEVDDAFEVVTAYGLGASSIALFSRVGGGIYTKAADVGADLVGKVEAGIPEDDPRNPATIADNVGDNVGDVAGMGADLFESYAGSIIAPISLVAFALGLTAGDASVSTNISLLLFPLAIAFAGMLTSILGSFLVRGGESTDSRALSRALHLGTNVAMGLTVLATVGIAYWMFGDNADFDNPIGLAISVVGGLLVGWALGKTAEFYTSDHYSPVKKIADQSKTGPATTILGGISAGMISVAASVALLGVGIAVAYWGGEMAF

SEQ ID NO: 171863 - protein, 246 aa, Unknown
  Bacterial polypetide isolated from the Sargasso Sea
DEREIVNALVALGFGASLISIFARLGGGIFTKGADVGADLVGKVEAGIPEDDPRNPAVIADNVGDNVGDCAGMAADLFETYAVTIVATMVLSSIFFHGDMNMMVYPLTIGGACIITSIIGTFFVKLGKSKNVMNALYKGFIATAVISLVILYPVTDYVIGFDKSYSVGEKSFNGMSLYYCGIIGLIITGLLIWVTEYYTGTGYRPVKSVAASSTTGHGTNVIHRFGCIYGGNGNTSFNNSGRDIIN

SEQ ID NO: 171864 - protein, 250 aa, Unknown
  Bacterial polypetide isolated from the Sargasso Sea
AEYRMLAIFIVVVAALLFVGGEDNGLGMETMVAFIIGALCSVAAGFSGMQSATSANGRTAQAAANGGQAAALTTSYNGGAVMGLAVGGLGLFGISLMYYMTDPVGGDGFLSVENVAGFGMGASSIALFARVGGGIYTKAADVGADLVGKVEAGIPEDDPRNPGVIADNVGDNVGDVAGMGADIFESFVGSIIAAMVIAQASEELGADYLMIPIALAVVGYISSIIGVFSIAGMKNMHPGAALRNTTFMGL

SEQ ID NO: 171865 - protein, 301 aa, Unknown
  Bacterial polypetide isolated from the Sargasso Sea
MLELILLVKLRQVFLEDHPLNPATIADNVGDNVGDVAGMGADLFESFVGSIIGAMVLGAAFLNLSEFQGNEINAVILPLFIAGAGIIMSIIGTFFVRVKEGGDPHTALNIGEFSSAILMIIITYLLIHFLLPETWEYNDFIYSANGVFYATISGLIVGLGVGKITEYYTATGKNPVMSIVRQSETGPATTIISGLGVGMISTAVPIILICIAIITSYSFAGLYGIAIAAVGMLANTGIQLAVDAYGPISDNAGGIAEMAELPAEVRERTDKLDAVGNTTAAIGKGFAIASAALTALALFAA

SEQ ID NO: 171866 - protein, 290 aa, Unknown
  Bacterial polypetide isolated from the Sargasso Sea
IALGIFRVVLSYSEGSPEVKKIGDMIHSGAMSFMKTEYTYLVVFVLVLAVLVFFALGWETATAVLVGASSSALAGFIGMYAATKANTRTAAAAQENGAASALSISFYGGSIMGLCVASLGLLGLGGLFYFLGEGHYLEGFGMGASVVALFSRVGGGIFTKSADVGADLVGKVEAGIPEDDPRNPGVIADNVGDNVGDVAGMGSDIFESYCGSMIATIAIAYTMTEANNGPLMSLPLALASIGLISSILGILIVRAQSAKAPAAALRTGTIGSPVIFIALAFGLISYWISH

SEQ ID NO: 171867 - protein, 258 aa, Unknown
  Bacterial polypetide isolated from the Sargasso Sea
MSNLPKSVRKTTDALDAVGNTTKAVTKGYAIGSAGLGALVLFAAYTEDIKFFSNISGSALENVTVNFDLSNPFVVVGLLIGGMLPYLFGSMSMQAVGRAGGAVVIEVRRQFKKIPGIMKRKRKPDYGKLVDLLTKAAIREMIIPSLLPVLSPIILYFIISLIGGTEAALSSVGAMLLGVIITGLFVAISMTAGGGAWDNAKKYIEDGKFGGKGSEAHKAAVTGDTVGDPYKDTAGPAVNPMIKITNIVALLLLAVIAH

SEQ ID NO: 171868 - protein, 292 aa, Unknown
  Bacterial polypetide isolated from the Sargasso Sea
EDDPRNPAVIADNVGDNVGDCAGMAADLFETYAVTIVATMVLSSIFFHGDLNMMIYPLSIGGACILTSIIGTFFVKLGKSKNIMTALYKGFVVTAVTSLVILYPITDYVLGLENTYTISDKTFTGMSLYICGVIGLIITGLLIWVTEYYTGTNYRPVKSVASSSTTGHGTNVIQGLAVSMEATAIPALIIVGGILMTNYIAGLFGIAIAVTTMLALAGMVVALDAYGPVTDNAGGIAEMSNLPKNVRKTTDALDAVGNTTKAVTKGYAIGSAGLGALVLFAAYTEDIKHFSK

SEQ ID NO: 171869 - protein, 209 aa, Unknown
  Bacterial polypetide isolated from the Sargasso Sea
AVTKGYAIGSAGLGALVLFAAYTEDIKHFSKVAGSNLEGIAVTFDLSNPYVVVGLLIGGMLPYLFGSMGMQAVGRAGGEVVIEVRRQFKKIPGIMKRKAKPDYGKLVDLLTKAAIKEMIIPSLLPILSPIVLYIVIYFIGGQVAALSSLGAMLLGVIITGLFVAVSMTAGGGAWDNAKKYIEDGKFGGKGSEAHKAAVTGDTVGDPYKD

SEQ ID NO: 171870 - protein, 275 aa, Unknown
  Bacterial polypetide isolated from the Sargasso Sea
ALDAYGPVTDNAGGIAEMSNLPKNVRKTTDALDAVGNTTKAVTKGYAIGSAGLGALVLFAAYTEDIKHFSKVAGSKLEGIVVTFDLSNPFVVVGLLVGGMLPYLFGSMGMQAVGRAGGAVVVEVRRQFKKIPGIMKRKSKPDYGRLVDLLTKAAIKEMIIPSLLPVLSPIVLYLFILPIGGQVAALSSVGAMLLGVIITGLFVAISMTAGGGAWDNAKKYIEDGNYGGKGSEAHKAAVTGDTVGDPYKDTAGPAVNPMIKITNIVALLLLAVIAS

SEQ ID NO: 171871 - protein, 254 aa, Unknown
  Bacterial polypetide isolated from the Sargasso Sea
MENLHLIVFVGVLAVVYSYFLSKQIISSSPGNNKMQEIAEAIQIGAKAYLNRQYKTIAIVGVIVLVIISYFFSLLVGLGYFIGALLSGVAGYVGMLISVQANVRTAEASRTSLQNGLTMAFKSGAITGLLVAGLALLAISIYYWVLLAFNIESRELINALIALGFGASLISIFARLGGGIFTKGADVGADLVGKVEAGIPEDDPRNPAVIADNVGDNVGDCAGMAADLFETYAVTIVATMVLASIFFQDNASMM

SEQ ID NO: 171872 - protein, 286 aa, Unknown
  Bacterial polypetide isolated from the Sargasso Sea
HLQFRLGAKAYLNRQYKTIAIVGVVVLVIISFSFSILVGLGYLIGAALSGIAGYVGMLVSVQANVRTAEASRKGLSEGLSIAFKSGAVTGMLVAGLALLSIAVYYYLLLSFEVNEREIVNALVALGFGASLISIFARLGGGIFTKGADVGADLVGKVEAGIPEDDPRNPAVIADNVGDNVGDCAGMAADLFETYAVTIVATMVLSSIFFHGDLNMMIYPLSIGGACILTSIIGTFFVKLGRSKNIMAALYKGFIVTAVSSLVILYPITDYVLGLENNYSIYNKTFS

SEQ ID NO: 171873 - protein, 286 aa, Unknown
  Bacterial polypetide isolated from the Sargasso Sea
GYVGMLVSVQANVRTAEASRKGLSQGLSIAFKSGAVTGMLVAGLALLAIAVYYYFLLSYGVEEREIVNALVALGFGASLISIFARLGGGIFTKGADVGADLVGKVEAGIPEDDPRNPAVIADNVGDNVGDCAGMAADLFETYAVTIVATMVLSSIFFHGDLNMMVYPLSIGGACILTSIIGTYFVKLGKSKNIMAALYKGFIVTALTSLIILYPITNYVLGLENTYSIYNKSFTGMSLYICGVIGLVITGLLIWVTEYYTGTNYRPVKSVASSSTTGHGTNVIQGL

SEQ ID NO: 171874 - protein, 285 aa, Unknown
  Bacterial polypetide isolated from the Sargasso Sea
MYYIIAAGVLSIVYGFITGRNILNSSSGNAKMLEIASAIQEGARAYLNRQYKTIAMVGIVVLVIITFLFSPLVGLGYLIGATLSGIAGYVGMLVSVQANVRTAEASRKSLSSGLSIAFKSGAVTGMLVAGLALLSIAVYYYFLVKAGVDEREIVNALVALGFGASLISIFARLGGGIFTKGADVGADLVGKVEAGIPEDDPRNPAVIADNVGDNVGDCAGMAADLFETYAVTIVATMVLSSIFFVNDLNMMIYPLAIGGACILTSILGTFFVTLGSDKNIMKAMV

SEQ ID NO: 171875 - protein, 248 aa, Unknown
  Bacterial polypetide isolated from the Sargasso Sea
MTIMQTFIILCGLAAVLYGFITSRQILSLNSGNEKMQEIAKAIQEGAKAYLNRQYLTIAIVGIVIFFLIWIIFDLFSAIGFLIGAFFSGAAGYVGMNISVRSNVRTTQAASSSLAEGLSVSFKAGAVTGMLVAGFALISVAAYYFILDNSGNFEGRDIVAPLVSLGFGASLISIFARLGGGIFTKGADVGADLVGKVEAGIPEDDPRNPAVIADNVGDNVGDCAGMAADLFETYVVTVVATMVLASIF

SEQ ID NO: 171876 - protein, 247 aa, Unknown
  Bacterial polypetide isolated from the Sargasso Sea
VICILLYLFFRDLWVVGGFLIGAILSGAAGYIGMIISVRANVRTAQAASESLGKGLNIAFKAGAVTGMLVAGLALLSISVYFLTLENFSVSEETLKHALVALGFGASLISIFARLGGGIFTKGADVGADLVGKVEAGIPEDDPRNPAVIADNVGDNVGDCAGMAADLFETYAVTIVATMVLATIFFDGEIANKMTLYPMAIGGSCLVASIIGTFFVRLGSSQSIMGALYKGFIASAIISLIFIYPVT

SEQ ID NO: 171877 - protein, 310 aa, Unknown
  Bacterial polypetide isolated from the Sargasso Sea
VEAGIPEDDPRNPAVIADNVGDNVGDCAGMAADLFETYAVTIVATMLLATISFTGSDIVKGMEYPLIIGGVCILASIIGTFFVKLGSNNNIMSALYRGLIITAIVSAVLIFFVSKSIFVDDYLSYFLCAVVGLIVTALIVWITEYYTSTEYRPVRSIAQSSETGHGTNVIQGLAISLEATAIPAIIIAIGILVSFHLNGIYGIAVSATTMLALAGMIVALDAYGPVTDNAGGIAEMCDLDDDVRKTTDALDAVGNTTKAVTKGYAIGSAGLAALVLFSAYTYDLKYYFPNLDISFSLSDPKRSCGSLNRR

SEQ ID NO: 171878 - protein, 50 aa, Unknown
  Bacterial polypetide isolated from the Sargasso Sea
HGGKGSEAHKAAVTGDTVGDPYKDTAGPAVNPMIKITNIVALLLLAAIAH

SEQ ID NO: 171879 - protein, 307 aa, Unknown
  Bacterial polypetide isolated from the Sargasso Sea
IADNVGDNVGDCAGMAADLFETYAVTIVATMVLASIFFINEIKMMIYPLAIGGSCILTSIVGTFFVRLGKSKNIMGALYKGFIATAILSVVVLYPVTDKIIGLENVYSSTNAVFNGFGLYLCGVIGLVITGLIIWVTEYYTGTKFRPVISVAKSSVTGHGTNVIQGLAVSLEATALPALIIVAGILFTNHIAGLFGIAIAVTTMLALAGMVVALDAYGPVTDNAGGIAEMSNLPKNVRKTTDALDAVGNTTKAVTKGYAIGSAGLGALVLFAAYTEDIKFFSKVPGSSLENITVSFDLSNPFVVVGL

SEQ ID NO: 171880 - protein, 303 aa, Unknown
  Bacterial polypetide isolated from the Sargasso Sea
VGDNVGDCAGMAADLFETYAVTIVATMVLSSIFFVGDLNMMIYPLSIGAACLLTSILGTFFVKLGNTKNVMNALYKGFVVSAVASLVILWPVTDHVIGFANEYTVNGKTFNGMNLYYCGVIGLVITGLLIWITEYYTGTNYRPVKSVALSSTTGHGTNVIQGLAVSMEATAIPALIIVAGILITNSIAGLFGIAIAVTTMLALAGMVVALDAYGPVTDNAGGIAEMSNLDKKVRKTTDALDAVGNTTKAVTKGYAIGSAGLGALVLFAAYTEDIKHFSKEAGSALEGIVVTFDLSNPYVVVGL

SEQ ID NO: 171881 - protein, 284 aa, Unknown
  Bacterial polypetide isolated from the Sargasso Sea
ALLAIAVYYYLLLSYGVDEREIVNALVALGFGASLISIFARLGGGIFTKGADVGADLVGKVEAGIPEDDPRNPAVIADNVGDNVGDCAGMAADLFETYAVTIVATMVLSSIFFHGDLNMMVYPLSIGGACILTSIIGTFFVKLGKSKNIMAALYKGFIVTAVTSLIILYPITDYVLGLENIYSISNKSFTGMSLYICGVIGLIITGLLIWVTEYYTGTNYRPVKSVASSSTTGHGTNVIQGLAVSMEATAIPALIIVGGILLTNYIAGLFGIAIAVTTMLALAG

SEQ ID NO: 171882 - protein, 283 aa, Unknown
  Bacterial polypetide isolated from the Sargasso Sea
LYPVTDYVLGLDNFYSLNNISFSGMSLYYCGVIGLIITGLLIWVTEYYTGTNYRPVRSVANSSTTGHGTNVIQGLAISLEATAIPALIIVAGILLTNNIAGLYGIAIAVTTMLALAGMVVALDAYGPVTDNAGGIAEMSKLPNNVRKTTDALDAVGNTTKAVTKGYAIGSAGLGALVLFAAYTEDIKHFSKEVGSKLEGIVVTFDLSNPYVVVGLLIGGMLPYLFGSMGMQAVGRAGGAVVIEVRRQFKKYPGIMKRKQKPDYAKLVDLLTVAAIKEMIIPSL

SEQ ID NO: 171883 - protein, 328 aa, Unknown
  Bacterial polypetide isolated from the Sargasso Sea
FLSGVAGYVGMLISVKANVRTAEASRQNLQAGLTIAFKSGAITGLLVAGLALLAITTYYIILINLNVDNREIINALVALGFGASLISIFARLGGGIFTKGADVGADLVGKVEAGIPEDDPRNPAVIADNVGDNVGDCAGMAADLFETYAVTIVATMVLASIFSPQDYNLMVYPLAIGGACILTSIIGTWFVKLGKSKNIMGALYKGFIVTAVSSLLIMYPITDSLIGINNSYNNNAGANFSGLDLYICGIVGFAITGLLIWVTEYYTGTDYRPVKTVAKSSTTGHGTNVIQGLAISMEATAIPALIIVAGILYTNSLAGLYGIAIAVT

SEQ ID NO: 171884 - protein, 237 aa, Unknown
  Bacterial polypetide isolated from the Sargasso Sea
MNSTVETILLYTILAGFLSIVYGYFTGKNILNLSAGNSKMQDIASAIQIGAKAYLARQYKTISIVGVVVLVIVSIAFSPLVGLGYLIGAALSGIAGYVGMLVSVEANVRTAEASKKGLANGLSVAFKSGAVTGMLVAGLALLAIAVYYYLLLKFNVDEREIVNALVALGFGASLISIFARLGGGIFTKGADVGADLVGKVEAGIPEDDPRNPAVIADNVGDNVGDCAGMAADLFETY

SEQ ID NO: 171885 - protein, 255 aa, Unknown
  Bacterial polypetide isolated from the Sargasso Sea
ICVLPLIFGMDKLEVAEMLGGYMAGVTVSGVLWAIFQNNAGGAWDNAKKSFEAGVEINGEMTFKGSEAHKASVTGDTVGDPFKDTSGPSMNILIKLTCLIGLVVAPILGESHDNKHEDLDAPKAIESTISTEGTNINSISAVTGAFKFNKEIKTITEFIVKEIDCKNKSSLCEEFDIILTKNPITFKTNQKSIEKFEEKSKFNNKVFGELTIGKQAYNSILYFDAKANEKGAMFVGVLKFERNKTNVEILVKGKK

SEQ ID NO: 171886 - protein, 205 aa, Unknown
  Bacterial polypetide isolated from the Sargasso Sea
MENLYLIVFVGILAVVYSYFLSKQIISSSPGSSKMQEIAEAIQIGAKAYLNRQYKTIAIVGVIVLIIISYFFSLLVGLGYFIGALLSGVAGYVGMLISVEANVRTAEASRTSLQKGLTMAFKSGAITGLLVAGLALLAISIYYWVLLSFNVESRELINALIALGFGASLISIFARLGGGIFTKGADVGADLVGKVEAGIPEDDPR

SEQ ID NO: 171887 - protein, 166 aa, Unknown
  Bacterial polypetide isolated from the Sargasso Sea
FGASLISIFARLGGGIFTKGADVGADLVGKVEAGIPEDDPRNPAVIADNVGDNVGDCAGMAADLFETYAVTVVATMVLSMIFFPGSASMLIYPMAICGSCLIASIVGTFFVRLGSSESIMGALYKGFIASAVISLIVMYPVTDRVIGFEDIDGADFTGMSLYIVLY

SEQ ID NO: 171888 - protein, 277 aa, Unknown
  Bacterial polypetide isolated from the Sargasso Sea
TTMLALAGMVVALDAYGPVTDNAGGIAEMSNLPKNVRKTTDALDAVGNTTKAVTKGYAIGSAGLGALVLFAAYTEDIKHFSKVAGSNLEGIIVTFDLSNPYVVVGLLIGGMLPYLFGSMGMQAVGRAGGAVVIEVRRQFKKIPGIMKRKAKPDYGKLVDLLTKAAIKEMIIPSLLPVLSPIVLYLIIYFIGGQVAALSAVGAMLLGVIITGLFVAVSMTAGGGAWDNAKKYIEDGNYGGKGSEAHKAAVTGDTVGDPYKDTAGPAVNPMIKITNIVA

SEQ ID NO: 171889 - protein, 280 aa, Unknown
  Bacterial polypetide isolated from the Sargasso Sea
AVLSGIAGYIGMNVSVRANVRTTQAATEGLQPALDIAFKSGAITGLLVVGLGLLGVAGYYAFLLSANVDTRLLIESLVALSFGASLISIFARLGGGIFTKGADVGADLVGKVEAGIPEDDPRNPAVIADNVGDNVGDCAGMAADLFETYAVTIVATMLIGTIMFSGQINYVELPLFIGGVCIIASIIGAFFVRLGSSENIMGALYKGFIVTAILSAIFIYFAVDYMFDDSTESMPLFWSSIVGLVVTAAIIWITEYYTSTEYRPVKSIAQSSETGHGTNV

SEQ ID NO: 171890 - protein, 297 aa, Unknown
  Bacterial polypetide isolated from the Sargasso Sea
MVAVSFVVGALCSGLAGFIGMQVATKANVRTTNAAQHSLGKALEIAFSGGSVMGMGVVGLGVLGVGSLFIIYRPMFDDINTVIQVLSGFSLGASSIALFARVGGGIYTKAADVGADLVGKVEAGIPEDHPLNPATIADNVGDNVGDVAGMGADLFESFVGSIIGAMVLGAAFISLSEFSGIEINAVLLPLFIAASGIIMSIVGTFFVKVKEGGDPHKALNMGEFISAGLMIAVTYFLIRYLLPESWIFNDIEYTSNGVFIATISGLIAGLLVGKVTEYYTATGKNPVLSIVKQSETG

SEQ ID NO: 171891 - protein, 266 aa, Unknown
  Bacterial polypetide isolated from the Sargasso Sea
MIAIHQRIQDGAKTFLFWEYAYLSVFVIIVALALGVTLEMIQGEHVVEGAGVKSAISFIVGAVFSASAGYMGMMVATTANVKTTEAAKDGANGLNKALKVAFKGGGVMGFVVVGLGLMGLTVLFGIWGAISEARVGDVYTGRDFYKMREAARYLAGFGFGASSIALFARVAGGIFTKAADVGADLVGKVMESIPEDDPRNPGVIADNVGDNVGDVAGMGADLFESYVGSIVAAMALSHCTSQMALPLWIASSGVLASCLGFWCVST

SEQ ID NO: 171892 - protein, 63 aa, Unknown
  Bacterial polypetide isolated from the Sargasso Sea
AWDNAKKYIEDGNYGGKGSEAHKAAVTGDTVGDPYKDTAGPAVNPMIKITNIVALLLLAVIAG

SEQ ID NO: 171893 - protein, 165 aa, Unknown
  Bacterial polypetide isolated from the Sargasso Sea
FFVAALTMTAVGRAAQGMVDEVRRQFRENPGIMEGTVKPDSARCVDISTQAALREMVLPGVTAVLAPVFVGKVLGVEALGGLLAGATVTGVLMALFMANAGGAWDNAKKYIEGGAYGGKGSDPHKAAVVGDTVGDPFKDTSGPSLNILIKLMSVVSLVLAPWFIA

SEQ ID NO: 171894 - protein, 308 aa, Unknown
  Bacterial polypetide isolated from the Sargasso Sea
TMFSARVKEEKDVAPALKRLLIVATALSALVMLFVSLWALPESFEINDEIYTNLDVYFCYLTGTVAGLLVGLLTEYYTSHDFKPVREVAKSSETGAATNIIFGLALGYHSATGSILLLAISIFLPFTLAGMYGVAIAAIGMLSTLVVGLTIDAYGPVADNAGGIAEMTGMGENIRDRTDVLDSAGNTTAAIGKGFAIGSAILTSLALFSAFLTRADLLDPSAKVMESINLLDPLVLTGLFVGAMLPFLFSAMTMKSVGKAAFDMIEEVRRQFRTIPGIMDGKAEPDYEKCVEISTTAALREMIAPGIL

SEQ ID NO: 171895 - protein, 315 aa, Unknown
  Bacterial polypetide isolated from the Sargasso Sea
MLVGLGYLIGATLSGIAGYVGMLVSVQANVRTAEASRKGLASGLSVAFKSGAVTGMLVAGLALLSIAVYYYLLLKFNVDEREIVNALVALGFGASLISIFARLGGGIFTKGADVGADLVGKVEAGIPEDDPRNPAVIADNVGDNVGDCAGMAADLFETYAVTIVATMVLSSIFFPGDLSMMIYPLTIGGACILTSIIGTFFVKLGRSKNVMGALYKGFVVSALASLVILYPVTNYVLGLENSYDLNNKSFSGMSLYYCGVIGLIITGLLIWVTEYYTGTNYRPVKSVASSSTTGHGTNVIQGLAISLEATAIPAL

SEQ ID NO: 171896 - protein, 154 aa, Unknown
  Bacterial polypetide isolated from the Sargasso Sea
MINIGENDKWTDKDKKIFDSADGKAEYSKCVDISTQSAIKEMVLPGLLAVLTPVIVGFMFGAETLGGLLAGVTVTGVLMAIFQSNSGGAWDNAKKMIEEGVEIDGNEYGKGSETHKAAVVGDTVGDPFKDTSGPSLNILIKLMSVVSLVIAPLI

SEQ ID NO: 171897 - protein, 265 aa, Unknown
  Bacterial polypetide isolated from the Sargasso Sea
YNLVGAICSSVAGFIGMYAATKANVRTATAAQKDGPAAALSVSFYGGSIMGLCVASLGLIGLGGLYYFYIPAEIDPHKLEGFAMGASVVALFSRVGGGIFTKSADVGADLVGKIEAGIPEDDPRNPGVIADNVGDNVGDVAGMGSDIFESYCGSMIASIAIAYTLGNQDMMMLPLALAATGLIASIIGIFIVKLQSAKAPASALRSGTLLAPVIFVAMAYFIINFFDGVGMNVWWCVIAGAVGGVLIGLITEYYTGGNPVKKIAE

SEQ ID NO: 171898 - protein, 168 aa, Unknown
  Bacterial polypetide isolated from the Sargasso Sea
MSMQAVGRAGGAVVIEVRRQFKKIPGIMKRKRKPDYGRLVDLLTKAAIKEMIVPSLLPVLSPIVLYFLILMIGGMEAALSAVGAMLLGVIITGLFVAISMTAGGGAWDNAKKYIEDGKFGGKGSEAHKAAVTGDTVGDPYKDTAGPAVNPMIKITNIVALLLLAVIAH

SEQ ID NO: 171899 - protein, 207 aa, Unknown
  Bacterial polypetide isolated from the Sargasso Sea
FSKVVGSKLEGIVVTFDLSNPFVVVGLLVGGMLPYLFGSMGMQAVGRAGGAVVVEVRRQFKKIPGIMKRKAKPDYGKLVDLLTKAAIKEMIVPSLLPVLSPIVLYIIILPIGGQVAALSSVGAMLLGVIITGLFVAISMTAGGGAWDNAKKYIEDGNYGGKGSEAHKAAVTGDTVGDPYKDTAGPAVNPMIKITNIVALLLLAVIAG

SEQ ID NO: 171900 - protein, 265 aa, Unknown
  Bacterial polypetide isolated from the Sargasso Sea
TAIPALIIVAGILYTNSLAGLYGIAIAVTAMLALTGMVVALDAYGPVTDNAGGIAEMSKLPKNVRKTTDALDAVGNTTKAVTKGYAIGSAGLGALVLFAAYTEDINYFSNVSGSALEGVNVTFDLSNPFVVAGLLIGGMLPYLFGSMGMQAVGRAGGAVVVEVRRQFKKIPGIMKGKRKPDYGKLVDLLTKAAIKEMILPSLLPVLSPIVLYFIILQIGGIEAALSSLGAMLLGVIITGLFVAVSMTAGGGAWDNAKKYMKMVIM

SEQ ID NO: 171901 - protein, 293 aa, Unknown
  Bacterial polypetide isolated from the Sargasso Sea
MEASASNILQLIILAGLLSIVYGFFTGKNILSSSAGNKKMQEIASAIQVGAKAYLNRQYKTIAIVGVVVLVIISFSFSILVGLGYLIGAALSGIAGYVGMLVSVQANVRTAEASRKGLSQGLSIAFKSGAVTGMLVAGLALLAIAVYYYLLLSNGVEEREIVNALVALGFGASLISIFARLGGGIFTKGADVGADLVGKVEAGIPEDDPRNPAVIADNVGDNVGDCAGMAADLFETYAVTIVATMVLSSIFFHGDLNMMVYPLSIGGACILTSIIGTFFVRLGKSKNIYGCFV

SEQ ID NO: 171902 - protein, 313 aa, Unknown
  Bacterial polypetide isolated from the Sargasso Sea
FCGVISVIYGFISSKQILSASAGDNKMQEIASAIQIGAKAYLNRQYTTIAIVGVIVLILISFLFSIWVGLGYVIGATLSGAAGYVGMLISVQANVRTAEASRTSLDDGLKIAFKSGAVTGMLVAGLALLSISVYYFLLLKLNIDEREIVNALVALGFGASLISIFARLGGGIFTKGADVGADLVGKVEAGIPEDDPRNPAVIADNVGDNVGDCAGMAADLFETYAVTIVATMVLSSIFFTGNTNMLIYPLSIGGICILTSIIGTYFVKLGKSQNIMGALYKGFIVTAVLSLLALYPVTDLVIGLDSQFSVNDK

SEQ ID NO: 171903 - protein, 265 aa, Unknown
  Bacterial polypetide isolated from the Sargasso Sea
VVGMSTSLNAIGDNITGMSLFYCGLLGLIITGMIIWVTEYYTGTNYRPVQSIAKSSTTGHGTNVIQGLAISLEATALPALIIVAGIITTYSIAGLFGIAIAVTTMLALAGMVVALDAYGPVTDNAGGIAEMSELDESVRKTTDALDAVGNTTKAVTKGYAIGSAGLGALVLFAAYTEDVSHYGLEVSFDLSNPYVVVGLLLGGLLPYLFGAMSMTAVGRAAGSVVEEVRRQFKEIPGIMKGKGKPEYGTCVDILTKAAIKEMIIP

SEQ ID NO: 171904 - protein, 323 aa, Unknown
  Bacterial polypetide isolated from the Sargasso Sea
VESRELINALIALGFGASLISIFARLGGGIFTKGADVGADLVGKVEAGIPEDDPRNPAVIADNVGDNVGDCAGMAADLFETYAVTIVATMVLASIFFQNNMDLMIYPLAIGGGCIIASIIGTFFVKLGKSKNIMGALYKGFIVTAIISLVLLYPITSKIIGLDELFKVGSKTFSGLDLYYCGVVGLIVTGLIIWVTEYYTGTNYRPVRSVAKSSTTGHGTNVIQGLAVSMEATALPALIIVAGIIVTNEFAGLFGIAIAVTAMLALTGMVVALDAYGPVTDNAGGIAEMSKLPKNVRKTTDALDAVGNTTKAVTKGYAIGSAG

SEQ ID NO: 171905 - protein, 69 aa, Unknown
  Bacterial polypetide isolated from the Sargasso Sea
MTAGGGAWDNAKKYIEDGKYGGKGSEAHKAAVTGDTVGDPYKDTAGPAVNPMIKITNIVALLLLAVIAG

SEQ ID NO: 171906 - protein, 84 aa, Unknown
  Bacterial polypetide isolated from the Sargasso Sea
MLLGVIITGLFVAVSMTAGGGAWDNAKKYIEDGNHGGKGSEAHKAAVTGDTVGDPYKDTAGPAVNPMIKITNIVALLLLAVIAG

SEQ ID NO: 171907 - protein, 279 aa, Unknown
  Bacterial polypetide isolated from the Sargasso Sea
AITGLLIWVTEYYTGTNYRPVKSVASSSTTGHGTNVIQGLAVSMEATAIPALIIVGGILLTNYIAGLFGIAIAVTTMLALAGMVVALDAYGPVTDNAGGIAEMSNLPKNVRKTTDALDAVGNTTKAVTKGYAIGSAGLGALVLFAAYTEDIKHFSKVAGSNLEGIVVTFDLSNPFVVVGLLVGGMLPYLFGSMGMQAVGRAGGAVVIEVRRQFKKIPGIMKRKAKPDYGKLVDLLTKAAIKEMIIPSLLPVLSPIVLYLFILPDRRSRLQPYHQLAQCC

SEQ ID NO: 171908 - protein, 264 aa, Unknown
  Bacterial polypetide isolated from the Sargasso Sea
LFGIAIAVTAMLALAGMVVALDAYGPVTDNAGGIAEMSNLDENVRKTTDALDAVGNTTKAVTKGYAIGSAGLGALVLFAAYVEDLKLISYLTPNFSLENPYVVVGLLIGGLLPYLFASMGMMAVGRAGGAVVEEVRKQFADNPGIMTGETKPDYSRSVDMLTRSAIKEMIIPSMLPVLSPIVLFFIVSIVADQNAAVSAVGAMLLGVIVTGIFVAISMTAGGGAWDNAKKYVEDGNFGGKGSEAHKAAVTGDTVGDPYKDTAGP

SEQ ID NO: 171909 - protein, 300 aa, Unknown
  Bacterial polypetide isolated from the Sargasso Sea
TNSLAGLYGIAIAVTAMLALTGMVVALDAYGPVTDNAGGIAEMSKLSKNVRKTTDALDAVGNTTKAVTKGYAIGSAGLGALVLFAAYTEDIKYFSTVKGSALEGVIVTFDLSNPFVVAGLLIGGMLPYLFGSMGMQAVGRAGGAVVIEVRRQFKKIPGIMKGKRKPDYGRLVDLLTKAAIKEMIIPSLLPVLSPVVLYFIILQIGGMEAALSSLGAMLLGVIITGLFVAVSMTAGGGAWDNAKKYIEDGNFGGKGSEAHKSAVTGDTVGDPYKDTAGPAVNPMIKITNIVALILLAVIAH

SEQ ID NO: 171910 - protein, 105 aa, Unknown
  Bacterial polypetide isolated from the Sargasso Sea
VLYFIILSIGGQVAALAAVGAMLLGVIITGLFVAVSMTAGGGAWDNAKKYIEDGNHGGKGSDAHKAAVTGDTVGDPYKDTAGPAVNPMIKITNIVALLLLAVIAG

SEQ ID NO: 171911 - protein, 204 aa, Unknown
  Bacterial polypetide isolated from the Sargasso Sea
VAGSNLEGIVVTFDLSNPFVVVGLLVGGMLPYLFGSMGMQAVGRAGGAVVIEVRRQFKKIPGIMKRKSKPDYGKLVDLLTKAAIKEMIVPSLLPVLSPIVLYFFILPIGGQVAALSSVGAMLLGVIITGLFVAISMTAGGGAWDNAKKYIEDGNYGGKGSDAHKAAVTGDTVGDPYKDTAGPAVNPMIKITNIVALLLLAVISG

SEQ ID NO: 171912 - protein, 239 aa, Unknown
  Bacterial polypetide isolated from the Sargasso Sea
FSILVGLGYLIGAALSGIAGYVGMLVSVQANVRTAEASRKGLSQGLSIAFKSGAVTGMLVAGLALLSIAVYYYLLLTFNVDEREIVNALVALGFGASLISIFARLGGGIFTKGADVGADLVGKVEAGIPEDDPRNPAVIADNVGDNVGDCAGMAADLFETYAVTIVATMVLSSIFFHGDLNMMVYPLSIGGACILTSIIGTFFVKLGNSKNIMAALYKGFVVTAVTSLVILYPNYSIMF

SEQ ID NO: 171913 - protein, 244 aa, Unknown
  Bacterial polypetide isolated from the Sargasso Sea
MNLVPIILGFFGLLAAYLLYAQVKKYPAGEKNLTDISDEIHLGAMAFMKKEYSILFMFSLILVFGIYIGLGLSSTIAFIVGALSSSITGFIGMYTATKANVRTATAAQNSGVSDSLSVAFFGGSIMGLTVAAMGLLGLGLLYILYGSDPATASTIHGFGMGASTVALFSRVGGGIFTKSADVGADLVGKVEKDIPEDDPRNPGVIADNVGDNVGDVAGMGSDIFESYCGAIIATIAIASTMLQS

SEQ ID NO: 171914 - protein, 291 aa, Unknown
  Bacterial polypetide isolated from the Sargasso Sea
VIVAIILFLTLGLYVSIGFLIGAVLSGIAGYIGMNVSVRANVRTTQAATEGLQPALDIAFKSGAITGLLVVGLGLLGVAGYYAFLLSANVETRLLIESLVALSFGASLISIFARLGGGIFTKGADVGADLVGKVEAGIPEDDPRNPAVIADNVGDNVGDCAGMAADLFETYAVTIVATMLIGTIMFSGQINYVELPLLIGGVCIIASIIGAFFVRLGSSENIMGALYKGFIVTAVLSAIFIYFAVDYMFDDSNLSMPLFWSSIVGLVVTAAIIWITEYYTSTEYRPVKSML

SEQ ID NO: 171915 - protein, 236 aa, Unknown
  Bacterial polypetide isolated from the Sargasso Sea
KAVTKGYAIGSAGLGALVLFAAYTEDIKHFSKVAGSNLEGIIVTFDLSNPFVVVGLLIGGMLPYLFGSMGMQAVGRAGGAVVIEVRRQFKKIPGIMKRKAKPDYGRLVDLLTKAAIKEMIIPSLLPVLSPIVLYIIIYFIGGQVAALSAVGAMLLGVIITGLFVAVSMTAGGGAWDNAKKYIEDGKFGGKGSEAHKAAVTGDTVGDPYKDTAGPAVNPMIKITNIVALLLLAVIAG

SEQ ID NO: 171916 - protein, 228 aa, Unknown
  Bacterial polypetide isolated from the Sargasso Sea
TTKAVTKGYAIGSAGLGALVLFAAYVEDLKLVPTLTPNFSLENPYVVVGLLIGGLLPYLFASMGMMAVGRAGGAVVEEVRKQFSDNPGIMTGESKPDYSKSVDMLTRSAIKEMIIPSMLPVLSPIILFFIVSIVADQNAAVSAVGAMLLGVIVTGIFVAISMTAGGGAWDNAKKYVEDGNFGGKGSEAHKAAVTGDTVGDPYKDTAGPAVNPMIKITNIVALLLLAAL

SEQ ID NO: 171917 - protein, 320 aa, Unknown
  Bacterial polypetide isolated from the Sargasso Sea
LISIFARLGGGIFTKGADVGADLVGKVEAGIPEDDPRNPAVIADNVGDNVGDCAGMAADLFETYAVTIVATMVLSSIFFQNDLMMMVYPLTIGGACIVTSILGTFFVRLGSSKNIMLALYKGFIVTAITSLLILYPLTDYVLGLDKVYSIGNKQFSGLNLYYCSVIGLLITGLLIWVTEYYTGTNYRPVKSVAASSTTGHGTNVIQGLAVSMEATAIPALIIVGGILLTNYIAGLYGIAIAVTAMLALAGMVVALDAYGPVTDNAGGIAEMSNLPKNVRKTTDALDAVGNTTKAVTKGYAIGSAGLGALVLFAAYTEDIK

SEQ ID NO: 171918 - protein, 250 aa, Unknown
  Bacterial polypetide isolated from the Sargasso Sea
MIGTLTIIIITGLLAILYGYIVGKQILLANPGNKKMQEIANAIQEGARAYLNRQYKTISIVGVVILVIITLALGIWVGIGFFIGSFLSGVAGYVGMLVSVQANVRTAEASRNGLSAGLNIGFKSGAVTGMLVAGLALLSISIYYLFLLKMEIPEREIINALVGLGFGASLISIFARLGGGIFTKGADVGADLVGKVEAGIPEDDPRNPAVIADNVGDNVGDCAGMAADLFETYAVTIVATIGFIFNFFCN

SEQ ID NO: 171919 - protein, 292 aa, Unknown
  Bacterial polypetide isolated from the Sargasso Sea
YVGMNISVRSNVRTTHAASNSLAEGLSVSFKAGAVTGMLVAGFALLSIAIFYFVLHNSGSFPGREIVAPLVSLGFGASLISIFARLGGGIFTKGADVGADLVGKVEAGIPEDDPRNPAVIADNVGDNVGDCAGMAADLFETYVVTVVATMVLASIFFIENSYTMMMFPLAIAGVCALTSIIGTYFVRLGKNNNIMAALYRGFAVSAILSAVLLYFVTDYIVGLNNVLVVEGTSTQFTGMSLFICGLLGLIITGLIIWVTEYYTGTNYRPVQSIAQSSTTGHGTNVIQGLAIS

SEQ ID NO: 171920 - protein, 271 aa, Unknown
  Bacterial polypetide isolated from the Sargasso Sea
MVGISSAIKNGALAFLNAEYKLLFFFVIGASLALFFISTQVETTSWLIIPAFVVGAVFSGLAGNIGMRIATDANSRTTQAARTSLPKALNVAFGGGTVMGLGVAGLAVFGLSIFFLFFVNYFITEGGNFYTEMTIVLEALAGFSLGAESIALFARVGGGIYTKAADVGADLVGKVEAGIPEDDPRNPATIADNVGDNVGDVAGMGADLFGSYVATVLASMVLGNYIIKDMSDYGASQFSDAFSGMGPNIIAFIHSWCWYHSVYNWNTIYKN

SEQ ID NO: 171921 - protein, 273 aa, Unknown
  Bacterial polypetide isolated from the Sargasso Sea
IPEDHPLNPATIADNVGDNVGDVAGMGADLFESYVGSIIGSMVLGATILTVGDVPKFDASFVILPLVIAASGIIVSIIGTFLVSVKEGGSPQKALNIGEFGSSAIMIAVMYFLITSLLPNTFTLGGNPYTSLGVFWASTIGLLAGLGIGLITEHYTGTNTSPTLSIARQSLTGPATNIIAGLGVGMQSTAGPILIIAAGIVGAHHFAGLYGVAMAALGMLANTGIQLAVDAYGPISDNAGGIAEMAELPAEVRERTDKLDAVGNTTAAIGKGL

SEQ ID NO: 171922 - protein, 319 aa, Unknown
  Bacterial polypetide isolated from the Sargasso Sea
MLHLNLGAVTGMLVAGLALLSIAVYYFLLLSFNIDEREIVNALVALGFGASLISIFARLGGGIFTKGADVGADLVGKVEAGIPEDDPRNPAVIADNVGDNVGDCAGMAADLFETYAVTIVATMVLSSIFFIGDLNMMIYPLTIGGACLITSIIGTFFVKLGKDKNVMNALYKGFIVSAVASLIILWPVTDYVIGFTTEYTVNDKTFNGMSLYYCGVIGLVITGLLIWITEYYTGTSYRPVKSVALSSTTGHGTNVIQGLAVSMEATAVPALIIVAGILITNTIAGLFGIAIAVTTMLALAGMVVALDAYGPVTDNAGGI

SEQ ID NO: 171923 - protein, 272 aa, Unknown
  Bacterial polypetide isolated from the Sargasso Sea
PDGEDKVKKIGDQIHAGALAFMKTEYKYLSIFIAVIVLLAWYALGPYTAISIVVGAICSSVAGFIGMYAATKANVRTATAAQKDGPAAALSVSFYGGSIMGLCVASLGLIGLGGLYYFYIPAEIDPHKLEGFAMGASVVALFSRVGGGIFTKSADVGADLVGKIEAGIPEDDPRNPGVIADNVGDNVGDVAGMGSDIFESYCGSMIASIAIAYTLGNQDMMMLPLALAATGLIASIIGIFIVKLQSAKAPASALRSGTLLAPSNICGYGLFH

SEQ ID NO: 171924 - protein, 172 aa, Unknown
  Bacterial polypetide isolated from the Sargasso Sea
LFGALSMTAVGRAAGSVVLEVRRQFKEIPGIMEGKGKPEYGTCVDILTKSAIKEMIIPSMLPVLSPIAVYFVILLIAGQTAALSCLGALLLGVIITGLFVAISMTAGGGAWDNAKKFIEDGNHGGKGSEAHKAAVTGDTVGDPYKDTAGPAVNPMIKITNIVALLLLAAISI

SEQ ID NO: 171925 - protein, 264 aa, Unknown
  Bacterial polypetide isolated from the Sargasso Sea
MPAFIPPLLGLIGLLIALGIFRVVLSYPEGNPEVKKIGDMIHSGAMSFMKTEYMYLVVFVLVLAVLVFFALGWETATAVLVGASSSALAGFIGMYAATKANTRTAAAAQDSGAASALTISFYGGSIMGLCVASLGLLGLGGLFYFLGEGHYLEGFGMGASVVALFSRVGGGIFTKSADVGADLVGKVEAGIPEDDPRNPGVIADNVGDNVGDVAGMGSDIFESYCGSMIATIAIAYTMTEANNGPLMSLPLALASIGLISSILG

SEQ ID NO: 171926 - protein, 231 aa, Unknown
  Bacterial polypetide isolated from the Sargasso Sea
GYAIGSAGLGALVLFAAYTEDIKHFSKVAGSNLEGIVVTFDLSNPFVVVGLLIGGMLPYLFGSMGMQAVGRAGGAVVIEVRRQFKKIPGIMKRKSKPDYGRLVDLLTKAAIKEMIIPSLLPVLSPIVLYLIILPIGGQVAALSSVGAMLLGVIITGLFVAVSMTAGGGAWDNAKKYIEDGKFGGKGSEAHKAAVTGDTVGDPYKDTAGPAVNPMIKITNIVALLLLAVIAG

SEQ ID NO: 171927 - protein, 220 aa, Unknown
  Bacterial polypetide isolated from the Sargasso Sea
RQFREIPGIMEGTGTPEYAKCVDISTKAALKEMLLPGLITIITPIIIGLMFGAEPLGGYMAGVCVSGVMWAIFQNNSGGAWDNAKKSFEAGVEINGEMTYKGSDAHKAAVTGDTVGDPFKDTSGPSMNILIKLTCLVGLVIAPILGNHDSESALLDFNNENLEIKIQENKKKEYSVEIKAENEKTKELLIEVKISGNQKNVMSAVENITPEINQIIDIDS

SEQ ID NO: 171928 - protein, 256 aa, Unknown
  Bacterial polypetide isolated from the Sargasso Sea
ALYKGFIATAILSLVVLYPVTEYVIGFDKNYVVGSNIFTGLNLYYCGVIGLIITGLLIWVTEYYTGTSYRPVKSVAASSTTGHGTNVIQGLAVSMEATAIPALIIVAGILLTNYIAGLFGIAIAVTTMLALAGMVVALDAYGPVTDNAGGIAEMSNLPKNVRKTTDALDAVGNTTKAVTKGYAIGSAGLGALVLFAAYTEDIKHFSKVAGSKLEGIVVTFDLSDPFVVVGLLIGGMLPYLFGSMGMQAVGRAGGAV

SEQ ID NO: 171929 - protein, 257 aa, Unknown
  Bacterial polypetide isolated from the Sargasso Sea
FALIWIVFDLASGIGFLIGAFFSGAAGYVGMNISVRSNVRTTHAASKSLAQGLSVSFKAGAVTGMLVAGFALLSIAIFYFVLHNSGSFPGREIVAPLVSLGFGASLISIFARLGGGIFTKGADVGADLVGKVEAGIPEDDPRNPAVIADNVGDNVGDCAGMAADLFETYVVTVVATMVLASIFFIENSYTMMIFPLAIAGVCALTSIIGTYFVRLGKNNNIMAALYRGFAVSAILSAILLYFVTDYIVGLDNVLVVE

SEQ ID NO: 171930 - protein, 113 aa, Unknown
  Bacterial polypetide isolated from the Sargasso Sea
CCQFFSPIVLYIIILIIGGKEAALSALGAMLLGVIVTGLFVAISMTAGGGAWDNAKKYIEDGNFGGKGSEAHKAAVTGDTVGDPYKDTAGPAVNPMIKITNIVALLLLSVIAH

SEQ ID NO: 171931 - protein, 299 aa, Unknown
  Bacterial polypetide isolated from the Sargasso Sea
CKAYLARQYKTIAIVGAVVLVIVSIAFSPLVGLGYLIGAALSGIAGYVGMLVSVEANVRTAEASRKGLAQGLSVAFKSGAVTGMLVAGLALLSIAVYYYILLKSNVDEREIVNALVALGFGASLISIFARLGGGIFTKGADVGADLVGKVEAGIPEDDPRNPAVIADNVGDNVGDCAGMAADLFETYAVTIVATMVLSSIFFVGDLNMMIYPLSIGAACLLTSIIGTFFVKLGKSNNVMNALYKGFVVSAVASLIILWPVTDHVIGFTNEYTVNNKIFNGMDLYYCGVIGLVITGLLIW

SEQ ID NO: 171932 - protein, 187 aa, Unknown
  Bacterial polypetide isolated from the Sargasso Sea
PYVVVGLLIGGMLPYLFGSMGMQAVGRAGGAVVIEVRRQFKKYPGIMKKKQKPDYAKLVDLLTVAAIKEMIIPSLLPVLSPIVLYFIIFAIGGQVAALASVGAMLLGVIITGLFVAVSMTAGGGAWDNAKKYIEDGNHGGKGSEAHKAAVTGDTVGDPYKDTAGPAVNPMIKITNIVALMLLAVIAG

SEQ ID NO: 171933 - protein, 279 aa, Unknown
  Bacterial polypetide isolated from the Sargasso Sea
FRVGGGIYTKSADVGADLVGKVEAGIPEDDPRNPGVIADNVGDNVGDIAGMGSDIFESYCGSMVACIAIASTFTILDREGMMFLPLALASIGLISSVLGIIIVRLFSSSSPALAMRIGTIAAPIIFVIAAYFVINLLVQETGTNIWLAVVCGSAGGIAIGLITEYYTGSTPIVKIAESGQTGPATVMITGLSVGMQSVVAPIACLALIIFISTQLTGLYGVGIAAVGMLSTVGITMAIDAYGPVADNAGGIAEMAGMPSETREITDELDEQGNTTAAIG

SEQ ID NO: 171934 - protein, 306 aa, Unknown
  Bacterial polypetide isolated from the Sargasso Sea
YDGAMAFLWAEYRLLSGFIVIVAIALLLGGEENGLGMETMIAFIIGALCSVAAGFSGMRSATSANGRTAQAAADGGQSAALTTSYNGGAVMGLAVGGLGLAGISLMYYLTQTEFLTVENIAGFGMGASSIALFARVGGGIYTKAADVGADLVGKVEAGIPEDDPRNPGVIADNVGDNVGDVAGMGADIFESFVGSIIAAMVIAAAMDNADVSADYLMIPIVLAVVGYIASIIGVFSITAMQNMDPGAALRNTTFIAAALFIGGGYLVLEYLDLPTTVIQAVAIGSLVGILIGLVTEYYTGIEDVFF

SEQ ID NO: 171935 - protein, 214 aa, Unknown
  Bacterial polypetide isolated from the Sargasso Sea
YTEDLDHFAKDPSSPLYGIEVSFDLSNPYVVVGLLLGGLLPFLFGALSMTAVGRAAGSVVLEVRRQFKEIPGIMEGKGKPEYGTCVDILTKSAIKEMIVPSMLPVLSPIVVYFVILIIAGQSAALSCLGALLLGVIITGLFVAISMTAGGGAWDNAKKYIEDGNHGGKGSEAHKAAVTGDTVGDPYKDTAGPAVNPMIKITNIVALLLLAAISL

SEQ ID NO: 171936 - protein, 300 aa, Unknown
  Bacterial polypetide isolated from the Sargasso Sea
LNSIFARLGGGIFTKGADVGADLVGKVEAGIPEDDPRNPAVIADNVGDNVGDCAGMAADLFETYAVTIVATMVLASIFFPDSSNMMVYPLAIGGSCIITSIIGTWFVRLGKSKNIMGALYKGFIATAILSLLILYPLTNATLGLNETYSYSNITFSGFDLYICAVIGLIITGLIIWITEYYTGTNFRPVKSVAQSSTTGHGTNVIQGLAISMEATAIPALIIVVGIISTFKFAGLFGIAIAVTSMLALTGMVVALDAYGPVTDNAGGIAEMSKLPKNVRKTTDALDAVGNTTKAVTKGYA

SEQ ID NO: 171937 - protein, 295 aa, Unknown
  Bacterial polypetide isolated from the Sargasso Sea
GFFTGKNILSSSAGNHKMQEIASAIQVGAKAYLNRQYKTIAVVGIVVLIIISFSFSILVGIGYLIGAALSGIAGYVGMLVSVQANVRTAEASRKGLSQGLAIAFKSGAVTGMLVAGLALLSIAVYYYLLLSFGVEEREIVNALVALGFGASLISIFARLGGGIFTKGADVGADLVGKVEAGIPEDDPRNPAVIADNVGDNVGDCAGMAADLFETYAVTIVATMVLSSIFFHGDLNMMVYPLSIGGACILTSIIGTFFVKLGKSKNIMAALYKGFIVTAVTSLIILYPNYQIMFWD

SEQ ID NO: 171938 - protein, 108 aa, Unknown
  Bacterial polypetide isolated from the Sargasso Sea
SPIVLYMFILPIGGKEAALSAVGAMLLGVIITGLFVAISMTAGGGAWDNAKKYIEDGNFGGKGSEAHKAAVTGDTVGDPYKDTAGPAVNPMIKITNIVALLLLAVIAG

SEQ ID NO: 171939 - protein, 131 aa, Unknown
  Bacterial polypetide isolated from the Sargasso Sea
EYAKCVEISTQSAIREMMAPGLLAIITPVVVGYFFGAETLGGLLAGVTVSGVLMAIFQSNAGGAWDNAKKMFEGGVTIDGVEYKKGTDAHKAAVTGDTVGDPLKDTSGPSINILIKLMSVVALVVYPLISG

SEQ ID NO: 171940 - protein, 221 aa, Unknown
  Bacterial polypetide isolated from the Sargasso Sea
FAAYTSDLNYFSSNPSQFPYFAGVELNFSLENPYVVVGLLLGGLLPYLFGALSMTAVGRAAGSVVIEVRRQFKEIKGIMTGKGKPDYARAVDLLTKAAIKEMIVPSLLPVLAPVIFYFVIFYITGGDKSAAFSAVGAMLLGVIVTGLFVALSMTAGGGAWDNAKKYIEDGNHGGKGSEAHKAAVTGDTVGDPYKDTAGPAVNPMIKITNIVALMLLAILAH

SEQ ID NO: 171941 - protein, 216 aa, Unknown
  Bacterial polypetide isolated from the Sargasso Sea
MEASALNILQIIILAGLLSIVYGFFTGKNILSASAGNSKMQEIASAIQIGAKAYLNRQYKTIAVVGVVVLVIISFAFSILVGIGYLIGAALSGIAGYVGMLVSVQANVRTAEASRKGLSQGLAIAFKSGAVTGMLVAGLALLAIAVYYYLLLSFGVDEREIVNALVALGFGASLISIFARLGGGIFTKGADVGADLVGKVEAGIPEDDPRNPAVIA

SEQ ID NO: 171942 - protein, 104 aa, Unknown
  Bacterial polypetide isolated from the Sargasso Sea
IIPSLLPVLSPIVLYIIILPIGGQVAALSSVGAMLLGVIITGLFVAVSMTAGGGAWDNAKKYIEDGKFGGKGSEAHKAAVTGDTVGDPYKDTAGPAVNPMIKIT

SEQ ID NO: 171943 - protein, 271 aa, Unknown
  Bacterial polypetide isolated from the Sargasso Sea
VHDKHFSGMSLFICGILGLIITGLIIWVTEYYTGTNYRPVQSIAQASTTGHGTNVIQGLAISLESTALPAIIIVAGIILTHSIAGLFGIAIAVTTMLALAGMVVALDAYGPVTDNAGGIAEMANLDDNVRKTTDALDAVGNTTKAVTKGYAIGSAGLGALVLFAAYTEDLEHFASDPNASLYGVEVSFDLSNPYVVVGLLLGGLLPFLFGALSMTAVGRAAGSVVLEVRRQFKEIPGIMKGESKPEYGTCVDILTKSAIKEMIIPSMLPVL

SEQ ID NO: 171944 - protein, 247 aa, Unknown
  Bacterial polypetide isolated from the Sargasso Sea
MDIIAITLACGVCALIYGIWAGQRIFSADAGSDKMKEIAEAIQEGATAYLNRQYSTITMVGIIVAIILFFTLGLYVSFGFILGAILSGIAGYIGMNVSVRANVRTTEAAKTSIESALDIAFKSGAITGMLVVGLGLLGVAGYFWFLSAMNVDQRLLIESLVALSFGASLISIFARLGGGIFTKGADVGADLVGKVEAGIPEDDPRNPAVIADNVGDNVGDCAGMAADLFETYGVTIVATNVNCLDIV

SEQ ID NO: 171945 - protein, 284 aa, Unknown
  Bacterial polypetide isolated from the Sargasso Sea
GHGTNVIQGLAISMEATAIPALIIVVGIISTYNFAGLFGIAIAVTSMLALTGMVVALDAYGPVTDNAGGIAEMSKLPKNVRKTTDALDAVGNTTKAVTKGYAIGSAGLGALVLFAAYTEDIKYYSMDKTSSLYQTEVSFDLSNPYVVIGLLIGGLLPYLFGSMGMQAVGRAGGAVVIEVRRQFKKIPGIMKGKRKPDYGRLVDLLTKAAIKEMIVPSLLPVLSPIVLYIIILFIAGKVAALAALGAMLLGVIVTGLFVAISMTAGGGAWDNAKKYIEDGNFGGK

SEQ ID NO: 171946 - protein, 122 aa, Unknown
  Bacterial polypetide isolated from the Sargasso Sea
AIKEMVIPSLLPVLSPIVLYLIILPIGGQVAALSSVGAMLLGVIITGLFVAVSMTAGGGAWDNAKKYIEDGKFGGKGSEAHKAAVTGDTVGDPYKDTAGPAVNPMIKITNIVALLLLAVIAG

SEQ ID NO: 171947 - protein, 245 aa, Unknown
  Bacterial polypetide isolated from the Sargasso Sea
ISMKFFGENNGDPIAIERIRVFYSVLIGLAVGGLIAMLTEYYTAMGKKPVMGIIKNSSTGAATNIIAGLSLGMMSTFAPIILFAGAIWGAYACAGFYGVAIAASAMMATTAMQLAIDAFGPIADNAGGIAEMSELEPEVRERTDILDAVGNTTAAVGKGFAIASAALTALALFAAYVTFTGIEGINIFKAKVLAALFIGGMIPVVFSAMAMSSVGKAAMAMVKEVRRQFKEIPGIMESKAEPEYD

SEQ ID NO: 171948 - protein, 318 aa, Unknown
  Bacterial polypetide isolated from the Sargasso Sea
SMTGPATNIIAGLGVGMESTAIPIIIISVSIMGAYYFAGLYGIAMAALGMLANTGIQLAVDAYGPISDNAGGIAEMAELPSEVRERTDKLDAVGNTTAAIGKGFAIGSAALTALALFAAYMVKTGISTIDISNPMVMAGLFIGGMLPFLFSSMAMGAVGRAAMAMIEEVRRQFREIPELKKALEIMNLKDKNDWNDEDHRIYTNALGKAEHGRCVEISTESAIKEMIVPGLLAVITPVLIGFVPRFFGSDQGPEILGGLLAGVTVTGVLMAIFQSNSGGAWDNAKKMIEEGIVINSQELKKGSEAHKAAVVGDTVGDP

SEQ ID NO: 171949 - protein, 92 aa, Unknown
  Bacterial polypetide isolated from the Sargasso Sea
GGVLAGVTVSGVLMAIFQSNAGGAWDNAKKMVEEGITVNGEVLQKGSETHKAAVVGDTVGDPFKDTSGPSLNILIKLMSVVSLVIAPLIAIA

SEQ ID NO: 171950 - protein, 163 aa, Unknown
  Bacterial polypetide isolated from the Sargasso Sea
VGRAGGAVVVEVRRQFKKIPGIMKRKAKPDYGKLVDLLTKAAIKEMIVPSLLPVLSPIVLYLFILPIGGQVAALSSVGAMLLGVIITGLFVAISMTAGGGAWDNAKKYIEDGNFGGKGSEAHKAAVTGDTVGDPYKDTAGPAVNPMIKITNIVALLLLAVIAG

SEQ ID NO: 171951 - protein, 275 aa, Unknown
  Bacterial polypetide isolated from the Sargasso Sea
SLIFIYPVTQIVLGDMSKEFTFGDTTFSGTSLYICSIIGIVITGLLIWITEYYTGTNYRPVQSVAKASTTGHGTNVIQGLAVSMEATALPALVIVIGIVMTFQLAGLFGIAIAVTAMLALAGMVVALDAYGPVTDNAGGIAEMSNLDENVRKTTDALDAVGNTTKAVTKGYAIGSAGLGALVLFAAYVEDLKLVEYLTPDFSLENPYVVVGLLIGGLLPYLFASMGMMAVGRAGGAVVEEVRKQFADNPGIMTGDSKPDYSRSVDMLTRSAIKEM

SEQ ID NO: 171952 - protein, 219 aa, Unknown
  Bacterial polypetide isolated from the Sargasso Sea
VVGAACSSLAGFIGMYAATKANVRTATAAQQDGAAAALSVSFYGGSVMGLCVASLGLIGLGGLFYFFSESHVHALEGFGMGASVVALFSRVGGGIFTKSADVGADLVGKIEAGIPEDDPRNPGVIADNVGDNVGDVAGMGSDIFESYCGSMIASIAIAYTLGSKEMMMFPLALTSIGLIASIIGIIIVKLQSAKAPASALRSGTLLAPAIFIVMAYFLT

SEQ ID NO: 171953 - protein, 276 aa, Unknown
  Bacterial polypetide isolated from the Sargasso Sea
MTGIFNLIIAAGLLAILYGYIVGKQILSASPGNSKMRDIAGAIQEGARAYLNRQYKTISIVGFIILIVITFILGVWVGLGYFIGAFLSGAAGYVGMLVSVQANVRTAEASRKGLSAGLNIGFKSGAITGMLVAGLALLSISVYYLLLLKLNVESREIINALVGLGFGASLISIFARLGGGIFTKGADVGADLVGKVEAGIPEDDPRNPAVIADNVGDNVGDCAGMAADLFETYAVTIVATMVLSSIFFIDNLNMMLYPLCIGASCILTSIIGTFFV

SEQ ID NO: 171954 - protein, 89 aa, Unknown
  Bacterial polypetide isolated from the Sargasso Sea
SCLGALLLGVIITGLFVAISMTAGGGAWDNAKKYIEDGNHGGKGSEAHKAAVTGDTVGDPYKDTAGPAVNPMIKITNIVALLLLAAISL

SEQ ID NO: 171955 - protein, 234 aa, Unknown
  Bacterial polypetide isolated from the Sargasso Sea
IIFSGILAVGYSYLLSGQILSSSAGNEKMRDIAGAIQIGAKAYLNRQYKTIAIVGLIVLIIVTYFFNFLVGFGYLIGATLSGIAGYVGMLISVQANVRTAEASRKSLQAGLSIAFKSGAITGLLVAGLALLSIAIYYLILVNLNTDSRDIINALVALGFGASLISIFARLGGGIFTKGADVGADLVGKVEAGIPEDDPRNPAVIADNVGDNVGDCAGMAADLFETYAVTIVATM

SEQ ID NO: 171956 - protein, 199 aa, Unknown
  Bacterial polypetide isolated from the Sargasso Sea
MAGLLLGAMLPFVFSPLSMKAVGKAAMSTIEEVRRQFTDLPKLKAALEIMRKYDSDLSKASKEDLKIFNDADGVAEYSKCVEISTQAALREMVLPGLMAISVPVIIGFAGGAEMLGGLLAGVTSCGVLMAIFQSNAGGAWDNAKKMIEEDGRKGSEAHKAAVVGDTVGDPFKDTSGPSLNILLKLIAVVALVIAPLLVG

SEQ ID NO: 171957 - protein, 286 aa, Unknown
  Bacterial polypetide isolated from the Sargasso Sea
AVIADNVGDNVGDCAGMAADLFETYAVTIVATMVLASIFFPNDNGMMIYPLAIGGSCILTSIAGTWFVRLGKSKNIMGALYKGFIATALLSLLILYPVTKSIISFDQSYIVNNKSFNGFDLYICAVAGLVITGLIIWVTEYYTGTNYRPVKSVANSSTTGHGTNVIQGLAISMEATAIPAIIIVVGILFTNNLAGLYGIAIAVTSMLALTGMVVALDAYGPVTDNAGGIAEMSKLPKNVRKTTDALDAVGNTTKAVTKGYAIGSAGLGALVLFAAYTEDIKFYAND

SEQ ID NO: 171958 - protein, 301 aa, Unknown
  Bacterial polypetide isolated from the Sargasso Sea
GEILLTNHIAVLYGIAIAVTTMLALAGMVVALDAYGPVTDNAGGIAEMSNLPKNVRKTTDALDAVGNTTKAVTKGYAIGSAGLGALVLFAAYTEDIKHFSKVAGSNLEGIIVTFDLSNPFVVVGLLIGGMLPYLFGSMGMQAVGRAGGAVVIEVRRQFKKIPGIMKRKAKPDYGKLVDLLTKAAIKEMIIPSLLPVLSPIVLYIIIYFIGGQVAALSAVGAMLLGVIITGLFVAVSMTAGGGAWDNAKKYIEDGKFGGKGSEAHKAAVTGDTVGDPYKDTAGPAVNPMIKITNIVALLLLA

SEQ ID NO: 171959 - protein, 320 aa, Unknown
  Bacterial polypetide isolated from the Sargasso Sea
RMQEIAEAIQIGAKAYLNRQYKTIAIVGFIVLAIVTYFFNYLVGIGYFIGAFLSGVAGYVGMLISVKANVRTAEASRTSLQSGLTIAFKSGAITGLLVAGLALLAITIYYIILINLNVDSREIINALVALGFGASLISIFARLGGGIFTKGADVGADLVGKVEAGIPEDDPRNPAVIADNVGDNVGDCAGMAADLFETYAVTIVATMVLASIFSPQDYNLMVYPLAIGGACIITSIIGTWFVKLGKSKNIMGALYKGFIVTAITSLIVLYPVTESIVGLNSTYNNNAGAIFTGFNLYICGVVGFVITGLLIWVTEYYTRN

SEQ ID NO: 171960 - protein, 212 aa, Unknown
  Bacterial polypetide isolated from the Sargasso Sea
EDIKHFSKEAGSALEGIVVTFDLSNPYVVVGLLIGGMLPYLFGSMGMQAVGRAGGAVVVEVRRQFKKFPGIMKRKQKPDYAKLVDLLTVAAIKEMIIPSLLPVLSPVVLYFIILSIGGQVAALAAVGAMLLGVIITGLFVAVSMTAGGGAWDNAKKYIEDGNHGGKGSEAHKAAVTGDTVGDPYKDTAGPAVNPMIKITNIVALLLLAVIAS

SEQ ID NO: 171961 - protein, 320 aa, Unknown
  Bacterial polypetide isolated from the Sargasso Sea
FDLYVSIGFIIGAVLSGIAGYIGMNVSVRANVRTTQAATEGLQSALDIAFKSGAITGLLVVGLGLLGVAGYYAFLLSANVETRKLIEALVALSFGASLISIFARLGGGIFTKGADVGADLVGKVEAGIPEDDPRNPAVIADNVGDNVGDCAGMAADLFETYAVTIVATMLIGTISFAGQTNYVELPLFIGGVCIIASIIGAFFVRLGSSENIMGALYKGFIVTAVLSAIFIYFAIDYMFNDSAKSMPLFWSSIVGLVVTAAIIWVTEYYTSTEYRPVKSIAQSSETGHGTNVIQGLAISMEATAVPAIIIALGIVFSFNL

SEQ ID NO: 171962 - protein, 299 aa, Unknown
  Bacterial polypetide isolated from the Sargasso Sea
YMPIIMSVLGLAYVFVRRSWVMKQDAGDGKMKEISDHIYEGALAFLNAEYRLLSVFVIVVSAVLAGISFIVPTTHILIVVSFIFGAFFSAYAGNIGMKIATKTNVRTTQAAKTSLPNALKISFAGGTVMGLGVAGLAVLGLTAFFIIFFNHFMGGVWAATDYGSASDTMTIVLETLAGFSLGAESIALFARVGGGIYTKAADVGADLVGKVEAGIPEDDPRNPATIADNVGDNVGDVAGMGADLFGSYVATVLAAMVLGNYVITDMGGSINDAFGGIGPILLPMAIAGLGIIISLIGTL

SEQ ID NO: 171963 - protein, 272 aa, Unknown
  Bacterial polypetide isolated from the Sargasso Sea
NVIQGLAVSLEATALPALIIVLGILFTNHIAGLFGIAISVTTMLALAGMVVALDAYGPVTDNAGGIAEMSNLPKSVRKTTDALDAVGNTTKAVTKGYAIGSAGLGALVLFAAYTEDIKFFSKMSGSSLENVSVSFDLSNPFVVVGLLIGGMLPYLFSSMSMQAVGRAGGAVVIEVRRQFKKIPGIMKRKRKPDYGKLVDLLTKAAIKEMVIPSLLPVLSPLILYFIISLVAGTEAALSSVGAMLLGVIITGLFVAISMTAGGGAWDNAKKFI

SEQ ID NO: 171964 - protein, 308 aa, Unknown
  Bacterial polypetide isolated from the Sargasso Sea
EDDPRNPAVIADNVVINVGDCAGMAADLFETYAVTIVATMVLSSIFFHGDLNMMVYPLSIGGACILTSIIGTFFVKLGKSKNIMAALYKGFIVTAVTSLIILYPITDYVLGLDNNYSISNKSFTGMSLYVCGVIGLIITGLLIWVTEYYTGTNYRPVKSVASSSTTGHGTNVIQGLAVSMEATAIPALIIVGGILLTNYIAGLFGIAIAVTTMLALAGMVVALDAYGPVTDNAGGIAEMSNLPKNVRKTTDALDAVGNTTKAVTKGYAIGSAGLGALVLFAAYTEDIKHFSKVAGSKLEGIVVTFDLS

SEQ ID NO: 171965 - protein, 235 aa, Unknown
  Bacterial polypetide isolated from the Sargasso Sea
TSWIEKQDQGTKKMVVIGSSIADGAMAFLRAEYRVLSVFVIAVAIILGVANKNNPESSVFIAFSFLIGAVASGLAGFLGMRVATKSNNRTTNAARDNLEKALNVAFSGGSVMGLSVVGLGVLGLGGLFLLYTNMYGSDFQSIGTVLNVLSGFSLGASSIALFARVGGGIYTKAADVGADLVGKVEAGIPEDHPLNPATIADNVGDNVGDVAGMGADLFESYVGSIIGSMVLGASI

SEQ ID NO: 171966 - protein, 206 aa, Unknown
  Bacterial polypetide isolated from the Sargasso Sea
FVGGMLPFLFSSMAMSAVGRAAMAMIEEVRRQFREIPELKKALELMNLKDKKDWSDQDHRMYNDAMGKAEHGRCVEISTESAIKEMIIPGLLAVITPVLIGFGPRFFGSDQGPEILGGLLAGVTVTGVLMAIFQSNSGGAWDNAKKMIEEGIVINSQELKKGSEAHKAAVVGDTVGDPFKDTSGPSLNILIKLMSVVSLVIAPLIK

SEQ ID NO: 171967 - protein, 182 aa, Unknown
  Bacterial polypetide isolated from the Sargasso Sea
GLLIGGMLPYLFGSMGMQAVGRAGGAVVVEVRRQFKKFPGIMKRKQKPDYAKLVDLLTVAAIKEMIVPSLLPVLSPVVLYFIILSIGGQVAALAAVGAMLLGVIITGLFVAVSMTAGGGAWDNAKKYIEDGNHGGKGSEAHKAAVTGDTVGDPYKDTAGPAVNPMIKITNIVALLLLAVIAG

SEQ ID NO: 171968 - protein, 278 aa, Unknown
  Bacterial polypetide isolated from the Sargasso Sea
MSLFICGLLGLIITGLIIWVTEYYTGTNYRPVQSIAQSSTTGHGTNVIQGLAISLEATALPALIIVAGIISTYSLAGLFGIAIAVTTMLALAGMVVALDAYGPVTDNAGGIAEMSNLDENVRKTTDALDAVGNTTKAVTKGYAIGSAGLGALVLFAAYTEDLDHFAKDSSSPLYGIEVSFDLSNPYVVVGLLLGGLLPFLFGALSMTAVGRAAGSVVLEVRRQFKEIPGIMEGKGKPEYGTCVDILTKSAIKEMIIPSMLPVLSPIVVYFVILFIAGQ

SEQ ID NO: 171969 - protein, 306 aa, Unknown
  Bacterial polypetide isolated from the Sargasso Sea
IAGDGTNVIQGLAISMESTALPVLLISASIIAAFSQAGLFGIAIAATTMLALAGMVVALDAYGPVTDNAGGIAEMSDLPENVRNITDTLDAVGNTTKAVTKGYAIGSAGLAALVLFAAYTSDLDHYFPNLTGLEFSLKDPYVVIGLFVGGMLPYLFGALGMQAVGRAGQAVVLEVQRQFKEKPGIMERTEKPEYGVLVDMLTKSAIKEMIIPSLLPVLAPILLYYVVSLTSGGPAQGFIALGAMLLGTIVTGLFVAISMTSGGGAWDNAKKYIEDGQLKDEDGNVQGKGTDAHKAAVTGDTVEILI

SEQ ID NO: 171970 - protein, 215 aa, Unknown
  Bacterial polypetide isolated from the Sargasso Sea
KSILSSSAGNAKMQEIASAIQIGAKAYLNRQYKTIAIVGVVVLVIVSFSFSILVGLGYLVGATLSGIAGYVGMLVSVQANVRTAEASRKGLDSGLNVAFKSGAVTGMLVAGLALLSIAVYYYLLLKFGIDEREIVNALVALGFGASLISIFARLGGGIFTKGADVGADLVGKVEAGIPEDDPRNPAVIADNVGDNVGDCAGMAADLFETYAVTIV

SEQ ID NO: 171971 - protein, 229 aa, Unknown
  Bacterial polypetide isolated from the Sargasso Sea
MPYSLISVILGLLGLLSAYLVYLKVRSSSEGEGRVKEIGDEIHLGAMVFMSAEYKRLAVFCLVCIAALYFSLGWQTSISFLLGALCSGTAGFIGMYSATKANVRTAVAAKEKGASEALNIAFFGGSIMGLTVAAMGLFGVGILFHYFAGDIKTIHAIEGFAMGASSVALFSRVGGGIFTKSADVGADLVGKVEAGIPEDDPRNPGVIADNVGDNIGDVAGMGSDIFESY

SEQ ID NO: 171972 - protein, 302 aa, Unknown
  Bacterial polypetide isolated from the Sargasso Sea
AQGLSVAFKSGAVTGMLVAGLALLSIAVYYYLLLKLNVDEREIVNALVALGFGASLISIFARLGGGIFTKGADVGADLVGKVEAGIPEDDPRNPAVIADNVGDNVGDCAGMAADLFETYAVTIVATMVLSSIFFVGDLNMMIYPLSIGGACILTSILGTFFVKLGKDKNVMNALYKGFIVSAVASLVILWPVTDYVIGFTNEYTVNGKTFNGMNLYYCGVVGLVITGLLIWITEYYTGTNYRPVKSVALSSTTGHGTNVIQGLAVSMEATAIPALIIVASILITNAVAGLFGIAIAVTTMLA

SEQ ID NO: 171973 - protein, 283 aa, Unknown
  Bacterial polypetide isolated from the Sargasso Sea
HGTNVIQGLAVSMEATALPALIIVAGILYTNSLAGLYGIAIAVTAMLALTGMVVALDAYGPVTDNAGGIAEMSRLPKNVRKTTDALDAVGNTTKAVTKGYAIGSAGLGALVLFAAYTEDIKYFSTVKDSTLEGVNVTFDLSNPFVVAGLLIGGMLPYLFGSMGMQAVGRAGGAVVIEVRRQFKKIPGIMKGKRKPDYGRLVDLLTKAAIKEMIIPSLLPVLSPVILYFVILQIGGLEAALSSLGAMLLGVIITGLFVAVSMTAGGGAWDNAKKYIEDGNLEAK

SEQ ID NO: 171974 - protein, 315 aa, Unknown
  Bacterial polypetide isolated from the Sargasso Sea
WIAGYVGMLVSVEANVRTAEASRKGLAQGLSVAFKSGAVTGMLVAGLALLAIAVYYYLLLKFKIEEREIVNALVALGFGASLISIFARLGGGIFTKGADVGADLVGKVEAGIPEDDPRNPAVIADNVGDNVGDCAGMAADLFETYAVTIVATMVLSSIFFVGDLNMMIYPLTIGAACLITSIIGTFFVKLGTNNNVMNALYKGFIVSAVASLAILWPVTDLVIGFTNEYTINDKTFNGMDLYYCGVIGLIITGLLIWITEYYTGTNYRPVKSVALSSTTGHGTNVIQGLAVSMEATAIPALIIVAGILITNFIAG

SEQ ID NO: 171975 - protein, 221 aa, Unknown
  Bacterial polypetide isolated from the Sargasso Sea
ALVLFAAYTEDIKFFSKVPGSSLEGINVSFDLSNPFVVIGLLVGGMLPYLFGSMGMQAVGRAGGAVVIEVRRQFKKIPGIMKGKRKPDYGKLVDLLTKAAIKEMILPSLLPVLSPIVLYLIIYLIGGQEAALSSVGAMLLGVIVTGLFVAISMTAGGGAWDNAKKFIEDGNYGGKGSESHKAAVTGDTVGDPYKDTAGPAVNPMIKITNIVALLLLAVIAH

SEQ ID NO: 171976 - protein, 110 aa, Unknown
  Bacterial polypetide isolated from the Sargasso Sea
YHLLFLYIVILPIGGQVAALASVGAMLLGVIITGLFVAISMTAGGGAWDNAKKYIEDGNFGGKGSEAHKAAVTGDTVGDPYKDTAGPAVNPMIKITNIVALLLLAVIAGS

SEQ ID NO: 171977 - protein, 155 aa, Unknown
  Bacterial polypetide isolated from the Sargasso Sea
MKNENDWDEDDRNLYEDALKKAEHGRCVEISTQSAIKEMVAPGVLAVITPVIVGFAFGPQTLGGLLAGVTVSGVLMAIFQSNAGGAWDNAKKMIEEGINIDGEVLKKGSEAHKASVVGDTVGDPFKDTSGPSLNILIKLMSVVSLVIAPLLKSFS

SEQ ID NO: 171978 - protein, 277 aa, Unknown
  Bacterial polypetide isolated from the Sargasso Sea
VVALDAYGPVTDNAGGIAEMSNLPKNVRKTTDALDAVGNTTKAVTKGYAIGSAGLGALVLFAAYTEDIKHFSKEAGSKLEGIVVTFDLSNPFVVVGLLIGGMLPYLFGSMGMQAVGRAGGAVVIEVRRQFKKIPGIMKRKSKPDYGKLVDLLTKAAIKEMVIPSLLPVLSPIVLYLIILPIGGQVAALSSVGAMLLGVIITGLFVAVSMTAGGGAWDNAKKYIEDGKFGGKGSEAHKAAVTGDTVGDPYKDTAGPAVNPMIKITNIVALLLLAVIAG

SEQ ID NO: 171979 - protein, 130 aa, Unknown
  Bacterial polypetide isolated from the Sargasso Sea
LVDLLTVAAIKEMILPSLLPVLSPVVLYFIILSIGGQVAALAAVGAMLLGVIITGLFVAVSMTAGGGAWDNAKKYIEDGNHGGKGSEAHKAAVTGDTVGDPYKDTAGPAVNPMIKITNIVALLLLAVIAG

SEQ ID NO: 171980 - protein, 305 aa, Unknown
  Bacterial polypetide isolated from the Sargasso Sea
VGMLISVKANVRTAEAARKSLQSGLTIAFKSGAITGLLVAGLALISITIYYIILISLNINEREIINALVALGFGASLISIFARLGGGIFTKGADVGADLVGKVEAGIPEDDPRNPAVIADNVGDNVGDCAGMAADLFETYAVTIVATMVLSSIFFPNEYNLMIYPLAIGGACIITSIIGTWFVKLGKSKNIMGALYKGFIVTAITSLIILYPVTDSIVGLSEKYSNNDKTFSGLNLYICGVVGFVITGLLIWITEYYTGTNYRPVKTVAQSSTTGHGTNVIQGLAISMEATAVPALIIVAGILYT

SEQ ID NO: 171981 - protein, 206 aa, Unknown
  Bacterial polypetide isolated from the Sargasso Sea
SKVSGSALEGVNVTFDLSNPFVVAGLLIGGMLPYLFGSMGMQAVGRAGGAVVIEVRRQFKKIPGIMKGKRKPDYGRLVDLLTKAAIKEMIIPSLLPVLSPIVLYFIILQIGGIEAALSSLGAMLLGVIITGLFVAVSMTAGGGAWDNAKKYIEDGNFGGKGSEAHKSAVTGDTVGDPYKDTAGPAVNPMIKITNIVALLLLAVIAH

SEQ ID NO: 171982 - protein, 77 aa, Unknown
  Bacterial polypetide isolated from the Sargasso Sea
TGLFVAVSMTAGGGAWDNAKKYIEDGNHGGKGSEAHKAAVTGDTVGDPYKDTAGPAVNPMIKITNIVALLLLAVIAG

SEQ ID NO: 171983 - protein, 310 aa, Unknown
  Bacterial polypetide isolated from the Sargasso Sea
LLKFNVDKRELINALIALGFGASLISIFARLGGGIFTKGADVGADLVGKVEAGIPEDDPRNPAVIADNVGDNVGDCAGMAADLFETYAVTIVATMVLSSIFFQNDLMMMVYPLTIGGACIVTSILGTFFVRLGSSKNIMLALYKGFVVTAITSLLLLYPLTDYVLGLEKVYSVGNKQFSGLSLYYCSVIGLVITGLLIWVTEYYTGTNYRPVKSVASSSTTGHGTNVIQGLAVSMEATAIPALIIVGGILLTNYIAGLYGIAIAVTAMLALAGMVVALDAYGPVTDNAGGIAEMSNLPKNVRKTTDAWTP

SEQ ID NO: 171984 - protein, 302 aa, Unknown
  Bacterial polypetide isolated from the Sargasso Sea
MNVTVETILLYTIGAGLLSIVYGFLTGKNILNSSPGNSKMQEIASAIQIGAKAYLARQYKTIAIVGTVVLVIVSIAFSPLVGLGYLIGAALSGIAGYVGMLVSVEANVRTAEASRKGLAQGLSVAFKSGAVTGMLVAGLALLAIAVYYYLLLKFNIDEREIVNALVALGFGASLISIFARLGGGIFTKGADVGADLVGKVEAGIPEDDPRNPAVIADNVGDNVGDCAGMAADLFETYAVTIVATMVLSSIFFVGDLNMMIYPLTIGAACLLTSIIGTFFVKLGRNNNVMNALYKGFIVSAVS

SEQ ID NO: 171985 - protein, 153 aa, Unknown
  Bacterial polypetide isolated from the Sargasso Sea
MSLLNVPAGKELPEDIYVVIEIPANADPIKYEVDKESGALFVDRFMSTAMFYPCNYGYINHTLSLDGDPVDVLVPTPYPLQPGAVIRCRPVGVLKMTDESGEDAKLVAVPHTKLSKEYDHIKDVNDLPELLKAQITHFFEHYKDLEKGKWVKV

SEQ ID NO: 171986 - protein, 279 aa, Unknown
  Bacterial polypetide isolated from the Sargasso Sea
MLLNYQGSVIAALLGLALAAYFANRILSIEVTDNKVQSLSDAIRKGSMAFLKRQYSWVSIFVVVLAVLISTLTEWGYPFGSLAFVGGALFSSLAGFIGMRIATAANGRTTEAARDGGTLKALPVAFRGGAVMGFSVAGLGLLGVALGYWVFIDIMDLENGYDILAAIGLGGSSIALFARVGGGIYTKAADVGADLVGKVEAGIPEDDPRNPATIADNVGDNVGDVAGMGADLFESYVGSLVAPLAYAAIVFSSTDVLPSLLFFPLAVGTIGMLASIVSS

SEQ ID NO: 171987 - protein, 51 aa, Unknown
  Bacterial polypetide isolated from the Sargasso Sea
KGADVGADLVGKVEAGIPEDDPRNPAVIADNVGDNVGDCAGMAADLFETYA

SEQ ID NO: 171988 - protein, 295 aa, Unknown
  Bacterial polypetide isolated from the Sargasso Sea
EDDPRNPAVIADNVGDNVGDCAGMAADLFETYAVTIVATMVLSSIFFVGDLNMMIYPLSIGAACLLTSILGTFFVKLGKTKNVMNALYKGFIVSAVASLIILWPVTDHVIGFTNEYTVNGKTFNGMNLYYCGVIGLVITGLLIWITEYYTGTNYRPVKSVALSSTTGHGTNVIQGLAVSMEATAIPALIIVAGILITNSVAGLFGIAIAVTTMLALAGMVVALDAYGPVTDNAGGIAEMSNLDKKVRKTTDALDAVGNTTKAVTKGYAIGSAGLGALVLFAAYTEDIKHSQKKLV

SEQ ID NO: 171989 - protein, 286 aa, Unknown
  Bacterial polypetide isolated from the Sargasso Sea
MGALYKGFVATAISSLIILYPITDYVIGFNTSYDVNGNTFNGKDLYYCGIIGLVITGLIIWITEYYTGTNYRPVKSVASSSTTGHGTNVIQGLAVSMEATAVPALIIVAGILLTNSIAGLFGIAIAVTTMLALAGMVVALDAYGPVTDNAGGIAEMSKLPNNVRKTTDALDAVGNTTKAVTKGYAIGSAGLGALVLFAAYTEDIKHFSKEAGSKLEGIIVTFDLSNPYVVVGLLIGGMLPYLFGSMGMQAVGRAGGAVVIEVRRQFKKFPGIMKRKQKPDYAKLVD

SEQ ID NO: 171990 - protein, 73 aa, Unknown
  Bacterial polypetide isolated from the Sargasso Sea
VAISMTAGGGAWDNAKKYIEDGNFGGKGSEAHKAAVTGDTVGDPYKDTAGPAVNPMIKITNIVALLLLAVIAG

SEQ ID NO: 171991 - protein, 272 aa, Unknown
  Bacterial polypetide isolated from the Sargasso Sea
CGIIGLIITGLLIWVTEYYTGTDYRPVRSVAGSSTTGHGTNVIQGLAISLEATAIPALIIVAGILLTNHIAGLYGIAIAVTTMLALAGMVVALDAYGPVTDNAGGIAEMSKLPNNVRKTTDALDAVGNTTKAVTKGYAIGSAGLGALVLFAAYTEDIKHFSKVAGSKLEGIVVTFDLSNPYVVVGLLIGGMLPYLFGSMGMQAVGRAGGAVVVEVRRQFKKYPGIMKRKQKPDYAKLVDLLTVAAIKEMIIPSLLPVLSPIILYIIIYTIGG

SEQ ID NO: 171992 - protein, 176 aa, Unknown
  Bacterial polypetide isolated from the Sargasso Sea
MLPYLFAALGMTAVGRAGSAIVEEVRKQFKEKPGIMTGEDKPDYSSAVDLLTKSAIKEMIVPSLLPLLSPIVLFYTVNFIATKSDAFSALGAMLLGVIVTGLFVALSMTAGGGAWDNAKKYIEDGNYGGKGSEAHKAAVTGDTVGDPYKDTAGPAVNPMIKITNIVALLLLAVLAH

SEQ ID NO: 171993 - protein, 297 aa, Unknown
  Bacterial polypetide isolated from the Sargasso Sea
MLANTGIQLAVDAYGPISDNAGGIAEMAELPTEVRERTDKLDAVGNTTAAIGKGFAIGSAALTALALFAAYMVKTGISTIDISNPMVMAGLFIGGMLPFLFSSMAMGAVGRAAMAMIEEVRRQFREIPELKKALEIMNLKDKKDWTDEDHKIYTDALGKAEHGRCVEISTESAIKEMIVPGLLAVITPVLIGFVPRFFGSDQGPEVLGGLLAGVTVTGVLMAIFQSNSGGAWDNAKKMIEEGIIVNGQEIKKGSEAHKAAVVGDTVGDPFKDTSGPSLNILIKLMSVVSFSIAPLIK

SEQ ID NO: 171994 - protein, 72 aa, Unknown
  Bacterial polypetide isolated from the Sargasso Sea
FVAISMTAGGGAWDNAKKYVEDGNFGGKGSDAHKAAVTGDTVGDPYKDTAGPAVNPMIKITNIVALLLLAAL

SEQ ID NO: 171995 - protein, 230 aa, Unknown
  Bacterial polypetide isolated from the Sargasso Sea
AYLARQYKTIAFVGVVVLVIVSVAFSPLVGLGYLIGAALSGIAGYVGMLVSVEANVRTAEASRKGLAQGLSVAFKSGAVTGMLVAGLALLAIAVYYYFLLRNGVDEREIVNALVALGFGASLISIFARLGGGIFTKGADVGADLVGKVEAGIPEDDPRNPAVIADNVGDNVGDCAGMAADLFETYAVTIVATMVLSSIFFHGDINMMIYPLTIGGACILTSIIGTFFVKL

SEQ ID NO: 171996 - protein, 321 aa, Unknown
  Bacterial polypetide isolated from the Sargasso Sea
TSLQKGLTMAFKSGAITGLLVAGLALLSISIYYGALLSFNIDDRETINALIALGFGASLISIFARLGGGIFTKGADVGADLVGKVEAGIPEDDPRNPAVIADNVGDNVGDCAGMAADLFETYAVTIVATMVLSSIFFQDNTAMMIYPLAIGGGCIIASIIGTFFVKLGKSKNIMGALYKGFIVTAIISLVLLYPITSHVIGLESLFNVGDKSFTGFDLYYCGIIGLVVTGLIIWVTEYYTGTNYRPVKSVAKSSTTGHGTNVIQGLAISMEATALPALIIVAGILATNELAGLFGIAIAVTAMLALTGMVVALDAYGPVTD

SEQ ID NO: 171997 - protein, 282 aa, Unknown
  Bacterial polypetide isolated from the Sargasso Sea
MVLASIFFTGDLVTTMMMYPLSIAGVCTIASIIGTYFVKLGKSENIMVALYKGFFVSAILSAVLLYFITDHVVGMGTTLNEIGNDITGLSLFYCGILGLIITGLIIWVTEYYTGTNYRPVQSISKASTTGHGTNVIQGLAISLEATALPALIIIAGIIATYSLAGLFGIAISVTTMLALAGMVVALDAYGPVTDNAGGIAEMAELDESVRKTTDALDAVGNTTKAVTKGYAIGSAGLGALVLFAAYTEDVSHYGLEVSFDLSNPYVVVGLLLGGLLPYLLEQ

SEQ ID NO: 171998 - protein, 311 aa, Unknown
  Bacterial polypetide isolated from the Sargasso Sea
ADNVGDNVGDCAGMAADLFETYAVTIVATMVLATIFFTGDIAHQMTIYPMAIGGSCLVASIMGTFFVRLGSSQSIMGALYKGFIASAILSLIFIYPVTQIVLGDMSKEFTFGETTFSGTSLYICSIIGIVITGLLIWITEYYTGTNYRPVQSVAKASTTGHGTNVIQGLAVSMEATALPALVIVIGIVMTFQLAGLFGIAIAVTAMLALAGMVVALDAYGPVTDNAGGIAEMSNLDENVRKTTDALDAVGNTTKAVTKGYAIGSAGLGALVLFAAYVEDLKLIESLTPNFSLENPYVVVGLLIGGLLPYLL

SEQ ID NO: 171999 - protein, 203 aa, Unknown
  Bacterial polypetide isolated from the Sargasso Sea
KALEIAFSGGSVMGMGVVGLGVLGVGSLFIIYRPMFTDINTVIQVLSGFSLGASSIALFARVGGGIYTKAADVGADLVGKVEAGIPEDHPLNPATIADNVGDNVGDVAGMGADLFESFVGSIIGAMVLGAAFVGLNEFSGIEINAVLLPLFIAASGIIMSIIGTFFVKVKEGGDPHKALNTGEFVSAGLMIAVTWVLIQYLLP

SEQ ID NO: 172000 - protein, 227 aa, Unknown
  Bacterial polypetide isolated from the Sargasso Sea
PITDSSIGLDKIYTFKETSFTGLDLYICAVAGLVVTGLIIWVTEYYTGTNYRPVKSVAKSSTTGHGTNVIQGLAISLEATALPAIIIVIGILYTNHLAGLFGIAIAVTSMLALTGMVVALDAYGPVTDNAGGIAEMSKLPKNVRKTTDALDAVGNTTKAVTKGYAIGSAGLGALVLFAAYTEDIKYYSNDNTSSLYGLVVDFDLSNPFVVVGLLLGGLLPYLFGSMG

SEQ ID NO: 172001 - protein, 235 aa, Unknown
  Bacterial polypetide isolated from the Sargasso Sea
PKNVRKTTDALDAVGNTTKAVTKGYAIGSAGLGALVLFAAYTEDIKHFSKVAGSNLEGIAVTFDLSNPYVVVGLLIGGMLPYLFGSMGMQAVGRAGGAVVIEVRRQFKKIPGIMKRKAKPDYGKLVDLLTRAAIKEMIIPSLLPILSPIILYVVIYFIGGQVAALSSLGAMLLGVIITGLFVAVSMTAGGGAWDNAKKYIEDGKFGGKGSEAHKAAVTGDTVGDPYKDTAGPAVN

SEQ ID NO: 172002 - protein, 285 aa, Unknown
  Bacterial polypetide isolated from the Sargasso Sea
VIGFGDISNASFSGMSLYICAIVGLVITGLLIWITEYYTGTNYRPVQSIAKASTTGHGTNVIQGLAVSMEATALPAIVIVIGIVLTFQLAGLFGIAIAVTSMLGLAGMVVALDAYGPVTDNAGGIAEMSDLDESVRKTTDALDAVGNTTKAVTKGYAIGSAGLGALVLFAAYVNDLQTDHLSHITPNFSLENPYVVVGLLIGGLLPYLFGSMGMMAVGRAGGAVVEEVRQQFSDNPGIMTGDSKPDYSKSVDLLTKSAIKEMVVPSMLPVLSPNCAISFSFFVAD

SEQ ID NO: 172003 - protein, 275 aa, Unknown
  Bacterial polypetide isolated from the Sargasso Sea
AYITAGLFGLAIAATTMLALAGMVVALDAYGPVTDNAGGIAEMADLPEDVRRTTDALDAVGNTTKAVTKGYAIGSAGLAALVLFAAYTEDLGHYFPQLEISFELQSPYVVIGLFLGGLLPYLFGALGMMAVGRAGGQVVVEVRRQFKEIPGIMEGTARPEYGKAVDLLTKAAIKEMIIPSLLPVLAPIVVYVVIWAVAGQGEAFTTLGAMLLGTIVTGIFVAISMTSGGGAWDNAKKYIEDGNHGGKASEAHKASVTGDTVGDPYKDTAGPAVNP

SEQ ID NO: 172004 - protein, 261 aa, Unknown
  Bacterial polypetide isolated from the Sargasso Sea
TFNVGDKNFTGFDLYYCGVIGLVVTGLIIWVTEYYTGTNYRPVRSVAKSSTTGHGTNVIQGLAVSMEATALPALIIVAGIIATNELAGLFGIAIAVTAMLALTGMVVALDAYGPVTDNAGGIAEMSKLPKNVRKTTDALDAVGNTTKAVTKGYAIGSAGLGALVLFAAYTEDIKFFSTVPGSKLEGVNVSFDLSNPFVVIGLLVGGMLPYLFASMGMQAVGRAGGAVVIEVRRQFKKIPGIMKGKRKPDYGRLVDLLTKAA

SEQ ID NO: 172005 - protein, 299 aa, Unknown
  Bacterial polypetide isolated from the Sargasso Sea
NSIAGLFGIAIAVTTMLALAGMVVALDAYGPVTDNAGGIAEMSNLPKNVRKTTDALDAVGNTTKAVTKGYAIGSAGLGALVLFAAYTEDIKYFSTVSGSKLEGIVVSFDLSNPFVVVGLLIGGMLPYLFGSMGMQAVGRAGGAVVVEVRRQFKKIPGIMKRKAKPDYGKLVDLLTKAAIKEMIIPSLLPVLSPIVLYIIILPIGGQVAALSSVGAMLLGVIITGLFVAVSMTAGGGAWDNAKKYIEDGNFGGKGSEAHKAAVTGDTVGDPYKDTAGPAVNPMIKITNIVALLLLAVIAG

SEQ ID NO: 172006 - protein, 288 aa, Unknown
  Bacterial polypetide isolated from the Sargasso Sea
VTAAIIWITEYYTSTEYRPVKSIAQSSETGHGTNVIQGLAISMEATAVPAIIIALGIIFSYNLAGIYGIALAATTMLALAGMVVALDAYGPVTDNAGGIAEMSGLDDDVRKTTDALDAVGNTTKAVTKGYAIGSAGLAALVLFAAYTYDLEHYFPDIEISFLLSDPYVVVGLIIGGMLPYLFGSMGMQAVGRAGGAVVEEVRRQFKEMPGIMEGKTRPDYSRAVDMLTKSAIREMIIPSLLPVLAPIVVYFVISLYDQSAALTTVGSMLLGTIVTGLYVAISMTAGGG

SEQ ID NO: 172007 - protein, 299 aa, Unknown
  Bacterial polypetide isolated from the Sargasso Sea
IIIAGIIATYSLAGLFGIAIAVTTMLALAGMVVALDAYGPVTDNAGGIAEMAELDESVRKTTDALDAVGNTTKAVTKGYAIGSAGLGALVLFAAYTEDVSHYGLEVSFDLSNPYVVVGLLLGGLLPYLFGAMSMTAVGRAAGSVVEEVRRQFKEIPGIMEGKGKPEYGTCVDILTKSAIKEMIIPSMLPVLSPIVVYYVILFIAGQTAALACLGALLLGVIVTGLFVAISMTAGGGAWDNAKKYIEDGNHGGKGSEAHKAAVTGDTVGDPYKDTAGPAVNPMIKITNIVALLLLASISL

SEQ ID NO: 172008 - protein, 307 aa, Unknown
  Bacterial polypetide isolated from the Sargasso Sea
HPLNPATIADNVGDNVGDVAGMGADLFESYVGSIIGSMVLGASILSFGGFDVSFVVLPLLIAASGVVVSIIGTFLVSVKEGGNPQRALNVGEFGSSAIMVVIMYLLITNFLPQTFTLGGNDYTSLGVFWASTIGLVAGLGIGLITEHYTGTNTSPTLSITRQSLTGPATNIIAGLGVGMQSTAGPIFIISGGIVGAYYFAGLYGIAMAALGMLANTGIQLAVDAYGPISDNAGGIAEMAELPAEVRDRTDKLDAVGNTTAAIGKGFAIGSAALTALALFAAFMVQTGIESIDIANPMVMAGLFVGGM

SEQ ID NO: 172009 - protein, 233 aa, Unknown
  Bacterial polypetide isolated from the Sargasso Sea
MAVGNTTKAVTKGYAIGSAGLGALVLFAAYVEDLKLIPELTPDFSLENPYVVVGLLIGGLLPYLFASMGMMAVGRAGGAVVEEVRKQFSDNPGIMTGEVKPDYSRSVDMLTRSAIKEMIIPSMLPVLSPLVLYFIISIVADQNAAVSCVGAMLLGVIVTGIFVAISMTAGGGAWDNAKKFVEDGNFGGKGSEAHKAAVTGDTVGDPYKDTAGPAVNPMIKITNIVALLLLAAL

SEQ ID NO: 172010 - protein, 265 aa, Unknown
  Bacterial polypetide isolated from the Sargasso Sea
IADNVGDNVGDCAGMAADLFETYAVTIVATMVLATIFFSGEIAHMMTIYPMAIGGSCLVASIIGTFFVRLGSSQSIMGALYKGFIASAILSLIFIYPVTQIVLGDMSKEFTFGETTFSGTSLYLCSIIGIVITGLLIWITEYYTGTNYRPVQSVAKASTTGHGTNVIQGLAVSMEATALPALVIVIGIVMTFQLAGLFGIAIAVTAMLALAGMVVALDAYGPVTDNAGGIAEMSNLDENVRKTTDALDAVGNTTKAVTKGYAIGS

SEQ ID NO: 172011 - protein, 106 aa, Unknown
  Bacterial polypetide isolated from the Sargasso Sea
IVLYLIIFAIGGQVAALASVGAMLLGVIITGLFVAVSMTAGGGAWDNAKKYIEDGNHGGKGSEAHKAAVTGDTVGDPYKDTAGPAVNPMIKITNIVALLLLAVIAG

SEQ ID NO: 172012 - protein, 271 aa, Unknown
  Bacterial polypetide isolated from the Sargasso Sea
MVLLQITLGGIAEMSKLPKNVRKTTDALDAVGNTTKAVTKGYAIGSAGLGALVLFAAYTEDIKFFSTVSGSSLEGINVSFDLSNPFVVIGLLVGGMLPYLFGSMGMQAVGRAGGAVVIEVRRQFKKIPGIMKGKRKPDYGRLVDLLTKAAIKEMIIPSLLPVLSPIVLYLIIFSIGGMEAALSSVGAMLLGVIVTGLFVAISMTAGGGAWDNAKKFIEDGNYGGKGSESHKAAVTGDTVGDPYKDTAGPAVNPMIKITNIVALLLLAVIAH

SEQ ID NO: 172013 - protein, 272 aa, Unknown
  Bacterial polypetide isolated from the Sargasso Sea
MNSSIETILYYTIFAGFLSILYGYITGVNIIKSSAGNNKMQEIASAIQIGAKAYLNRQYKTIAIVGVVVLVIIIFAFSFLVGLGYFIGATLSGIAGYVGMLVSVQANVRTAEASRKGLSNGLSVAFKSGAITGMLVAGLALLSITVYYFILLKFGIDEREIVNALVALGFGASLISIFARLGGGIFTKGADVGADLVGKVEAGIPEDDPRNPAVIADNVGDNVGDCAGMAADLFETYAVTIVATMVLSSIFFHGDINMMVYPLTIGGACIIT

SEQ ID NO: 172014 - protein, 252 aa, Unknown
  Bacterial polypetide isolated from the Sargasso Sea
MENSTDTILIYTIISGLLAIAYGYFTGKNILNQSAGNSKMQEIAAAIQVGAKAYLNRQYKTIAIVGLVVLVIITIAFSPLVGVGYLIGAALSGIAGYVGMLVSVQANVRTAEASRKGLAQGLSVAFKSGAVTGLLVAGLALLSIAVYYYLLLKFNVEERELINALIALGFGASLISIFARLGGGIFTKGADVGADLVGKVEAGIPEDDPRNPAVIADNVGDNVGDCAGMAADLFETYAVTIVATMVLSSIFF

SEQ ID NO: 172015 - protein, 268 aa, Unknown
  Bacterial polypetide isolated from the Sargasso Sea
VTDNAGGIAEMSNLPKNVRKTTDALDAVGNTTKAVTKGYAIGSAGLGALVLFAAYTEDIKHFSKVAGSKLEGIVVTFDLSNPFVVVGLLVGGMLPYLFGSMGMQAVGRAGGAVVVEVRRQFKKIPGIMKRKSKPDYGKLVDLLTKAAIKEMIVPSLLPVLSPIVLYLFILPIGGQVAALSSVGAMLLGVIITGLFVAISMTAGGGAWDNAKKYIEDGNFGGKGSEAHKAAVTGDTVGDPYKDTAGPAVNPMIKITNIVALLLLAVIAG

SEQ ID NO: 172016 - protein, 298 aa, Unknown
  Bacterial polypetide isolated from the Sargasso Sea
GLGTLFYVLSGDAHSIEGFAMGASIVALFSRVGGGIYTKSADVGADLVGKVEAGIPEDDPRNPGVIADNVGDNVGDIAGMGSDIFESYCGSMVACIAIASTYLITSEFSQADKDGMMFLPLALASIGLIASILGIVIVRLFSKSSPANAMRWGTMGAPLIFIIAAYFLTNALVGTNGVDVWLAVVCGSVGGIAIGLITEYYTGSSPVIKIAEAGQTGSATVMITGLSVGMQSVVLPIACIILIIFISTQLTGLYGVGIAAVGMLSTVGITMAIDAYGPVADNAGGIAEMAGMPTETRV

SEQ ID NO: 172017 - protein, 301 aa, Unknown
  Bacterial polypetide isolated from the Sargasso Sea
PQDYNLMVYPLAIGGACIITSIIGTWFVKLGKSKSIMGALYKGFIVTAVTSLLVMYPVTESIIGIKSTYNNNAGAIFTGLDLYICGVVGFVITGLLIWVTEYYTGTNYRPVKTVAKSSTTGHGTNVIQGLAISMEATAIPALIIVAGILYTNSLAGLYGIAIAVTAMLALTGMVVALDAYGPVTDNAGGIAEMSKLPKNVRKTTDALDAVGNTTKAVTKGYAIGSAGLGALVLFAAYTEDINYFSKVSGSALEGVNVTFDLSNPFVVTGLLIGGMLPYLFGSMGMQAVGRAGGAVVIEVRR

SEQ ID NO: 172018 - protein, 216 aa, Unknown
  Bacterial polypetide isolated from the Sargasso Sea
AAYTEDIKFFSNSLGSKLENVVVSFDLSNPFVVVGLLVGGMLPYLFGSMGMQAVGRAGGAVVIEVRRQFKKIPGIMKRKAKPDYGKLVDLLTKAAIKEMIIPSLLPVLSPIILYLVIYQIGGQVAALSSVGAMLLGVIITGLFVAISMTAGGGAWDNAKKYIEDGNHGGKGSEAHKAAVTGDTVGDPYKDTAGPAVNPMIKITNIVALLLLAVIAG

SEQ ID NO: 172019 - protein, 295 aa, Unknown
  Bacterial polypetide isolated from the Sargasso Sea
FGFGAALLAMFMRVGGGIFTKAADVGADLVGKVEQNIPEDDPRNAATIADNVGDNVGDCAGMAADLFESYAVVLVAALILGSAAFGELGLVLPLVIPAIGVITAVIGIFTVSPRPSDRSGMSSINRGFFISAAISAILVVAAVFVWVPSSWSDIDGDFAREAADAGIGISPQLFVIGAVFVGIVLAAVIQQLTAYFTETNRRPVDDVAKTSMTGPATVILSGISLGLESAVYTALVIGAAVYGAFLLGSGIIGLSLFAIALAGTGLLTTVGVIVSMDTFGPVSDNAQGIAEMSGG

SEQ ID NO: 172020 - protein, 245 aa, Unknown
  Bacterial polypetide isolated from the Sargasso Sea
GGGIFTKGADVGADLVGKVEAGIPEDDPRNPAVIADNVGDNVGDCAGMAADLFETYAVTIVATMVLSSIFFIGDFSMMIYPLAIGGACILTSILGTFFVTLGSDKNIMKAMYKGFVITAISSLVILYPITKHVIGFTNEYIVNEKSFTGLSLYFCGIIGLVITGLIIWITEYYTGTDYRPVKSVAQSSTTGHGTNVIQGLAVSMEATAIPALIIVGGILLTNHIAGLYGIAIAVTTMLALAGMVV

SEQ ID NO: 172021 - protein, 263 aa, Unknown
  Bacterial polypetide isolated from the Sargasso Sea
MGASSVALFSRVGGGIFTKSADVGADLVGKVEAGIPEDDPRNPGVIADNVGDNVGDVAGMGSDIFESYCGSMIASIALAASMTSATITKLGGDQYMLQLMPLALASLGLVCSIIGILMVRLFSDKSPEIALRFGTIGSAVVFIIASFFLVKYLGVSSGVWAAVLIGSIGGIIVGLVTEYYTGGAPVKKIAKGGETGSATIMITGLATGMQSVAIPVFTIVCIIFTSNYFAGLYGVGIAAIGMLSTVGITMAIDAYGPVADNAG

SEQ ID NO: 172022 - protein, 297 aa, Unknown
  Bacterial polypetide isolated from the Sargasso Sea
PVLLANGYQNVQALDLFLATVVGLVSGILIGVLTEYYTSDHQKPSQNVAASSETGSATNIISGLANGMFSTALPVLVIALSILGSYHFAHLYGIALAALGMLSTIGIQLAVDAYGPIADNAGGIAEMAELPKEVRERTDKLDAVGNTTAAIGKGFAIGSAALTSLALFAAFRETVGGLTLDINNPQVMAGLLIGSSLPFVFSALAMQAVGDAAFEMIEEVRRQFREIKGLLDGKAKADYAKCVDIATTAAINKMVLPGALAVFTPIIFGLVLGQKEMLGGILAGVTVTGVLLAIFMS

SEQ ID NO: 172023 - protein, 237 aa, Unknown
  Bacterial polypetide isolated from the Sargasso Sea
TDALDAVGNTTKAVTKGYAIGSAGLGALVLFAAYVEDLKLIPNLTPNFSLENPYVVVGLLIGGLLPYLFASMGMMAVGRAGGAVVEEVRKQFAENPGIMTGESKPDYSRSVDMLTKSAIKEMIIPSMLPVLSPLILFFIVSLVADQNAAVSAVGAMLLGVIVTGIFVAISMTAGGGAWDNAKKFVEDGNFGGKGSEAHKAAVTGDTVGDPYKDTAGPAVNPMIKITNIVALLLLAAL

SEQ ID NO: 172024 - protein, 240 aa, Unknown
  Bacterial polypetide isolated from the Sargasso Sea
DPRNPAVIADNVGDNVGDCAGMAADLFETYAVTIVATMVLASIFFQNNASMMIYPLAIGGGCIIASIIGTFFVKLGKSKNIMGALYKGFIVTAIVSLILLYPITSNTIGLDQVFNVGNKSFDGADLYYCGVIGLVVTGLIIWVTEYYTGTNFRPVKSVAKSSTTGHGTNVIQGLAISMEATALPALIIVAGIITTNELAGLFGIAIAVTAMLALTGMVVALDAYGPVTDNAGGIAEMSKL

SEQ ID NO: 172025 - protein, 238 aa, Unknown
  Bacterial polypetide isolated from the Sargasso Sea
AGLDPEVRERTDALDALGNTTAATGKGFAIGSAILTALALMSAYGQVTGVTSFDIGKVDVLSGVLIGALLPFVFSGLTMQAVGSAAGAMIEEVRRQFREIKGLREGKKGVKPDAARAVEISTTGSLKAMILPSILAIISPILIGLFLKAEALGGMLAGSIVSGFLLAIFMANAGGAWDNAKKYIELGNHGGKGSDAHKAAVTGDTVGDPFKDTSGPSINILLKLMTIVALVFGPLFIG

SEQ ID NO: 172026 - protein, 87 aa, Unknown
  Bacterial polypetide isolated from the Sargasso Sea
VGAMLLGVIITGLFVAVSMTAGGGAWDNAKKYIEDGNHGGKGSEAHKAAVTGDTVGDPYKDTAGPAVNPMIKITNIVALLLLAVIAG

SEQ ID NO: 172027 - protein, 222 aa, Unknown
  Bacterial polypetide isolated from the Sargasso Sea
GALVLFAAYTEDIKHFSKEAGSALEGIVVTFDLSNPYVVVGLLIGGMLPYLFGSMGMQAVGRAGGAVVVEVRRQFKKFPGIMKRKQKPDYAKLVDLLTVAAIKEMIIPSLLPVLSPIVLYFIILSIGGQVAALAAVGAMLLGVIITGLFVAVSMTAGGGAWDNAKKYIEDGNHGGKGSDAHKAAVTGDTVGDPYKDTAGPAVNPMIKITNIVALLLLAVIAG

SEQ ID NO: 172028 - protein, 268 aa, Unknown
  Bacterial polypetide isolated from the Sargasso Sea
LSSTTGHGTNVIQGLAVSMEATAIPALIIVAGILITNSVAGLFGIAIAVTTMLALAGMVVALDAYGPVTDNAGGIAEMSNLDKKVRKTTDALDAVGNTTKAVTKGYAIGSAGLGALVLFAAYTEDIKHFSKEAGSALEGIVVTFDLSNPYVVVGLLIGGMLPYLFGSMGMQAVGRAGGAVVVEVRRQFKKYPGIMKRKQKPDYAKLVDLLTVAAIKEMIIPSLLPVLSPVVLYFIILAIGGQVAALAAVGAMLLGVIITGLFVAVSMT

SEQ ID NO: 172029 - protein, 232 aa, Unknown
  Bacterial polypetide isolated from the Sargasso Sea
NALVALGFGASLISIFARLGGGIFTKGADVGADLVGKVEAGIPEDDPRNPAVIADNVGDNVGDCAGMAADLFETYAVTIVATMVLSSIFFHGDLNMMIYPLSIGGACILTSIIGTFFVKLGKSKNIMTALYKGFVVTAVTSLIILYPVTDYVLGLENTYTFSNKSFSGMSLYLCGVIGLVITGLLIWVTEYYTGTNYRPVKSVASSSTTGHGTNVIQGLAVSMEATAIPALI

SEQ ID NO: 172030 - protein, 227 aa, Unknown
  Bacterial polypetide isolated from the Sargasso Sea
GSAGLGALVLFAAYTEDIKFFSELPGSKLENVVVSFDLSNPFVVVGLLVGGMLPYLFGSMGMQAVGRAGGAVVIEVRRQFKKIPGIMKRKAKPDYGKLVDLLTKAAIKEMIIPSLLPVLSPIVLYLIIYQIGGQVAALSSVGAMLLGVIITGLFVAISMTAGGGAWDNAKKYIEDGNHGGKGSEAHKAAVTGDTVGDPYKDTAGPAVNPMIKITNIVALLLLAVIAG

SEQ ID NO: 172031 - protein, 57 aa, Unknown
  Bacterial polypetide isolated from the Sargasso Sea
KYIEDGNFGGKGSEAHKAAVTGDTVGDPYKDTAGPAVNPMIKITNIVALLLLAVIAS

SEQ ID NO: 172032 - protein, 224 aa, Unknown
  Bacterial polypetide isolated from the Sargasso Sea
GLGALVLFAAYTEDIKHFSKVAGSNLEGIIVTFDLSNPFVVVGLLVGGMLPYLFGSMGMQAVGRAGGAVVIEVRRQFKKIPGIMKRKSKPDYGKLVDLLTKAAIKEMIVPSLLPVLSPIVLYFFILPIGGQVAALSSVGAMLLGVIITGLFVAISMTAGGGAWDNAKKYIEDGNYGGKGSEAHKAAVTGDTVGDPYKDTAGPAVNPMIKITNIVALLLLAVISG

SEQ ID NO: 172033 - protein, 269 aa, Unknown
  Bacterial polypetide isolated from the Sargasso Sea
ESLGKGLNVAFKAGAVTGMLVAGLALLSISVYYAVLDTYSVSDETLKHALVALGFGASLISIFARLGGGIFTKGADVGADLVGKVEAGIPEDDPRNPAVIADNVGDNVGDCAGMAADLFETYAVTIVATMVLATIFFSGEIAQMMTIYPMAIGGSCLVASIIGTFFVRLGSSQSIMGALYKGFIASAILSLIFIYPVTQIVLGDMSKEFTFGDTTFSGSSLYICSIIGIVITGLLIWITEYYTGTNYRPVQSVAKASTTGHGTNVIQGL

SEQ ID NO: 172034 - protein, 238 aa, Unknown
  Bacterial polypetide isolated from the Sargasso Sea
TTKAVTKGYAIGSAGLGALVLFAAYTEDIKHFSKEAGSALEGIVVTFDLSNPYVVVGLLIGGMLPYLFGSMGMQAVGRAGGAVVVEVRRQFKKFPGIMKRKQKPDYAKLVDLLTVAAIKEMIIPSLLPVLSPVVLYFIIFSIGGQVAALAAVGAMLLGVIITGLFVAVSMTAGGGAWDNAKKYIEDGNHGGKGSEAHKAAVTGDTVGDPYKDTAGPAVNPMIKITNIVALLLLAVIAG

SEQ ID NO: 172035 - protein, 245 aa, Unknown
  Bacterial polypetide isolated from the Sargasso Sea
MAADLFETYAVTIVATMVLATIFFSGAVAEMMTIYPMAIGGSCLVASIIGTFFVRLGRSQSIMGALYKGFIASAILSLIFIYPVTQLVLGDMSTEFNFGNTAFTGVSLYICAFVGIIITGLLIWITEYYTGTNYRPVQSVAKASTTGHGTNVIQGLAVSMEATALPAIVIVVGIVFTYQLAGLFGIAIAVTAMLALAGMVVALDAYGPVTDNAGGIAEMANLDESVRKTTDALDAVGNTTKAVTK

SEQ ID NO: 172036 - protein, 279 aa, Unknown
  Bacterial polypetide isolated from the Sargasso Sea
EGNGKVKEIGDEIHLGAMVFMSSEYKRLSLFCLVCIVALLFSLGWETAISFFVGAACSGTAGFIGMYTATKANVRTAVAANEKGPSEALNVAFFGGSIMGLTVASMGLFGIGILFYYFGGSSETIHSIEGFAMGASSVALFSRVGGGIFTKSADVGADLVGKVEAGIPEDDPRNPGVIADNVGDNVGDVAGMGSDIFESYCGSMIASIALAASMTSATINNLGGDQSLLQLLPLVLASVGLICSLVGIAMVRIFSTKTPEIALRFGTIGSAVFFIIASY

SEQ ID NO: 172037 - protein, 67 aa, Unknown
  Bacterial polypetide isolated from the Sargasso Sea
AGGGAWDNAKKYIEDGNFGGKGSEAHKAAVTGDTVGDPYKDTAGPAVNPMIKITNIVALLLLAVIAG

SEQ ID NO: 172038 - protein, 272 aa, Unknown
  Bacterial polypetide isolated from the Sargasso Sea
MAALYKGFVVTAITSLIILYPLTDYVLGLDKIYKIGSKEFTGLSLYYCGVIGLVITGLIIWVTEYYTGTGYRPVKSVAQSSTTGHGTNVIQGLAVSLEATAIPALIIVSGILITNYIAGLFGIAIAVTSMLALAGMVVALDAYGPVTDNAGGIAEMSKLPNNVRKTTDALDAVGNTTKAVTKGYAIGSAGLGALVLFAAYTEDIKHFSKIAGSNLEGIVVTFDLSNPFVVVGLLVGGMLPYLFGSMGMQAVGRAGGAVVVEVRRQFKKFPGI

SEQ ID NO: 172039 - protein, 250 aa, Unknown
  Bacterial polypetide isolated from the Sargasso Sea
VVVLVIVSIAFSPLVGLGYLIGAALSGIAGYVGMLVSVEANVRTAEASRKGLAEGLSVAFKSGAVTGMLVAGLALLAIAVYYFLLLKFEVDEREIVNALVALGFGASLISIFARLGGGIFTKGADVGADLVGKVEAGIPEDDPRNPAVIADNVGDNVGDCAGMAADLFETYAVTIVATMVLSSIFFIGDLNMMVYPLTIGAACLITSIIGTFFVKLGKNNNVMNALYKGFIVSAVASLLILWPVTDYVIG

SEQ ID NO: 172040 - protein, 130 aa, Unknown
  Bacterial polypetide isolated from the Sargasso Sea
CVDILTKTAIKEMIIPSMLPVLSPILVYFIILFISGQENALACVGALLLGVIITGLFVAISMTAGGGAWDNAKKYIEDGNYGGKGSEAHKAAVTGDTVGDPYKDTAGPAVNPMIKITNIVALLLIASLSL

SEQ ID NO: 172041 - protein, 256 aa, Unknown
  Bacterial polypetide isolated from the Sargasso Sea
NLPKNVRKTTDALDAVGNTTKAVTKGYAIGSAGLGALVLFAAYTEDIKHFSKVAGSKLEGIVVTFDLSNPFVVVGLLVGGMLPYLFGSMGMQAVGRAGGAVVLEVRRQFKKIPGIMKRKSKPDYGRLVDLLTKAAIKEMIIPSLLPVLSPIVLYLFILPIGGQVAALSSVGAMLLGVIITGLFVAISMTAGGGAWDNAKKYIEDGYYGGKGSEAHKAAVTGDTVGDPYKDTAGPAVNPMIKITNIVALLLLAVIAG

SEQ ID NO: 172042 - protein, 303 aa, Unknown
  Bacterial polypetide isolated from the Sargasso Sea
TGHGTNVIQGLAVSLEATALPALIIVGGILFTNHIAGLFGIAIAVTTMLALAGMVVALDAYGPVTDNAGGIAEMSNLPKNVRKTTDALDAVGNTTKAVTKGYAIGSAGLGALVLFAAYTEDIKFFSKVQGSSLENITVNFDLSNPFVVVGLLIGGMLPYLFGSMSMQAVGRAGGAVVIEVRRQFKKIPGIMKRKKKPDYGKLVDLLTKAAIKEMIIPSLLPVLSPIILYFVILLIGGMEAALSAVGAMLLGVIVTGLFVAISMTAGGGAWDNAKKYIEDGNFGGKGSEAHKAAVTGDTVGDPY

SEQ ID NO: 172043 - protein, 263 aa, Unknown
  Bacterial polypetide isolated from the Sargasso Sea
LCSGIAGFIGMYSATKANVRTAVAAKEKGAAEALNIAFFGGSIMGLTVAAMGLFGIGILFYYFAENAETIHAIEGFAMGASSVALFSRVGGGIFTKSADVGADLVGKVEAGIPEDDPRNPAVIADNVGDNVGDVAGMGSDIFESYCGSMIACIALAASMTSLTITNLGGNQTMLQFMPLALASLGLVCSLLGIITVRIFSSKSPETALRYGTIGSAVIFVITSYFLINFMGVSSGVWIAVLVGSVGGIVVGLITEYYTGGSPV

SEQ ID NO: 172044 - protein, 241 aa, Unknown
  Bacterial polypetide isolated from the Sargasso Sea
YFTGKNILASSTGNSKMQEIASAIQIGAKAYLNRQYKTIAIVGLVVLVIISFSFSLLVGLGYLIGAALSGIAGYVGMLVSVQANVRTAEASRKGLSKGLSIAFKSGAVTGMLVAGLALLSIAVYYYLLLKFNVDKRELINALIALGFGASLISIFARLGGGIFTKGADVGADLVGKVEAGIPEDDPRNPAVIADNVGDNVGDCAGMAADLFETYAVTIVATMVLSSIFFQNDLMMMVYPLT

SEQ ID NO: 172045 - protein, 250 aa, Unknown
  Bacterial polypetide isolated from the Sargasso Sea
AIVTYFFSYLVGIGYFIGAFLSGVAGYVGMLISVKANVRTAEAARKSLQAGLTIAFKSGAITGLLVAGLALIAITIYYIILINLNVDNREIINALVALGFGASLISIFARLGGGIFTKGADVGADLVGKVEAGIPEDDPRNPAVIADNVGDNVGDCAGMAADLFETYAVTIVATMVLASIFFPNNYNLMVYPLAIGGACIITSIIGTWFVKLGKSKNIMGALYKGFIVTAITSLIILYPVTDSIIGLTEN

SEQ ID NO: 172046 - protein, 137 aa, Unknown
  Bacterial polypetide isolated from the Sargasso Sea
GTVKPDYSKAVDLLTKSAIKEMIVPSLLPVLVPVVLAVLMNIMMPEDGGIKALGGLLIGTIVTGIFVAISMTTGGGAWDNAKKYVEDGHCGGKGSEAHNASITGDTVGDPYKDTAGPAINPLIKIINIVALLLIPLL

SEQ ID NO: 172047 - protein, 295 aa, Unknown
  Bacterial polypetide isolated from the Sargasso Sea
NELAGLFGIAIAVTAMLALTGMVVALDAYGPVTDNAGGIAEMSKLPKNVRKTTDALDAVGNTTKAVTKGYAIGSAGLGALVLFAAYTEDIKFFSKVSGSTLEGINVSFDLSNPFVVIGLLVGGMLPYLFGSMGMQAVGRAGGAVVIEVRRQFKKIPGIMKGKRKPDYGRLVDLLTKAAIKEMIVPSLLPVLSPIVLYGIIYFIGGLEAALSSVGAMLLGVIVTGLFVAISMTAGGGAWDNAKKFIEDGNYGGKGSESHKAAVTGDTVGDPYKDTAGPAVNPMIKITNIVALLLLA

SEQ ID NO: 172048 - protein, 106 aa, Unknown
  Bacterial polypetide isolated from the Sargasso Sea
FALYIIIYFIGGQVAALSSLGAMLLGVIITGLFVAVSMTAGGGAWDNAKKYIEDGKFGGKGSEAHKAAVTGDTVGDPYKDTAGPAVNPMIKITNIVALLLLAVIAG

SEQ ID NO: 172049 - protein, 330 aa, Unknown
  Bacterial polypetide isolated from the Sargasso Sea
IVSLILLYPITLNTIVLDQVFNVGNKSFNGEDLYYCGVIGLVVTGLIIWVTEYYTGTNFRPVRSVAKSSTTGHGTNVIQGLAVSMEATALPALIIVAGIIATNELAGLFGIAIAVTAMLALTGMVVALDAYGPVTDNAGGIAEMSKLPKNVRKTTDALDAVGNTTKAVTKGYAIGSAGLGALVLFAAYTEDIKFFSTVSGSSLEGIDVSFDLSNPFVVIGLLVGGMLPYLFGSMGMQAVGRAGGAVVIEVRRQFKKIPGIMKGKRKPDYGRLVDLLTKAAIKEMIVPSLLPVLSPIVLYLVIYSIGGLEAALSSVGAMLLGVIVTGLFVL

SEQ ID NO: 172050 - protein, 92 aa, Unknown
  Bacterial polypetide isolated from the Sargasso Sea
AALAAVGAMLLGVIITGLFVAVSMTAGGGAWDNAKKYIEDGNHGGKGSEAHKAAVTGDTVGDPYKDTAGPAVNPMIKITNIVALLLLAVIAG

SEQ ID NO: 172051 - protein, 134 aa, Unknown
  Bacterial polypetide isolated from the Sargasso Sea
MSYDKIPAGKDIPNDIYVAIEIPANHAPIKYEIDKDSSALFVDRFMATPMFYPANYGYIPNTLADDGDPLDVLVVTPHPVAPGSVIRARPVGVLHMTDDGGGDAKLIAVPHDKLTVLYRDIKEYTDLPELLIQQ

SEQ ID NO: 172052 - protein, 236 aa, Unknown
  Bacterial polypetide isolated from the Sargasso Sea
MSVDTILLYTIFAGILSIVYGFVTGSSILNASAGNAKMQEIASAIQIGAKAYLNRQYKTIAIVGVVVLVIISFAFSLLVGIGYLIGAALSGIAGYVGMLVSVQANVRTAEASRKGLSQGLSIAFKSGAITGMLVAGLALLAIAVYYYILLSTGVDEREIVNALVALGFGASLISIFARLGGGIFTKGADVGADLVGKVEAGIPEDDPRNPAVIADNVGDNVGDCAGMAADLFEHML

SEQ ID NO: 172053 - protein, 113 aa, Unknown
  Bacterial polypetide isolated from the Sargasso Sea
LLPVLSPIILYFLILQIGGLEAALSSLGAMLLGVIITGLFVAVSMTAGGGAWDNAKKYIEDGNFGGKGSEAHKSAVTGDTVGDPYKDTAGPAVNPMIKITNIVALLLLAVIAH

SEQ ID NO: 172054 - protein, 176 aa, Unknown
  Bacterial polypetide isolated from the Sargasso Sea
MSLSQVAAGKNLPDEINVIIEIPANADPIKYEVDKDTGTVWVDRFMATPMFYPCNYGFVNHTLSLDGDPVDVLVPTPYPLVPGAVIKCRPVAVLKMADESGEDAKVLAVPISKLTKIYDNIQDLDDVPELLKNQIQHFFERYKELEPGKWVKVIGWGDKAEAKAEIVSSFERAQQK

SEQ ID NO: 172055 - protein, 681 aa, Unknown
  Bacterial polypetide isolated from the Sargasso Sea
MLLNYQGSIVAAIMGLLLAAYFANRILSINVSDEKVSNLSDAIRKGSMAFLKRQYSWISIFVIVLAILIPTLTDLGVWGSVSFIGGALFSSLAGFIGMRIATAANGRTTEAARDGGTLKALPVAFRGGAVMGFSVAGLGLLGVGLGYWIFVDLLELENAYDILAAIGLGGSSIALFARVGGGIYTKAADVGADLVGKVEAGIPEDDPRNPATIADNVGDNVGDVAGMGADLFESYVGSLVAPLAYAAIVFSNSDTLPSLLFFPLAVGTIGMLASIVSSFLVVPKEGKLAQALHRGTYSAAALTAIGVFFLSNTMFSDYSENPIGLFFSVIIGLLVGITVGQISEWFTSDHHSIVKNIADQAKTGPATLVLSGISEGMRSAAFSVIVVVFGVFGAYTAGDWALGDGGGIYGVAVAAIGVLATLGITVAVDAYGPIADNAGGIAEMAHLDPEVRKATDELDSLGNTTAAIAKGFAIGSAAVTALALFSAFVQSAGLAESGLNITKVEVTLGLFLGGMFPFLFAAMTINAVGRAAFKMIEEVRRQFREIPGLREGKEGVVPEYEECVDIATTAALREMLLPGGLAIVLPLVIGFWNKEALGGFLAGALVTGFLLAIFMANSGGAWDNAKKYIEAGGGAGKGSEEHKAAVIGDTIGDPFKDTSGPAMNIVIKVMTIVSLIFASAF

SEQ ID NO: 172056 - protein, 705 aa, Unknown
  Bacterial polypetide isolated from the Sargasso Sea
MDYIYLIPAAGIVALMFVVIKNQWVAKKEIGNAKMKRIADNIADGAMAFLKAEYKILSVFVLFTSVLLAYKGINEGSSWLVAVSFIVGALCSGLAGYIGMKVATKANVRTTNAAQDSLGKALEIAFSGGSVMGMGVVGLGVLGIGSLFILYEPMFDDINTVIQVISGFSLGASSIALFARVGGGIYTKAADVGADLVGKVEAGIPEDHPLNPATIADNVGDNVGDVAGMGADLFESFVGSIIGAMVLGAAFVGLTEFSGVELNAVLLPLFIAASGIIMSIIGTFFVKVKEGGSPHKALNAGEFISAVLMAFVTFLLIQNLLPESWVMNNVEFTSLGVFYATISGLAAGLLVGKVTEYYTATGKKPVLSIVNQSETGAATTIISGLGVGMISTALPIIFICAAILISHHYAGLYGIAIAAVGMLANTGIQLAVDAYGPISDNAGGIAEMAELDPIVRERTDKLDAVGNTTAAIGKGFAIASAALTALALFAAFMQTAEINSIDISKPIVMAGLLLGAMLPFVFSALSMKAVGKAAMSMIEEVRRQFNDLPKLKAALEIMRKYDSDLSKASDADMKIFNEADGVAEYSKCVEISTQAALREMVLPGIMAISVPVIIGFTGGAEMLGGLLAGVTSCGVLMAIFQSNSGGAWDNAKKMIEEDGRKGTEAHKAAVVGDTVGDPFKDTSGPSLNILLKLIAVVALVIAPLL

SEQ ID NO: 172057 - protein, 344 aa, Unknown
  Bacterial polypetide isolated from the Sargasso Sea
IKVDNEEVLNIGNLIKEGAMAFLKREYTVLSIFVLAVFVILVVFIDLDLLGIIGTSQGNINMSISYLIGAVGSALAGYFGMAAAVRGNSRTTEASQKSLNNGLRVAFSTGAVPGFAVVGIGLLGVSVLYLIFESATVIAGFGFGASSVGLFARVAGGVYTKAADVGADLVGKVEAGLPEDDPRNPATIADNVGDMVGDTAGMSADLFESYAGSLIATIALAVAATKSMTSDLVVLPIIVSSIGVLASVIGTFLVRTKEGASMNNLLWSFRIGIFGATILGVIGAGLYISAKDMDFNLLWVILFGNLLGIIVGTATEYFTSYEYKPVKWMASQAETGAASVIIAG

SEQ ID NO: 172058 - protein, 106 aa, Unknown
  Bacterial polypetide isolated from the Sargasso Sea
IVVYFVILSIAGLAAALSCLGALLLGVIITGLFVAISMTAGGGAWDNAKKYIEDGNHGGKGSDAHKAAVTGDTVGDPYKDTAGPAVNPMIKITNIVALLLLAAISL

SEQ ID NO: 172059 - protein, 247 aa, Unknown
  Bacterial polypetide isolated from the Sargasso Sea
NAGGIAEMSEMGEETRKITDSLDEVGNTTAAIGKGFAISAAALAALALISAYIEKIASKSENFVLAINDPLVLAGMFLGGIFPFLVSSLTMRAVGDAAFEMIKEIRRQFKEIPGLLEGKAKPDTATCVDIATKAALRKMIAPGALAVLAPVVVGFLAGPKALGGMLGGALICCVMMALMMSNAGGAWDNAKKYVEKGNLGGKGSDVHKAAVVGDTVGDPLKDTSGPSMNILINVMAIVSLVIAPLLI

SEQ ID NO: 172060 - protein, 317 aa, Unknown
  Bacterial polypetide isolated from the Sargasso Sea
MISGLSVGMQSVVIPILILATIIFISTTLFDLYGVGIAAVGMLATVGITMAIDAYGPVADNAGGIAEMSGMGEDVREITDSLDELGNTTAAIGKGFAIGAAALAALAIIAAFVQVVGVNNDGFQLILSDPIVLVGMFIGGSIPFLVSSITMTAVGDAAFEMINEIRRQFREIPGILEGTGEPDTDKCVEIATRAALQRMLLPGVIAVSMPPLVGFLLGAKALGGMLAGGLLGCVLLALMMANAGGAWDNAKKYIEKGNLGGKGSDTHAAAVVGDTVGDPFKDTSGPAMNILINVMAIVSLVIAGLLPVDGLIVTLFN

SEQ ID NO: 172061 - protein, 667 aa, Unknown
  Bacterial polypetide isolated from the Sargasso Sea
MQTSFEFIYLIIFAGILAVGYSYLLSGQILSSSPGNSKMQEIADAIQVGAKAYLNRQYKTIAIVGLIVLLIVTYFFNLLVGLGYFIGAALSGVAGYVGMLISVKANVRTAEASRDNLQSGLSIAFKSGAITGLLVAGLALLAITIYYFILLRFNVDSREIINALVALGFGASLISIFARLGGGIFTKGADVGADLVGKVEAGIPEDDPRNPAVIADNVGDNVGDCAGMAADLFETYAVTVVATMVLSSIFFVNDFNMMIYPLAIGASCIFTSIVGTWFVRLGKSKNIMTALYKGFVATALLSLLILYPVTDSVIGLKNVYTVNENSFTGLSLYICGVAGLIITGLIIWITEYYTGTNFRPVRSVAKSSTTGHGTNVIQGLAISMEATAIPALIIVIGILFTNHLAGLFGIAIAVTSMLALTGMVVALDAYGPVTDNAGGIAEMSKLPKNVRKTTDALDAVGNTTKAVTKGYAIGSAGLGALVLFAAYTEDIKFFSKVEGSALENINVSFDLSNPFVVVGLLVGGMLPYLFGSMGMQAVGRAGGAVVIEVRRQFKKIPGIMKGKRKPDYGKLVDLLTKAAIKEMVVPSLLPVLSPIILYLIILPIGGIEAALSSLGAMLLGVIVTGLFVAVSMTAGGGAWDNAKKYIEDGNFGGKGSEAHKAAVTGDT

SEQ ID NO: 172062 - protein, 104 aa, Unknown
  Bacterial polypetide isolated from the Sargasso Sea
LYFIIYGIGGQVAALASVGAMLLGVIITGLFVAISMTAGGGAWDNAKKYIEDGNFGGKGSDAHKAAVTGDTVGDPYKDTAGPAVNPMIKITNIVALLLLAVIAG

SEQ ID NO: 172063 - protein, 358 aa, Unknown
  Bacterial polypetide isolated from the Sargasso Sea
TGLIIWVTEYYTGTNYRPVKSVASSSTTGHGTNVIQGLAVSMEATAIPAIIIVGGILLTNHIAGLYGIAIAVTTMLALAGMVVALDAYGPVTDNAGGIAEMSNLPKNVRKTTDALDAVGNTTKAVTKGYAIGSAGLGALVLFAAYTEDIKHFSKIAGSKLEGVTVTFDLSNPFVVVGLLVGGMLPYLFGSMGMQAVGRAGGAVVVEVRRQFKKIPGIMKRKAKPDYGRLVDLLTQAAIKEMIIPSLLPVLSPIVLYFIIFAIGGQVAALAAVGAMLLGVIITGLFVAISMTAGGGAWDNAKKYIEDGNYGGKGSEAHKAAVTGDTVGDPYKDTAGPAVNPMIKITNIVALLLLAVLAG

SEQ ID NO: 172064 - protein, 467 aa, Unknown
  Bacterial polypetide isolated from the Sargasso Sea
MTEGQALWIALSASIVAIVCGVVFSLQIMKESDGNDRMREIAGAIQEGAQAYLNRQYSTIAIVGVVIFILLGISGIGWSSAIGFAIGAVFSGLAGYIGMSISVRANVRTAQAAHQGMNAALSMAFRGGAVTGLLVVGLGLLSIAGYYLILTSSGVSVDDSLHALIGLAFGGSLISIFARLGGGIFTKGADVGADLVGKIEAGIPEDDPRNPAVIADNVGDNVGDCAGMAADLFETYAVTIIATMLLGGLVFSGAEATNAVMYPLVLGAVSIVASVIGALFVKAKDGGSVMGALYKGVIISGLLAAIAFYPITGMMGMDMGLFWSAIIGLVLTAFMVLVTEFYTSTEYSPVQKIAEASTTGHATNIIAGLGVSMKSTALPVLAVCFSIWGAYALGGLYGIAIAATSMLSLTGMIVALDAFGPITDNAGGIAEMAELPSEIRGITDPLDAVGNTTKAVTKGYAIVQRVC

SEQ ID NO: 172065 - protein, 296 aa, Unknown
  Bacterial polypetide isolated from the Sargasso Sea
MNSSVETILLYTIAAGFLSIVYGFFTGKNILNSSAGNSKMQDIASAIQIGAKAYLARQYKTIAIVGVVVLVIVSVAFSPLVGLGYLIGAALSGIAGYVGMLVSVQANVRTAEASRKGLASGLSVAFKSGAVTGMLVAGLALLAIAVYYYLLLKFNIDEREIVNALVALGFGASLISIFARLGGGIFTKGADVGADLVGKVEAGIPEDDPRNPAVIADNVGDNVGDCAGMAADLFETYAVTIVATMVLSSIFFPGDMSMMIYPLTIGGACILTSIIGNFLLNLVEATNVMGALYKGF

SEQ ID NO: 172066 - protein, 269 aa, Unknown
  Bacterial polypetide isolated from the Sargasso Sea
MSIINLIIFSGVLSIIYGFWAGNSVLKSNAGNEKMQEISAAIQEGAQAYLNRQYTTIAIVGVAICILLYLFFRDFWVVGGYLIGAILSGAAGYIGMIISVRANVRTAQAATISLGDGLGVAFKAGAVTGMLVAGLALLSISVYYAILDSYSVSDETLKHALVALGFGASLISIFARLGGGIFTKGADVGADLVGKVEAGIPEDDPRNPAVIADNVGDNVGDCAGMAADLFETYAVTIVATMVLATIFFTGEVAHMMTIYPMAIGGSCLV

SEQ ID NO: 172067 - protein, 389 aa, Unknown
  Bacterial polypetide isolated from the Sargasso Sea
PGAWFYFYLCGLIGIACAYTFVFIAQYYTDYKYSPVRVIAEASTTGHGTNIIAGIGVGMESTAAPVIVISIAIISAYWCGNWSGITNSNGEAIGGLFGTAVATMGMLSTAAYVLTMDVFGPIADNAGGIVEMSEQPESVRDICDELDAVGNTTKATTKGYAIGSAALASFLLFSAFMDEVSAFTGKPFDQVDIAIPEVFVGGLLGAALVYLFSAWSITAVGRSAQEVVREVRRQFAERPGIMTHEETPDYARCVAIVAASALREMVRPGALAVLSPVVVGIVFKNVGYATGQELLGVKSVAAFLMFATVAGILMALFLNTAGGAWDNAKKYVETGAHGGKGSEAHKAAVSGDTVGDPFKDTAGPSIHVLIKMLATITLVMAPMFLDGVA

SEQ ID NO: 172068 - protein, 460 aa, Unknown
  Bacterial polypetide isolated from the Sargasso Sea
MENLYLIILVGIVAVIYSYFLSKQIISSNPGNSKMQEIAQAIQIGAKAYLNRQYKTIAIVGLIVLVIISYFFSLLVGLGYFIGALLSGVAGYVGMLISVQANVRTAEASRTSLQKGLTMAFKSGAITGLLVAGLALLAISIYYWALISFNVDSRELINALIALGFGASLISIFARLGGGIFTKGADVGADLVGKVEAGIPEDDPRNPAVIADNVGDNVGDCAGMAADLFETYAVTIVATMVLSSIFFPGDLSMMIYPLTIGGACILTSIIGTFFVKLGRSKNVMGALYKGFIVSALASLIILYPVTDYVLGLENSYDLDNKSFSGMSLYYCGIIGLIITGLLIWVTEYYTGTNYRPVKSVASSSTTGHGTNVIQGLAISLEATAIPALIIVAGILLTNHIAGLYGIAIAVTTMLALAGMVVALDAYGPVTDNAGGIAEMSKLPKNVRKTTDALDAVGNTT

SEQ ID NO: 172069 - protein, 508 aa, Unknown
  Bacterial polypetide isolated from the Sargasso Sea
DPHKLEGFAMGASVVALFSRVGGGIFTKSADVGADLVGKIEAGIPEDDPRNPGVIADNVGDNVGDVAGMGSDIFESYCGSMIASIAIAYTLGNKDMMMLPLALASTGLIASIIGIFIVKLQSAKAPDKALRSGTMLAPAIFVAMAYFIIDSFDGVGMNVWWCVIAGAVGGVLIGLITEYYTGGSPVKKIAESGETGSATVMISGLSVGMQSVVIPIGILAGIILISTQLSGIYGVGIAAVGMLATVGITMAIDAYGPVADNAGGIAEMSGMGEEVREITDSLDELGNTTAAIGKGFAIGAAALAALAIISAFSAVVADANPEFSLALTEPIVLVGMFIGVCIPFLVSSITMTAVGDAAFEMINEIRRQFKEIPGLMEGTAEPDSEKCVEIATTAALKKMMLPGIIAVSMPTIVGFGLGAQALGGMLAGGLLGCVSLALMMANAGGAWDNAKKYVEKGNLGGKGSDTHAAAVVGDTVGDPFKDTSGPSMNILINVMAIVSLVIAPLLSI

SEQ ID NO: 172070 - protein, 442 aa, Unknown
  Bacterial polypetide isolated from the Sargasso Sea
LLSVNVETRLLIESLVALSFGASLISIFARLGGGIFTKGADVGADLVGKVEAGIPEDDPRNPAVIADNVGDNVGDCAGMAADLFETYAVTIVATMLIGTIMFSNQTNYVELPLLIGGVCIIASIIGAFFVKLGSSENIMGALYKGFIVTAVLSAIFIYFAVDYMFYDSKEGMSLFWSSIVGLIVTAAIIWITEYYTSTEYRPVKSIAQSSETGHGTNVIQGLAISMEATAVPAIIIALGIIFSYNLAGIYGIALAATTMLALAGMVVALDAYGPVTDNAGGIAEMSGLDEEVRKTTDALDAVGNTTKAVTKGYAIGSAGLAALVLFAAYTYDLEHYFPDFEVSFLLSDPYVVVGLIIGGMLPYLFGSMGMQAVGRAGGSVVEEVRRQFKEMPGIMKGTTRPDYSRAVDMLTKSAIREMIIPSLLPVLAPIVVYYVIAFYDQT

SEQ ID NO: 172071 - protein, 340 aa, Unknown
  Bacterial polypetide isolated from the Sargasso Sea
VRSVAKSSTTGHGTNVILGLAVSMEATALPALIIVAGIIVTNEFAGLFGIAIAVTAMLALTGMVVALDAYGPVTDNAGGIAEMSKLPKNVRKTTDALDAVGNTTKAVTKGYAIGSAGLGALVLFAAYTEDIKFFSNVSGSPLEGINVSFDLSNPFVVIGLLVGGMLPYLFGSMGMQAVGRAGGAVVIEVRRQFKKIPGIMKGKRKPDYGRLVDLLTKAAIKEMIVPSLLPVLSPIVLYFIIYLIGGLEAALSSVGAMLLGVIITGLFVAISMTAGGGAWDNAKKYIEDGNYGGKGSETHKAAVTGDTVGDPYKDTAGPAVNPMIKITNIVALLLLAVISH

SEQ ID NO: 172072 - protein, 343 aa, Unknown
  Bacterial polypetide isolated from the Sargasso Sea
MNALYKGFVVSAVSSLIILYPVTDYVLGLDNTYNLENKVFSGMSLYYCGIIGLVITGLLIWVTEYYTGTNYRPVRSVASSSTTGHGTNVIQGLAVSLEATAIPALIIVTGILATNHIAGLYGIAIAVTTMLALAGMVVALDAYGPVTDNAGGIAEMSKLPNNVRKTTDALDAVGNTTKAVTKGYAIGSAGLGALVLFAAYTEDIKHFSKEAGSALEGIVVTFDLSNPYVVVGLLIGGMLPYLFGSMGMQAVGRAGGAVVVEVRRQFKKYPGIMKRKQKPDYAKLVDLLTVAAIKEMIIPSLLPVLSPIVLYFIILAIGGQVAALASVGAMLLGVIITGLFVAV

SEQ ID NO: 172073 - protein, 451 aa, Unknown
  Bacterial polypetide isolated from the Sargasso Sea
MSGTVETILLYTIGAGLLSIVYGFLTGKNILSSSAGNAKMQDIASAIQIGAKAYLARQYKTIAIVGAVVLVIVSIAFSPLVGLGYLIGAALSGIAGYVGMLVSVEANVRTAEASRKGLAQGLSVAFKSGAVTGMLVAGLALLSIAVYYYILLKSGVDEREIVNALVALGFGASLISIFARLGGGIFTKGADVGADLVGKVEAGIPEDDPRNPAVIADNVGDNVGDCAGMAADLFETYAVTIVATMVLSSIFFVGDLNMMIYPLSIGAACLLTSIIGTFFVKLGKSNNVMNALYKGFVVSAVASLIILWPVTDHVIGFTNEFTVNDKTFNGMDLYYCGVIGLVITGLLIWITEYYTGTSYRPVKSVALSSTTGHGTNVIQGLAVSMEATAIPALIIVAGILITNSIAGLFGIAIAVTTMLALAGMVVALDAYGPVTDNAGGIAEMSNLDKKV

SEQ ID NO: 172074 - protein, 456 aa, Unknown
  Bacterial polypetide isolated from the Sargasso Sea
GIVIFVLIWLVFGLSSGLGFLIGAIFSGAAGFVGMNISVRSNVRTTQAASSSLAEGLSVSFKAGAVTGMLVAGFALLSIALYYFALDNSGLFPGREIVAPLVSLGFGASLISIFARLGGGIFTKGADVGADLVGKVEAGIPEDDPRNPAVIADNVGDNVGDCAGMAADLFETYVVTVVATMVLSSIFFSDLSSMMMYPLAIAGVCTLASIVGTYFVRLGKSENIMAALYKGFAVSAILSALLLYFITDHVIGLSSVFTVDNKSFTGISLFYCGLLGLIITGLIIWVTEYYTGTNYRPVQSIAQASTTGHGTNVIQGLAISLEATALPAIIIVAGIIITHSLAGLFGIAIAVTTMLALAGMVVALDAYGPVTDNAGGIAEMSELDDNVRKTTDALDSVGNTTKAVTKGYAIGSAGLGALVLFAAYTEDLEYFAKDPNSPLSFEKLETLLLIYQIHML

SEQ ID NO: 172075 - protein, 444 aa, Unknown
  Bacterial polypetide isolated from the Sargasso Sea
GKVEAGIPEDDPRNPGVIADNVGDNVGDVAGMGSDIFESYCGSMIATIAIAYTMTEANNGPLMSLPLALASIGLISSILGILIVRAQSAKAPAAALRTGTIGSPVIFIALAFGLITYLDISLNVWFCVLTGAVGGVLIGLITEYYTGSTPVEKIAKSGETGSATVMISGLSVGMQSVVIPILILATIIFISTTLFDLYGVGIAAVGMLATVGITMAIDAYGPVADNAGGIAEMSGMGEDVREITDSLDELGNTTAAIGKGFAIGAAALAALAIIAAFVQVVGVNNDGFQLILSDPIVLVGMFIGGSIPFLVSSITMTAVGDAAFEMINEIRRQFREIPGILEGTGEPDTDKCVEIATRAALQRMLLPGVIAVSMPPLVGFLLGAKALGGMLAGGLLGCVLLALMMANAGGAWDNAKKYIEKGNLGGKGSDTHAAAVVGDTVGDP

SEQ ID NO: 172076 - protein, 325 aa, Unknown
  Bacterial polypetide isolated from the Sargasso Sea
MAGYRSCDWFCNEYTVNDKTFNGMDLYYCGVIGLVITGLLIWITEYYTGTSYRPVKSVALSSTTGHGTNVIQGLAVSMEATAIPALIIVAGILITNSIAGLFGIAIAVTTMLALAGMVVALDAYGPVTDNAGGIAEMSNLDKKVRKTTDALDAVGNTTKAVTKGYAIGSAGLGALVLFAAYTEDIKHFSKEAGSALEGIVVTFDLSNPYVVVGLLIGGMLPYLFGSMGMQAVGRAGGAVVVEVRRQFKKFPGIMKRKQKPDYAKLVDLLTVAAIKEMIIPSLLPVLSPVVLYFIILSIGGQVAALAAVGAMLLGVLSLVCLLQYQ

SEQ ID NO: 172077 - protein, 297 aa, Unknown
  Bacterial polypetide isolated from the Sargasso Sea
MGKNILNSSAGNAKMQDIASAIQIGAKAYLARQYKTIAIVGAVVLVIVSIAFSPLVGLGYLIGAALSGIAGYVGMLVSVEANVRTAEASRKGLAQGLSVAFKSGAVTGMLVAGLALLSIAVYYYILLKTGVDEREIVNALVALGFGASLISIFARLGGGIFTKGADVGADLVGKVEAGIPEDDPRNPAVIADNVGDNVGDCAGMAADLFETYAVTIVATMVLSSIFFVGDLNMMIYPLSIGAACLLTSIVGTFFVKLGKSNNVMNALYKGFVVSAVASLVILWPVTDHVIGFAMNIL

SEQ ID NO: 172078 - protein, 355 aa, Unknown
  Bacterial polypetide isolated from the Sargasso Sea
SSIALFARVGGGIYTKAADVGADLVGKVEAGIPEDDPRNPASIADNVGDNVGDVAGMGADIFESYVGSIIATIAIAATANSGLLDLLGGRAQDASLIQILAMQLPIAIAMIGLVSSLLGVLSMRFLRNIGPAAALRNVPLISAVLMFAGSYYFINSVGLSQQIFYAVCFGGVTGIAIGLMTEYYTGGAPIRRIATASETGPATNMIAGLAVGMESTMLPILAICAAIGFGYHFAGLYGIGIASVGMLSTVGVTMAVDAYGPIADNAGGISEMAELGPDTRKITDGLDSIGNTTAAIGKGFAIGSAALTALALFSAYTAAVGLESIDLTKPIVVIGLFVGGAVPFFVAALTMTSVG

SEQ ID NO: 172079 - protein, 401 aa, Unknown
  Bacterial polypetide isolated from the Sargasso Sea
ERLLIVATALSALVMLFVSLWALPESFEINNEIYTNLDVYFCYLTGTVAGLLVGLLTEYYTSHDFEPVREVAKSSETGAATNIIFGLALGYHSATGSILMLAVSIFLPFTLAGMYGVAVAAIGMLSTLVVGLTIDAYGPVADNAGGIAEMTGMGENIRDRTDVLDSAGNTTAAIGKGFAIGSAILTSLALFSAFLTRADLLDPQANIMDSINLLDPLVLTGLFVGAMLPFLFSAMTMKSVGKAAFDMIEEVRRQFRTIPGIMDGKAEPDYEKCVEISTNAALREMIPPGILIMGTPLLVGFLFGVPAVAGILAGSLVSGGVLAISSANSGGAWDNAKKYIEKGNFGGKGTETHKAAVVGDTVGDPFKDTSGPALNILIKLSAILSLVFVPFFINYGGLLTR

SEQ ID NO: 172080 - protein, 452 aa, Unknown
  Bacterial polypetide isolated from the Sargasso Sea
FLRAEYRVLSFFVLIVALLLGFANAGRQDSSAFISLSFVSGAIASGLAGFIGMKVATKANNRTTNAARTSLESALNVAFTGGSVMGLSVVGLGLIGLGSLFLLYQNIFVSDYNKVITVISGFSLGASSIALFARVGGGIYTKAADVGADLVGKVEAGIPEDHPLNPATIADNVGDNVGDVAGMGADLFESYVGSIIGSMVLGASIIVMGGFDISFVLLPLLIAASGIIMSIIGTFFVRVKEGGDPQKALNKGEFGSSIILIGIIYLLVKSILPESFTQNEIIYSNMGVFIATTIGLFAGLGIGLVTEHYTGTNTKPTNSIVEQSLTGPATNIIAGLGVGMQSTAIPILIIAASIIGAYQFAGLYGIAMAALGMLANTGIQLAVDAYGPISDNAGGIAEMADLPSEVRDRTDKLDAVGNTTAAIGKGFAIGSAALTALALFAAFMVQTGIDKI

SEQ ID NO: 172081 - protein, 399 aa, Unknown
  Bacterial polypetide isolated from the Sargasso Sea
SLILLYPITSHVIGLENIFSVGDKSFSGMDLYYCGVVGLAVTGLIIWVTEYYTGTNYRPVKSVAKSSTTGHGTNVIQGLAVSMEATALPAIIIVAGIIITNQLAGLFGIAIAVTAMLALTGMVVALDAYGPVTDNAGGIAEMSKLPKNVRKTTDALDAVGNTTKAVTKGYAIGSAGLGALVLFAAYTEDIKFFSKVSGSSLEGIDVSFDLSNPFVVIGLLFGGMLPYLFGSMGMQAVGRAGGAVVIEVRRQFKKIPGIMKGKRKPDYGRLVDLLTKAAIKEMIVPSLLPVLSPIILYLVIYSIGGLEAALSSVGAMLLGVIVTGLFVAISMTAGGGAWDNAKKFIEDGNYGGKGSESHKAAVTGDTVGDPYKDTAGPAVNPMIKITNIVALLLLAVISH

SEQ ID NO: 172082 - protein, 406 aa, Unknown
  Bacterial polypetide isolated from the Sargasso Sea
MGLIYAQVTYWNIRSLPRGNDTQRKLGVTIYNGAMSFIKQEYRYIVIFVVVVGALLFYFLGQQTALCYFAGAILSMTCGWAGMTSACIANSRTAEAANTSGQGSALTTAFKGGSVMGFSVASLGILGVSGAFAIYFVLNGVNDMNLANFATNIGGFAMGASSVALFARVGGGIYTKAADVGADLVGKVEAGIPEDDPRNPATIADNVGDNVGDVAGMGADLFESYVGSVIATIVIASGLGMATNQTLAMYSFPIILIIVGTIASYIGTKVVDILKDSEPSGVLRKASLTAGILFLVFAYFSLNAVGGSVGIDSSLLTNIFICSIIGLFSGSLIGGITEYYTSGKPVSDIADASEKGGVATNIISGLSIGMLSTALPILVIVIAIFSSYQFADLYGIGIAAVSMLAT

SEQ ID NO: 172083 - protein, 247 aa, Unknown
  Bacterial polypetide isolated from the Sargasso Sea
MNAETILGYTILSGLLSIVYGFVTGKNILNSSAGNAKMQEIASAIQIGAKAYLNRQYKTIAIVGVVVLVIISYAFSILVGLGYLIGATLSGIAGYVGMLVSVQANVRTAEASRKGLNAGLDVAFKSGAVTGMLVAGLALLSIAVYYYLLLSFNVDEREIVNALVALGFGASLISIFARLGGGIFTKGADVGADLVGKVEAGIPEDDPRNPAVIADNVGDNVGDCAGMAADLFETYAVTIVATMVLSS

SEQ ID NO: 172084 - protein, 281 aa, Unknown
  Bacterial polypetide isolated from the Sargasso Sea
MLAGALAMLFSFWKTTWINNQSQGNERMKSIGASIAEGAMAFLRAEYRILAVFVIAVAFILGYANSGRADSSAMISLSFVVGALASGLAGFLGMKVATKANNRTTHAAEISLAKALNVAFSGGSVMGLSVVGLGVLGLGGLLYLFSNMYGFEKPSVVSMVLNILSGFSLGASSIALFARVGGGIYTKAADVGADLVGKVEAGIPEDHPLNPATIADNVGDNVGDVAGMGADLFESYVGSIIGSMVLGSSILVAGGMDLNFVILPLFIAASGIIVSILGTFM

SEQ ID NO: 172085 - protein, 321 aa, Unknown
  Bacterial polypetide isolated from the Sargasso Sea
MEIIHLIIGAGILAVVYGVVTSISVLSADTGNEKMQEIAGAIQEGASAYLSRQYSTIALVGIVILIISYFLLGLEVSIGFLIGAVLSGIAGYIGMLVSVRANVRTTQASSNSLAEGLSIAFKSGAVTGMLVAGLALLAVAVYYYVLTNFWIPQNERVVIDALVALGFGSSLISIFARLGGGIFTKGADVGGDLVGKVEAGIPEDDPRNPATIADNVGDNVGDCAGMAADLFETYAVTVVATMVLASIFFAGNETMMIYPLSICGACVITSILGTYFVKLGKNNSIMGALYRGFIATAILSLIILYFVTDLVVGFDTVLSVA

SEQ ID NO: 172086 - protein, 350 aa, Unknown
  Bacterial polypetide isolated from the Sargasso Sea
MSVDTILLYTIFAGILSIVYGFVTGSSILNASAGNAKMQEIASAIQIGAKAYLNRQYKTIAIVGVVVLVIISFAFSLLVGIGYLIGAALSGIAGYVGMLVSVQANVRTAEASRKGLSQGLAIAFKSGAITGMLVAGLALLSIAVYYYILLSAGVDEREIVNALVALGFGASLISIFARLGGGIFTKGADVGADLVGKVEAGIPEDDPRNPAVIADNVGDNVGDCAGMAADLFETYAVTIVATMVLSSIFFVSDLNMMVYPLSIGAACILTSIVGTFFVKLGQSKNIMNALYKGFVATAILSLIILYPITDYVIGLDTNYSVNGVSFNGMSLYYCGVIGLIITGLLIWITE

SEQ ID NO: 172087 - protein, 448 aa, Unknown
  Bacterial polypetide isolated from the Sargasso Sea
MENLSLIILAGLLAVAYSYILSKQIISSNTGNKKMQEIAEAIQIGAKAYLNRQYKTIAIVGFIVLLVISYFFSLLVGLGYFIGALLSGVAGYLGMLISVEANVRTAEASRSSLQKGLTMAFKSGAITGLLVAGLALLAISVYYWVLISFNVDSRELINALIALGFGASLISIFARLGGGIFTKGADVGADLVGKVEAGIPEDDPRNPAVIADNVGDNVGDCAGMAADLFETYAVTIVATMVLASIFFQNDASMMIYPLAIGGGCIIASIVGTFFVRLGKSKNIMGALYKGFIVTAIVSLILLYPITSNTIGLDQVYNVGNKSFNGKDLYYCGVIGLIVTGLIIWVTEYYTGTNFRPVRSVAKSSTTGHGTNVIQGLAVSMEATALPALIIVAGIIATNELAGLFGIAIAVTAMLALTGMVVALDAYGPVTDNAGGIAEMSKLPKNVRK

SEQ ID NO: 172088 - protein, 332 aa, Unknown
  Bacterial polypetide isolated from the Sargasso Sea
MTTLQVLIVLCGLAAVLYGLVTSRQILSLGSGNDKMQEIAGAIQEGARAYLNRQYMTIAIVGVVIFALIWIVFDLASGIGFLIGAFFSGAAGYVGMNISVRSNVRTTHAASNSLAEGLSVSFKAGAVTGMLVAGFALLSIAIFYFVLHNSGSFPGREIVAPLVSFGFGASLISIFARLGGGIFTKGADVGADLVGKVEAGIPEDDPRNPAVIADNVGDNVGDCAGMAADLFETYVVTVVATMVLASIFFIENSYTMMIFPLAIAGVCALTSIIGTYFVRLGKNNNIMAALYRGFAVSAILSAVLLYFVTDYIVGLKNVLVVEGTSTQFTGMS

SEQ ID NO: 172089 - protein, 678 aa, Unknown
  Bacterial polypetide isolated from the Sargasso Sea
MPIEVIIPIIAAIASFAVAAGYTGWVAKQNPGTKQMQEISEAVRVGAAAFLRREMRIIVPIAIGLSVIIGFFIGDSNGIAFAVGATLSAVAGFISLKVTVKAAVRAAHATGSGLGKTFAITFRGGATVGLAVPAMALAATAILYMIYPNPITIAGIGIGASLIALFIRIGGGIFTKAADMGADLVGKVEANIPEDDPRNPATIADNVGDNVGDAAGMGSDVYESYIVTILASLLIAALIGSPENFAYPILIGASGLVASIIGTATIGSRKITDVMKPLNISFYVSAAIAIALNFVFTQIVLGDTPIAYALFGATVIGVILVPVIQKITDYYTNANSKPVVEISESAKWGYASLTLMGIIKGLQSTGPFMIALVAAIIVSFAITSAAAPEGTDPLLYGIFGTSLTAMAMLSLAGIVLSIDAFGPIADNAGGIVEMTEMGEENRKITDEIDAVGNTTKAVTKGFAIASAALAALAMIQAFQFEASHYFQDVVIDYGLSNPSVIVGLLVGGLIPFIITGQLISGVERAAKKMVYEVRRQFKEDPEILTGKSKPDYAKCVDVATLASIGELWKSASIAVAAPIIVGILLGPSAVAGLLMGAVVSGIFLAYHLANTGGAWDNAKKLIEMKGEKGTEEHKVAVVGDIIGDPYKDTAGPALNTVIKLLNTIAIVFVPVFFAVIVL

SEQ ID NO: 172090 - protein, 408 aa, Unknown
  Bacterial polypetide isolated from the Sargasso Sea
KGFIVTAIVSLILLYPITSNTIGLDQVFNVGNKAFNGTDLYSCGVIGLVVTGLIIWVTEYYTGTNFRPVRSVAKSSTTGHGTNVIQGLAVSMEATALPALIIVAGIIATNELAGLFGIAIAVTAMLALTGMVVALDAYGPVTDNAGGIAEMSKLPKNVRKTTDALDAVGNTTKAVTKGYAIGSAGLGALVLFAAYTEDIKFFSTISGSRLEGIDVSFDLSNPFVVIGLLVGGMLPYLFGSMGMQAVGRAGGAVVIEVRRQFKKIPGIMKGKRKPDYGRLVDLLTKAAIKEMIVPSLLPVLSPIVLYLVIYLIGGLEAALSSVGAMLLGVIVTGLFVAISMTAGGGAWDNAKKYIEDGNYGGKGSESHKAAVTGDTVGDPYKDTAGPAVNPMIKITNIVALLLLAVISH

SEQ ID NO: 172091 - protein, 350 aa, Unknown
  Bacterial polypetide isolated from the Sargasso Sea
EYYTGTNYRPVKSVASSSTTGHGTNVIQGLAVSMEATAIPALIIVGGILLTNYIAGLFGIAIAVTTMLALAGMVVALDAYGPVTDNAGGIAEMSNLPKNVRKTTDALDAVGNTTKAVTKGYAIGSAGLGALVLFAAYTEDIKHFSKVAGSKLEGIVVTFDLSNPFVVVGLLVGGMLPYLFGSMGMQAVGRAGGAVVIEVRRQFKKIPGIMKRKSKPDYGRLVDLLTKAAIKEMIVPSLLPVLSPIVLYLFILPIGGQVAALSAVGAMLLGVIITGLFVAISMTAGGGAWDNAKKYIEDGNFGGKGSEAHKAAVTGDTVGDPYKDTAGPAVNPMIKITNIVALLLLAVIAG

SEQ ID NO: 172092 - protein, 502 aa, Unknown
  Bacterial polypetide isolated from the Sargasso Sea
AVMGFTVAGLGLLGVAVGYWVFIDILELPNGYDVLAAIGLGGSSIALFARVGGGIYTKAADVGADLVGKVEAGIPEDDPRNPATIADNVGDNVGDVAGMGADLFESYVGSLVAPLAYAAIVFSGQNVLPSLLFFPLAVGTIGMGASIVSSFLVKPKEGKLAQALHRGTYSAAALTTLGVYFLSDSMFSSYSENSIGLFFAVIIGLAVGLLVGQISEWFTSDHYSIVKNIADQAKTGPATLVLSGISEGMRSAAFSVIVVVFGIGGAYTAGDWALGSGGGIYGIAIAAIGVLATLGITVAVDAYGPIADNAGGIAEMAHLPPEVREATDELDSLGNTTAAIAKGFAIGSAAVTALALFSAFVQSAGLSEIGLNITKVEVTAGLFLGGMFPFLFAAMTINAVGRAAFKMIEEVRRQFKEIPGLREGKEGAKPDYTRCVDIATSAALKEMLLPGGLAIALPLIIGFWNKEALGGFLAGSLVTGFLLAIFMANSGGAWDNAKKYIE

SEQ ID NO: 172093 - protein, 495 aa, Unknown
  Bacterial polypetide isolated from the Sargasso Sea
VVIFILMGVSGIGWASAIGFAIGAIFSGLAGYIGMSISVRANVRTAQAAHQGMNAALSMAFRGGAVTGLLVVGLGLLSIAGYYLILTSSGISVDDSLHALIGLAFGGSLISIFARLGGGIFTKGADVGADLVGKINAGIPEDDPRNAAVIADNVGDNVGDCAGMAADLFETYAVTIIATMLLGGLLFSGVEATNAIMYPLVLGAVSIVASVVGALFVKAKEGGSVMGALYKGVIISGLLAAIAFYPITGMMGMSMGLFWSAIIGLALTAFMVIVTEYYTSTEYNPVKKIAEASETGHATNIIAGLGVSMKATALPVLAVCLSIWAAYMLGGLYGIAIAATSMLSLTGMIVALDAFGPITDNAGGIAEMAELPPEIRGITDPLDAVGNTTKAVTKGYAIGSAGLAALVLFADFTANLEAEGKMVQFMLNDPAVIIGLFIGGMVPYLFAALAMEAVERAATSVVEEVERQFEEPGIMEGTVKPDYSKAVDLLTQVRD

SEQ ID NO: 172094 - protein, 456 aa, Unknown
  Bacterial polypetide isolated from the Sargasso Sea
VVVLIIITILFSPLVGLGYFIGAALSGIAGYVGMIVSVQANVRTAEASRKSLASGLSIAFKSGAVTGMLVAGLALLAIAVYYFFLVKNGVDEREIVNALVALGFGASLISIFARLGGGIFTKGADVGADLVGKVEAGIPEDDPRNPAVIADNVGDNVGDCAGMAADLFETYAVTIVATMVLSSIFFVNDFNMMIYPLAIGGACILTSILGTFFVTLGSDKNIMKAMYKGFVITAISSLVVLFPITKHVIGFTTEYVANGKSFNGLSLYFCGIIGLVITGLIIWITEYYTGTDYRPVKSVAQSSTTGHGTNVIQGLAVSMEATAVPALIIVGGILWTNQIAGLYGIAIAVTTMLALAGMVVALDAYGPVTDNAGGIAEMSNLPKNVRKTTDALDAVGNTTKAVTKGYAIGSAGLGALVLFAAYTEDIKHFSKVAGSNLEGITVTFDLSNPYVVVGLL

SEQ ID NO: 172095 - protein, 593 aa, Unknown
  Bacterial polypetide isolated from the Sargasso Sea
AWYALGPYTAISIVVGAICSSVAGFIGMYAATKANVRTATAAQKDGPAAALSVSFYGGSIMGLCVASLGLIGLGGLYYFYIPAEIDPHKLEGFAMGASVVALFSRVGGGIFTKSADVGADLVGKIEAGIPEDDPRNPGVIADNVGDNVGDVAGMGSDIFESYCGSMIASIAIAYTLGNQDMMLLPLVLAATGLIASIIGIFIVKLQSAKAPASALRSGTLLAPVIFVAMAYFIIDSFDGVVMNVWWCVIAGAVGGVLIGLITEYYTGGGPVKKIAESGETGSATVMISGLSLGMQSVVIPIVILAGIILSSTQLSGIYGVGIAAVGMLATVGITMAIDAYGPVADNAGGIAEMSGMGEEVREITDSLDELGNTTAAIGKGFAIGAAALAALAIISAFSAVVGVANPEFSLALTEPIVLVGMFIGVCIPFLVSSITMTAVGDAAFEMINEIRRQFKEISGLMEGTAEPDSEKCVEIATKAALKKMMLPGVIAVSMPAIVGFGLGAQALGGMLAGGLLGCVSLALMMANAGGAWDNAKKYVEKGNLGGKGSDTHAAAVVGDTVGDPFKDTSGPSMNILINVMAIVSLVIAPLLSI

SEQ ID NO: 172096 - protein, 508 aa, Unknown
  Bacterial polypetide isolated from the Sargasso Sea
ILTVISGFSLGASSIALFARVGGGIYTKAADVGADLVGKVEAGIPEDHPLNPATIADNVGDNVGDVAGMGADLFESYVGSIIGSMVLGASILVAGSFEINFVTLPLTIAASGIIVSILGTFMVSVKEGGDPQRALNIGEFGSSAIMVAIMYFLINNLLPASFQLNNIEYTRMGVFFASTIGLLAGLGIGLITEHYTGTNTGPTNSITRQSLTGPATNIIAGLGVGMQSTAFPILIIAAGIMGAYHFAGLYGIAMAALGMLANTGIQLAVDAYGPISDNAGGIAEMAELPKEVRERTDKLDAVGNTTAAIGKGFAIGSAALTALALFSAYMVQTGISKIDISNPMVMAGLFVGGMLPFLFSSMAMNAVGRAAMAMIEEVRRQFKSIPELSKALAIMNKYKDGDKWTDDDKKTFEEADGKAEYGKCVEISTTSAIREMVFPGILAILSPVIVGFIFGPETLGGLLAGVTVSGVLMAIFQSNSGGAWDNAKKMIEEGINVDGVLHGKGSDA

SEQ ID NO: 172097 - protein, 532 aa, Unknown
  Bacterial polypetide isolated from the Sargasso Sea
MREASRKGLASGLSVAFKSGAVTGMLVAGLALLSIAVYYYLLLKFNVDEREIVNALVALGFGASLISIFARLGGGIFTKGADVGADLVGKVEAGIPEDDPRNPAVIADNVGDNVGDCAGMAADLFETYAVTIVATMVLSSIFFQGDMSMMIYPLTIGGACILTSILGTFFVKLGKSKNVMNALYKGFVASAVSSLIILYPVTDHVLGLDNTYNLDNKVFSGMSLYYCGIIGLVITGLLIWVTEYYTGTNYRPVRSVASSSTTGHGTNVIQGLAVSLEATAIPALIIVTGILATNHIAGLYGIAIAVTTMLALAGMVVALDAYGPVTDNAGGIAEMSKLPNNVRKTTDALDAVGNTTKAVTKGYAIGSAGLGALVLFAAYTEDIKHFSKEAGSALEGIVVTFDLSNPYVVVGLLIGGMLPYLFGSMGMQAVGRAGGAVVVEVRRQFKKYPGIMKRKQKPDYAKLVDLLTVAAIKEMIIPSLLPVLSPILLYFIIFAIGGQVAALASVGAMLLGVIITGLFVAVSMTAGGGAWD

SEQ ID NO: 172098 - protein, 670 aa, Unknown
  Bacterial polypetide isolated from the Sargasso Sea
MESFIIGPMTPWGPVVTGLIGLVFAFVLYGLIMKYPAGKDSVVKIGDQIHLGAKVFMFTEYKILTPVVIALVVACGFSPLGWDTAIAIAVGALSSAIAGFIGMYSATQANVRTATAAENSGQEQALSISFFGGSIMGLCVASMGLVGLGGLYFYFSGVIEDPNELAKALEGFGVGASAVALFSRVGGGIFTKSADVGADLVGKIEAGIPEDDPRNPGVIADNVGDNVGDIAGMGSDIFESYCGAMIASIAIAATMGNTDLMFLPLWLAASGLFCSLLGIGIVRTQVSRSPAVALRWGTFLSPVLFLLFAGMSIYYSPAIEMNYFYSVLTGAVGGILIGLITEYYTGGETENSPVGKIAKSGETGPATVMIAGLSVGMQSVVLPLFVIAGIVGLSTYFSGLYGVGIAAVGMLSTVGITMAIDAYGPVADNAGGIAEMSGMKSEVREITDSLDELGNTTAAIGKGFAIGAAALAALAIIAAYMLATGVESLSLDDPKVLMGMFIGGSIPFLVSSITMTAVGDAAFEMIEEIRRQFREIPGLLEGKAEPDNAKCVDIATKAALNKMLLPGAIAIGSPVAVGFILGPVVLGGMLAGALLGCVLMALMMANAGGAWDNAKKFVEKGNFGGKGTDTHAATVVGDTVGDPFKDTSGPSMNILINVMAIVSLVIAPLL

SEQ ID NO: 172099 - protein, 681 aa, Unknown
  Bacterial polypetide isolated from the Sargasso Sea
MLLNYQGSIFAAILGLVLAAYFANRILAINVSDEKVSNLSDAIRKGSMAFLKRQYSWISIFVLVLAILIPTLTDLGVWGSVSFIGGAAFSSLAGFIGMRIATAANGRTTEAARDGGTLKALPVAFRGGAVMGFSVAGLGLLGVGLGYWIFVELLELENAYDILAAIGLGGSSIALFARVGGGIYTKAADVGADLVGKVEAGIPEDDPRNPATIADNVGDNVGDVAGMGADLFESYVGSLVAPLAYAAIVFANSEALPSLLFFPLAVGTIGMLASIVSSFLVVPQEGKLAQALHRGTYSAAALTAGGVFFLSNTMFADYSENPIGLFISVIIGLLVGITVGQISEWFTSDHHSIVKSIADQAKTGPATLVLSGISEGMRSAAFSVIVVVFGVFGAYTAGDWALGAGGGIYGVAVAAIGVLATLGITVAVDAYGPIADNAGGIAEMAHLDPEVRKATDELDSLGNTTAAIAKGFAIGSAAVTALALFSAFVQSAGLAESGLNITKVEVTLGLFLGGMFPFLFAAMTINAVGRAAFKMIEEVRRQFREIPGLREGKEGVVPEYEECVDIATTAALREMLLPGGLAIVLPLVIGFWNKEALGGFLAGALVTGFLLAIFMANSGGAWDNAKKYIEAGGGAGKGSDEHKAAVIGDTIGDPFKDTSGPAMNIVIKVMTIVSLIFASAF

SEQ ID NO: 172100 - protein, 629 aa, Unknown
  Bacterial polypetide isolated from the Sargasso Sea
MDPWGPFATGFIGLIFAFILYGLIMKFPAGKQSVVKIGDQIHLGAKVFMITEYKILAPVVLALVLACGLSPLGWYTALAIAVGALSSAIAGFIGMYSATKANVRTATAAENHGQEQALSISFFGGSIMGLCVASMGLVGLGGLFFYFSGAMDDLDKIAKALEGFGVGASAVALFSRVGGGIYTKSADVGADLVGKIEAGIPEDDPRNPGVIADNVGDNVGDIAGMGSDIFESYCGAMIASIAIAATMLDPNLMFLPLWLAASGLFCSLIGIGIVRTQVSRSPAVALRWGTFLSPVIFLIFAGVSIYYSPIEMKYFYSVLTGAVGGILIGLITEYYTGGDTENSPVGKIAKSGETGPATVMITGLSVGMQSVVLPLFVIAGIVGLSTYFSGLYGVGIAAVGMLSTVGITMAIDAYGPVADNAGGIAEMSGMKSEVREITDSLDELGNTTAAIGKGFAIGAAALAALAIIAAYMLAADVEQLSLDDPKVLMGMFIGGSIPFLVSSITMTAVGDAAFEMIEEIRRQFREIPGLLEGKAEPDNAKCVDIATKAALNKMLLPGAIAILSPVIVGFVLGPIHLGGMLAGALLGCVLMALMMANAGGAWDNAKKFVEKGNFGGKGTDTHSATVVGD

SEQ ID NO: 172101 - protein, 459 aa, Unknown
  Bacterial polypetide isolated from the Sargasso Sea
MVLASIFFAGNETMMIYPLSICGACVITSILGTYFVKLGKNNSIMGALYRGFIATAILSLIILYFVTDLVVGFDTVLSVAGQSFSGLDLYICGVMGLAITGLIIWITEYYTGVDYRPVKSIAKSSETGHGTNVIQGLAISMESTALPALVIVFGIIVTYSLAGLFGIAVAVTTMLALAGMVVALDAFGPVTDNAGGIAEMSELPEEVRNTTDSLDAVGNTTKAVTKGYAIGSAGLGALVLFGAYTADLEYFSSNATEGSYFFGVAPDFSLSNPYVVVGLLVGGMLPYLFAALGMTAVGRAGSAIVEEVRHQFKEKPGIMTGEDKPNYKSAVDLLTKAAIKEMIVPSLLPLLSPVILFYIVNFIATKSDAFSALGAMLLGVIVTGLFVALSMTAGGGAWDNAKKYIEDGNHGGKGSEAHKAAVTGDTVGDPYKDTAGPAVNPMIKITNIVALLLLAVLAH

SEQ ID NO: 172102 - protein, 352 aa, Unknown
  Bacterial polypetide isolated from the Sargasso Sea
MNEGQALWIALTASVVAIICGVVFSLQIIKESDGNDRMREIAGAIQEGAQAYLTRQYSTIAIVGVVIFILMGVSGIGWASAIGFAIGAIFSGLAGYIGMSISVRANVRTAQAAHQGMNAALSMAFRGGAVTGLLVVGLGLLSIAGYYLILTSSGISVDDSLHALIGLAFGGSLISIFARLGGGIFTKGADVGADLVGKINAGIPEDDPRNAAVIADNVGDNVGDCAGMAADLFETYAVTIIATMLLGGLLFSGVEATNAIMYPLVLGAVSIVASVVGALFVKAKEGGSVMGALYKGVIISGLLAAIAFYPITGMMGMSMGLFWSAIIGLALTAFMVIVTEYYTSTEYNPVKK

SEQ ID NO: 172103 - protein, 672 aa, Unknown
  Bacterial polypetide isolated from the Sargasso Sea
MITGQFIPIIFGLGGLITAYLLYKFVLKFPAGEGKIVEISDQIHLGAMAFIRKEYSILLIFALILIAGIYYGLGVASTISFIIGAVCSSATGFIGMYTATKANVRTTNAANKTGLSDSLVIAFFGGSIMGLTVAAMGLLGLGVLYFLYGGDKETASVIHGFGMGASTVALFSRVGGGIFTKSADVGADLVGKVEAGIPEDDPRNPGVIADNVGDNVGDVAGMGSDIFESYCGSIIATIAIASTLSLTIIDTLGPQESLMFLPLALASLGLICSIAGILIVKILAKSTSTEKISSALRGGTFSAAIIFIISSYFLINLLNLNSYIWLAVLSGAVGGVIIGLVTEYYTGSAPVRKIASQGKTGSATVITTGFATGLESVVVPIIAIAFIIFISNEFANLYGVGIAAVGMLATVGITMAIDAYGPVADNAGGIAEMAGLGEGTRKITDSLDEVGNTTAAIGKGFAIGAAALAALAIITAFVQEVNHGREIPIKLLLTDTNVLIGLFIGGMIPFLVASLTITAVGDAAFEMITEIRRQFKEIPGLLEGTGKPDNGRCVEIATTAALKRMVLPGAIAIFAPVVIGFSFGAEMLGGLLGGGLLSCVLLALTMSNAGGAWDNAKKYVEQGNLGGKGSETHKATVVGDTVGDPLKDTSGPSMNILINVMAIVSLVIAPLL

SEQ ID NO: 172104 - protein, 700 aa, Unknown
  Bacterial polypetide isolated from the Sargasso Sea
MEIIHLIIGAGVLAVVYGIVTSISVLSADTGNEKMQEIAGAIQEGASAYLSRQYSTIAIVGLVILVISYFLLGLEVSIGFLIGAVLSGIAGYIGMLVSVRANVRTTQAASNSLAEGLSIAFKSGAVTGMLVAGLALLAVAVYYYVLTNLWIPQNNRIVIDALVALGFGSSLISIFARLGGGIFTKGADVGGDLVGKVEAGIPEDDPRNPATIADNVGDNVGDCAGMAADLFETYAVTVVATMVLASIFFAGNETMMIYPLSICGACVITSILGTYFVKLGKSNSIMGALYKGFIATAILSLVVLYFVTDLVVGFGTSLTISGKSFNGLDLYMCGVTGLAITGLIIWITEYYTGVDYRPVKSIAKSSETGHGTNVIQGLAISMESTALPALVIVFGIIITYSLAGLFGIAVAVTTMLALAGMVVALDAFGPVTDNAGGIAEMSDLPEEVRNTTDSLDAVGNTTKAVTKGYAIGSAGLGALVLFGAYTADLEYFSSNAAEGSYFFGVNPDFSLSNPYVVVGLLVGGMLPYLFAALGMTAVGRAGSAIVEEVRKQFKEKPGIMTGEDKPDYSSAVDLLTKSAIKEMIVPSLLPLLSPIVLFYTVNFIATKSDAFSALGAMLLGVIVTGLFVALSMTAGGGAWDNAKKYIEDGNYGGKGSEAHKAAVTGDTVGDPYKDTAGPAVNPMIKITNIVALLLLAVLAH

SEQ ID NO: 172105 - protein, 359 aa, Unknown
  Bacterial polypetide isolated from the Sargasso Sea
MISSFEGVEMSVWWCVISGAVGGVLIGLITEYYTGGSPVRKIAESGETGSATVMISGLSVGMQSVVVPIIILAAIIFVSTQLSGVYGVGIAAVGMLATVGITMAIDAYGPVADNAGGIAEMAGMGEDVREITDSLDELGNTTAAIGKGFAIGAAALAALAIISAYSEVVSANDNNFNLALTNPIVLVGMFIGACIPFLVSSITMTAVGDAAFEMINEIRRQFREISGLMEGQADPDSEKCVQIATQAALKKMMLPGVIAVSMPAIVGFGLGAQALGGMLAGGLLGCVSLALMMANAGGAWDNAKKYVEKGNLGGKGSETHAAAVVGDTVGDPFKDTSGPSMNILINVMAIVSLVIAPLL

SEQ ID NO: 172106 - protein, 428 aa, Unknown
  Bacterial polypetide isolated from the Sargasso Sea
MGGLFLFYSNLYNVDHTNITTVLNILSGFSLGASSIALFARVGGGIYTKAADVGADLVGKVEAGIPEDHPLNPATIADNVGDNVGDVAGMGADLFESYVGSIIGSMVLGSSIVVAGAVGGFDINFILLPLLIAASGIIVSIVGTFMVSVKEGGDPQTALNRGEFGSAFIMVAIIYLLIQNFLPAVFSQGGETFSNMGVFYATVIGLVAGLGIGMITEHYTGTGTSPVRSIAQQSLTGPATNIIAGLGVGMQSTAIPILIIASAIIGAYHFAGLYGIAMAALGMLANTGIQLAVDAYGPISDNAGGIAEMAELPEEVRNRTDKLDAVGNTTAAIGKGFAIGSAALTALALFAAFMVQTDIQSIDIADPWVMAGLFVGGMLPFLFSSMAMGAVGRAAMAMIEEVRRQFREIPELKKALELMNLKNENDWG

SEQ ID NO: 172107 - protein, 166 aa, Unknown
  Bacterial polypetide isolated from the Sargasso Sea
MTAVGRAASSVVEEVRRQFREDAGILKGTSKPNYARAVDMLTKSAIKEMIVPSMLPVLAPVFCFFVINVIDGKSSAFSALGAMLLGTIITGLFLAISMTAGGGAWDNAKKLIEDGQFGGKGSDAHKASVTGDTVGDPYKDTAGPAINPMIKITNIVALLLLAILAH

SEQ ID NO: 172108 - protein, 294 aa, Unknown
  Bacterial polypetide isolated from the Sargasso Sea
MQVLFKEGAGAYLKRQYATISVVGVIIFLLVAYLLDPIVAVGFAIGAILSGIAGFVGMLISVRANVRTAQAASEDLSKGLSIAFKAGSVTGMLVAALALLAVSVYFFILTNMLNHSFDSRVIIDALVALGFGASLISIFARLGGGIFTKGADVGGDLVGKVEAGIPEDDPRNPATIADNVGDNVGDCAGMAADLFETYAVTIVATMVLASIYFSSSVYFEQIMLYPLAIGATCILTSIVGTFFVKLGKNRSIMGALYKGFFVTGALSLALLWPLTNNLIGMETILETSFIKFSG

SEQ ID NO: 172109 - protein, 296 aa, Unknown
  Bacterial polypetide isolated from the Sargasso Sea
CIPIAILATIIFVSTSLADVYGVGIAAVGMLATVGITMAIDAYGPVADNAGGIAEMSGMGKKVRDITDSLDELGNTTAAIGKGFAIGAAALAALAIISAFSAVVTVNNPEFSLSLSDPIVLVGMFIGACVPFLVSSITMTAVGDAAFEMINEIRRQFKEIKGLMEGKADPDSEKCVEIATTAALKKMMLPGVIAVSMPAIVGFGLGAQALGGMLAGGLLGCVSLALMMANAGGAWDNAKKFVEKGNFGGKGSDTHAAAVVGDTVGDPFKDTSGPSMNILINVMAIVSLVIAPLLSI

SEQ ID NO: 172110 - protein, 424 aa, Unknown
  Bacterial polypetide isolated from the Sargasso Sea
ISYAFSILVGLGYLIGATLSGLAGYVGMLVSVQANVRTAEASRKGLSNGLSIAFKSGAVTGMLVAGLALLSIAVYYYFLLKFNVEERELINALIALGFGASLISIFARLGGGIFTKGADVGADLVGKVEAGIPEDDPRNPAVIADNVGDNVGDCAGMAADLFETYAVTIVATMVLSSIFFQGDMNMMIYPLTIGGACILTSILGTFFVSLGSSKNIMAALYKGFIVTAISSLAILYPVTDYVIGFDTMYSTGDKSFNGMSLYYCGVIGLIITGLIIWITEYYTGTGYRPVQSVASSSKTGHGTNVIQGLAVSMEATAIPALIIVAGILLTNSIAGLYGIAIAVTTMLALAGMVVALDAYGPVTDNAGGIAEMSNLPKNVRKTTDALDAVGNTTKAVTKGYAIGSAGLGALVLFAAYTEDIKHFS

SEQ ID NO: 172111 - protein, 341 aa, Unknown
  Bacterial polypetide isolated from the Sargasso Sea
MNLIPIILGFTGLLAAYLLYAQVKKYPAGEKNLTDISDEIHLGAMAFMKKEYSILFVFSLILVFGIYIGLGLNSTIAFIVGALSSSITGFIGMYTATKANVRTATAAQNSGVSDSLSVAFFGGSIMGLTVAAMGLLGLGLLYILYGSDPATASTIHGFGMGASTVALFSRVGGGIFTKSADVGADLVGKVEKDIPEDDPRNPGVIADNVGDNVGDVAGMGSDIFESYCGAIIATIAIASTMLQSDLIELGSREILMSLPLALASLGLLCSIIGILIIKILASRKGSNETNIANSLRGGTFASAISFIVLAYFVIISLGVTENAWYAVLSGTIGGIIIGLVT

SEQ ID NO: 172112 - protein, 295 aa, Unknown
  Bacterial polypetide isolated from the Sargasso Sea
VCLSIWGAYMLGFLYGIAIAATSMLSLTGMIVALDAFGPITDNAGGIAEMAELPPEIRGITDPLDAVGNTTKAVTKGYAIGSAGLAALVLFADFTANLEAEGKMVQFMLNDPAVIIGLFIGGMVPYLFAALAMEAVERAATSVVEEVERQFEEPGIMEGTVKPDYSKAVDLLTKSAIKEMIVPSLLPVLVPVVLAVLMNIMMPEDGGIKALGGLLIGTIVTGIFVAISMTTGGGAWDNAKKYVEDGHCGGKGSEAHNASITGDTVGDPYKDTAGPAINPLIKIINIVALLLIPLL

SEQ ID NO: 172113 - protein, 176 aa, Unknown
  Bacterial polypetide isolated from the Sargasso Sea
MSLNLVPAGKSLPDDIYVIIEIPQNADPIKYEVDKDSGAIFVDRFMSTPMFYPCNYGYVNATLSLDGDPVDVLVPTPYPLLAGSVIRCRPVGVLKMTDESGEDAKIVAVPHSKLTKQYDHIKDVNDLPELLRAQIQHFFERYKELEAGKWVKVEGWGDKAAAEAEIISSAERYAAK

SEQ ID NO: 172114 - protein, 507 aa, Unknown
  Bacterial polypetide isolated from the Sargasso Sea
CRLGGGIFTKGADVGADLVGKVEAGIPEDDPRNPAVIADNVGDNVGDCAGMAADLFETYAVTIVATMLIGTIMFSGQINYVELPLFIGGVCIIASIIGAFFVRLGSSENIMGALYKGFIVTAVLSAIFIYFAVDYMFDDSTESMPLFWSSIVGLIVTAAIIWITEYYTSTEYRPVKSIAQSSETGHGTNVIQGLAISMEATAVPAIIIALGIVFSYNLAGIYGIALAATTMLALAGMVVALDAYGPVTDNAGGIAEMSGLEDDVRKTTDALDAVGNTTKAVTKGYAIGSAGLAALVLFAAYTYDLEHYFPDLEISFLLSDPYVVVGLIIGGMLPYLFGSMGMQAVGRAGGAVVEEVRRQFKEMPGIMEGKTRPDYSRAVDMLTKSAIREMIVPSLLPVLAPIVVYFIISLYDQSAALTTVGSMLLGTIVTGLYVAISMTAGGGAWDNAKKYIEDGNHGGKGSEAHKAAVTGDTVGDPYKDTAGPAVNPMIKIINIVAILLLAAIGTH

SEQ ID NO: 172115 - protein, 504 aa, Unknown
  Bacterial polypetide isolated from the Sargasso Sea
DHPLNPATIADNVGDNVGDVAGMGADLFESYVGAILGSMVLGWGLHGSEAAVYLPLYIAGSGILVSIIGTFMVSVKEGGNPQKALNIGEFGSSAIMIGVMYYLITTVLPSGVDMTATNGEVITFTALGIFYATVIGLLAGLGIGLITEHYTGTGTSPVQSVADQSITGSATNIIAGLGVGMQSTAIPTVIIAAAIMGAYHFAGLYGIAMAALGMLANTGIQLAVDAYGPISDNAGGIAEMAELDPEVRERTDKLDAVGNTTAAIGKGFAIGSAALTTLALFASFRTVAGIDSIDLTDPKVMAGLFIGGMLPFLFSSMAMGAVGRAAMSMIEEVRRQFRDIPELKAALEVMNKGDESSWTDEDKSVYEKGLDSAEHGKCVEISTQAAIKEMMLPGLLAVLTPIVIGAFFGPEALGGLLAGVTVCGVLMAIFQSNAGGAWDNAKKMIEEGIQINGTEYGKGSDPHKAAVVGDTVGDPFKDTSGPSLNILIKLMSVVSLVIAPILFG

SEQ ID NO: 172116 - protein, 351 aa, Unknown
  Bacterial polypetide isolated from the Sargasso Sea
MNIILGTNYRPVKSVASSSTTGHGTNVIQGLAVSMEATAIPALIIVGGILLTNYIAGLFGIAIAVTTMLALAGMVVALDAYGPVTDNAGGIAEMSNLPKNVRKTTDALDAVGNTTKAVTKGYAIGSAGLGALVLFAAYTEDIKHFSKVTGSKLEGIVVTFDLSNPFVVVGLLVGGMLPYLFGSMGMQAVGRAGGAVVVEVRRQFKKIPGIMKRKAKPDYGKLVDLLTKAAIKEMIIPSLLPVLSPIVLYLFILPIGGQVAALSSVGAMLLGVIITGLFVAISMTAGGGAWDNAKKYIEDGNFGGKGSEAHKAAVTGDTVGDPYKDTAGPAVNPMIKITNIVALLLLAVIAG

SEQ ID NO: 172117 - protein, 331 aa, Unknown
  Bacterial polypetide isolated from the Sargasso Sea
MSVDTILLYTIFAGILSIVYGFVTGSSILNASAGNAKMQEIASAIQIGAKAYLNRQYKTIAIVGVVVLVIISFAFSLLVGIGYLIGAALSGIAGYVGMLVSVQANVRTAEASRKGLSQGLSIAFKSGAITGMLVAGLALLAIAVYYYILLSAGIDEREIVNALVALGFGASLISIFARLGGGIFTKGADVGADLVGKVEAGIPEDDPRNPAVIADNVGDNVGDCAGMAADLFETYAVTIVATMVLSSIFFVSDLNMMVYPLSIGAACILTSIVGTFFVKLGQSKNIMNALYKGFVATAILSLIILYPITDYVIGLDTNYSVNGVSFNGMSL

SEQ ID NO: 172118 - protein, 499 aa, Unknown
  Bacterial polypetide isolated from the Sargasso Sea
GGIYTKAADVGADLVGKVEAGIPEDDPRNPATIADNVGDNVGDVAGMGADLFESYVGSLVAPLAYAAIVFAGTDVLPSLLFFPLAVGTIGMLASIVSSFLVVPKEGKLAQALHRGTYSAAGITAIGVYFLSDTMFADFSENPIGLFISVIIGLLVGITVGQISEWFTSDHYSIVKNIADQAKTGPATVVLSGISEGMRSAAFSVVVVVIGVGGAYTSGAWALGESGGIYGVAVAAIGVLATLGITVAVDAYGPIADNAGGIAEMAHLDPEVRKATDELDSLGNTTAAIAKGFAIGSAAVTALALFSAFVQSAGLTELDITQVEVTAGLFLGGMFPFLFAAMTINAVGRAAFKMIEEVRRQFREIPGLREGKEGVTPEYEECVDIATSAALKEMLLPGGLAIVSPLIIGFWNKEALGGFLAGALVTGFLLAIFMANSGGAWDNAKKYIEAGGGAGKGSEEHKAAVIGDTIGDPFKDTSGPAMNIVIKVMTIVSLIFASAF

SEQ ID NO: 172119 - protein, 473 aa, Unknown
  Bacterial polypetide isolated from the Sargasso Sea
MNYNVETILIYTILAGILSIVYGYFTGKNILAASTGNSKMQEIASAIQIGAKAYLNRQYKTIAIVGLVVLVIISFSFSFLVGLGYLIGAALSGIAGYVGMLVSVQANVRTAEASRKGLSKGLSIAFKSGAVTGMLVAGLALLSIAVYYYLLLKFNVDKRELINALIALGFGASLISIFARLGGGIFTKGADVGADLVGKVEAGIPEDDPRNPAVIADNVGDNVGDCAGMAADLFETYAVTIVATMVLSSIFFQNDLMMMVYPLTIGGACIITSILGTFFVRLGSSKNIMLALYKGFIVTAITSLLVLYPLTDYVLGLDKVYSIEDKKFSGLSLYYCSVIGLVITGLLIWVTEYYTGTNYRPVKSVASSSTTGHGTNVIQGLAVSMEATAIPALIIVGGILLTNYIAGLYGIAIAVTAMLALAGMVVALDAYGPVTDNAGGIAEMSNLPKNVRKTTDALDAVGNTTKAVTKGYA

SEQ ID NO: 172120 - protein, 679 aa, Unknown
  Bacterial polypetide isolated from the Sargasso Sea
MIESYLAIPPIIGVLGLLVALGIYLVVTNFPEGEDKVKKIGDQIHLGAMTFMKTEYTYLSIFALVVIILVYLSLGQDTALAVLAGALSSSIAGWIGMYSATKANVRTATAASESGAESALSVAFYGGSIMGLCVASLGLIGLGTLYYVLSGDAHSIEGFAMGASIVALFSRVGGGIYTKSADVGADLVGKVEAGIPEDDPRNPGVIADNVGDNVGDIAGMGSDIFESYCGSMVACIAIASTYAITADFAQADKEGMMFLPLALASIGLIASIIGIVIVRLFSKSSPANAMRWGTMGAPLIFIIAAYYLTNSLVASNPLPGSDGLDVWLAVVCGSVGGIAIGLITEYYTGSSPVIKIAEAGQTGPATVMITGLSVGMQSVVLPIACIILIIFISTQLTGLYGVGIAAVGMLSTVGITMAIDAYGPVADNAGGIAEMAGMPSETRVITDELDEQGNTTAAIGKGFAIGAAALAALAIISAFVETVSANRAEPLELILSNPTVLIGIFIGGAIPFLIASITMTAVGDAAFEMINEIRRQFKEIPGLLEGNAEPDTEKCVDIATAAALKKMLLPGIIAVSAPPLVGLGIGAEALGGLLAGGLLVCVLMALFMANAGGAWDNAKKFIEKGNLGGKGTDTHSAAVVGDTVGDPFKDTSGPSMNILINVMAIVSLVIAPIIVRALS

SEQ ID NO: 172121 - protein, 399 aa, Unknown
  Bacterial polypetide isolated from the Sargasso Sea
DVGADLVGKIEAGIPEDDPRNPGVIADNVGDNVGDVAGMGSDIFESYCGSMIASIAIAYTLGNKDMMMLPLALASTGLIASIIGIFIVKLQSAKAPASALRSGTLLAPVIFVAMAYFIIDSFEGVEMNVWWCVIAGAVGGVLIGLITEYYTGGSPVKKIAESGETGSATVMISGLSVGMQSVVIPIGILAGIILISTQLSGIYGVGIAAVGMLATVGITMAIDAYGPVADNAGGIAEMSSMGEEVREITDSLDELGNTTAAIGKGFAIGAAALAALAIISAFSAVVADANPEFSLALTEPIVLVGMFIGVCIPFLVSSITMTAVGDAAFEMINEIRRQFKEIPGLMEGTAEPDSEKCVEIATTAALKKMMLPGIIAVSMPTIVGFGLGAQALGGMLAGG

SEQ ID NO: 172122 - protein, 236 aa, Unknown
  Bacterial polypetide isolated from the Sargasso Sea
KAVTKGYAIGSAGLGALVLFAAYTEDIKHFSKVAGSNLEGIIVTFDLSNPYVVVGLLIGGMLPYLFGSMGMQAVGRAGGAVVIEVRRQFKKYPGIMKKKQKPDYAKLVDLLTVAAIKEMIIPSLLPVLSPIILYFIILFIGGQVAALASVGAMLLGVIITGLFVAVSMTAGGGAWDNAKKYIEDGNFGGKGSEAHKAAVTGDTVGDPYKDTAGPAVNPMIKITNIVALLLLAVIAG

SEQ ID NO: 172123 - protein, 433 aa, Unknown
  Bacterial polypetide isolated from the Sargasso Sea
FESYCGAMIASIAIAATMGNESLMFLPLSLATFGLFCSLIGIGIVRTQVSRSPAVALRWGTFFSPILFLVIAYFFIKYSPGLEIQVFYSVLTGAVGGILIGLITEYYTGGSTEDSPVGRIAKSGETGPATVMITGLSVGMQSVVLPLFVIAAIIGISTYFSGLYGVGIAAVGMLATVGITMAIDAYGPVADNAGGIAEMSGMKKEVREITDSLDELGNTTAAIGKGFAIGAAALAALAIIAAYMLATEIESLSLNDPRVLMGIFIGGTIPFLVSSITMSAVGEAAFEMIEEIRRQFREIPGLLEGKAEPDNAKCVDIATKAALNKMLLPGAIAILSPVLIGFLLGPVHLGGMLAGALLGCVLMALMMANAGGAWDNAKKFVEKGNFGGKGTDTHSATVVGDTVGDPFKDTSGPSMNILINVMAIVSLVIAPLL

SEQ ID NO: 172124 - protein, 499 aa, Unknown
  Bacterial polypetide isolated from the Sargasso Sea
FTKAADVGSDLVGKVEAGIPEDDPRNPGVIADNVGDNVGDVAGMGADLFESYVGSIISAIALAAGSMALISSKEALLPLMIAGAGIIASILGTFLVRSSENANFGQLLWALRKGIFSSAILVAIFSGGIIYFLEMSDGVSLFICIITGLIAGTIIGTATEYYTSYEYKPTKNVAENAQTGAATVIISGFATGMMSTLIPVIAIGATILIAYELQEFYGIALAGVGLLSTLGITLATDAYGPVADNAGGIAEQAQLAPEVRQRTDALDALGNTTAATGKGFAIGSAALTSLALLAAFAQAAGLFDGDGINILKHTTLAGLLIGAMLPFIFSALTMNAVGRAAFSVVNEVRRQFREIEGLLDGKATPDYERCVDISTRGALKEMIIPGLLAVIMPIAIGLLLGAEALGGMLIGSVASGFMIAITMASAGGSWDNAKKYVELGHYGGKGSDSHKAAVEGDVVGDPFKDTSGPSLNILLKLMAIVSLVFAPVFTVVTPIILYI

SEQ ID NO: 172125 - protein, 660 aa, Unknown
  Bacterial polypetide isolated from the Sargasso Sea
MDNLIIPPALGILGMVMAFVVYKLVMKYPDGEDKVKKIGDQIHAGALAFMKTEYKYLSIFIAVIVLLAWYALGPYTAISIIVGAICSSVAGFIGMYAATKANVRTATAAQKDGPAAALSVSFYGGSIMGLCVASLGLIGLGGLYYFYIPAEIDPHKLEGFAMGASVVALFSRVGGGIFTKSADVGADLVGKIEAGIPEDDPRNPGVIADNVGDNVGDVAGMGSDIFESYCGSMIASIAIAYTLGNQDMMMLPLALAATGLIASIIGIFIVKLQSAKAPASALRSGTLLAPVIFVAMAYFIVDSFDGVAMNVWWCVIAGAVGGVLIGLITEYYTGGGPVKKIAESGETGSATVMISGLSVGMQSVVIPIVILAGIILTSTQLSGIYGVGIAAVGMLATVGITMAIDAYGPVADNAGGIAEMSGMGEEVREITDSLDELGNTTAAIGKGFAIGAAALAALAIISAFSAVLKVKYPDFSLALTDPIVLVGMFIGICIPFLVSSITMTAVGDAAFEMINEIRRQFREITGLMEGTAEPDSEKCVEIATKAALKKMMLPGVIAVSMPAIVGFGLGAQALGGMLAGGLLGCVSLALMMANAGGAWDNAKKYVEKGNLGGKGSDTHAAAVVGDTVGDPFKDTSGPSMNILINVMAIVSLVIAPLLSI

SEQ ID NO: 172126 - protein, 519 aa, Unknown
  Bacterial polypetide isolated from the Sargasso Sea
MSGTVETILLYTIGAGLLSIVYGFLTGKNILNSSAGNAKMQDIASAIQIGAKAYLARQYKTIAIVGAVVLVIVSVAFSPLVGLGYLIGAALSGIAGYVGMLVSVEANVRTAEASRKGLAQGLSIAFKSGAVTGMLVAGLALLSIAVYYYILLKSNVDEREIVNALVALGFGASLISIFARLGGGIFTKGADVGADLVGKVEAGIPEDDPRNPAVIADNVGDNVGDCAGMAADLFETYAVTIVATMVLSSIFFVGDLNMMIYPLSIGAACLLTSIVGTFFVKLGRSNNVMNALYKGFVVSAVASLVILWPVTDHVIGFTNEFTVNDKTFNGMDLYYCGVIGLVITGLLIWITEYYTGTSYRPVKSVALSSTTGHGTNVIQGLAVSMEATAIPALIIVAGILITNTIAGLFGIAIAVTTMLALAGMVVALDAYGPVTDNAGGIAEMSNLDKKVRKTTDALDAVGNTTKAVTKGYAIGSAGLGALVLFAAYTEDIKHFSKEAGSALERIVVTFDLSNPYVVV

SEQ ID NO: 172127 - protein, 692 aa, Unknown
  Bacterial polypetide isolated from the Sargasso Sea
MDGEQLGMIGIAAGLFGLVVAFFLYNKVNSIKIENETVAKITERIYDGAMAFLWAEYRLLSGFIVIVAIALLLGGEENGLGFETMIAFIIGAICSVAAGFSGMRSATSANGRTAQAAADGGQSAALTTSYNGGAVMGLAVGGLGLAGISLMYYLTQTEFLTVENIAGFGMGASSIALFARVGGGIYTKAADVGADLVGKVEAGIPEDDPRNPGVIADNVGDNVGDVAGMGADIFESFVGSIIAAMVIAAASEDLLGPDYVMIPIVLAVVGYIASIIGVFSITAMQNMDPGAALRNTTFIAAGLFIIGGYLALDYLELPTKVIQAVAIGSLVGILIGLVTEYYTGIEDVFFFKVQAIPYIGEASKTGSATNAIAGLAVGMQSVFIPVLLMAAGIFGANHVMDGGDPGLYGIAMAAMGMLGTVGVTMTVDAYGPVADNAGGIAEMSGLGDDVREITDGLDSIGNTTAAIGKGFAIGSAALTALALFAAFKTSANLEAADLSLTEPMVVIGLLIGAALPFVVAAMTMKSVGRAAEDMITEIRRQFKEIDGLLEGREGVEPDSATCVDISTKAALREMVLPGVVAVSSPVVIGLLLGSAALGGTLAGATASGVLMALFMANAGGAWDNAKKAIEQGHIEGAAKGDEAHSAAVVGDTIGDPFKDTSGPSLNILIKLMSIVSVVIAGMLTKGGELGTL

SEQ ID NO: 172128 - protein, 273 aa, Unknown
  Bacterial polypetide isolated from the Sargasso Sea
IPEDDPRNPAVIADNVGDNVGDCAGMAADLFETYVVTVVATMVLASIFFINNSYTMMFYPLAIAGVCTLASIVGTYFVRLGKNNNIMAALYRGFAVSAILSAILLYFVTDYVVGLDNQLIVDGTDISFSGMSLFICGILGLIITGLIIWVTEYYTGTNYRPVQSIAQSSTTGHGTNVIQGLAISLEATALPALIIVAGIISTYSLAGLFGIAIAVTTMLALAGMVVALDAYGPVTDNAGGIAEMSNLDDNVRKPQMLLMQLEILPKLSQKVTQ

SEQ ID NO: 172129 - protein, 63 aa, Unknown
  Bacterial polypetide isolated from the Sargasso Sea
AWDNAKKYIEDGKFGGKGSEAHKAAVTGDTVGDPYKDTAGPAVNPMIKITNIVALLLLAVIAS

SEQ ID NO: 172130 - protein, 337 aa, Unknown
  Bacterial polypetide isolated from the Sargasso Sea
VAESSTTGHGTNVIQGLAFSMEATAIPAIIIVAGILLTNSIAGLFGIAIAVTTMLALAGMVVALDAYGPVTDNAGGIAEMSNLPKNVRKTTDALDAVGNTTKAVTKGYAIGSAGLGALVLFAAYTEDIKHFSKEAGSKLEGIVVTFDLSNPFVVVGLLIGGMLPYLFGSMGMQAVGRAGGAVVIEVRRQFKKIPGIMKRKAKPDYGKLVDLLTKAAIKEMVIPSLLPVLSPIVLYLIILQIGGQVAALSSVGAMLLGVIITGLFVAVSMTAGGGAWDNAKKYIEDGKFGGKGSEAHKAAVTGDTVGDPYKDTAGPAVNPMIKITNIVALLLLAVIAG

SEQ ID NO: 172131 - protein, 434 aa, Unknown
  Bacterial polypetide isolated from the Sargasso Sea
MEASASNILQIIILAGLLSIVYGFFTGKNILSSSPGNSKMQEIASAIQVGAKAYLNRQYKTIAIVGVVVLVIISFAFSILVGLGYLIGAALSGIAGYVGMLVSVQANVRTAEASRKGLSQGLSIAFKSGAVTGMLVAGLALLSIAVYYYLLLSFNVDEREIVNALVALGFGASLISIFARLGGGIFTKGADVGADLVGKVEAGIPEDDPRNPAVIADNVGDNVGDCAGMAADLFETYAVTIVATMVLSSIFFHGDLNMMVYPLSIGGACILTSIIGTFFVKLGKSKNIMTALYKGFVVTAVTSLIILYPITDYVLGLDNNYSISNKSFTGMSLYLCGVIGLIITGLLIWVTEYYTGTNYRPVKSVASSSTTGHGTNVIQGLAVSMEATAIPALIIVGGILLTNYIAGLFGIAIAVTTMLALAGMVVALDAYGPS

SEQ ID NO: 172132 - protein, 389 aa, Unknown
  Bacterial polypetide isolated from the Sargasso Sea
ETYAVTIVATMVLSSIFFQSDISMMIYPLTIGGACIITSIIGTFFVKLGNSKNVMNALYKGFIATAILSLVVLYPVTDYVIGLDANYSFGDTTFTGISLYYCGVVGLIITGLLIWITEYYTGTDYRPVKTVAASSTTGHGTNVIQGLAISMEATAVPALIIVAGILITNAIAGLFGIAIAVTTMLALAGMVVALDAYGPVTDNAGGIAEMSNLPKNVRKTTDALDAVGNTTKAVTKGYAIGSAGLGALVLFAAYTEDIKYFSKEAGSKLEGIVVSFDLSNPFVVVGLLIGGMLPYLFGSMGMQAVGRAGGAVVIEVRRQFKKIPGIMKRKAKPDYGRLVDLLTKAAIKEMVIPSLLPVLSPIVLYIIILPIGGQVAALSSVGAMLLGVL

SEQ ID NO: 172133 - protein, 198 aa, Unknown
  Bacterial polypetide isolated from the Sargasso Sea
EGIVVTFDLSNPFVVVGLLVGGMLPYLFGSMGMQAVGRAGGAVVLEVRRQFKKFPGIMKRKQKPDYAKLVDLLTIAAIKEMIIPSLLPVLSPIVLYFIIYSIGGQVAALASVGAMLLGVIITGLFVAISMTAGGGAWDNAKKYIEDGNFGGKGSEAHKAAVTGDTVGDPYKDTAGPAINPMIKITNIVALLLLAVIAG

SEQ ID NO: 172134 - protein, 590 aa, Unknown
  Bacterial polypetide isolated from the Sargasso Sea
IASAIQIGARAYLFRQYKTIGIVGIVVLVIISYAFSILVGIGYLIGATLSGIAGYVGMLVSVQANVRTAEASRKGLSQGLSIAFKSGAVTGMLVAGLALLSIAVYYFLLISFGVDEREIVNALVALGFGASLISIFARLGGGIFTKGADVGADLVGKVEAGIPEDDPRNPAVIADNVGDNVGDCAGMAADLFETYAVTIVATMVLSSIFFHGDLNMMIYPLSIGGACILTSIFGTFFVKLGKSKNIMAALYKGFIVTAITSLLVLYPITDYVLGLENTYSINDKTFTGLSLYICGVIGLVITGLIIWVTEYYTGTNYRPVKSVASSSTTGHGTNVIQGLAVSMEATAVPALIIVGGILLTNYIAGLFGIAIAVTTMLALAGMVVALDAYGPVTDNAGGIAEMSNLPKNVRKTTDALDAVGNTTKAVTKGYAIGSAGLGALVLFAAYTEDIKHFSKVAGSNLEGIVVTFDLSNPFVVVGLLVGGMLPYLFGSMGMQAVGRAGGAVVVEVRRQFKKIPGIMKRKSKPDYGRLVDLLTKAAIKEMIIPSLLPVLSPIVLYLFILPIGGQVAALSSVGAMLLGVIITGLFVAIS

SEQ ID NO: 172135 - protein, 350 aa, Unknown
  Bacterial polypetide isolated from the Sargasso Sea
NIWLAVVCGSAGGIAIGLITEYYTGSTPIVKIAESGQTGPATVMITGLSVGMQSVVAPIACLALIIFISTQLTGLYGVGIAAVGMLSTVGITMAIDAYGPVADNAGGIAEMAGMPSETREITDELDEQGNTTAAIGKGFAIGAAALAALAIIAAFVATVSSNREEPLELLLSNPMVLIGMFIGGAIPFLIASITMTAVGDAAFEMINEIRRQFKEIPGLLEGNAEPDTAKCVDIATAAALKKMLIPGVIAVSAPPLVGFGLGAESLGGMLAGGLLACVLMALFMANAGGAWDNAKKYIEKGNLGGKGTDTHSAAVVGDTVGDPFKDTSGPSMNILINVMAIVSLVIAPLL

SEQ ID NO: 172136 - protein, 390 aa, Unknown
  Bacterial polypetide isolated from the Sargasso Sea
MSGTVETILLYTIGAGLLSIVYGFLTGKNILNSSAGNSKMQDIASAIQIGAKAYLARQYKTIAIVGAVVLVIVSIAFSPLVGLGYLIGAALSGIAGYVGMLVSVEANVRTAEASRKGLAQGLSVAFKSGAVTGMLVAGLALLAIAVYYYILLKSNVDEREIVNALVALGFGASLISIFARLGGGIFTKGADVGADLVGKVEAGIPEDDPRNPAVIADNVGDNVGDCAGMAADLFETYAVTIVATMVLSSIFFVGDLNMMIYPLSIGAACLLTSIVGTFFVKLGKSNNVMNALYKGFVVSAVASLVILWPVTDHVIGFTNEYTINDKIFNGMDLYYCGVIGLVITGLLIWITEYYTGTSYRPVKSVALSSTTGHGTNVIQGLAVSMEATAI

SEQ ID NO: 172137 - protein, 612 aa, Unknown
  Bacterial polypetide isolated from the Sargasso Sea
MDSLIIPPALGLLGMAMAYVVYMLVMKYPDGEDKVKKIGDQIHTGALTFMKTEYKYLFIFMTVIVGLAWFALGPFTAIAVVVGALCSSIAGFIGMYAATKANVRTATAAQKDGSAAALSVSFYGGSIMGLCVASLGLIGLGGLYYFYIPAEIDPHKLEGFAMGASVVALFSRVGGGIFTKSADVGADLVGKIEAGIPEDDPRNPGVIADNVGDNVGDVAGMGSDIFESYCGSMIASIAIAYTLGNKDMMMLPLALASTGLIASIIGIFIVKLQSAKAPASALRSGTLLAPVIFVAMAYFIIDSFDGVGMNVWWCVISGAVGGVLIGLITEYYTGGSPVKKIAESGKTGSATVMISGLSVGMQSVVIPIVILAGIILASTQLSGIYGVGIAAVGMLATVGITMAIDAYGPVADNAGGISEMSGMGEEVREITDSLDELGNTTAAIGKGFAIGAAALAALAIISAFSAVVADANPEFSLALTEPIVLVGMFIGVCIPFLVSSITMTAVGDAAFEMINEIRRQFKEIEGLMEGTAEPDSEKCVEIATTAALKKMMLPGVIAVSMPAIVGFGLGAQALGGMLAGGLLGCVSLALMMANAGGAWDNAKKYVEKGNLG

SEQ ID NO: 172138 - protein, 153 aa, Unknown
  Bacterial polypetide isolated from the Sargasso Sea
MFAIAYLKETDMSLLNVPAGKDLPEDIYVVIEIPANADPIKYEVDKESGALFVDRFMSTAMFYPCNYGYINHTLSLDGDPVDVLVPTPYPLEPGSVIRCRPVGVLKMTDESGEDAKLVAVPHTKLSKEYDHIKDVTDLPELLKAQITHFFEHY

SEQ ID NO: 172139 - protein, 342 aa, Unknown
  Bacterial polypetide isolated from the Sargasso Sea
LEMFSATKANVRTATAASESGAQAALSVAFYGGSIMGLCVASLGLVGLGGLYFYFGGDPDTARAIEGFGMGASCVALFSRVGGGIYTKSADVGADLVGKVEAGIPEDDPRNPGVIADNVGDNVGDVAGMGSDIFESYCGAMIASIAIAATIDNTGMMALPLALASLGLLASILGIIIVRVFSKADPGTALRTGTIGSAILFIIAAYFLIQMILTENALNTWLAVLAGAVGGVIIGLITEYYTGSKPVEKIAKSGETGPATVMITGLSVGMQSVVLPILVLATIILVSTSLVGLYGVGIAAVGMLATVGITMAIDAYGPVADNAGGIAEMSGMGSETREITDF

SEQ ID NO: 172140 - protein, 335 aa, Unknown
  Bacterial polypetide isolated from the Sargasso Sea
MMQTFILLCGLAAVFYGLITSRQILSLSTGNEKMSEIANAIQEGARAYLNRQYLTIGIVGIAIFILIWIIFGLSSGLGFLIGAFFSGAAGYVGMNISVRSNVRTTQAASSSLSEGLSVSFKAGAVTGMLVAGFALLSIAIYYFLLDNSGLFPGREIVAPLVSLGFGASLISIFARLGGGIFTKGADVGADLVGKVEAGIPEDDPRNPAVIADNVGDNVGDCAGMAADLFETYVVTVVATMVLASIFFSESLSSTMMMYPLAIAGVCTLASIIGTYFVKLGKNQNIMMALYKGFAVSAILSAILLYFITDHVVGNDEVFNIDDKTFTGLSLFYCGI

SEQ ID NO: 172141 - protein, 342 aa, Unknown
  Bacterial polypetide isolated from the Sargasso Sea
MSGTVETILLYTIGAGLLSIVYGFLTGKNILNSSAGNAKMQDIASAIQIGAKAYLARQYKTIAIVGAVVLVIVSIAFSPLVGLGYLIGAALSGIAGYVGMLVSVEANVRTAEASRKGLAQGLSVAFKSGAVTGMLVAGLALLAIAVYYYILLKSNVEEREIVNALVALGFGASLISIFARLGGGIFTKGADVGADLVGKVEAGIPEDDPRNPAVIADNVGDNVGDCAGMAADLFETYAVTIVATMVLSSIFFVGDLNMMIYPLSIGAACLLTSIIGTFFVKLGKSNNVMNALYKGFVVSAVASLIILWPVTDHVIGFTNEYTINDKTFNGMDLYYCGVIGLV

SEQ ID NO: 172142 - protein, 224 aa, Unknown
  Bacterial polypetide isolated from the Sargasso Sea
MPAYIPPLLGLIGLLIALGIFRVVLSYPEGNPEVKKIGDMIHSGAMSFMKTEYMYLVVFVLVLAVLVFFALGWETATAVLVGASSSALAGFIGMYAATKANTRTAAAAQDSGAASALSISFYGGSIMGLCVASLGLLGLGGLFYFLGEGHYLEGFGMGASVVALFSRVGGGIFTKSADVGADLVGKVEAGIPEDDPRNPGVIADNVGDNVGDVAGMGSDIFESY

SEQ ID NO: 172143 - protein, 507 aa, Unknown
  Bacterial polypetide isolated from the Sargasso Sea
WINKQSQGNDRMKSIGASIADGAMAFLRAEYRILVVFVIAVAFILGFANSGRSDSSAMISLSFVVGALASGLAGFLGMKVATKANNRTTHAAETSLAKALNVAFSGGSVMGLSVVGLGVLGLGGLLYLYSNMYGFENSSAVSMVLNILSGFSLGASSIALFARVGGGIYTKAADVGADLVGKVEAGIPEDHPLNPATIADNVGDNVGDVAGMGADLFESYVGSIIGSMVLGSSILVAGGMDLNFIILPLLIAGAGIVVSILGTFMVSVKEGGDPQKGLNQGEFGSGLIMVGVIYFLIMKFLPDSYFQAGVSYKSTGVFYATIIGLFGGLGIGKITEYYTGTGTKPVKSIAEQSITGPATNIIAGLGVGMESTAIPIIIISSSIMGAYYFAGLYGIAMAALGMLANTGIQLAVDAYGPISDNAGGIAEMAELPSEVRERTDRLDAVGNTTAAIGKGFAIGSAALTALALFAAYMVKTGISTIDISNRNGYGWFIYWWYVAISIFINSN

SEQ ID NO: 172144 - protein, 509 aa, Unknown
  Bacterial polypetide isolated from the Sargasso Sea
LRAEYRILAVFVIAVAFILGYANSGRSDSSAMISLSFVVGALASGLAGFLGMKVATKANNRTTHAAESSLARALNVAFSGGSVMGLSVVGLGVLGLGGLLYLYSNMYGFENSSTVSMVLNILSGFSLGASSIALFARVGGGIYTKAADVGADLVGKVEAGIPEDHPLNPATIADNVGDNVGDVAGMGADLFESYVGSIIGSMVLGSSILVAGGMDLNFVILPLLIAASGIVVSILGTFMVSVKEGGDPQKGLNQGEFGSGLIMVGVIYVLIVKILPESYFQGGVSYNSTGVFYATIIGLFGGLGIGKITEHYTGTGTKPVKSIAEQSMTGPATNIIAGLGVGMESTAVPMIIISASIMGAYYFAGLYGIAMAALGMLANTGIQLAVDAYGPISDNAGGIAEMAELPSEVRERTDKLDAVGNTTAAIGKGFAIGSAALTALALFAAYMVKTGISTIDISNPMVMAGLFIGGMLPFLFSSMAMGAVGRAAMAMIEEVRRQFRENPELKKAL

SEQ ID NO: 172145 - protein, 318 aa, Unknown
  Bacterial polypetide isolated from the Sargasso Sea
VPNVAASSETGSATNIISGLANGMFSTALPVLVIALSILGAYHFAHLYGIALAALGMLSTIGIQLAVDAYGPIADNAGGIAEMAELPKEVRERTDKLDAVGNTTAAIGKGFAIGSAALTSLALFAAFRETVGGLTLDINNPQVMAGLLIGSSLPFVFSALAMQAVGDAAFEMIEEVRRQFREIKGLLDGKAKADYAKCVDIATTAAINKMVLPGALAVFTPIVFGLVLGQKEMLGGILAGVTVTGVLLAIFMSNAGGSWDNAKKYIESGNHGGKGSTAHKAAVVGDTVGDPFKDTAGPSLNILIKLISVVSLVIAPLI

SEQ ID NO: 172146 - protein, 432 aa, Unknown
  Bacterial polypetide isolated from the Sargasso Sea
MGGLYYFYIPAEIDPHKLEGFAMGASVVALFSRVGGGIFTKSADVGADLVGKIEAGIPEDDPRNPGVIADNVGDNVGDVAGMGSDIFESYCGSMIASIAIAYTLGNQDMMMLPLALAATGLIASIIGIFIVKLQSAKAPASALRSGTLLAPVIFVAMAYFIIDSFDGVGMNVWWCVIAGAVGGVLIGLITEYYTGGGPVKKIAESGETGSATVMISGLSVGMQSVVIPIVILAGIILASTQLSGIYGVGIAAVGMLATVGITMAIDAYGPVADNAGGIAEMSGMGEEVREITDSLDELGNTTAAIGKGFAIGAAALAALAIISAFSAVVGVANPEFSLALTEPIVLVGMFIGVCIPFLVSSITMTAVGDAAFEMINEIRRQFKEITGLMEGTAEPDSEKCVEIATKAALKKMMLPGVIAVSMPAIVGFGLGA

SEQ ID NO: 172147 - protein, 303 aa, Unknown
  Bacterial polypetide isolated from the Sargasso Sea
MVAIIIAAAFLGLGTALFYWIKVSSIPLTHGIENKEEAEKLSKITHAIEIGAMAFLKAEYKYMVYFMAGFAILIAFLIDDPHTPDVSEGIYTAISFLLGCVISIASGFIGMRIATIGNARTTTAAKNSIADAFKVALNSGAVMGFGLVGLAVLGLAVIYLVLDFLLPGIDKHILMEVMAGFGLGGSSIALFGRVSGGIFTKAADVGADLVGKVEQGIPEDDPRNPAVIADNVGDNVGDVAGMGADLFGSCAESTCAALVIGAVAFATNTEALLFPNFDICSWNSNKSDYYVLSHGLKKKKTCS

SEQ ID NO: 172148 - protein, 404 aa, Unknown
  Bacterial polypetide isolated from the Sargasso Sea
YETEYTYLVVFVFVLAVFVFFALGWETATAVLVGASSSALAGFIGMYAATKANTRTAAAAQESGAASALSISFYGGSIMGLCVASLGLLGLGGLFYFLGEGHYLEGFGMGASVVALFSRVGGGIFTKSADVGADLVGKVEAGIPEDDPRNPGVIADNVGDNVGDVAGMGSDIFESYCGSMIATIAIAYTMKEANNGPLMSLPLALASIGLISSILGILIVRAQSAKAPAAALRTGTIGSPVIFIALAFGLISYLDISLNVWFCVLTGAVGGVLIGLITEYYTGSTPVEKIAKSGETGSATVMISGLSVGMQSVVIPILILATIIFISTTLFDLYGVGIAAVGMLATVGITMAIDAYGPVADNAGGIAEMSGMGEDVREITDSLDELGNTTTAIGKGFAIGAAAL

SEQ ID NO: 172149 - protein, 441 aa, Unknown
  Bacterial polypetide isolated from the Sargasso Sea
GVIVLIIISYFFSLLVGLGYLIGAVLSGLAGYVGMLISVQANVRTAEASRSSLQSGLTMAFKSGAITGLLVAGLALLAISIYYWALLSFNVESRELINALIALGFGASLISIFARLGGGIFTKGADVGADLVGKVEAGIPEDDPRNPAVIADNVGDNVGDCAGMAADLFETYAVTIVATMVLSSIFFLENQTMMIYPLAIGGGCIIASIIGTFFVRLGKGKNIMGALYKGFIVTAILSLILLYPITLNTIGLETSYIVGDKTFNGLDLYYCGVIGLIVTGLIIWVTEYYTGTNYRPVKSVAKSSTTGHGTNVIQGLAVSMEATALPALIIVGGIIITNQLAGLFGIAIAVTAMLALTGMVVALDAYGPVTDNAGGIAEMSKLPKNVRKTTDALDAVGNTTKAVTKGYAIGSAGLGALVLFAAYTEDIKFFSNVPGSALEGI

SEQ ID NO: 172150 - protein, 349 aa, Unknown
  Bacterial polypetide isolated from the Sargasso Sea
FLLGAGCSAASGYVGMWVSVRANVRVAGAARRGFREALGVALRAGGFAAILVVSVAVFGVAGLFATFSFLLGSTDQVPLMLVGYGFGASFVALFAQLGGGIYTKAADVGADLVGKVEAGIPEDDPRNPAVVADLVGDNVGDCSARGADLFESIAAEIISAMILGASMAKKTDVPEAIAPGFIAFPLVVHAMDCVVSAIGIMSVQTTEDASASSSAGGSLESGAAAASNGASDPYEVMKSGYRVAMACGAVFFALACRFMLHVPSVPQAWVHFYGCGLIGMASSYAFVFLAQYYTDYKYPPVRVIAEASLTGHGTNVIAGVGVGMEATAAPTLVIGAAIVGAYWCGQTCG

SEQ ID NO: 172151 - protein, 343 aa, Unknown
  Bacterial polypetide isolated from the Sargasso Sea
MGFGASLISIFARLGGGIFTKGADVGADLVGKVEAGIPEDDPRNPAVIADNVGDNVRDCAGMAADLFETYAVTIVATMVLSSIFFHGDLNMMVYPLSIGGGCILTSIIGTFFVKLGKSKNIMAALYKGFIVTAITSLIILYPITDYVLGLENTYSVSGKSFTGMNLYMCGVIGLIITGLLIWVTEYYTGTNYRPVKSVASSSTTGHGTNVIQGLAVSMEATAIPALIIVGGILLTNYIAGLFGIAIAVTTMLALAGMVVALDAYGPVTDNAGGIAEMSNLPKNVRKTTDALDAVGNTTKAVTKGYAIGSAGLGALVLFAAYTEDIKHFSMIAGSKLEGVVVNF

SEQ ID NO: 172152 - protein, 434 aa, Unknown
  Bacterial polypetide isolated from the Sargasso Sea
SCIITSIIGTWFVRLGNSKNIMNALYKGFIATAFLSLLILYPLTNATLGLNENYSYSNITFSGFDLYICSVIGLVITGLIIWITEYYTGTNFRPVKSVAKSSTTGHGTNVIQGLAISMEATAVPALIIVVGIISTYNFAGLFGIAIAVTSMLALTGMVVALDAYGPVTDNAGGIAEMSKLPKNVRKTTDALDAVGNTTKAVTKGYAIGSAGLGALVLFAAYTEDIKYYSMDKTSSLYQMEVSFDLSNPYVVIGLLIGGLLPYLFGSMGMQAVGRAGGAVVVEVRRQFKKIPGIMKGKRKPDYGRLVDLLTKAAIKEMITPSLLPVLSPIVLYIIILLIAGKVAALAALGAMLLGVIVTGLFVAISMTAGGGAWDNAKKYIEDGNFGGKGSEAHKAAVTGDTVGDPYKDTAGPAVNPMIKITNIVALLLLSIIAH

SEQ ID NO: 172153 - protein, 177 aa, Unknown
  Bacterial polypetide isolated from the Sargasso Sea
GMLPYLFGSMGMQAVGRAGGAVVVEVRRQFKKYPGIMKRKQKPDYAKLVDLLTVAAIKEMIIPSLLPVLSPVVLYFIILAIGGQVAALAAVGAMLLGVIITGLFVAVSMTAGGGAWDNAKKYIEDGNHGGKGSEAHKAAVTGDTVGDPYKDTAGPAVNPMIKITNIVALLLLAVIAG

SEQ ID NO: 172154 - protein, 508 aa, Unknown
  Bacterial polypetide isolated from the Sargasso Sea
LAIAVYYFLLIKYEVDEREIVNALVALGFGASLISIFARLGGGIFTKGADVGADLVGKVEAGIPEDDPRNPAVIADNVGDNVGDCAGMAADLFETYAVTIVATMVLSSIFFVGDLNMMIYPLTIGAACLLTSILGTFFVKLGRDNNVMNALYKGFIVSAVASLAILWPVTDHVIGFTNEYTVNGNTFNGMDLYYCGVIGLVITGLLIWITEYYTGTSYRPVKSVALSSTTGHGTNVIQGLAVSMEATAIPALIIVAGILITNSIAGLFGIAIAVTTMLALAGMVVALDAYGPVTDNAGGIAEMSNLDKKVRKTTDALDAVGNTTKAVTKGYAIGSAGLGALVLFAAYTEDIKHFSKEAGSALEGIVVTFDLSNPYVVVGLLIGGMLPYLFGSMGMQAVGRAGGAVVVEVRRQFKKFPGIMKRKQKPDYAKLVDLLTVAAIKEMIIPSLLPVLSPVVLYFIILSIGGQVAALAAVGAMLLGVIITGLFVAVSMTAGGGAWDNAKKYMKM

SEQ ID NO: 172155 - protein, 303 aa, Unknown
  Bacterial polypetide isolated from the Sargasso Sea
MTTLQVLIVLCGLAAVLYGLVTSRQILSLGSGNDKMQEIAGAIQEGARAYLNRQYMTIAIVGVVIFALIWIVFDLASGIGFLIGAFFSGAAGYVGMNISVRSNVRTTHAASNSLAEGLSVSFKAGAVTGMLVAGFALLSIAIFYFVLHNSGSFPGREIVAPLVSLGFGASLISIFARLGGGIFTKGADVGADLVGKVEAGIPEDDPRNPAVIADNVGDNVGDCAGMAADLFETYVVTVVATMVLASIFFIENSYTMMIFPLAIAGVCALTSIIGTYFVKLGKNNNIMAALYRGFAVSAILSAN

SEQ ID NO: 172156 - protein, 295 aa, Unknown
  Bacterial polypetide isolated from the Sargasso Sea
MDNLIIPPVLGLLGMVMAFVVYMLVMKYPDGEDKVKKIGDQIHTGALTFMKTEYKYLFIFMAVIVGLAWYALGPYTAIAVIVGALCSSIAGFIGMYAATKANVRTATAAQKDGSAAALTVSFYGGSIMGLCVASLGLIGLGGLYFFYIPAEIDPHKLEGFAMGASVVALFSRVGGGIFTKSADVGADLVGKIEAGIPEDDPRNPGVIADNVGDNVGDVAGMGSDIFESYCGSMIASIAIAYTLGNKDMMMLPLALASTGLIASIIGIFIVKLQSAKAPASALRSGTLLAPSNICG

SEQ ID NO: 172157 - protein, 404 aa, Unknown
  Bacterial polypetide isolated from the Sargasso Sea
SSLAQGLSVSFKAGAVTGMLVAGFALLSVAAYYFILDNSGNFEGRLIVAPLVSLGFGASLISIFARLGGGIFTKGADVGADLVGKVEAGIPEDDPRNPAVIADNVGDNVGDCAGMAADLFETYVVTVVATMVLASIFFTTELSSKMMMYPLSIAGVCTIASIIGTYFVRLGSSENIMMALYKGFLVSAILSAIFLYFITDHVVGMSTSLDALGNNITGLSLFYCGILGLIITGLIIWVTEYYTGTNYRPVQSIAKSSTTGHGTNVIQGLAISLEATALPAIIIVAGIIITYSIAGLFGIAIAVTTMLALAGMVVALDAYGPVTDNAGGIAEMANLDDSVRKTTDALDAVGNTTKAVTKGYAIGSAGLGALVLFAAYTEDVSHYGFRSLFLIYQILYVVVGPFTL

SEQ ID NO: 172158 - protein, 416 aa, Unknown
  Bacterial polypetide isolated from the Sargasso Sea
MDNLIIPPALGILGMVMAFVVYKLVMKYPDGEDKVKKIGDQIHAGALAFMKTEYKYLSIFIAVIVLLAWYALGPYTAISIVVGAICSSVAGFIGMYAATKANVRTATAAQKDGPAAALSVSFYGGSIMGLCVASLGLIGLGGLYYFYIPAEIDPHKLEGFAMGASVVALFSRVGGGIFTKSADVGADLVGKIEAGIPEDDPRNPGVIADNVGDNVGDVAGMGSDIFESYCGSMIASIAIAYTLGNQDMMMLPLALAATGLIASIIGIFIVKLQSAKAPASALRSGTLLAPVIFVAMAYFIINTFDGVGMNVWWCVIAGAVGGVLIGLITEYYTGGGPVKKIAESGETGSATVMISGLSVGMQSVVIPIVILAGIILTSTQLSGIYGVGIAAVGMLATVGITMAIDAYGPVADNAGG

SEQ ID NO: 172159 - protein, 489 aa, Unknown
  Bacterial polypetide isolated from the Sargasso Sea
MDASIDTILYYIIFAGLLSIIYGFFTGSNIIKSSPGNSKMQEIASAIQIGAKAYLNRQYKTIAIVGVVVLIIITFAFNYLVGLGYLIGATLSGIAGYVGMLVSVQANVRTAEASRKGLASGLSVAFKSGAITGMLVAGLALLSIAVYYFILLKFGIDEREIVNALVALGFGASLISIFARLGGGIFTKGADVGADLVGKVEAGIPEDDPRNPAVIADNVGDNVGDCAGMAADLFETYAVTIVATMVLSSIFFHGDINMMLYPLTIGAACIITSIVGTFFVKLGNSKNVMNALYKGFIATAILSLVILYPVTEYVIGFEKNYVVGSNVFTGLNLYYCGVIGLIITGLLIWVTEYYTGTNYRPVKSVAASSTTGHGTNVIQGLAVSMEATAIPALIIVSGILLTNYIAGLFGIAIAVTTMLALAGMVVALDAYGPVTDNAGGIAEMSNLPKNVRKTTDALDAVGNTTKAVTKGYAIGSAGLGALVLFAAYT

SEQ ID NO: 172160 - protein, 311 aa, Unknown
  Bacterial polypetide isolated from the Sargasso Sea
MSSSVETILIYTIIAGLLSIVYGFFTGKSILSSSSGNSRMQEIASAIQIGAKAYLNRQYKTIAIVGVVVLIIISIAFSPLVGLGYLIGATLSGIAGYVGMLVSVQANVRTAEAARKGLSAGLSLAFRSGAVTGMLVAGLALLSIAVYYFLLLKFNIDEREIVNALVALGFGASLISIFARLGGGIFTKGADVGADLVGKVEAGIPEDDPRNPAVIADNVGDNVGDCAGMAADLFETYAVTIVATMVLSHIFFHGDLNMMIYPLTIGGACIITSIIGTYFVKLGRDKNVMNAMYKGFIITAISSLIILYPNN

SEQ ID NO: 172161 - protein, 334 aa, Unknown
  Bacterial polypetide isolated from the Sargasso Sea
ILARLGGGIFTKGADVGADLVGKVEAGIPEDDPRNPAVIADNVGDNVGDCAGMAADLFETYAVTIVATMVLSSIFFMGDLNMMVYPLTIGAACLITSIVGTFFVKLGKNNNVMNALYKGFIVSAIASLLILWPVTDYVIGFSNEYTINDKTFNGKDLYYCGVIGLIITGLLIWITEYYTGTGYRPVKSVALSSTTGHGTNVIQGLAVSMEATAIPALIIVAGILITNSIAGLFGIAIAVTTMLALAGMVVALDAYGPVTDNAGGIAEMSNLDKKVRKTTDALDAVGNTTKAVTKGYAIGSAGLGALVLFAAYTEDIKHFSKEAGSALEGIVVTL

SEQ ID NO: 172162 - protein, 350 aa, Unknown
  Bacterial polypetide isolated from the Sargasso Sea
LVGLLTEYYTSHDFKPVREVAKSSETGAATNIIFGLALGYHSATGSILLLAISIFVPFTLAGMYGVAIAAIGMLSTLVVGLTIDAYGPVADNAGGIAEMTGMGENIRDRTDVLDSAGNTTAAIGKGFAIGSAILTSLALFSAFLTRADLLDPEANIMESINLLDPLVLTGLFVGAMLPFLFSAMTMKSVGKAAFDMIEEVRRQFRTIPGIMDGKAEPDYEKCVEISTAAALREMIPPGILIMGTPLLVGFLFGVPAVAGILAGSLVSGGVLAISSANSGGAWDNAKKYIEKGNFGGKGTETHKAAVVGDTVGDPFKDTSGPSLNILIKLSAILSLVFVPFFINYGGLLTS

SEQ ID NO: 172163 - protein, 537 aa, Unknown
  Bacterial polypetide isolated from the Sargasso Sea
YSSIYNIDSANITTVLNILSGFSLGASSIALFARVGGGIYTKAADVGADLVGKVEAGIPEDHPLNPATIADNVGDNVGDVAGMGADLFESYVGSIIGSMVLGSSILALGGFDINFILLPLLIAASGIIVSIIGTFMVSVKEGGDPQTSLNRGEFGSAFIMIAVIYTLIQKFLPAEFTQGGEPFTSMGVFYATVIGLLAGLGIGLITEHYTGTGTSPVKAIAQQSITGPATNIIAGLGVGMQSTAVPILIIASSIIGAFHFAGLYGIAMAALGMLANTGIQLAVDAYGPISDNAGGIAEMAELPEEVRERTDKLDAVGNTTAAIGKGFAIGSAALTALALFAAFMVQSDIEKIDIADPWVMAGLFVGGMLPFLFSSMAMGAVGRAAMAMIEEVRRQFREIPELKEALGLMNLKKESDWTESDRSIYEGALSKAEHGRCVAISTESAIKEMIAPGLLAVITPVVVGILFGAETLGGLLAGVTVSGVLMAIFQSNAGGAWDNAKKMIEEGISVGGETLNKGSEAHKASVVEIQLEIHLRI

SEQ ID NO: 172164 - protein, 298 aa, Unknown
  Bacterial polypetide isolated from the Sargasso Sea
MDYNMIFVLAAGVLALLFSVWKTQWIEAQDQGTEKMKVIGSSIAEGAMAFLKAEYRVLTVFVIAVAILLGIANSNREDSSILISLSFLVGALTSGLAGFLGMKVATKANNRTTNAAREGLAKALNVAFSGGSVMGLSVVGLGVLGLGGLFLFYSNLYNVDHTNITTVLNILSGFSLGASSIALFARVGGGIYTKAADVGADLVGKVEAGIPEDHPLNPATIADNVGDNVGDVAGMGADLFESYVGSIIGSMVLGSSIVVAGAVGGFDINFILLPLLIAASGIIVSIVGTFMVSVKEGG

SEQ ID NO: 172165 - protein, 112 aa, Unknown
  Bacterial polypetide isolated from the Sargasso Sea
MPVLSPIILYFIILQIGGLEAALSSLGAMLLGVIITGLFVAVSMTAGGGAWDNAKKYIEDGNFGGKGSEAHKSAVTGDTVGDPYKDTAGPAVNPMIKITNIVALLLLAVIAH

SEQ ID NO: 172166 - protein, 564 aa, Unknown
  Bacterial polypetide isolated from the Sargasso Sea
MPIEVIIPILAAIASFAVAAGYTGWVAKQNPGTKQMQEISEAVRVGAAAFLRREMRIIVPIAIGLSVIIGFFIGDSNGIAFAVGATLSAVAGFISLKVTVKAAVRAAHATGSGLGKTFAITFRGGATVGLAVPAMALAATAILYMIYPNPITIAGIGIGASLIALFIRIGGGIFTKAADMGADLVGKVEANIPEDDPRNPATIADNVGDNVGDAAGMGSDVYESYIVTILASLLIAALIGSPENFAYPILIGASGLVASIIGTATIGSRKITDVMKPLNISFYVSAAIAIALNFVFTQIVLGDTPIAYALFGATVIGVILVPVIQKITDYYTNANSKPVREISESAKWGYASLTLMGIIKGLQSTGPFMIALVAAIIISFAITSAAAPEGTDPLLYGIFGTSLTAMAMLSLAGIVLSIDAFGPIADNAGGIVEMTEMGEENRKITDEIDAVGNTTKAVTKGFAIASAALAALAMIQAFQFEASHYFQDMVIDYGLSNPSVIIGLLVGGLIPFIITGQLISGVERAAKKMVYEVRRQFKEDPEILTGKSKPDYAKCVDVATLASI

SEQ ID NO: 172167 - protein, 501 aa, Unknown
  Bacterial polypetide isolated from the Sargasso Sea
MSGTVETILLYTIGAGLLSIVYGFLTGKNILNSSAGNAKMQDIASAIQIGAKAYLARQYKTIAIVGAVVLVIVSIAFSPLVGLGYLIGAALSGIAGYVGMLVSVEANVRTAEASRKGLAQGLSVAFKSGAVTGMLVAGLALLSIAVYYYILLKSEVDEREIVNALVALGFGASLISIFARLGGGIFTKGADVGADLVGKVEAGIPEDDPRNPAVIADNVGDNVGDCAGMAADLFETYAVTIVATMVLSSIFFVGDLNMMIYPLSIGAACLLTSIVGTFFVKLGRSNNVMNALYKGFVVSAVASLVILWPVTDHVIGFTNEYTINDKTFNGMDLYYCGVIGLVITGLLIWITEYYTGTSYRPVKSVALSSTTGHGTNVIQGLAVSMEATAIPALIIVAGILITNSIAGLFGIAIAVTTMLALAGMVVALDAYGPVTDNAGGIAEMSNLDKKVRKTTDALDAVGNTTKAVTKGYAIGSAGLGALVLFAAYTEDIKHFSKEAGS

SEQ ID NO: 172168 - protein, 518 aa, Unknown
  Bacterial polypetide isolated from the Sargasso Sea
MQDIASAIQIGAKAYLARQYKTIAIVGAVVLVIVSIAFSPLVGLGYLIGAALSGIAGYVGMLVSVEANVRTAEASRKGLAQGLSVAFKSGAVTGMLVAGLALLAIAVYYFLLLKYEVDQREIVNALVALGFGASLISIFARLGGGIFTKGADVGADLVGKVEAGIPEDDPRNPAVIADNVGDNVGDCAGMAADLFETYAVTIVATMVLSSIFFVGDLSMMIYPLTIGAACLLTSIIGTFFVKLGKNNNVMNALYKGFIVSAVASLVILWPVTDHVIGFTNEYTVNGNTFNGKDLYYCGVIGLVITGLLIWITEYYTGTSYRPVKSVALSSTTGHGTNVIQGLAVSMEATAIPALIIVAGILITNSIAGLFGIAIAVTTMLALAGMVVALDAYGPVTDNAGGIAEMSNLDKKVRKTTDALDAVGNTTKAVTKGYAIGSAGLGALVLFAAYTEDIKHFSKEAGSALEGIVVTFDLSNPYVVVGLLIGGMLPYLFGSMGMQAVGRAGGAVVVEVEDNLKNF

SEQ ID NO: 172169 - protein, 458 aa, Unknown
  Bacterial polypetide isolated from the Sargasso Sea
MLESYLAVPPMLGVLGLLVALGIYLVVTRFPEGDESVKKIGDQIHLGAMTFMKTEYTYLSIFALIVIVLVWFSLGEGTAIAVFAGALSSSVAGWIGMYSATKANVRTATAASDSGAEAALSVAFYGGSIMGLCVASLGLIGLGTLFYILSGDAHSIEGFAMGASIVALFSRVGGGIYTKSADVGADLVGKVEAGIPEDDPRNPGVIADNVGDNVGDIAGMGSDIFESYCGSMVACIAIASTYLITSEFSQADKDGMMFLPLALASIGLIASILGIVIVRLFSKSSPANAMRWGTMGAPLIFIIAAYFLTNALVGTNGFDVWLAVVCGSVGGIAIGLITEYYTGSSPVIKIAESGQTGSATVMITGLSVGMQSVVLPIACIILIIYISTELTGLYGVGIAAVGMLSTVGITMAIDAYGPVADNAGGIAEMAGMPSETRVITDELDEQGNTTAAIGKGFA

SEQ ID NO: 172170 - protein, 329 aa, Unknown
  Bacterial polypetide isolated from the Sargasso Sea
MNNYLELLYLISFTGILAVAYSYLLSGQILSSSPGNNRMQEIAEAIQVGAKAYLNRQYKTIAVVGIIVLAIVTYFFNYLVGLGYFIGAFLSGVAGYVGMLISVKANVRTAEASRKSLQAGLTIAFKSGAITGLLVAGLALLAITIYYIILIELDVDSREIINALVALGFGASLISIFARLGGGIFTKGADVGADLVGKVEAGIPEDDPRNPAVIADNVGDNVGDCAGMAADLFETYAVTIVATMVLASIFSPQDYNLMIYPLAIGGACIITSIVGTWFVKLGKNKNIMGALYKGFIVTAVTSLLILYPVTDAIVGLKSTYNNNAGAIFS

SEQ ID NO: 172171 - protein, 265 aa, Unknown
  Bacterial polypetide isolated from the Sargasso Sea
GGIAEMADLPDSVRKTTDNLDAVGNTTKAVTKGYAIGSAGLGALVLFGAYREDLDYFISNSESYPYFAGLDISFSLDNPFVIIGLIFGGLLPFLFGAMSMTAVGRAASSVVLEVRKQFSENKGIMTGKTKPNYERTVDLLTKSAIKEMIVPSLLPVLAPIIFYFVIELVASREDAFISLGAMLLGVIVTGLYVAISMTSGGGAWDNAKKYIEDGNHGGKGSDAHKAAVTGDTVGDPYKDTSGPAVNPMIKITNIVALLLLAFLSH

SEQ ID NO: 172172 - protein, 260 aa, Unknown
  Bacterial polypetide isolated from the Sargasso Sea
MLALAGMVVALDAYGPVTDNAGGIAEMSNLDENVRKTTDALDAVGNTTKAVTKGYAIGSAGLGALVLFAAYVEDLKLIPELTPNFSLENPYVVVGLLIGGLLPYLFASMGMMAVGRAGGAVVEEVRKQFADNPGIMTGESKPDYSRSVDMLTRSAIKEMIIPSMLPVLSPLVLFFIISIVADQNAAVSAVGAMLLGVIVTGIFVAISMTAGGGAWDNAKKYVEDGNFGGKGSEAHKAAVTGDTVGDPYKDTAGPAVNPND

SEQ ID NO: 172173 - protein, 209 aa, Unknown
  Bacterial polypetide isolated from the Sargasso Sea
LIIWVTEYYTGTNYRPVQSIAQSSTTGHGTNVIQGLAISLEATALPALIIVAGIISTYSLAGLFGIAIAVTTMLALAGMVVALDAYGPVTDNAGGIAEMSNLDENVRKTTDALDAVGNTTKAVTKGYAIGSAGLGALVLFAAYTEDLDHFAKDSSSPLYGIEVSFDLSNPYVVVGLLLGGLLPFLFGALSMTAVGRAAGSVVLEVRRQF

SEQ ID NO: 172174 - protein, 265 aa, Unknown
  Bacterial polypetide isolated from the Sargasso Sea
NAGGIAEMSNLPKNVRKTTDALDAVGNTTKAVTKGYAIGSAGLGALVLFAAYTEDIKFFSKISGSSLENVSVNFDLSNPFVVIGLLIGGMLPYLFSSMSMQAVGRAGGAVVIEVRRQFKKIPGIMKRKKKPDYGRLVDLLTKAAIKEMIIPSLLPVLSPIILYFVILPIGGLEAALSAVGAMLLGVIVTGLFVAISMTAGGGAWDNAKKYIEDGNLGGKGSEAHKAAVTGDTVGDPYKDTAGPAVNPMIKITNIVALLLLAVIAH

SEQ ID NO: 172175 - protein, 151 aa, Unknown
  Bacterial polypetide isolated from the Sargasso Sea
TTVSREARDHERTPRTRLCAPCEISTKAAQRKMVCPSCLALLVPIVSGLLLVSGGVMGLLVGGLTSGFCVAVFMANAGGAWDNAKKHIESGVHGGKGTDAHKAAVVGDTVGDPFKDTSGPSLNILIKLMSMVSVVVAGLIVRYSLEAMGIF

SEQ ID NO: 172176 - protein, 435 aa, Unknown
  Bacterial polypetide isolated from the Sargasso Sea
MGADLFESYVGSMIGAMVLAATAGEKSLVFLPLFLAAAGILVSIFGTFFVKTKEGGNPQTALNIGVFGSGAVMTIVSYFLIGKLIENPVALADGYQNVQALDLFLATVVGLVSGILIGVLTEYYTSDHQKPSQNVAAASETGSATNIISGLANGMFSTALPVLVIAMSILGAYHFAHLYGIALAALGMLSTIGIQLAVDAYGPIADNAGGIAEMAELPKEVRERTDKLDAVGNTTAAIGKGFAIGSAALTSLALFAAFRETVGGLTLDINNPYVMAGLLIGSSLPFVFSALAMQAVGDAAFEMIEEVRRQFREIKGLLDGKAKPDYAKCVDIATTAAINKMVLPGALAVFTPIVFGLVLGQKEMLGGILAGVTVTGVLLAIFMSNAGGSWDNAKKYIEAGKHGGKGSTAHKAAVVGDTVGDPFKDTAGPSLNILI

SEQ ID NO: 172177 - protein, 77 aa, Unknown
  Bacterial polypetide isolated from the Sargasso Sea
MAIFQSNSGGAWDNAKKMIEEGFVVNGQEIKKGSEAHKAAVVGDTVGDPFKDTSGPSLNILIKLMSVVSLVIAPLIK

SEQ ID NO: 172178 - protein, 701 aa, Unknown
  Bacterial polypetide isolated from the Sargasso Sea
MEASASNILQLIILAGLLSIVYGFFTGKNILSSSAGNNKMQEIASAIQVGAKAYLNRQYKTIAIVGVVVLVIISFSFSILVGLGYLIGAALSGIAGYVGMLVSVQANVRTAEASRKGLSQGLSIAFKSGAVTGMLVAGLALLSIAVYYYLLLSFGVDEREIVNALVALGFGASLISIFARLGGGIFTKGADVGADLVGKVEAGIPEDDPRNPAVIADNVGDNVGDCAGMAADLFETYAVTIVATMVLSSIFFHGDLNMMVYPLSIGGACILTSIIGTFFVKLGKSKNIMAALYKGFIVTAITSLIILYPITDYVLGLENTYTISNKSFTGMSLYICGAIGLVITGLLIWVTEYYTGTNYRPVKSVASSSTTGHGTNVIQGLAVSMEATAIPALIIVGGILLTNYIAGLFGIAIAVTTMLALAGMVVALDAYGPVTDNAGGIAEMSNLPKNVRKTTDALDAVGNTTKAVTKGYAIGSAGLGALVLFAAYTEDIKHFSKVTGSKLEGIVVTFDLSNPFVVVGLLVGGMLPYLFGSMGMQAVGRAGGAVVVEVRRQFKKIPGIMKRKAKPDYGKLVDLLTKAAIKEMIIPSLLPVLSPIVLYLFILPIGGQVAALSSVGAMLLGVIITGLFVAISMTAGGGAWDNAKKYIEDGNFGGKGSEAHKAAVTGDTVGDPYKDTAGPAVNPMIKITNIVALLLLAVIAG

SEQ ID NO: 172179 - protein, 459 aa, Unknown
  Bacterial polypetide isolated from the Sargasso Sea
VLASIFFTENSYTMMIFPLTIAGVCALTSIIGTYFVRLGKNNNIMAALYRGFAVSAILSAVLLYFVTDYIVGLNNVLVVEGSSTQFTGMSLFICGLLGLIITGLIIWVTEYYTGTNYRPVQSIAQSSTTGHGTNVIQGLAISLEATALPALIIVAGIISTYSLAGLFGIAIAVTTMLALAGMVVALDAYGPVTDNAGGIAEMSNLDENVRKTTDALDAVGNTTKAVTKGYAIGSAGLGALVLFAAYTEDLDHFAKDPSSPLYGIEVSFDLSNPYVVVGLLLGGLLPFLFGALSMTAVGRAAGSVVLEVRRQFKEIPGIMEGKGKPEYGTCVDILTKSAIKEMIIPSMLPVLSPIVVYFAILFIAGQSAALSCLGALLLGVIITGLFVAISMTAGGGAWDNAKKYIEDGNHGGKGSEAHKAAVTGDTVGDPYKDTAGPAVNPMIKITNIVALLLLSAISL

SEQ ID NO: 172180 - protein, 437 aa, Unknown
  Bacterial polypetide isolated from the Sargasso Sea
YVGMLVSVQANVRTAEASRKGLSEGLSVAFKSGAVTGLLVAGLALLAIAVYYYFLLKFNVDEREIVNALVALGFGASLISIFARLGGGIFTKGADVGADLVGKVEAGIPEDDPRNPAVIADNVGDNVGDCAGMAADLFETYAVTIVATMVLSSIFFYGDLNMMIYPLTIGGACILTSIIGTFFVKLGKDKNVMNALYKGFIVSAVTSLIILYPVTDQVIGFTNEYTVNNKTFNGMNLYYCGVIGLIITGLLIWVTEYYTGTGYRPVKSVASSSTTGHGTNVIQGLAVSMEATAIPALIIVAGILITNSIAGLFGIAIAVTTMLALAGMVVALDAYGPVTDNAGGIAEMSNLDKKVRKTTDALDAVGNTTKAVTKGYAIGSAGLGALVLFAAYTEDIKHFSKVSGSKLEGIVVTFDLSNPYVCCGTVKLAVCFHIYLV

SEQ ID NO: 172181 - protein, 293 aa, Unknown
  Bacterial polypetide isolated from the Sargasso Sea
APVLFLAAIIFVSTNLAGLYGVGIAAVGMLATVGVTMAIDAYGPVADNAGGIAEMAGMGADTREITDGLDEVGNTTAAIGKGFAIGAAALAALAIIAAFVETVTVNNPDFDLQLSDPEVLIGIFIGGTIPFLIASITMTAVGDAAFDMINEIRRQFREIPGLLEGNAEPDTARCVDIATTAALKRMVVPGAIAVLAPVVVGFGLGATSLGGMLAGGLLGCVLMALMMANAGGAWDNAKKYIEKGNLGGKGSDTHAAAVVGDTVGDPFKDTSGPSMNILINVMAIVSLVIAPLL

SEQ ID NO: 172182 - protein, 199 aa, Unknown
  Bacterial polypetide isolated from the Sargasso Sea
SLTLFVAFAAAAKINSVNLLEYKVVCGLLLGGMVPYLFGALTMGAVGRSAEKMVQEVRRQFKEIAGIMEGKAEPDYASCIKISTDASLKEMVLPGILAVVCPIVVGFALGPAGLASFLGGALISGITLALMMANSGGAWDNAKKYIEEGNKGGKGSEAHKAAVVGDTIGDPFKDTSGPAMNILIKLMTIVSLVVAPIFL

SEQ ID NO: 172183 - protein, 381 aa, Unknown
  Bacterial polypetide isolated from the Sargasso Sea
MSILNLIIFSGILSIVYGFWAGNSVLKSSAGNEKMQEISSAIQIGAQAYLNRQYTTIAIVGAVICILLFLFFRDLWVVGGYLIGAILSGAAGYIGMIISVRANVRTAQAANESLGKGLNVAFKAGAVTGMLVAGLALLSISVYYYLLEVNSVSEETLKHALVALGFGASLISIFARLGGGIFTKGADVGADLVGKVEAGIPEDDPRNPAVIADNVGDNVGDCAGMAADLFETYAVTIVATMVLATIFFSGETAQMMTLYPMAIGGSCLVASILGTFFVRLGSSQSIMGALYKGFIASAILSLIFIYPVTQFVLGDISTEFTFQETTFTGMSLYICSVVGIIITGLLIWITEYYTGTNYRPVQSVAKASTTGHGTNVIQGLA

SEQ ID NO: 172184 - protein, 426 aa, Unknown
  Bacterial polypetide isolated from the Sargasso Sea
MEISIIPPALGILGMVMAFIVYRLVMKYPDGEDKVKKIGDQIHAGALAFMKTEYKYLSIFIAVIVLLAWWKLGIYTAISIIVGAICSSVAGFIGMYAATKANVRTATAAQKDGPAAALSVSFYGGSIMGLCVASLGLIGLGGLYYFYIPAEIDPHKLEGFAMGASVVALFSRVGGGIFTKSADVGADLVGKIEAGIPEDDPRNPGVIADNVGDNVGDVAGMGSDIFESYCGSMIASIAIAYTLGNQDMMMLPLALAATGLIASIIGIFIVKLQSAKAPASALRSGTLLAPVIFVAMAYFIIDSFDGVGINVWWCVIAGAVGGVLIGLITEYYTGGGPVKKIAESGETGSATVMISGLSVGMQSVVIPIVILAGIILTSTLLSDIYGVGIAAVGMLATVGITMAIDAYGPVADNAGGIAEMSGMGEE

SEQ ID NO: 172185 - protein, 226 aa, Unknown
  Bacterial polypetide isolated from the Sargasso Sea
MSSTVETILLYTIVAGLLSIVYGFFTGKNILNSSPGNAKMQEIASAIQIGAKAYLARQYKTIAIVGVVVLVIVSIAFSPLVGAGYLIGAALSGIAGYVGMLVSVEANVRTAEASRTGLAQGLSVAFKSGAVTGMLVAGLALLSIAVYYYLLLKLNVDEREIVNALVALGFGASLISIFARLGGGIFTKGADVGADLVGKVEAGIPEDDPRNPAVIADNVGDNVGDC

SEQ ID NO: 172186 - protein, 346 aa, Unknown
  Bacterial polypetide isolated from the Sargasso Sea
DVFGVKVQAIPYIGEASKTGSATNAIAGLAVGMQSVFIPVLLMAAGIFGANHVMGGGDAGLYGIAMAAMGMLGTVGVTMTVDAYGPVADNAGGIAEMSGLGDDVREITDGLDSIGNTTAAIGKGFAIGSAALTALALFAAFKTSADLQAADLSLTEPLVVIGLLVGASLPFVVAAMTMKSVGRAAEDMITEIRRQFREIDGLLEGRDGVEPDSATCVEISTKAALREMVMPGVVAVSAPVIIGILLGSAALGGALAGATASGVLMALFMANAGGAWDNAKKAIEQGHIDGASKGDEAHSAAVVGDTIGDPFKDTSGPSLNILIKLMSIVSVVIAGLLTKTGELGAL

SEQ ID NO: 172187 - protein, 469 aa, Unknown
  Bacterial polypetide isolated from the Sargasso Sea
MYLAISSGIIAMLFAFWKTSWINKQDQGTEKMERIGQDISDGAMAFLKAEYRVLAIFVFVVALLLGFANYNKDGSSSLVALSFIIGALASGFAGFLGMRVATKANNRTTHAARTGLAPALNVAFTGGSVMGLSVVGLGVIGLSILFMFYLSYFSSDYDKILNVISGFSLGASSIALFARVGGGIYTKAADVGADLVGKVEAGIPEDHPLNPATIADNVGDNVGDVAGMGADLFESYVGSIIGSMVLGATILSFGSFDASFVILPLVIASSGIIVSIIGTFLVSVKEGGNPQKALNIGEFGSSAIMIAVMYFLISNLLPNSFTLGDNSYTNLGVFWASTIGLLAGLGIGMITEHYTGTNTSPTLSIARQSLTGPATNIIAGLGVGMQSTAGPILIIAAGIVGAHYFAGLYGVAMAALGMLANTGIQLAVDAYGPISDNAGGIAEMAELPAEVRERTDKLDAVGNTTAAIG

SEQ ID NO: 172188 - protein, 531 aa, Unknown
  Bacterial polypetide isolated from the Sargasso Sea
AEASRKNLASGLSIAFKSGAVTGMLVAGLALLSIAVYYYILVKTGVEEREIVNALVALGFGASLISIFARLGGGIFTKGADVGADLVGKVEAGIPEDDPRNPAVIADNVGDNVGDCAGMAADLFETYAVTIVATMVLSSIFFVNDLNMMIYPLAIGGACIITSILGTFFVTLGSDKNIMKAMYKGFVITAISSLVILFPITKQVIGFTTEYVVNGKSFNGLSLYFCGIIGLIITGLIIWITEYYTGTDYRPVKSVAKSSTTGHGTNVIQGLAVSMEATALPALIIVGGILWTNHIAGLYGIAISVTTMLALAGMVVALDAYGPVTDNAGGIAEMSNLPKNVRKTTDALDAVGNTTKAVTKGYAIGSAGLGALVLFAAYTEDIKHFSKVAGSNLEGIAVTFDLSNPYVVVGLLIGGMLPYLFGSMGMQAVGRAGGEVVIEVRRQFKKIPGIMKRKAKPDYGKLVDLLTKAAIKEMIIPSLLPILSPIVLYIVIYFIGGQVAALSSLGAMLLGVIITGLFVAVSMTAGGGAWD

SEQ ID NO: 172189 - protein, 241 aa, Unknown
  Bacterial polypetide isolated from the Sargasso Sea
MLESYLAIPPLLGVLGLLVALGIYIVVTRFSEGEENVKKIGDQIHLGAMTFMKTEYTYLSIFALVVIILVWFSLGEGTAIAVLAGALSSSIAGWIGMYSATKANVRTATAASESGAEAALSVAFYGGSIMGLCVASLGLIGLGSLFYILSGDAHSIEGFAMGASIVALFSRVGGGIYTKSADVGADLVGKVEAGIPEDDPRNPGVIADNVGDNVGDIAGMGSDIFESYCGSMVACIAIAST

SEQ ID NO: 172190 - protein, 110 aa, Unknown
  Bacterial polypetide isolated from the Sargasso Sea
VLSPIVLYLFILPIGGQVAALSAVGAMLLGVIITGLFVAISMTAGGGAWDNAKKYIEDGNFGGKGSEAHKAAVTGDTVGDPYKDTAGPAVNPMIKITNIVALLLLAVIAG

SEQ ID NO: 172191 - protein, 696 aa, Unknown
  Bacterial polypetide isolated from the Sargasso Sea
MDSLTLIILVGILAVVYSYFLSKQILSSSPGNSKMQEIAEAIQIGAKAYLNRQYKTIAIVGLIVLVIISYFFSLLVGLGYFIGALLSAVAGYVGMLISVEANVRTAEASRSSLQKGLTMAFKSGAITGLLVAGLALLSISVYYWILLSFKVESRELINALIALGFGASLISIFARLGGGIFTKGADVGADLVGKVEAGIPEDDPRNPAVIADNVGDNVGDCAGMAADLFETYAVTIVATMVLASIFFQNNTDLMIYPLAIGGGCIIASIIGTFFVKLGKSKNIMSALYKGFIVTAIISLVLLYPITSKIIGLDELFKVGSKTFSGLDLYYCGVVGLIVTGLIIWVTEYYTGTNYRPVRSVAKSSTTGHGTNVIQGLAVSMEATALPALIIVAGIIVTNEFAGLFGIAIAVTAMLALTGMVVALDAYGPVTDNAGGIAEMSKLPKNVRKTTDALDAVGNTTKAVTKGYAIGSAGLGALVLFAAYTEDIKFFSNVSGSPLEGINVSFDLSNPFVVIGLLVGGMLPYLFGSMGMQAVGRAGGAVVIEVRRQFKKIPGIMKGKRKPDYGRLVDLLTKAAIKEMIIPSLLPVLSPIVLYFVIYSIGGLEAALSSVGAMLLGVIVTGLFVAISMTAGGGAWDNAKKYIEDGNYGGKGSETHKAAVTGDTVGDPYKDTAGPAVNPMIKITNIVALLLLAVISH

SEQ ID NO: 172192 - protein, 111 aa, Unknown
  Bacterial polypetide isolated from the Sargasso Sea
GNTTKAVTKGYAIGSAGLGALVLFAAYTEDIKHFSKETGSKLEGIVVTFDLSNPYVVVGLLIGGMLPYLFGSMGMQAVGRAGGAVVVEVRRQFKKFPWYNDRKNKNQIMQN

SEQ ID NO: 172193 - protein, 595 aa, Unknown
  Bacterial polypetide isolated from the Sargasso Sea
MDNLIISPVLGLLGMAMAYIVYMLVMKYPDGEDKVKKIGDQIHTGALTFMKTEYKYLFIFMTVIVGLAWFALGPYTAIAVVVGALCSSIAGFIGMYAATKANVRTATAAQKDGPAAALTVSFYGGSIMGLCVASLGLIGLGGLYYFYIPAEIDPHKLEGFAMGASVVALFSRVGGGIFTKSADVGADLVGKIEAGIPEDDPRNPGVIADNVGDNVGDVAGMGSDIFESYCGSMIASIAIAYTLGNKDMMMLPLALASTGLIASIIGIFIVKLQSAKAPASALRSGTLLAPVIFVAMAYFIIDSFNGVGMNVWWCVIAGAVGGVLIGLITEYYTGGSPVKKIAESGETGSATVMISGLSVGMQSVVIPIVILAGIILASTQLSGIYGVGIAAVGMLATVGITMAIDAYGPVADNAGGIAEMSGMGEEVREITDSLDELGNTTAAIGKGFAIGAAALAALAIISAFSAVVADANPKFSLALTEPIVLVGMFIGVCIPFLVSSITMTAVGDAAFEMINEIRRQFKEIPGLMEGSAEPDSEKCVEIATTAALKKMMLPGVIAVSMPAIVGFGLGAQALGGMLAGGLLGCVSLALMMANA

SEQ ID NO: 172194 - protein, 677 aa, Unknown
  Bacterial polypetide isolated from the Sargasso Sea
MNEGQALWIALTASVVAIICGVVFSLQIIKESDGNDRMREIAGAIQEGAQAYLTRQYSTIAIVGVVIFILMGVSGIGWASAIGFAIGAIFSGLAGYIGMSISVRANVRTAQAAHEGMNAALSMAFRGGAVTGLLVVGLGLLSIAGYYLILTSSGVSVDDSLHALIGLAFGGSLISIFARLGGGIFTKGADVGADLVGKINAGIPEDDPRNAAVIADNVGDNVGDCAGMAADLFETYAVTIIATMLLGGLLFSGTEATNAIMYPLVLGAVSIVASVIGALFVKAKEGGSVMGALYKGVIISGLLAAIAFYPITGMMGMEMGLFWSAIIGLALTAFMVIVTEYYTSTEYSPVKKIAEASETGHATNIIAGLGVSMKATALPVLAVCLSIWGAYMLGGLYGIAIAATSMLSLTGMIVALDAFGPITDNAGGIAEMAELPPEIRGITDPLDAVGNTTKAVTKGYAIGSAGLAALVLFADFTANLESEGKMVQFMLNDPAVIIGLFVGGMVPYLFAALAMEAVERAASSVVAEVSRQFEEPGIMDGTVKPDYSKAVDLLTKSAIKEMIIPSLLPVLVPVVLAVLMNIMMPEDGGIKALGGLLIGTIVTGIFVAISMTTGGGAWDNAKKYVEDGHCGGKGSEAHNASITGDTVGDPYKDTAGPAINPLIKIINIVALLLIPLL

SEQ ID NO: 172195 - protein, 671 aa, Unknown
  Bacterial polypetide isolated from the Sargasso Sea
AALGLALAAFYANKVLSIKVTDEKVEELSASIREGSMAFLKRMYSWISVFVVVLAVLISTLTEWGYPWGSIAFVAGAFLSSLAGFIGMRIATAANGRTTEAARDGGTLKALPVAFRGGAVMGFTVAGLGLLGVSVGYWVFIDILELPNGYDVLAAIGLGGSSIALFARVGGGIYTKAADVGADLVGKVEAGIPEDDPRNPATIADNVGDNVGDVAGMGADLFESYVGSLVAPLAYAAIVFSGQNVLPSLLFFPLAVGTIGMGASIVSSFLVKPKEGKLAQALHRGTYSAAALTTLGVYFLSDSMFSSYTENSIGLFFAVIIGLAVGLLVGQISEWFTSDHYSIVKNIADQAKTGPATLVLSGISEGMRSAAFSVIVVVFGIGGAYTAGDWALGSGGGIYGIAIAAIGVLATLGITVAVDAYGPIADNAGGIAEMAHLPPEVREATDELDSLGNTTAAIAKGFAIGSAAVTALALFSAFVQSAGLSEIGLNITKVEVTAGLFLGGMFPFLFAAMTINAVGRAAFKMIEEVRRQFKEIPGLREGKEGVKPDYTRCVDIATSAALKEMLLPGGLAIALPLIIGFWNKEALGGFLAGSLVTGFLLAIFMANSGGAWDNAKKYIEAGGGAGKGSDEHKAAVIGDTIGDPFKDTSGPAMNIVIKVMTIVSLIFASAF

SEQ ID NO: 172196 - protein, 175 aa, Unknown
  Bacterial polypetide isolated from the Sargasso Sea
MSYSKIPAGKDLPNDIYVAIEIPANHAPIKYEIDHDTDCLMVDRFMATPMFYPANYGFIPHTLADDGDPLDVLVVTPYPVAPGSVIRARPVGVLHMSDEAGGDAKLVAVPHDKLTVLYKDVQEYTDLPALLIEQIKHFFENYKDLEKGKWVKVEGWGGAEEARGLINKAVAAYQK

SEQ ID NO: 172197 - protein, 230 aa, Unknown
  Bacterial polypetide isolated from the Sargasso Sea
MNSSIETILYYTIFAGFLSILYGYVTGISIIKLSAGNNKMQEIASAIQIGAKAYLNRQYKTIAIVGVAVLVIITFAFNYLVGLGYLIGATLSGIAGYVGMLVSVQANVRTAEASRKGLSHGLSVAFKSGAITGMLVAGLALLSIAVYYFILLKYGVNEREIVNALVALGFGASLISIFARLGGGIFTKGADVGADLVGKVEAGIPEDDPRNPAVIADNVGDNVGDCAGMA

SEQ ID NO: 172198 - protein, 662 aa, Unknown
  Bacterial polypetide isolated from the Sargasso Sea
MSSSVETILIYTIIAGLLSIVYGYFTGKSILSSSPGNSKMQEIASAIQIGAKAYLNRQYKTIAIVGVVVLIIISIAFSPLVGLGYLIGATLSGIAGYVGMLVSVQANVRTAEAARKGLSTGLSLAFRSGAVTGMLVAGLALLSIAVYYFLLLKFNIDEREIVNALVALGFGASLISIFARLGGGIFTKGADVGADLVGKVEAGIPEDDPRNPAVIADNVGDNVGDCAGMAADLFETYAVTIVATMVLSHIFFHGDLNMMIYPLTIGGACIITSIIGTYFVKLGRDKNIMNAMYKGFIITAISSLIVLYPITDKVIGFSAEYIVNDKSFTGLSLYFCGIVGLIITGLLIWVTEYYTGTDYRPVKSVAESSTTGHGTNVIQGLAVSMEATAIPALIIVAGILITNSIAGLFGIAIAVTTMLALAGMVVALDAYGPVTDNAGGIAEMSNLPKNVRKTTDALDAVGNTTKAVTKGYAIGSAGLGALVLFAAYTEDIKYFSTVTGSKLEGIVVSFDLSNPFVVVGLLIGGMLPYLFGSMGMQAVGRAGGAVVVEVRRQFKKIPGIMKRKAKPDYGKLVDLLTKAAIKEMIIPSLLPVLSPIVLYIIILPIGGQVAALASVGAMLLGVIITGLFVAVSMTAGGGAWDNAKKYIEDGKFGGKGSEAHKA

SEQ ID NO: 172199 - protein, 304 aa, Unknown
  Bacterial polypetide isolated from the Sargasso Sea
MPSVAVVVAMIGLSYWLGGAAFGAAGDVKGLYGVSLAAIGMLAVTGVIVAVDAYGPIADNAGGIAEMAELPPEVREVTDSLDALGNTTAAVAKGFAVGSAAVTALALFKSFSLTAGPQVDLDINDTAVTIGLFLGAMTPFIFAALTMSSVGRAAQAMIVEVRRQFAEIPGLREGQPGVKPDSRRCVDISTQAALREMLLPGGLAILLPLVIGFIDVNALGGFLAGAVVTGFLIAIYMANSGGAWDNAKKYIEAGAHGGKGTDAHSAAVVGDTIGDPFKDTSGPAMNILIKVMTIVSLVFVPAFI

SEQ ID NO: 172200 - protein, 670 aa, Unknown
  Bacterial polypetide isolated from the Sargasso Sea
MESFIIGPMTPWGPVVTGLIGLVFAFVLYGLIMKYPAGKDSVVKIGDQIHLGAKVFMFTEYKILTPVVIALVVACGFSPLGWDTAIAIAVGALSSAIAGFIGMYSATQANVRTATAAENSGQEQALSISFFGGSIMGLCVASMGLVGLGGLYFYFSGVIEDPNELAKALEGFGVGASAVALFSRVGGGIFTKSADVGADLVGKIEAGIPEDDPRNPGVIADNVGDNVGDIAGMGSDIFESYCGAMIASIAIAATMGSTDLMFLPLWLAASGLFCSLLGIGIVRTQVSRSPAVALRWGTFLSPVLFLLFAGLSIYYSPAIEMKYFYSVLTGAIGGILIGLITEYYTGGETESSPVGKIAKSGETGPATVMIAGLSVGMQSVVLPLFVIAGIVGLSTHFSGLYGVGIAAVGMLSTVGITMAIDAYGPVADNAGGIAEMSGMKSEVREITDSLDELGNTTAAIGKGFAIGAAALAALAIIAAYMLATGVESLSLDDPRVLMGMFIGGSIPFLVSSITMTAVGDAAFEMIEEIRRQFREIPGLLEGKAEPDNAKCVDIATKAALNKMLLPGAIAIGSPVAIGFILGPVVLGGMLAGALLGCVLMALMMANAGGAWDNAKKFVEKGNFGGKGTDTHAATVVGDTVGDPFKDTSGPSMNILINVMAIVSLVIAPLL

SEQ ID NO: 172201 - protein, 668 aa, Unknown
  Bacterial polypetide isolated from the Sargasso Sea
MLESYLAIPPLLGVFGLLVALGIYIVVTRFPEGEESVKKIGDQIHLGAMTFMKTEYTYLSIFALVVIVLVWFSLGEGTAIAVLAGALSSSIAGWIGMYSATKANVRTATAASDSGAEAALSVAFYGGSIMGLCVASLGLIGLGSLFYILSGDAHSIEGFAMGASIVALFSRVGGGIYTKSADVGADLVGKVEAGIPEDDPRNPGVIADNVGDNVGDIAGMGSDIFESYCGSMVACIAIASTYLITSEFTQAQKDGMMFLPLALASIGLISSILGIVIVRLFSKSSPANAMRWGTMGAPLIFIIAAYFLTGSLVGNNGFDVWLAVVCGSVGGIAIGLITEYYTGSSPVVKIAESGQTGSATVMISGLSVGMQSVVLPIACIILIIYISTQLTGLYGVGIAAVGMLSTVGITMAIDAYGPVADNAGGIAEMAGMPSETRVITDELDEQGNTTAAIGKGFAIGAAALAALAIISAFVSTVSANRSEPLELLLSNPIVLIGIFIGGAIPFLIASITMTAVGDAAFEMINEIRRQFKEIPGLLEGNAEPDTAKCVDIATAAALKKMLLPGIIAVSAPPLVGLGIGAEALGGMLAGGLLVCVLMALFMANAGGAWDNAKKYIEKGNLGGKGTDTHSAAVVGDTVGDPFKDTSGPSMNILINVMAIVSLVIAPLL

SEQ ID NO: 172202 - protein, 98 aa, Unknown
  Bacterial polypetide isolated from the Sargasso Sea
FIATKSDAFSALGAMLLGVIVTGLFVALSMTAGGGAWDNAKKYIEDGNYGGKGSEAHKAAVTGDTVGDPYKDTAGPAVNPMIKITNIVALLLLAVLAH

SEQ ID NO: 172203 - protein, 484 aa, Unknown
  Bacterial polypetide isolated from the Sargasso Sea
VEAGIPEDDPRNPGVIADNVGDNVGDIAGMGSDIFESYCGSMVACIAIASTYAITSEFAQADKEGMMFLPLALASIGLIASIIGIVIVRLFSKSSPANAMRWGTMGAPLIFIIAAYFLTNSLVESNPLPGSDGFDVWLAVVCGSVGGIAIGLITEFYTGSSPVIKIAEAGQTGPATVMITGLSVGMQSVVLPIACIILIIFISTQLTGLYGVGIAAVGMLSTVGITMAIDAYGPVADNAGGIAEMAGMPSETRVITDELDEQGNTTAAIGKGFAIGAAALAALAIISAFVETVSANRVEDLVLSLSNPMVLIGIFIGGAIPFLIASITMTAVGDAAFEMINEIRRQFKEIPGLLEGNAEPDTEKCVDIATAAALKKMLLPGIIAVSAPPLVGLGIGAEALGGLLAGGLLVCVLMALFMANAGGAWDNAKKFIEKGNLGGKGTDTHSAAVVGDTVGDPFKDTSGPSMNILINVMAIVSLVIAPLL

SEQ ID NO: 172204 - protein, 667 aa, Unknown
  Bacterial polypetide isolated from the Sargasso Sea
AIASFAVAAGYTGWVAKQNPGTKQMQEISEAVRVGAAAFLRREMRIIVPIAIGLSVIIGFFIGDSNGIAFAVGATLSAVAGFISLKVTVKAAVRAAHATGSGLGKTFAITFRGGATVGLAVPAMALAATAILYMIYPNPITIAGIGIGASLIALFIRIGGGIFTKAADMGADLVGKVEANIPEDDPRNPATIADNVGDNVGDAAGMGSDVYESYIVTILASLLIAALIGSPENFAYPILIGASGLVASIIGTATIGSRKITDVMKPLNISFYVSAAIAIALNFVFTYMILGTTPIAYALFGATVIGVILVPVIQKITDYYTNANSKPVVEISESAKWGYASLTLMGIIKGLQSTGPFMIALVAAIIISFAITSAAAPEGTDPLLYGIFGTSLTAMAMLSLAGIVLSIDAFGPIADNAGGIVEMTEMGEENRKITDEIDAVGNTTKAVTKGFAIASAALAALAMIQAFQFEASHYFQDMVIDYGLSNPSVIIGLLVGGLIPFIITGQLISGVERAAKKMVYEVRRQFKEDPEILTGKSKPDYAKCVDVATLASIGELWKSASVAVAAPIIVGVLLGPSAVAGLLMGAVVSGIFLAYHLANTGGAWDNAKKLIEMKGEKGTEEHKVAVVGDIIGDPYKDTAGPALNTVIKLLNTIAIVFVPVFFAIIVL

SEQ ID NO: 172205 - protein, 608 aa, Unknown
  Bacterial polypetide isolated from the Sargasso Sea
MNASTETILLYIIAAGIISIIYGFFTGRNILNSSSGNAKMIEIASAIQEGARAYLNRQYKTIAIVGVVVLIIISVAFSPLVGLGYLIGAALSGIAGYVGMLVSVQANVRTAEASRKSLANGLSIAFKSGAVTGMLVAGLALLSIAVYYYFLVKIGIDEREIVNALVALGFGASLISIFARLGGGIFTKGADVGADLVGKVEAGIPEDDPRNPAVIADNVGDNVGDCAGMAADLFETYAVTIVATMVLSSIFFIGDFSMMIYPLAIGGACILTSILGTFFVTLGSDKNIMKAMYKGFVITAISSLIILYPITKYVIGFTTEYVVNEKSFTGLSLYFCGIIGLIITGLIIWITEYYTGTDYRPVKSVAQSSTTGHGTNVIQGLAVSMEATAIPALIIVGGILLTNHIAGLYGIAIAVTTMLALAGMVVALDAYGPVTDNAGGIAEMSNLPKNVRKTTDALDAVGNTTKAVTKGYAIGSAGLGALVLFAAYTEDIKHFSKVAGSNLEGIIVTFDLSNPFVVVGLLIGGMLPYLFGSMGMQAVGRAGGAVVIEVRRQFKKIPGIMKRKAKPDYGRLVDLLTRAAIKEMIIPSLLPVLSPIVLYIIIYFIGGA

SEQ ID NO: 172206 - protein, 592 aa, Unknown
  Bacterial polypetide isolated from the Sargasso Sea
LTIQSAIAVIVGAACSSLAGFIGMYAATKANVRTATAAQQDGAAAALSVSFYGGSVMGLCVASLGLIGLGGLFYFFSESNVHALEGFGMGASVVALFSRVGGGIFTKSADVGADLVGKIEAGIPEDDPRNPGVIADNVGDNVGDVAGMGSDIFESYCGSMIASIAIAYTLGSKEMMMFPLALTSIGLIASIIGIIIVKLQSAKAPASALRSGTLLAPAIFIVMAYFLTNSIDGVSMNVWWAVVCGAIGGVLIGLITEYYTGGDPVKKIAESGETGSATVMISGLSVGMQSVVIPISVLATIILISTTLSGVYGVGIAAVGMLSTVGITMAIDAYGPVADNAGGIAEMAGMGEDVREITDSLDELGNTTAAIGKGFAIGAAALAALAIISAFSAVVSLNFGEAFTLSLGQPIVLVGMFIGICIPFLISSITMTAVGDAAFEMINEIRRQFKEITGLMEGNADPDSEKCVEIATKAALKKMMLPGVIAVAMPAVIGFGLGAMALGGMLAGGLLGCVALALFMANAGGAWDNAKKYVEKGNYGGKGSDTHAAVVVGDTVGDPFKDTSGPSMNILINVMAIVSLVIAPLLTLNGML

SEQ ID NO: 172207 - protein, 270 aa, Unknown
  Bacterial polypetide isolated from the Sargasso Sea
LTGMIVALDAFGPITDNAGGIAEMAELPSEIRGITDPLDAVGNTTKAVTKGYAIGSAGLAALVLFADFTANLESEGKTVQFMLNDPAVIIGLFVGGMVPYLFGALAMEAVGRAASSVVTEVRRQFKEIPGIMEGTGKPDYSNCVDLLTKAAIKEMIIPSILPVLVPVVLAVLMNIMMPEDGGIKALGGLLIGTIVTGIFVAISMTTGGGAWDNAKKYVEDGHCGGKGSEAHNASITGDTVGDPYKDTAGPAINPLIKIINIVALLLIPLL

SEQ ID NO: 172208 - protein, 356 aa, Unknown
  Bacterial polypetide isolated from the Sargasso Sea
LIIWVTEYYTGTNYRPVQSIAKSSTTGHGTNVIQGLAISLEATALPAIIIVAGIIITHSLAGLFGIAIAVTTMLALAGMVVALDAYGPVTDNAGGIAEMSELDDKVRKTTDALDSVGNTTKAVTKGYAIGSAGLGALVLFAAYTEDLEHFAKDPSSSLYGIDVSFDLSNPYVVVGLLLGGLLPFLFGAMSMTAVGRAAGSVVIEVRRQFKDIPGIMEGTGKPEYGKCVDILTKSAIREMIVPSMLPVLSPIVVYFVILLIAGQSAALSCLGALLLGVIITGLFVAISMTAGGGAWDNAKKYIEDGNHGGKGSEAHKAAVTGDTVGDPYKDTAGPAVNPMIKITNIVALLLLASIAI

SEQ ID NO: 172209 - protein, 260 aa, Unknown
  Bacterial polypetide isolated from the Sargasso Sea
MNSSTETIMYYIIAAGILSIVYGFITGRNILNSSSGNAKMLEIASAIQEGARAYLNRQYKTIAMVGVVVLIIITVLFSPLVGLGYLIGAALSGIAGYVGMLVSVQANVRTAEASRKNLASGLSIAFKSGAVTGMLVAGLALLSIAVYYYFLVKTGVEEREIVNALVALGFGASLISIFARLGGGIFTKGADVGADLVGKVEAGIPEDDPRNPAVIADNVGDNVGDCAGMDADLFETYAVTIVATMVLSSIFFVNDLNMMI

SEQ ID NO: 172210 - protein, 461 aa, Unknown
  Bacterial polypetide isolated from the Sargasso Sea
ADNVGDNVGDVAGMGADLFESYVGGVIATIVIASSMSYGTEAKFALYGFPIILIIVGTLASFIGTKVVDLIQNSEPSGVLRKASLTAGILFLVFGYFSLNYVGSNAGLPSSTILSIFTCSIIGLFSGSLIGGITEYYTAGKPVHEIADASNRGGVATNIISGLSVGMLSTALPIIVIVLAIFLSFNSFGLYGIGIAAVSMLSTIGITMSVDAYGPIADNAGGIAEMAGLGPEVRTITDKLDSLGNTTAAIGKGFAIGSAALTSLALFVAFAAATNLNSVDILQYKVVCGLLLGGMVPYLFGALTMGAVGRSAEKMVQEVRRQFKEIAGIMEGKAEPDYQSCIKISTEASLKEMVLPGILAVVCPIVVGFLLGASGLAGFLAGALISGVALALMMSNAGGAWDNAKKYIEEGNQGGKGSEAHKAAVVGDTIGDPFKDTSGPAMNILIKLMTIVSLVIAPIFL

SEQ ID NO: 172211 - protein, 682 aa, Unknown
  Bacterial polypetide isolated from the Sargasso Sea
MDGLVLALAAGVLAIVFAGYLAKRVLSADEGTDRMQEIGAAIQEGANAFLKREYTVLAGFVVIVFGVLLTLGYLQDEQSPETAIAYLVGAIASAITGFVGMRIAVKSNMRTAAAAQHGLNKALRVAFSSGGVMGTTVVGIGILGTAILWMIFEDPKIVAGFSFGASSIALFARVGGGIYTKAADVGGDLAGKVEAGIPEDDPRNAAVIADNVGDNVGDVAGMGADLFESYVGSIIAALALAATASAFITSDSPVDNLYILPFLIASVGIVASILGTFIVRTGETANIGSLLWSLRRGIFAASLLALLGSFGAIYWLLEIESSLGVEKVWQLWGAVAVGLVAGVIIGVSTEYYTSYEYKPTKGIAARSVTGPATIIITGFATGMLSTVIPLIVIAVAVLGAYELAGVYGIAIAAVGMLSTLGITLATDAYGPVADNAGAIAEQAHLDPEVRERTDALDSLGNTTAATGKGFAIGSAVLTSLALMAAYAEVVGLDAIDLLKVSTLVGLLIGALMPFVFSALTMEAVGRAAQDMVEEVRRQFNEIPGLREGKEGVRAEYAKCVDISTKGALREMIIPGLLAVIVPIVVGLIPFLGAEAVGGLLIGSIAAGSLLAITMANAGGAWDNAKKFIEAGAHGGKGTDEHAAAVVGDTVGDPFKDTSGPSLNILIKLMAIVAVVFGSTFVS

SEQ ID NO: 172212 - protein, 542 aa, Unknown
  Bacterial polypetide isolated from the Sargasso Sea
MEIIHLIIGAGILAVVYGIVTSISVLSADTGNEKMQEIAGAIQEGASAYLSRQYSTIAIVGLVILVISYFLLGLEVSIGFLIGAVLSGIAGYIGMLVSVRANVRTTQAASNSLAEGLSIAFKSGAVTGMLVAGLALLAVAVYYYVLTNLWIPQNDRIVIDALVALGFGSSLISIFARLGGGIFTKGADVGGDLVGKVEAGIPEDDPRNPATIADNVGDNVGDCAGMAADLFETYAVTVVATMVLASIFFAGNETMMIYPLSICGACVITSILGTYFVKLGKSNSIMGALYKGFIATAILSLVVLYFVTDLVVGFGTSLTISGKSFNGLDLYICGVTGLAITGLIIWITEYYTGVDYRPVKSIAKSSETGHGTNVIQGLAISMESTALPALVIVFGIIITYSLAGLFGIAVAVTTMLALAGMVVALDAFGPVTDNAGGIAEMSELPEEVRNTTDSLDAVGNTTKAVTKGYAIGSAGLGALVLFGAYTADLEYFSSNAAEGSYFFGVNPDFSLSNPYVVVGLLVGGMLPYLFAALRMTAVGRAG

SEQ ID NO: 172213 - protein, 454 aa, Unknown
  Bacterial polypetide isolated from the Sargasso Sea
MPLVIASSGIIVSIIGTFLVSVKEGGNPQKALNIGEFGSSAIMIAVMYFLISNLLPNSFTLGDNSYTNLGVFWASTIGLLAGLGIGMITEHYTGTNTSPTLSIARQSLTGPATNIIAGLGVGMQSTAGPILIIAAGIVGAHYFAGLYGVAMAALGMLANTGIQLAVDAYGPISDNAGGIAEMAELPAEVRERTDKLDAVGNTTAAIGKGFAIGSAALTTLALFAAYMVKSGIIDKGIDIANPAVMAGLFVGGMLPFLFSSMAMGAVGRAAMSMIEEVRRQFRDIPELKSALEILNKSEESQWSEKDREVYELGLMKADHGQCVEISTQAAIKEMVLPGLLAVITPVVFGFGPKLFGSDLGPQMLGGLLAGVTVCGVLMAIFQSNAGGAWDNAKKMVEEGLNIDGESYGKGSEAHKAAVVGDTVGDPFKDTSGPSLNILIKLMSVVSLVIAPLIA

SEQ ID NO: 172214 - protein, 470 aa, Unknown
  Bacterial polypetide isolated from the Sargasso Sea
AAALTVSFYGGSIMGLCVASLGLIGLGGLYFFYIPAEIDPHKLEGFAMGASVVALFSRVGGGIFTKSADVGADLVGKIEAGIPEDDPRNPGVIADNVGDNVGDVAGMGSDIFESYCGSMIASIAIAYTLGNKDMMMLPLALASTGLIASIIGIFIVKLQSAKAPASALRSGTLLAPVIFVAMAYFIIDSFEGVGMNVWWCVIAGAVGGVLIGLITEYYTGGSPVKKIAESGETGSATVMISGLSVGMQSVVIPIGILAGIILTSTQLSGIYGVGIAAVGMLATVGITMAIDAYGPVADNAGGIAEMSSMGEEVREITDSLDELGNTTAAIGKGFAIGAAALAALAIISAFSAVVADANPEFSLALTEPIVLVGMFIGVCIPFLVSSITMTAVGDAAFEMINEIRRQFKEIPGLMEGSAEPDSEKCVEIATKAALKKMMLPGVIAVSMPTIVGFGLGAQALGGMLAGGLLG

SEQ ID NO: 172215 - protein, 536 aa, Unknown
  Bacterial polypetide isolated from the Sargasso Sea
YPYFSIYIGGLNGNADFSLVMTKVSGFAMGASSIALFARVGGGIYTKAADVGADLVGKVEAGIPEDDPRNPATIADNVGDNVGDVAGMGADLFESYVGSMIGAMVLAATAGEKSLVFLPLFLAAAGIIVSIFGTFFVKTKEGGNPQTALNIGVFGSGAVMTVVSYFLIGRLIENPVALADGYQNVQALDLFLATVVGLVSGILIGVLTEYYTSDHQKPSQNVAASSETGSATNIISGLANGMFSTALPVLVIALSILGAYHFAHLYGIALAALGMLSTIGIQLAVDAYGPIADNAGGIAEMAELPKEVRERTDKLDAVGNTTAAIGKGFAIGSAALTSLALFAAFRETVGGLTLDINNPQVMAGLLIGSSLPFVFSALAMQAVGDAAFEMIEEVRRQFREIKGLLDGKAKADYAKCVDIATTAAINKMVLPGALAVFTPIIFGLVLGQKEMLGGILAGVTVTGVLLAIFMSNAGGSWDNAKKYIESGNHGGKGSTAHKAAVVGDTVGDPFKDTAGPSLNILIKLISVVSLVIAPLI

SEQ ID NO: 172216 - protein, 662 aa, Unknown
  Bacterial polypetide isolated from the Sargasso Sea
MNVLIAPALGVLGLIAAFVVFSLVMRYSDGTDQVKKIGDEIHKGAMKFMKTEYTYLLIFVAVLVVLVATFLTIQSAIAVVVGAACSSLAGFIGMYAATKANVRTATAAQQDGAAAALSVSFYGGSVMGLCVASLGLIGLGGLFYFFSESHVHALEGFGMGASVVALFSRVGGGIFTKSADVGADLVGKIEAGIPEDDPRNPGVIADNVGDNVGDVAGMGSDIFESYCGSMIASIAIAYTLGSKEMMMFPLALTSIGLIASIIGIVIVKLQSAKAPASALRSGTLLAPVIFIAMAYFLTNSMAGVSMNVWWAVVCGAVGGVLIGLITEYYTGGAPVQKIAESGETGSATVMISGLSVGMQSVVIPISVLATIILISTTLSGVYGVGVAAVGMLSTVGITMAIDAYGPVADNAGGIAEMAGMGEDVREITDSLDELGNTTAAIGKGFAIGAAALAALAIISAFSAVVSLNFGEAFTLSLGQPIVLVGMFIGICIPFLISSITMTAVGDAAFEMINEIRRQFREIAGLMEGNADPDSEKCVEIATKAALKKMMLPGVIAVAMPAVVGFGLGAMALGGMLAGGLLGCVALALFMANAGGAWDNAKKYVEKGNFGGKGSDTHAAVVVGDTVGDPFKDTSGPSMNILINVMAIVSLVIAPLLTLNGML

SEQ ID NO: 172217 - protein, 645 aa, Unknown
  Bacterial polypetide isolated from the Sargasso Sea
RQYKTIAIVGVVVLVIITLPFNYLVGLGYLIGATLSGIAGYVGMLVSVQANVRTAEASRKGLSHGLSVAFKSGAITGMLVAGLALLSIAVYYFILLKLRVEEREIVNALVALGFGASLISIFARLGGGIFTKGADVGADLVGKVEAGIPEDDPRNPAVIADNVGDNVGDCAGMAADLFETYAVTIVATMVLSSIFFHGDTNMMIYPLTIGGACIITSIIGTFFVKLGNSKNVMNALYKGFIATAILSLIVLYPVTDYVIGFEKNYTVGIKTFGGINLYYCGVIGLIITGLLIWVTEYYTGTNYRPVKSVAASSTTGHGTNVIQGLAVSMEATAIPALIIVAGILLTNHIAGLFGIAIAVTTMLALAGMVVALDAYGPVTDNAGGIAEMSNLPKNVRKTTDALDAVGNTTKAVTKGYAIGSAGLGALVLFAAYTEDIKHFSKVAGSKLEGIVVTFDLSNPFVVVGLLIGGMLPYLFGSMGMQAVGRAGGAVVVEVRRQFKKIPGIMKRKAKPDYGKLVDLLTKAAIKEMIIPSLLPVLSPIVLYFIILPIGGQVAALSSVGAMLLGVIITGLFVAVSMTAGGGAWDNAKKYIEDGKFGGKGSEAHKAAVTGDTVGDPYKDTAGPAVNPMIKITNIVALLLLAVIAG

SEQ ID NO: 172218 - protein, 441 aa, Unknown
  Bacterial polypetide isolated from the Sargasso Sea
GAALSGIAGYVGMLVSVQATVRTAEASRKGLANGLSVAFKSGAVTGMLVAGLALLAIAVYYYLLLKFNVDEREIVNALVALGFGASLISIFARLGGGIFTKGADVGADLVGKVEAGIPEDDPRNPAVIADNVGDNVGDCAGMAADLFETYAVTIVATMVLSSIFFPGDMSMMIYPLTIGGACILTSIIGTFFVKLGKNKNVMGALYKGFIVSAITSLVILYPVTDFVLGLENNYNLNNKSFSGLSLYYCGIIGLIITGLLIWVTEYYTGTNYRPVRSVASSSTTGHGTNVIQGLAISLEATAIPALIIVAGILLTNHIAGLYGIAIAVTTMLALAGMVVALDAYGPVTDNAGGIAEMSKLPNNVRKTTDALDAVGNTTKAVTKGYAIGSAGLGALVLFAAYTEDIKHFSKVAGSKLEGVVVTFDLSNPYVVVGLLIGGMLP

SEQ ID NO: 172219 - protein, 439 aa, Unknown
  Bacterial polypetide isolated from the Sargasso Sea
LAIGGACILTSILGTFFVTLGSDKNIMKAMYKGFVITAISSLIILYPITKYVIGFTNEYIVNEKSFTGLSLYFCGIIGLVITGLIIWITEYYTGTDYRPVKSVAQSSTTGHGTNVIQGLAVSMEATAIPALIIVGGILLTNHIAGLYGIAIAVTTMLALAGMVVALDAYGPVTDNAGGIAEMSNLPKNVRKTTDALDAVGNTTKAVTKGYAIGSAGLGALVLFAAYTEDIKHFSKVAGSNLEGIIVTFDLSNPFVVVGLLIGGMLPYLFGSMGMQAVGRAGGAVVIEVRRQFKKIPGIMKRKAKPDYGRLVDLLTKAAIKEMIIPSLLPVLSPIVLYIIIYFIGGQVAALSAVGAMLLGVIITGLFVAVSMTAGGGAWDNAKKYIEDGKFGGKGSEAHKAAVTGDTVGDPYKDTAGPAVNPMIKITNIVALLLLAVIAG

SEQ ID NO: 172220 - protein, 277 aa, Unknown
  Bacterial polypetide isolated from the Sargasso Sea
IYGVGIAAVGMLATVGITMAIDAYGPVADNAGGIAEMSGMGEEVREITDSLDELGNTTAAIGKGFAIGAAALAALAIISAFSAVVGVANPEFSLALTEPIVLVGMFIGVCIPFLVSSITMTAVGDAAFEMINEIRRQFREISGLMEGTAEPDSEKCVEIATKAALKKMMLPGVIAVSMPAIVGFGLGAQALGGMLAGGLLGCVSLALMMANAGGAWDNAKKYVEKGNLGGKGSDTHAAAVVGDTVGDPFKDTSGPSMNILINVMAIVSLVIAPLLSI

SEQ ID NO: 172221 - protein, 309 aa, Unknown
  Bacterial polypetide isolated from the Sargasso Sea
ICAAILLSYEFAGLYGIAIAAVGMLANTGIQLAVDAYGPISDNAGGIAEMAELDPKVRERTDKLDAVGNTTAAIGKGFAIASAALTALALFAAFMQTAEITAIDISKPVVMAGLLLGAMLPFVFSALSMKAVGKAAMSMIEEVRRQFKDLPKLKAALEVMRKYDSDISKASKEDLKIFNDADGVAEYSKCVEISTQAALREMVLPGLMAISVPVIIGFAGGAEMLGGLLAGVTSCGVLMAIFQSNAGGAWDNAKKMIEEDGRKGTEAHKAAVVGDTVGDPFKDTSGPSLNILLKLIAVVALVIAPLLVG

SEQ ID NO: 172222 - protein, 532 aa, Unknown
  Bacterial polypetide isolated from the Sargasso Sea
GLALLAIAVYYYLLLKFNIDEREIVNALVALGFGASLISIFARLGGGIFTKGADVGADLVGKVEAGIPEDDPRNPAVIADNVGDNVGDCAGMAADLFETYAVTIVATMVLASIFFPGDMAMMIYPLTIGGACILTSIVGTFFVKLGKSKNVMGALYKGFIVSAITSLAILYPVTDFVLGLENTYNLNNKSFSGMNLYYCGVIGLIITGLLIWVTEYYTGTNYRPVRSVANSSTTGHGTNVIQGLAISLEATAVPALIIVAGILLTNHIAGLYGIAIAVTTMLALAGMVVALDAYGPVTDNAGGIAEMSKLPNSVRKTTDALDAVGNTTKAVTKGYAIGSAGLGALVLFAAYTEDIKHFSKEIGSNLEGIVVTFDLSNPYVVVGLLIGGMLPYLFGSMGMQAVGRAGGAVVIEVRRQFKKYPGIMKRKQKPDYAKLVDLLTVAAIKEMIIPSLLPVLSPIVLYFIIFAIGGQVAALASVGAMLLGVIITGLFVAVSMTAGGGAWDNAKKYIEDGNYGGKGSEAHKAAVTGDTV

SEQ ID NO: 172223 - protein, 306 aa, Unknown
  Bacterial polypetide isolated from the Sargasso Sea
VAGILLTNSIAGLYGISIAVTTMLALAGMVVALDAYGPVTDNAGGIAEMSKLPNNVRKTTDALDAVGNTTKAVTKGYAIGSAGLGALVLFAAYTEDIKHFSKIAGSKLEGVVVTFDLSNPYVVVGLLIGGMLPYLFGSMGMQAVGRAGGAVVVEVRRQFKKFPGIMKKTQKPDYAKLVDLLTIAAIKEMIIPSLLPVLSPIVLYFVIFSIGGQVAALASVGAMLLGVIITGLFVAVSMTAGGGAWDNAKKYIEDGNFGGKGSEAHKAAVTGDTVGDPYKDTAGPAVNPMIKITNIVALLLLAVIAS

SEQ ID NO: 172224 - protein, 509 aa, Unknown
  Bacterial polypetide isolated from the Sargasso Sea
FDIDEREIVNALVALGFGASLISIFARLGGGIFTKGADVGADLVGKVEAGIPEDDPRNPAVIADNVGDNVGDCAGMAADLFETYAVTIVATMVLSSIFFVEDLNMMIYPLTIGAACLLTSIIGTFFVKLGRSNNVMNALYKGFIVSAVSSLAILWPVTDHVIGFTNEYTVNNKTFNGMSLYYCGVIGLVITGLLIWITEYYTGTSYRPVKSVALSSTTGHGTNVIQGLAVSMEATAIPALIIVSGILVTNSIAGLFGIAIAVTTMLALAGMVVALDAYGPVTDNAGGIAEMSNLDKKVRKTTDALDAVGNTTKAVTKGYAIGSAGLGALVLFAAYTEDIKHFSKVSGSALEGIVVTFDLSNPYVVVGLLIGGMLPYLFGSMGMQAVGRAGSAVVVEVRRQFKKFPGIMKRKQKPDYAKLVDLLTVAAIKEMIIPSLLPVLSPVVLYFIILSIGGQVAALAAVGAMLLGVIITGLFVAVSMTAGGGAWDNAKKYIEDGNHGEKVLKLIKL

SEQ ID NO: 172225 - protein, 497 aa, Unknown
  Bacterial polypetide isolated from the Sargasso Sea
PEDDPRNPAVIADNVGDNVGDCAGMAADLFETYAVTIVATMVLSSIFFHGDINMMIYPLTIGGACILTSIIGTFFVKLGNDKNVMNALYKGFIVSALASLAILYPVTDHVIGFTNEYTVNDKTFNGLNLYYCGVIGLIITGLLIWITEYYTGTNYRPVKSVAASSTTGHGTNVIQGLAVSMEATAIPALIIVAGILVTNSIAGLFGIAIAVTTMLALAGMVVALDAYGPVTDNAGGIAEMSNLDKKVRKTTDALDAVGNTTKAVTKGYAIGSAGLGALVLFAAYVEDIKHFSNVAGSKLEGIVVTFDLSNPYVVVGLLVGGMLPYLFGSMGMQAVGRAGGAVVVEVRRQFKKFPGIMKRKQKPDYAKLVDLLTVAAIKEMIIPSLLPVLSPVVLYFIILSIGGQVAALAAVGAMLLGVIITGLFVAVSMTAGGGAWDNAKKYIEDGNHGGKGSEAHKAAVTGDTVGDPYKDTAGPAVNPMIKITNIVALLLLAVIAG

SEQ ID NO: 172226 - protein, 282 aa, Unknown
  Bacterial polypetide isolated from the Sargasso Sea
INIFKAPVLAMLFIGGMVPVVFSALAMNAVGKAAMEMVYEVRRQFKEIPGIMKGKEKPEYDKCVDISTKASLKEMMLPGILTIGTPIIITVLPMLFGLDNQLIAEMLGGYMAGVTVSGVLWAIFQNNAGGAWDNAKKSFEAGVEINGEMTFKGSDAHKASVTGDTVGDPFKDTSGPSMNILIKLTCLIGLVIAPILGNHGEDLAAFDLNKSVEKNVILAVNDENPEKSSLTIITKSEINGVVTEKTEKCYGSRAELLLKAAEVSGESEIADAYGSLNIKVSN

SEQ ID NO: 172227 - protein, 207 aa, Unknown
  Bacterial polypetide isolated from the Sargasso Sea
FLKEAGSALEGIVVTFDLSNPYVVVGLLIGGMLPYLFGSMGMQAVGRAGGAVVVEVRRQFKKYPGIMKRKQKPDYAKLVDLLTVAAIKEMIIPSLLPVLSPVVLYFIILAIGGQVAALAAVGAMLLGVIITGLFVAVSMTAGGGAWDNAKKYIEDGNHGGKGSEAHKAAVTGDTVGDPYKDTAGPAVNPMIKITNIVALLLLAVIAG

SEQ ID NO: 172228 - protein, 238 aa, Unknown
  Bacterial polypetide isolated from the Sargasso Sea
QQKAVTKGYAIGSAGLGALVLFAAYTEDIKHFSKEAGSALEGIVVTFDLSNPYVVVGLLIGGMLPYLFGSMGMQAVGRAGGAVVVEVRRQFKKYPGIMKRKQKPDYAKLVDLLTVAAIKEMIIPSLLPVLSPVVLYFIILAIGGQVAALAAVGAMLLGVIITGLFVAVSMTAGGGAWDNAKKYIEDGNHGGKGSEAHKAAVTGDTVGDPYKDTAGPAVNPMIKITNIVALLLLAVIAG

SEQ ID NO: 172229 - protein, 583 aa, Unknown
  Bacterial polypetide isolated from the Sargasso Sea
IAVGALSSAIAGFIGMYSATQANVRTATAAEESGQEQALSISFFGGSIMGLCVASMGLVGLGGLYFYFSGVIEDPNELAKALEGFGVGASAVALFSRVGGGIYTKSADVGADLVGKIEAGIPEDDPRNPGVIADNVGDNVGDIAGMGSDIFESYCGAMIASIAIAATMGNSDLMFLPLWLAASGLFCSLLGIGIVRTQVSRSPAVALRWGTFLSPVLFLLFAGASIYYSPAIEMNYFYSVLTGAVGGILIGLITEYYTGGDTENSPVGKIAKSGETGPATVMISGLSVGMQSVVLPLFVIAGIVGLSTYFSGLYGVGIAAVGMLSTVGITMAIDAYGPVADNAGGIAEMSGMKSEVREITDSLDELGNTTAAIGKGFAIGAAALAALAIIAAYMLATGVESLSLDDPKVLMGMFIGGSIPFLVSSITMTAVGDAAFEMIEEIRRQFREIPGLLEGKAEPDNAKCVDIATKAALNKMLLPGAIAIGSPVAVGFILGPVVLGGMLAGALLGCVLMALMMANAGGAWDNAKKFVEKGNFGGKGTDTHAATVVGDTVGDPFKDTSGPSMNILINVMAIVSLVIAPLL

SEQ ID NO: 172230 - protein, 660 aa, Unknown
  Bacterial polypetide isolated from the Sargasso Sea
MESNLILPPLFGIFGLAVAFILYLLVMRYDEGTDKVKKIGDQIHLGAMVFMRREYTYLAMFVAVLIVLSYLFLGLNTALAVTAGALSSSLAGWLGMFSATKANVRTATAASESGAQAALSVAFYGGSIMGLCVASLGLVGLGGLYFYFGGDPDTARAIEGFGMGASCVALFSRVGGGIYTKSADVGADLVGKVEAGIPEDDPRNPGVIADNVGDNVGDVAGMGSDIFESYCGAMIASIAIAATIDNTGMMALPLALASLGLLASILGIIIVRVFSKADPGTALRTGTIGSAILFIIAAFFLIQMILTENAVNTWLAVLAGAVGGVIIGLITEYYTGSKPVEKIAKSGETGPATVMITGLSVGMQSVVLPILVLATIIWVSTSLVGLYGVGIAAVGMLATVGITMAIDAYGPVADNAGGIAEMSGMGSETREITDSLDELGNSTAAIGKGFAIGAAALAALAIIAAFVETVAHNRGSFELLLSDPRVLVGMFIGISIPFLISSITMTAVGDAAFDMINEIRRQFREIPGLLEGNAEPDTAKCVDIATSAALKRMLLPGVIAVSAPAVVGFGLGPESLGGMLGGGLIGCVSMALMMANAGGAWDNAKKFIEKGNLGGKGTDTHSAAVVGDTVGDPFKDTSGPSMNILINVMAIVSLVISPLL

SEQ ID NO: 172231 - protein, 701 aa, Unknown
  Bacterial polypetide isolated from the Sargasso Sea
MNTSTETIMYYIIAAGILSIVYGFITGRNILNSSSGNAKMLEIASAIQEGARAYLNRQYKTIAIVGVVVLIVITILFSPLVGLGYFIGAALSGIAGYVGMIVSVQANVRTAEASRKSLASGLSIAFKSGAVTGMLVAGLALLAIAVYYYFLVKNGVDEREIVNALVALGFGASLISIFARLGGGIFTKGADVGADLVGKVEAGIPEDDPRNPAVIADNVGDNVGDCAGMAADLFETYAVTIVATMVLSSIFFVNDFNMMIYPLAIGGACILTSILGTFFVTLGSDKNIMKAMYKGFVITAISSLVILFPITKHVIGFTTEYVANGKSFNGLSLYFCGIIGLVITGLIIWITEYYTGTDYRPVKSVAQSSTTGHGTNVIQGLAVSMEATAVPALIIVGGILWTNQIAGLYGIAIAVTTMLALAGMVVALDAYGPVTDNAGGIAEMSNLPKNVRKTTDALDAVGNTTKAVTKGYAIGSAGLGALVLFAAYTEDIKHFSKVAGSNLEGIVVTFDLSNPYVVVGLLIGGMLPYLFGSMGMQAVGRAGGAVVIEVRRQFKKIPGIMKRKAKPDYGKLVDLLTRAAIKEMIIPSLLPILSPIVLYVIIYFIGGQVAALSSLGAMLLGVIITGLFVAVSMTAGGGAWDNAKKYIEDGKFGGKGSEAHKAAVTGDTVGDPYKDTAGPAVNPMIKITNIVALLLLAVIAG

SEQ ID NO: 172232 - protein, 135 aa, Unknown
  Bacterial polypetide isolated from the Sargasso Sea
LLSAIAPCIIVAIRRDDSFLLAQHVRHRNGVHTVLAGFVEVGETLEQAVAREVMEESGIKVKNLRYVTSQPWPFPMSLMTAFMAEYDSGEIVIDPKELLEANWYRYDDLPLLPPPGTVARRLIEDTVAMCRAEYE

SEQ ID NO: 172233 - protein, 132 aa, Unknown
  Bacterial polypetide isolated from the Sargasso Sea
MDRIIEKLDHGWWIVSHEQKLWLPHGELPHGDAATFDLVGQPALQIGEWEGEPVWLVQQHRRHEMGSVRQVIDQDVGLFQLAGRGVQLAEFYRSHKFCGYCGHLMHPSKTEWAMLCTHCRERYYPQIAPCII

SEQ ID NO: 172234 - protein, 145 aa, Unknown
  Bacterial polypetide isolated from the Sargasso Sea
MVKIKIKKLDPKVKIPQYKTEGSSGMDLMAFVKESLKIKPNSSELIPTGISIAIPQYTEIQIRPRSGLAAKSQISVLNTPGTIDSDYRGELKVILFNHGLDDFIVNNGDRIAQIVLMPVLKASFDEVDELPDTVRGSGGFGSTGK

SEQ ID NO: 172235 - protein, 145 aa, Unknown
  Bacterial polypetide isolated from the Sargasso Sea
MVKVLIKKLDKKVKLPEYKTTGSSGLDLTAFIEKKIVIKPGENALVPTGISIAIPDDTEFQIRPRSGLAAKNNITVLNTPGTIDSDYRGEIKVILFNHGDKDFTVNNDDRIAQMILLPILKVDFETVETLPETIRGSGGFGSTGK

SEQ ID NO: 172236 - protein, 145 aa, Unknown
  Bacterial polypetide isolated from the Sargasso Sea
MVKVLFKRLDPKAQIPKYKTNGSSGLDLMALIEDPIKIKAQESALIPTGISIAIPQDTEIQIRPRSGLAAKSSISVLNTPGTIDSDYRGEIKIILFNHGKKEFTVNNNDRIAQMVLMPILKIEFEEVDELPETLRGSGGFGSTGK

SEQ ID NO: 172237 - protein, 151 aa, Unknown
  Bacterial polypetide isolated from the Sargasso Sea
MKKVKVKILNPLIGNEIPIPKYETKGSAGLDLRACIKDKLILKPGKTEMIPMGFAMHLEDKSLAALVIPRSGLGSKHGIVLGNLVGLIDSDYQGELMVPAWNRSEQEFEINSGDRIAQMIIVPIVQADFEIVEDFEESERGAKGFGSSGLD

SEQ ID NO: 172238 - protein, 145 aa, Unknown
  Bacterial polypetide isolated from the Sargasso Sea
MIKVLVKKLNPSVKLPLYKTDGASGMDLMAYIDKSIELKPGESCLVPTGLSVAFPKEYEIQIRPRSGLAAKSNISVLNTPGTIDSDYRGEIKVILFNHGNKSFKINNNDRIAQMILTPVMKMDLEETNELPDSIRGAGGFGSTGK

SEQ ID NO: 172239 - protein, 148 aa, Unknown
  Bacterial polypetide isolated from the Sargasso Sea
MPDIIKTFTGKNQKESNLPLNVKFKILNERLGKEFPLPTFQTAGSAGLDLCACIEEDIFINPNDSVLVPTGFSIHIDNPDYAAFILPRSGLGHKHGIVLGNLIGLIDSDYQGEIMVSLWNRSDETFTVEPGARIAQMVFLPVMNPNFS

SEQ ID NO: 172240 - protein, 140 aa, Unknown
  Bacterial polypetide isolated from the Sargasso Sea
MIGEKIPVPRYETKGSAGLDLRACLEEKLILRPGCTEMIPMGFAMYLEDEELAALVIPRSGLGSKHGIVLGNLVGLIDSDYQGELMVPAWNRSNEEFEISPGDRIAQMIIVPILQANFEIVEDFEKSSRGSKGFGSSGIN

SEQ ID NO: 172241 - protein, 145 aa, Unknown
  Bacterial polypetide isolated from the Sargasso Sea
MVKVLVKRLDPKVKLPKYKTNGSSGMDLMAFIENPIKIKPGTSALIPTGISIAFPEEFEVQIRPRSGLAAKQSIGVLNTPGTIDSDYRGELKVIIFNHGENEFIVNCNDRIAQMVLSPVLKIEFEEVNDLPETLRGSGGFGSTGK

SEQ ID NO: 172242 - protein, 145 aa, Unknown
  Bacterial polypetide isolated from the Sargasso Sea
MVKVLIKKLNSKVQLPKYKTDGSSGMDLMAFIENSIKIKPQKSALIPTGISIAIPEDTEVQIRPRSGLAAKSNISVLNTPGTIDSDYRGEIKIILFNHGKDEFIINNKDRIAQMILMPIIKAEFEEVEDLPKTLRGSGGFGSTGK

SEQ ID NO: 172243 - protein, 145 aa, Unknown
  Bacterial polypetide isolated from the Sargasso Sea
MIKVLVKKLNPKAELPKYKTEGSSGMDLMALIENPITIKSQNSALIPTGLSIAIPEDMEVQIRPRSGLAAKSNISVLNTPGTIDSDYRGEIKIILFNHGKEEFTVNNNDRIAQMVLMPVLKAEFKEVEELPKTIRGSGGFGSTGK

SEQ ID NO: 172244 - protein, 151 aa, Unknown
  Bacterial polypetide isolated from the Sargasso Sea
MSNKKNSILIKKISNIKNFKLPEYQSDEASGVDLYASIKSDIIIQPWEREIIACGIAISMPKGMEAQVRPRSGLAFKYGISVLNTPGTIDSDYRGEIKVILINLSKAIFIVHPLERIAQMVFSNVARVEFKEVDNLDETDRGSSGFGSTGK

SEQ ID NO: 172245 - protein, 125 aa, Unknown
  Bacterial polypetide isolated from the Sargasso Sea
MPKILVKKLDPSIELPTYKTEGASGMDLMAFIKEPIVLKSKNSCLVPTGIAVAFSNEFEIQIRPRSGLAAKNNISVLNTPGTIDSDYRGEIKVILYNHGKEDFLINNKDRIAQMVLTPVIKMNFE

SEQ ID NO: 172246 - protein, 149 aa, Unknown
  Bacterial polypetide isolated from the Sargasso Sea
MLKSIKLKILDKNLSKLPSFSTLGSAGLDLRASLTSPLIVKKQTAELIPTGIAIHINNNNYAGIILPRSGLGHKSGIVLGNLVGLIDSDYQGELKISCWNRSNEDYEIEPYDRIAQLVFININQPDFDVVEDFENSERGESGFGSSGKK

SEQ ID NO: 172247 - protein, 123 aa, Unknown
  Bacterial polypetide isolated from the Sargasso Sea
AGVDLSASIETSIKIRPWEREIIPCGISIAMPRGLEAQIRPRSGLAFKHGITILNTPGTIDSDYRGEIKVILINLSKDEFIIRPKDRIAQMVFTSAIQVKFKEVENLDQTRRGDGGFGSTGKD

SEQ ID NO: 172248 - protein, 145 aa, Unknown
  Bacterial polypetide isolated from the Sargasso Sea
MVKVLIKKLDPEVKLPEYKTNGASGMDLKAFIKKPINLKPKTSSLIPTGLSVAFVEDYEIQIRPRSGLAAKNNITVLNTPGTIDSDYRGEIKVIIYNHGDDSFIVNNGDRIAQMVLSPVIKIELEEANELPKTLRGKGGFGSTGK

SEQ ID NO: 172249 - protein, 71 aa, Unknown
  Bacterial polypetide isolated from the Sargasso Sea
SVLNTPGTIDSDYRGEIKIILINLSQKSFVVKSGDRIAQMILCPVAKGKLKEVKNLPKTVRGGGGFGSTGK

SEQ ID NO: 172250 - protein, 145 aa, Unknown
  Bacterial polypetide isolated from the Sargasso Sea
MIKVMIKKLDPNVEIPEYKTSGSSGVDLMANLNEKITLKSGESCIVPTGLSISIPKDCEVQIRPRSGLAAKSQITVLNTPGTIDSDYRGELKIILFNHGKNEFIINNKDRIAQMVLIPILKFDFQEVDDLDNSERGSGGFGSTGK

SEQ ID NO: 172251 - protein, 100 aa, Unknown
  Bacterial polypetide isolated from the Sargasso Sea
IPTGLSIAIPEDLEIQIRPRSGLAAKSSISVLNTPGTIDSDYRGEIKIILFNHGNKDFIVNNNDRIAQMVLMPVIKMEIEEVDQLPKTIRGSGGFGSTGK

SEQ ID NO: 172252 - protein, 145 aa, Unknown
  Bacterial polypetide isolated from the Sargasso Sea
MVKVLIKKLDPTVQLPEYKTNGASGMDLTAFTEKPINVKPKTSSLVPTGLSVAFHENYEIQIRPRSGLAAKSNITVLNTPGTIDSDYRGEIKVIIYNHGDTDFVISNGDRIAQMVLSPVIRMELEEVKDLPKTIRGEGGFGSTGK

SEQ ID NO: 172253 - protein, 126 aa, Unknown
  Bacterial polypetide isolated from the Sargasso Sea
TSGSSGMDIVAYTKNKIKISPGKIAIVPTGIAVAIPKNYEIQIRPRSGLAAKNNISVLNTPGTIDSDYRGEIKIILINLGKKTFTVKSGDRIAQMILCPVAKGKIKEIKNLPNTVRGKGGFGSTGK

SEQ ID NO: 172254 - protein, 134 aa, Unknown
  Bacterial polypetide isolated from the Sargasso Sea
AVELPAYKTEGASGMDLMALVKEPINLKPNSSCLVPTGLAVAFSTDFEIQIRPRSGLAAKNSISVLNTPGTIDSDYRGEIKVILFNHGKNDFLINNKDRIAQMILTPVIKMDLEETDDLPETIRGEGGFGSTGK

SEQ ID NO: 172255 - protein, 145 aa, Unknown
  Bacterial polypetide isolated from the Sargasso Sea
MAKVLIKKLDPAVELPAYKTEGASGMDLMALVKEPINLKPNSSCLVPTGLAVAFSSDFEIQIRPRSGLAAKNSISVLNTPGTIDSDYRGEIKVILFNHGKNDFLINNKDRIAQMILTPVIKMDLEETDDLPETIRGEGGFGSTGK

SEQ ID NO: 172256 - protein, 144 aa, Unknown
  Bacterial polypetide isolated from the Sargasso Sea
MIKILIKRLSKEVSLPKYETSGSSGMDLGSNIVANISPGKIAIIPTGLALSIPKGFEAQIRPRSGLAAKKKISVLNTPGTIDSDYRGEIKVILINLGEEIFKVEKGLRIAQMVFCPIVQAQFREVDDLNETERGKGGFGSTGTK

SEQ ID NO: 172257 - protein, 122 aa, Unknown
  Bacterial polypetide isolated from the Sargasso Sea
GMDLAANINTDILIDPGKTAIIPTGLALSIPKGFEIQIRPRSGLAAKKKISVLNTPGTIDADYRGEIKVILINLGQESFKVEKGLRIAQMVVCPVIQAQLKEVDDLTETERGKGGFGSTGTK

SEQ ID NO: 172258 - protein, 146 aa, Unknown
  Bacterial polypetide isolated from the Sargasso Sea
MTEILIKRFSKDINLPKYETEGSSGMDLAAHIENSILIEPGNTVMVPTGIAVSIPKNFEIQIRPRSGLAARNKISVLNTPGTIDSDYRGEIKVILINLGEKTFTIEKGTRIAQMVLCPIVKARFKEVESLGETPRGSSGFGSTGTN

SEQ ID NO: 172259 - protein, 151 aa, Unknown
  Bacterial polypetide isolated from the Sargasso Sea
MKKIQIKLIDKRLGNEFPMPQYATEGSAGLDLCACIDSDLIINPGDTALISAGFAIYIADKSYAAMLLPRSGLGHKHGIVLGNLTGLVDSDYQGEIYISCWNRGAVKFTITPGDRIAQMIIVPIERPDFEFVDSFDETIRGLGGFGHTGVS

SEQ ID NO: 172260 - protein, 145 aa, Unknown
  Bacterial polypetide isolated from the Sargasso Sea
MVKVLIKKIDPSVKIPTYKTKGASGMDLMAFIKQPIKLAPKSSCLVPTGISVAFSEEYEIQIRPRSGLAIKNNISVLNTPGTIDSDYRGEIKIILFNHGNSEFIINNKDRVAQMILVPVNKMDLEVVESLPDTLRGKGGFGSTGK

SEQ ID NO: 172261 - protein, 102 aa, Unknown
  Bacterial polypetide isolated from the Sargasso Sea
MSVPTGLSVAFPKEYEIQIRPRSGLAAKNNISVLNTPGTVDSDYRGEIKIILFNHSNENFIINNNDRIAQMVLTPIIKIELEETNELPESVRGREGFGSTGK

SEQ ID NO: 172262 - protein, 149 aa, Unknown
  Bacterial polypetide isolated from the Sargasso Sea
MCTKKNSILIKKISDIENFELPKYQSEEASGIDLCASIKNDITIAPWEKEIIACGISVSMPTGMEAQVRPRSGLALKHGITVLNTPGTIDSDYRGEIKVILINLSKEKFVVRPLERIAQMIFSNVTKVEFKEVDSLDDTNRGQGGFGST

SEQ ID NO: 172263 - protein, 147 aa, Unknown
  Bacterial polypetide isolated from the Sargasso Sea
MVDIKVKKIYDSVDLPAYETSSSAGMDIRAFLPDGNVDIAPQQTKLIGTGLIFEIPDGLEVQIRPRSGLALKNSITVLNSPGTIDADYRGEIKVILINHGSNNFEVTNKMRIAQMVVSKYEKINFKLVSDLNTTKRGSGGFGSTGTK

SEQ ID NO: 172264 - protein, 146 aa, Unknown
  Bacterial polypetide isolated from the Sargasso Sea
MVKILIKKTDKEVITPKYKTDGSSGVDLSAFLEKKVVIKPNSSELIPTGLQVAIPEELEIQIRPRSGLAAKESIGVLNSPGTIDSDYRGELKIILFNHGKEDFIINNGDRIAQMVLVPIVKMEFEEVDSLPNTVRGQGGFGSTGKK

SEQ ID NO: 172265 - protein, 121 aa, Unknown
  Bacterial polypetide isolated from the Sargasso Sea
MAKVLIKKLSSKVELPKYKTEGSSGLDLMAFIEKSIKLNPKESVLVPTGISIAIEKDLEIQIRPRSGLAAKSNISVLNTPGTIDSDYRGEIKVILFNHGKNEFIINNKDRIAQMVLAPIIK

SEQ ID NO: 172266 - protein, 145 aa, Unknown
  Bacterial polypetide isolated from the Sargasso Sea
MVKILVKKFDKNIELPSYKTSGASGMDLVAFIKKKITISPYNKAMIPTGISLVIPKNYEIQIRPRSGLAAKKGVSVLNTPGTIDSDYRGEIKIILINLSKKPFIIKSGDRIAQMILCPVAKIKLKEVKNLPKTSRGKAGFGSTGK

SEQ ID NO: 172267 - protein, 106 aa, Unknown
  Bacterial polypetide isolated from the Sargasso Sea
PGESCLVPTGLSVAFPEEYEIQIRPRSGLAAKNNISVLNTPGTIDSDYRGEIKVILFNHGNKNFKINNNDRIAQMILTPVIKIDLEETNELPESIRGAGGFGSTGK

SEQ ID NO: 172268 - protein, 89 aa, Unknown
  Bacterial polypetide isolated from the Sargasso Sea
GLALKYGITVLNSPGTIDSDYRGEVSVLLINLGNEIFSFNRGDRIAQIVFSKVEQVQLEEVEELDESDRGTGGYGSTGISKKSKTRGIK

SEQ ID NO: 172269 - protein, 84 aa, Unknown
  Bacterial polypetide isolated from the Sargasso Sea
KYGVTVLNSPGTIDSDYRGEVSVLLINQGSETFFLERGDRIAQMVFTKVEQVKFQEVEALDESGRGLGGYGSTGMSKNLEGSMS

SEQ ID NO: 172270 - protein, 145 aa, Unknown
  Bacterial polypetide isolated from the Sargasso Sea
MVKVLIKKLDKKVKLPEYKTTGSSGLDLTAFIEKKIVIKPGENALVPTGISIAIPEDTEVQIRPRSGLAAKNNISVLNTPGTIDSDYRGEIKVILFNHGDKDFTVNKDDRIAQMILMPILKVDFETVEALPETIRGSGGFGSTGK

SEQ ID NO: 172271 - protein, 97 aa, Unknown
  Bacterial polypetide isolated from the Sargasso Sea
GLSIAIPDNTEVQIRPRSGLAAKNNISVLNTPGTIDSDYRGELKVILYNHSSKEFIVNNDDRIAQMILVPIIKATFEEVENLPETIRGEGGFGSTGK

SEQ ID NO: 172272 - protein, 145 aa, Unknown
  Bacterial polypetide isolated from the Sargasso Sea
MININIINESTNATPELATAGSAGVDIRAYLNEKVILNPLERKLIPTGLKVEIPLGYEIQIRPRSGLAYKYGITVLNSPGTIDSDYRGEIGVLLINLSNEAFEIKNGERIAQMILAKHEVPNFIQLKELSSSERGEGGFGSTGKS

SEQ ID NO: 172273 - protein, 145 aa, Unknown
  Bacterial polypetide isolated from the Sargasso Sea
MAKVLIKKLDPAVELPAYKTEGASGMDLMALLNEPINLKPNSSCLVPTGLAVAFSSNFEIQIRPRSGLAAKKSISVLNTPGTIDSDYRGEIKVILFNHGKSDFLINNKDRIAQMILTPVIKMDLEETDDLPETIRGEGGFGSTGK

SEQ ID NO: 172274 - protein, 145 aa, Unknown
  Bacterial polypetide isolated from the Sargasso Sea
MAKVLIKKLDPSVKLPAYKTKGASGMDLMALVKEPITLKPNSSCLVPTGLAVAFSSNFEIQIRPRSGLAAKNSISVLNTPGTIDSDYRGEIKVILFNHGKSDFLISNQDRIAQMILTPVIKIEFEEADDLPESVRGEGGFGSTGK

SEQ ID NO: 172275 - protein, 145 aa, Unknown
  Bacterial polypetide isolated from the Sargasso Sea
MVKVLIKKLDPAVKLPEYKTNGASGVDLTAFIKETIDLKPKKSVLVPTGLSMAFSEDFEIQIRPRSGLAAKNNISVLNTPGTIDSDYRGEIKVIIYNHGNENFLINNGDRIAQMILTPVLKMELEEVNNLPESIRGKGGFGSTGK

SEQ ID NO: 172276 - protein, 93 aa, Unknown
  Bacterial polypetide isolated from the Sargasso Sea
RIFSDFEIQIRPRSGLAAKNSISVLNTPGTIDSDYRGEIKVILFNHGKNDFLINNKDRIAQMILTPVIKMEFERADDLPKTVRGEGGFGSTGK

SEQ ID NO: 172277 - protein, 149 aa, Unknown
  Bacterial polypetide isolated from the Sargasso Sea
MLDSVQVKIVNNIIKVLPDYATEGSAGLDLRAAINKKMQLHSKETVLIPTGLSIFIENKDYAATLLPRSGLGHKKGIVLGNLVGLIDSDYQGELMISCWNRSKENYIIEPLDRIAQMVFIKVEHPKLKIVDEFRTSKRGEKGFGSSGKK

SEQ ID NO: 172278 - protein, 148 aa, Unknown
  Bacterial polypetide isolated from the Sargasso Sea
MTDIFVKILKNGKNLYKIKQATEGSAGFDINAAIEKDIVLESSKSILIPCGFSIELPRNFEAQVRPRSGLALKNMITVLNSPGTIDSDYRGEICVILINHGKDSFIIERGMRIAQIVFAKLPNFKLIEVKELSSTKRGKGGFGSTGLK

SEQ ID NO: 172279 - protein, 74 aa, Unknown
  Bacterial polypetide isolated from the Sargasso Sea
QISVLNTPGTIDADYRGELKVILINLSNKTFVVEGGARIAQMVLCPIVKAKLKEVDNLDDTSRGAGGFGSTGLK

SEQ ID NO: 172280 - protein, 113 aa, Unknown
  Bacterial polypetide isolated from the Sargasso Sea
MVKILIKRFDKNIKLPTYKTSGSSGMDVTAYIKNKINILPGKVALISTGIAAAIPKNYEIQIRPRSGLAAKNGISVLNTPGTIDSDYRGEIKIILNNLSKKKFVVKSGDRIAQ

SEQ ID NO: 172281 - protein, 145 aa, Unknown; identical to SEQ ID NO: 172255
  Bacterial polypetide isolated from the Sargasso Sea

SEQ ID NO: 172282 - protein, 149 aa, Unknown
  Bacterial polypetide isolated from the Sargasso Sea
MVSVAVKRLPHNADLPLPEYESVAASGMDLPAAIESDLIIKPGERQLVPTGLAIALPEGYEAQIRPRSGLALRNGVTILNTPGTIDSDYRGEVKVILVNFSNCNFKIQRGMRIAQMVIAPVLKVSLMDVDVLPETARGDDGFGSTGTST

SEQ ID NO: 172283 - protein, 103 aa, Unknown
  Bacterial polypetide isolated from the Sargasso Sea
MVKILIKKLNSKVKLPSYKTDGSSGMDLMAFIDKPITILPQKSELIPTGLSIAIPNDTEVQVRPRSGLAVKNNISVLNTPGTIDSDYRGEIKVILYNHGNKEF

SEQ ID NO: 172284 - protein, 146 aa, Unknown
  Bacterial polypetide isolated from the Sargasso Sea
MTEVLIKRLSKNVELPKYETNGSSGMDLSANIPTDIKIEPGKTSIIPTGISLSIPKNFEIQIRPRSGLAAKSQVSVLNTPGTIDADYRGEVKVILINLGSNTFTVRKGARIAQMVLSPVIKVKFKEVEKLDETDRGSGGFGSTGMK

SEQ ID NO: 172285 - protein, 84 aa, Unknown
  Bacterial polypetide isolated from the Sargasso Sea
IRPRSGLAAKKSITILNTPGTIDSDYRGEIKIILINLGKEDFQITNGLRIAQMVLCPISKAELTEVDDLDKTSRGRGGFGSTGS

SEQ ID NO: 172286 - protein, 122 aa, Unknown
  Bacterial polypetide isolated from the Sargasso Sea
SGMDLMALVKEPINLKPNSSCLVPTGLAVAFSSDFEIQIRPRSGLAAKNSISVLNTPGTIDSDYRGEIKVILFNHGKNDFLINNKDRIAQMILTPVIKMDLKETDDLPETIRGEGGFGSTGK

SEQ ID NO: 172287 - protein, 126 aa, Unknown
  Bacterial polypetide isolated from the Sargasso Sea
TSGASGMDLMACLKSTIKIEPKSSCLIPTGLSIAFSEDYEVQIRPRSGLAAKNNISVLNTPGTIDSDYRGEIKVIIYNHGNDHFLINNGDRIAQMVLLPIVKMELEETSDLPKSIRGEGGFGSTGK

SEQ ID NO: 172288 - protein, 145 aa, Unknown
  Bacterial polypetide isolated from the Sargasso Sea
MVKILIKKLDPSVKLPEYKTNGSSGMDIIAFTKEPINLRPKTSFVVPTGLAVAFSENYEIQIRPRSGLAAKNKISVLNTPGTIDSDYRGEIKVIIFNHGNDDFIINNGDRIAQMVLSPVIKMELEETNDLPKTIRGSGGFGSTGK

SEQ ID NO: 172289 - protein, 85 aa, Unknown
  Bacterial polypetide isolated from the Sargasso Sea
FLPRSGLGHKHGIVLGNLTGLVDSDYQGEIYISCWNRGAVKFTITPGDRIAQMIIVPIERPDFEFVDSFDETIRGLGGFGHTGVS

SEQ ID NO: 172290 - protein, 100 aa, Unknown
  Bacterial polypetide isolated from the Sargasso Sea
IPTGLSIAIPNNTEVQIRPRSGLAVKNNISVLNTPGTVDSDYRGEIKVILYNHGNKEFIVNNDDRIAQMVLVPLIKAYFEEVENLPETIRGEGGFGSTGK

SEQ ID NO: 172291 - protein, 145 aa, Unknown
  Bacterial polypetide isolated from the Sargasso Sea
MTKILIKRLSKKVSLPKYETSGSSGMDLAANIDANINIDPGKTAIIPTGLALSIPKGFEVQIRPRSGLAAKQKISVLNTPGTIDADYRGEIKVILINLGQVSFKVEKGLRIAQMVVCPIVQAQLKEVDDLSETDRGKGGFGSTGS

SEQ ID NO: 172292 - protein, 118 aa, Unknown
  Bacterial polypetide isolated from the Sargasso Sea
MVKVLIKKLDKKVKLPEYKTTGSSGLDLTAFIEKKIVIKPGENALVPTGITIAIPEDTEVQIRPRSGLAVKNNISVLNTPGTIDSDYRGEIKVILFNHGDKDFTVNKDDRIAQMILMP

SEQ ID NO: 172293 - protein, 129 aa, Unknown
  Bacterial polypetide isolated from the Sargasso Sea
STAGSAALDLRTNIKEKKVLQSDETFLFSTGFSIHIKDSKYAALILPRSGLGHKHGIVLGNLVGLIDSDYQGEIMVSLWNRSKESFEILPGDRIAQMMFFAVTSPNFKLVSEFDFSERGSKGFGSSGTK

SEQ ID NO: 172294 - protein, 153 aa, Unknown
  Bacterial polypetide isolated from the Sargasso Sea
AIERIRVVYIKVKKTNDNVTLPTYETSSSAGMDIRAFLPNGKVNISPKETKLIGTGLFFEIPNGFEVQIRPRSGLAAKNFITVLNSPGTIDADYRGEVKVILINHGLEMFEVEDKMRIAQMVVSKYEKVNFELVSDLSESERGSGGFGSTGTK

SEQ ID NO: 172295 - protein, 145 aa, Unknown
  Bacterial polypetide isolated from the Sargasso Sea
MAKVLVKKLNSKVQLPKYKTKGSSGMDLMAFIDNPIEISPNSSKLIPTGISVAIEEGYEIQIRPRSGLAAKSNISVLNTPGTIDSDYRGELKVILFNHGIIKYIVNNNDRIAQMVLSPILKVNFEEVDELPETVRGTGGFGSTGK

SEQ ID NO: 172296 - protein, 87 aa, Unknown
  Bacterial polypetide isolated from the Sargasso Sea
EVQIRPRSGLALKHGITVLNSPGTIDSDYRGEIGVILINLSHEKFIIKSGERIAQMVISKHEQVKWEVTESLPKSNRGEKGFGSTGK

SEQ ID NO: 172297 - protein, 117 aa, Unknown
  Bacterial polypetide isolated from the Sargasso Sea
MAFILNDIIIKPHESVLIPTGISVAIPKDTEIQIRPRSGLAAKSNISVLNTPGTIDSDYRGEIKIILFNHGKNEFTVKNNDRIAQMVLIPILKVEFEEVKDLPETLRGTGGFGSTGK

SEQ ID NO: 172298 - protein, 116 aa, Unknown
  Bacterial polypetide isolated from the Sargasso Sea
AFIKEPINLKPYTSCMVPTGISLAFSGEFEIQIRPRSGLAAKSSISVLNTPGTIDSDYRGEIKVILYNHGSNDFLINNKDRIAQMVLTPVVKIDLEETDDLPNTVRGKGGFGSTGK

SEQ ID NO: 172299 - protein, 133 aa, Unknown
  Bacterial polypetide isolated from the Sargasso Sea
GSAGIDLPAAIEGSASIDPGARLLIPTGFAFSIPRTYEGQVRPRSGLALKYGVTVLNSPGTIDSDYRGEVSVLLINQGNKTFFFERGDRIAQMVFTKVEQVKFQEVEALDTSDRGLGGYGSTGLSKNSESSML

SEQ ID NO: 172300 - protein, 145 aa, Unknown
  Bacterial polypetide isolated from the Sargasso Sea
MIKILIRKLDTKIPLPKYETDGSSGMDLSAYLKNDLVIAPNEKKMIPTGLMAAVPKGYEIQIRPRSGLAAKNSITVLNTPGTIDSDYRGEIKVILFNHGKENFKIENNMRIAQMVVCPVTMAEVCEVDKLDETERGKGGFGSTGK

SEQ ID NO: 172301 - protein, 116 aa, Unknown
  Bacterial polypetide isolated from the Sargasso Sea
ACVDEPVTIKPNESKLIPTGIAIAIPEDTEIQIRPRSGLAVKSSISVLNTPGTIDSDYRGELKIILFNHGKDEFTVNDEDRVAQMVLMPILKVEIEETNELPDTIRGSGGFGSTGK

SEQ ID NO: 172302 - protein, 145 aa, Unknown
  Bacterial polypetide isolated from the Sargasso Sea
MIKVLVKKLKHSVKLPSYKTNGASGMDLMAYIDKSIELKAGESCLIPTGLSVAFPKEYEIQIRPRSGLAAKSNISVLNTPGTIDSDYRGEIKVILFNHGNKSFKINNNDRIAQMILTPVIKMDLEETNELPESIRGAGGFGSTGK

SEQ ID NO: 172303 - protein, 153 aa, Unknown
  Bacterial polypetide isolated from the Sargasso Sea
MTKSHLIKISIKNLSKLDNFKIPSYQSDEASGVDLSASINSQIEIHPWEREIIPCGISIAMPKGFEAQIRPRSGLAFKNGITILNTPGTIDSDYRGEIKVVLINLSNTSFAINPGDRIAQMIFANTIHVKFEEVDDLEKTRRGDSGFGSTGKI

SEQ ID NO: 172304 - protein, 145 aa, Unknown
  Bacterial polypetide isolated from the Sargasso Sea
MAKVLIKKLDPAVELPAYKTEGASGMDLMALVKEPINLKPNSSCLVPTGLAVAFSTDFEIQIRPRSGLAAKNSISVLNTPGTIDSDYRGEIKVILFNHGKNDFLINNKDRIAQMILTPVIKMDLEETDDLPETIRGEGGFGSTGK

SEQ ID NO: 172305 - protein, 145 aa, Unknown
  Bacterial polypetide isolated from the Sargasso Sea
MVKVLIKKLDPAVEIPTYKTAGASGMDLMAFIKKPIILFPNTSCLVPTGLSVAISDEYEIQIRPRSGLAAKNNVSVLNTPGTIDSDYRGEIKIILFNHGKNNFTINNKDRIAQMILTPVHKMDLEEVESLPSTLRGKGGFGSTGK

SEQ ID NO: 172306 - protein, 118 aa, Unknown
  Bacterial polypetide isolated from the Sargasso Sea
RAFISKAIVLKPLERQLIPTGIKIELPIGYEAQIRPRSGLAYKNGITVLNSPGTIDSDYRGEVGVLLINLSNENFTVNNGDRIAQMVIAKHEFPVFNDSYKLKNSVRGEGGFGSTGKK

SEQ ID NO: 172307 - protein, 145 aa, Unknown
  Bacterial polypetide isolated from the Sargasso Sea
MVKVLVKKLNPKVKLPSYKTQGSSGMDLMAFIDKPIIIDPNNSALIPTGLSLAIPEDFEIQIRPRSGLASKSHISVLNTPGTIDSDYRGELKIILFNHGKKEFVVNNNERIAQMVLTPILKVDFEEVENLPDSFRGSGGFGSTGK

SEQ ID NO: 172308 - protein, 122 aa, Unknown
  Bacterial polypetide isolated from the Sargasso Sea
MLKIPIINQSPYELPSYATVSSAGMDLKAVLTSQVTLKPLERKVVGTGIKIALPEGYEAQVRPRSGLAAKKGITVLNSPGTIDADYRGEIGVILINLSSKNYMLNPGERVAQLVISRYEKVS

SEQ ID NO: 172309 - protein, 144 aa, Unknown
  Bacterial polypetide isolated from the Sargasso Sea
MVRILIVNKSSFDLPSYESNFAAGLDLRANLSEKITIAPMDRKLIPTGLFIALPKGYEAQIRPRSGTAIKYGITVLNSPGTIDSDYRGEIGIILINLSNKRFVVNSGDRIAQMVISKYEQIKWELTESLPKSNRGEKGFGSTGK

SEQ ID NO: 172310 - protein, 145 aa, Unknown
  Bacterial polypetide isolated from the Sargasso Sea
MAKVLIKKLVSSVELPTYKTDGASGMDLMAFIKEPITLKPNSSCLVPTGISVAFSNDFEIQIRPRSGLAAKNNISVLNTPGTIDSDYRGEIKVILFNHGNSDFLINNKDRIAQMILTPVIKMDLEETENLPETIRGEGGFGSTGK

SEQ ID NO: 172311 - protein, 106 aa, Unknown
  Bacterial polypetide isolated from the Sargasso Sea
KQTKLIGTGLIFEIPDGLEVQIRPRSGLALKNSITVLNSPGTIDADYRGEIKVILINHGSKVFEVKNKMRIAQMVVSKYEKVNFKLVSDLNTTKRGSGGFGSTGTN

SEQ ID NO: 172312 - protein, 95 aa, Unknown
  Bacterial polypetide isolated from the Sargasso Sea
SIAIPEDTEVQIRPRSGLAAKNNISVLNTPGTIDSDYRGEIKVILFNHGDKDFTVNNDDRIAQMILMPILKVDFETVETLPETIRGSGGFGSTGK

SEQ ID NO: 172313 - protein, 144 aa, Unknown
  Bacterial polypetide isolated from the Sargasso Sea
LKILDARMRDQLPAYATTGSAGLDLRACLDEPLTLKPGETALVPTGLAIHVGDPGYAALILPRSGLGHKHGIVLGNLVGLIDSDYQGQLMIWTWNRGETKFVLNPMERLAQLVIVPVVQAEFNIVDDFESSERGAGGFGSTGKH

SEQ ID NO: 172314 - protein, 151 aa, Unknown
  Bacterial polypetide isolated from the Sargasso Sea
MKNVKLKILNSLIGKNIPIPKYKTNGSAGLDLRACIDKKLILRPSKTEMIPMGFAMHLEDEGLAALVVPRSGLGSKHGIVLGNLVGLIDSDYQGELMVPAWNRSNKLYEINPGDRIAQMIIVPIVQASFEIVEDFEISERGTKGFGSSGIN

SEQ ID NO: 172315 - protein, 145 aa, Unknown
  Bacterial polypetide isolated from the Sargasso Sea
MVKVLIKKLDPKVKLPEYKTAGASGMDLLAFIRKPLTVKPKTSSLIPTGLSVAFSEDYEIQIRPRSGLAAKNNISVLNTPGTIDSDYRGEIKVIIYNHSDNDFIINNGDRIAQMILTPVIKMTLEETLDLPETIRGKSGFGSTGK

SEQ ID NO: 172316 - protein, 145 aa, Unknown
  Bacterial polypetide isolated from the Sargasso Sea
MVKVLIKKLKSSVQLPSYKTSGASGMDLMAFIEEPIELKPGKSCLIPTGLSVSFSKEYEIQIRPRSGLAAKNNISVLNTPGTIDSDYRGELKVILYNHGSENFMIKNNDRVAQMVLAPIIKMELEEINELPETIRGEGGFGSTGK

SEQ ID NO: 172317 - protein, 151 aa, Unknown
  Bacterial polypetide isolated from the Sargasso Sea
MINIKLKIINSLIGSKIPLPKYETKGSAGLDLRACLDKKLALKPGTTNMIPMGFAMHLDDQNLAALVVPRSGLGSKHGIVLGNLVGLIDSDYQGELMVPAWNRSEIDFEIHPGDRIAQMIIVPVMQANFEIVEEFTESVRGTKGFGSSGLN

SEQ ID NO: 172318 - protein, 142 aa, Unknown
  Bacterial polypetide isolated from the Sargasso Sea
ILIKKLSTKVKLPKYKTDGSSGMDLMAFIDKPISIIPHKSEIIPTGLSIAIPENTEIQIRPRSGLAAKNSISVLNTPGTIDSDYRGELRVILYNHGSEEFVVNNEDRIAQMVLVPIIKATFEEVEDLPETIRGEGGFGSTGK

SEQ ID NO: 172319 - protein, 146 aa, Unknown
  Bacterial polypetide isolated from the Sargasso Sea
MTEILIKRLSKNIILPKYETSGSSGLDLSANIKTSVKIKPGKTTIIPTGISVSIPKNFEIQIRPRSGLAAKNQISVLNTPGTIDADYRGEIKVILINLSKETFIVENGARIAQMVVCPVIKAKLKEVDSLDNTSRGSDGFGSTGMK

SEQ ID NO: 172320 - protein, 145 aa, Unknown
  Bacterial polypetide isolated from the Sargasso Sea
MIKVLVKKLNPKAELPKYKTEGSSGMDLMALIEKPIIIKSQNSALIPTGLSIAIPEDTEVQIRPRSGLASKSNISVLNTPGTIDSDYRGEIKIILFNHGKEEFTVSNNDRIAQMILTPVLKAEFEEVEELPKTVRGSGGFGSTGK

SEQ ID NO: 172321 - protein, 74 aa, Unknown
  Bacterial polypetide isolated from the Sargasso Sea
KISVLNTPGTIDSDYRGEIKVILINQGQETFKVEKGLRIAQMVVCPVVQAQIKEVEDLSETERGKGGFGSTGSK

SEQ ID NO: 172322 - protein, 145 aa, Unknown
  Bacterial polypetide isolated from the Sargasso Sea
MAKVLIKKLDPAVELPAYKTEGASGMDLMALVKEPINLKPNSSCLVPTGLAVAFSSDFEIQIRPRSGLAAKNNISVLNTPGTIDSDYRGEIKVILFNHGKSDFLINNKDRIAQMILTPVIKMDLEETDDLPETIRGEGGFGSTGK

SEQ ID NO: 172323 - protein, 145 aa, Unknown
  Bacterial polypetide isolated from the Sargasso Sea
MAKVLIKKLNPRVELPAYKTEGASGVDLMALVKEPINLKPNSSCLVPTGLAVAFSSDFEIQIRPRSGLAAKNSISVLNTPGTIDSDYRGEIKVILFNHGKNDFLINNKDRIAQMILTPVIKMDLEETDDLPKTIRGEGGFGSTGK

SEQ ID NO: 172324 - protein, 93 aa, Unknown
  Bacterial polypetide isolated from the Sargasso Sea
MPKGLEAQIRPRSGLAFKHGITILNTPGTIDSDYRGEIKVVLINLSKDEFTIHPKDRIAQMVFTNAIQVKFKEVQNLDQTKRGDGGFGSTGKD

SEQ ID NO: 172325 - protein, 113 aa, Unknown
  Bacterial polypetide isolated from the Sargasso Sea
KQPIKLAPKSSCLVPTGLSVAFSEEYEIQIRPRSGLAAKNNISVLNTPGTIDSDYRGEIKIILFNHGDNEFVINNKDRVAQMILMPVKKMELEEVENLPNTLRGEGGFGSTGK

SEQ ID NO: 172326 - protein, 145 aa, Unknown
  Bacterial polypetide isolated from the Sargasso Sea
MVKVLFKRLDPKAKVPKYKTDGSSGLDLMALIKKPIIIKPQQSELIPTGISVAIPQDTEIQIRPRSGLAAKANISVLNTPGTIDSDYRGEIKIILFNHGKEEFIVNNNDRIAQMVLMPVLKIEFDEVDDLPETIRGSGGFGSTGK

SEQ ID NO: 172327 - protein, 103 aa, Unknown
  Bacterial polypetide isolated from the Sargasso Sea
LAFIPTGITVAIPNDLEIQIRPRSGLAAKSNISVLNTPGTIDSDYRGEIKIILFNHGNKKFIVKNNDRVAQMVLTPILKVDFEEVEILPKTLRGSGGFGSTGK

SEQ ID NO: 172328 - protein, 99 aa, Unknown
  Bacterial polypetide isolated from the Sargasso Sea
PTGISIAFPEEFEVQIRPRSGLAAKQSIGVLNTPGTIDSDYRGELKVILFNHGENEFVVNCDDRIAQMVLTPVLKIEFEEVNDLPETLRGSGGFGSTGK

SEQ ID NO: 172329 - protein, 145 aa, Unknown
  Bacterial polypetide isolated from the Sargasso Sea
MVKILFKKLNSKVKLPKYKTDGSSGMDLMAFINKPISIMPQKSELIPTGISIAIPENTEVQIRPRSGLAAKNYISVLNTPGTIDSDYRGELKVILYNYGTKEFIVNNEDRIAQMVLVPVIKATFEEVEQLPDTIRGDGGFGSTGK

SEQ ID NO: 172330 - protein, 80 aa, Unknown
  Bacterial polypetide isolated from the Sargasso Sea
SGLAAKSQIGVLNTPGTIDSDYRGELKVILFNHGMDDFIVNNGDRIAQMVLMPVLKASFEEVDELPDTFRGSGGFGSTGK

SEQ ID NO: 172331 - protein, 135 aa, Unknown
  Bacterial polypetide isolated from the Sargasso Sea
MASKPEYGSGEAAGLDLKAAINNKVIIKSMDYTTVPTGLIIEIPNGFEGQIRPRSGLASKNGISVLNSPGTIDSDYRGEIKVILINLGQDNFQILPGMKVAQLIVAPIYKAKINYVKKIDSKTKRGKKGFGSTGL

SEQ ID NO: 172332 - protein, 112 aa, Unknown
  Bacterial polypetide isolated from the Sargasso Sea
ESFIIKPNNSELIPTGISIAIPKETEIQIRPRSGLAAKSRISVLNTPGTIDSDYRGELKVILFNHGVDDFIVNNGDRIAQMVLMPVLKASFEEVDELPDTVRGSGGFGSTGK

SEQ ID NO: 172333 - protein, 81 aa, Unknown
  Bacterial polypetide isolated from the Sargasso Sea
SGLAAKKKITVLNTPGTIDSDYRGEIKVILINLGLESFKIEKGLRIAQMVVCPVEQVQIEEVEDLSETDRGIGGFGSTGSK

SEQ ID NO: 172334 - protein, 104 aa, Unknown
  Bacterial polypetide isolated from the Sargasso Sea
FLVPTGIKLRIPRGYEGQVRPRSGLALNNGITVLNSPGTIDSDYRGEVKIILINHSSKMFTIKPNMRIGQIVFAPIVKIQLQLGDINIFETNRSSKGFGSTGLE

SEQ ID NO: 172335 - protein, 91 aa, Unknown
  Bacterial polypetide isolated from the Sargasso Sea
SEKYEIQIRPRSGLAAKNNISVLNTPGTIDSDYRGEIKIILFNHSKENFTINNNDRIAQMVLTPIIKVKLEETNELPESTRGEGGFGSTGK

SEQ ID NO: 172336 - protein, 149 aa, Unknown
  Bacterial polypetide isolated from the Sargasso Sea
MLDSVQVKIVNNIVKELPDYATEGSAGLDLRAAINKKMKLHSKETILIPTGLSIFIENKDYAATLLPRSGLGHKKGIVLGNLVGLIDSDYQGELMISCWNRSKENYIIEPLDRIAQMIFIKVEHPKLEIVDEFRTSKRGEKGFGSSGKK

SEQ ID NO: 172337 - protein, 145 aa, Unknown
  Bacterial polypetide isolated from the Sargasso Sea
MAKVLIKKLDPAVELPAYKTEGASGMDLMALVKKPINLKPSSSCLVPTGLAVAFSSDFEIQIRPRSGLAAKNEISVLNTPGTIDSDYRGEIKVILFNHGKSDFLINNKDRIAQMILTPIIKMDLEETDDLPDTVRGEAGFGSTGK

SEQ ID NO: 172338 - protein, 145 aa, Unknown
  Bacterial polypetide isolated from the Sargasso Sea
MVKILFKRLSSKVKLPKYETDGSSGMDLMAFLNKPVHLMPQKSELIPTGLSIAIPNDTEVQIRPRSGLAAKNNISVLNTPGTVDSDYRGEIKVILYNHGDKEFVINNEDRIAQMVIVPIIKATFEEVQDLPETIRGEGGFGSTGK

SEQ ID NO: 172339 - protein, 92 aa, Unknown
  Bacterial polypetide isolated from the Sargasso Sea
PKGFEVQIRPRSGLAAKKKISVLNTPGTIDSDYRGEIKVILINQGQETFNVEKGLRIAQMVVCPVAQAQIKEVEDLSETERGKGGFGSTGSK

SEQ ID NO: 172340 - protein, 132 aa, Unknown
  Bacterial polypetide isolated from the Sargasso Sea
MSNEVSLPKYETNGSSGMDLAANINSSININPGKIEIIPTGLALSIPKGFEVQIRPRSGLAAKNKITVLNTPGTIDADYRGEIKVILINLGQETFKVEKGLRIAQMVVCPIVQVELKEVNNLSHTERGKGGF

SEQ ID NO: 172341 - protein, 96 aa, Unknown
  Bacterial polypetide isolated from the Sargasso Sea
MKKIKLKILNPLIGNKIPVPKYETKGSAGLDLRACVKEKLILKPGKTEMIPMGFAMHLEDESLAALVVPRSGLGSKHGIVLGNLVGLIDSDYQGEL

SEQ ID NO: 172342 - protein, 83 aa, Unknown
  Bacterial polypetide isolated from the Sargasso Sea
RPRSGLAAKFNISVLNTPGTIDSDYRGEIKIILFNHGNEEFIVNNKDRVAQMILLPILKVDFEEVDNLPDTLRGSGGFGSTGK

SEQ ID NO: 172343 - protein, 149 aa, Unknown
  Bacterial polypetide isolated from the Sargasso Sea
MTRPVIRIMRLPHGQDTPLPAYATEGAAGMDICAAVDADLTLSPGARIAVPTGLAMAIDHGYEVQLRSRSGLALKNGVSLANAPGTIDSDYRGEVKVILVNFGDTDFVVSRGMRIAQMVIAPVTRCHIETVTELTDTSRGDGGFGSTGV

SEQ ID NO: 172344 - protein, 145 aa, Unknown
  Bacterial polypetide isolated from the Sargasso Sea
MVKVLVKKLDAKVKLPEYKTIGSSGMDLMAFLDSPIKITPNSLELIPTGLSIAIPEDLEIQIRPRSGLAVKSSISILNTPGTIDSDYRGELKIILFNHGTEEFTINNNDRVAQMVLTPIIKMELEEVDQLPDSIRGSGGFGSTGK

SEQ ID NO: 172345 - protein, 151 aa, Unknown
  Bacterial polypetide isolated from the Sargasso Sea
MKKVKLKILNPLIGNEIPIPKYETKGSAGLDLRACIKDKLILKPGKTEMIPMGFAMHLEDKSLAALVIPRSGLGSKHGIVLGNLVGLIDSDYQGELMVPAWNRSEQEFEINSGDRIAQMIIVPIVQADFEIVEDFEESERGAKGFGSSGLD

SEQ ID NO: 172346 - protein, 158 aa, Unknown
  Bacterial polypetide isolated from the Sargasso Sea
MASKIQILTESIPGNEDIPLPFYGSSASAGADLHAAIKDVLIIQPRERRIIPTGIKLMIPDGYEGQIRPRSGIALKHGVTVLNSPGTIDSDYRGEIGVLLINHGSKPYKISRGERIAQLIIAPYIQLDFTSTKIQTDTERGEMGFGSTGVSSKIIKDK

SEQ ID NO: 172347 - protein, 87 aa, Unknown
  Bacterial polypetide isolated from the Sargasso Sea
EIQIRPRSGLAAKNNISVLNTPGTIDSDYRGELKVILYNHGDEEFIVNNGDRIAQMVLVPIIKANLEEVKDLPETIRGEGGFGSTGK

SEQ ID NO: 172348 - protein, 151 aa, Unknown
  Bacterial polypetide isolated from the Sargasso Sea
MKKVKVKILNTLIGNEIPIPKYETKGSAGLDLRACIKDKLILKPGKTEMIPMGFAMHLEDKKLAALVVPRSGLGSKHGIVLGNLVGLIDSDYQGELMVPAWNRSEQEFEINSGDRIAQMIIVPIVQADFEIVEDFEESERGAKGFGSSGLD

SEQ ID NO: 172349 - protein, 148 aa, Unknown
  Bacterial polypetide isolated from the Sargasso Sea
MKVKILNPLIGDSIPLPEYSTEGSAGLDLRACVEESFVLKPQECQLIPLGFSIYIEDPTLSGLVIPRSGLGSKHGIVMGNLVGLIDSDYQGELKVPLWNRSTEDFLVSSGDRIAQMILVPIKQAKLRVVEYFSETDRGTKGFGSSGVE

SEQ ID NO: 172350 - protein, 132 aa, Unknown
  Bacterial polypetide isolated from the Sargasso Sea
PQIATEGSAGMDMRACIDSELTVSPGDTVLVPTGIAIHIADNNLAAVLLPRSGLGHKHGLVLGNLTGLIDSDYQGQIFISCWNRGEKAYKINPGDRIAQMVFIPVEQVKFEVVDDFKESDRGEGGFGHSGKS

SEQ ID NO: 172351 - protein, 146 aa, Unknown
  Bacterial polypetide isolated from the Sargasso Sea
MTKILIKRLSKEVPLPKYETSGSSGMDLAANINANIDINPGKTAIIPTGLALSIPKGFEVQIRPRSGLAANQKISVLNTPGTIDADYRGEIKVILINLGRESFKVEKGLRIAQMVVCPVIQAQLKEVDDLNETERGKGGFGSTGTK

SEQ ID NO: 172352 - protein, 152 aa, Unknown
  Bacterial polypetide isolated from the Sargasso Sea
MKTPIELKILDSRIGSEFPLPAYATPGSAGMDLRAMIDTTMTIAPGETQLIPTGIAIHVADPGLAAVILPRSGLGHKHGIVLGNLVGLIDSDYQGPLMVSCWNRSDTPFTLEIGDRLAQLVFVPVVQAQFKLVDEFDSSDRGEGGFGHSGTK

SEQ ID NO: 172353 - protein, 151 aa, Unknown
  Bacterial polypetide isolated from the Sargasso Sea
MKKVKLKILNTLIGNEIPIPKYETKGSAGLDLRACIKEKLILKPGKTEMIPMGFAMHLEDESLAALVVPRSGLGSKYGIVLGNLVGLIDSDYQGELMVPAWNRSEQEFAINSGDRIAQMIIVPIVQANFEIVEDFKKSERGAKGFGSSGID

SEQ ID NO: 172354 - protein, 148 aa, Unknown
  Bacterial polypetide isolated from the Sargasso Sea
MKLDLKILDARMRDYLPAYATTGSAGLDLRACLDAPVTLQPGETTLVPTGLAIHLADPGYAALILPRSGLGHKHGIVLGNLVGLIDSDYQGQLMVSTWNRGQTEFVLNPFERLAQLVIVPVVQAQFNIVDDFAESDRGEGGFGSTGRH

SEQ ID NO: 172355 - protein, 118 aa, Unknown
  Bacterial polypetide isolated from the Sargasso Sea
MIGSKIPLPKYETKGSAGLDLRACLDKKLVLKPGTTNMIPMGFAMHLDDENLAALVVPRSGLGSKHGIVLGNLVGLIDSDYQGELMVPAWNRSEIDFEIHQGDRIAQMIIVPVMQANF

SEQ ID NO: 172356 - protein, 146 aa, Unknown
  Bacterial polypetide isolated from the Sargasso Sea
MTEVLIKRLSKNIELPKYETNGSSGMDLSANIEKQIKIEPGKTSIIPTGISVSIPENFEIQIRSRSGLAAKSQVAVLNSPGTIDADYRGELKVILINLSNKTFVVEKGARIAQMVLCPIVKAKFKEVDKLEDTIRGEGGFGSTGLK

SEQ ID NO: 172357 - protein, 157 aa, Unknown
  Bacterial polypetide isolated from the Sargasso Sea
MQDSPNRKIIDLKVLDKRIGDTFDMPDYQTSGSAGIDLLACLDEPLTIQPGDTELIPSGIAVYIRDPSLAAVLLPRSGLGHKKGLVLGNLVGLIDSDYQGQVFISCWNRGKESCVIEPGMRLAQMVFLPIQQVNFNLVESFEESDRGEGGFGHTGEG

SEQ ID NO: 172358 - protein, 152 aa, Unknown
  Bacterial polypetide isolated from the Sargasso Sea
MTTQIELKILDARIGTEYPLPAYATPGSAGMDLRALLDAPLTLAPGDTTLVPTGLAIHIQDPGLCATILPRSGLGHKHGIVLGNLVGLIDSDYQGQLMVSVWNRGNDSFTMQPGERIAQLVIMPVVQASFQLVDEFNQSERGEGGFGSSGRQ

SEQ ID NO: 172359 - protein, 145 aa, Unknown
  Bacterial polypetide isolated from the Sargasso Sea
MIKVLIKKLNSKVQLPKYKTVGSSGMDLMALIEKPIIIKPQKSALIPTGLSIAIPEDTEVQIRPRSGLAVKSSISVLNTPGTIDSDYRGEIKIILFNHGKDEFTVNNNDRIAQMIVVPVLKAEFEQVEELPISVRGSGGFGSTGK

SEQ ID NO: 172360 - protein, 377 aa, Unknown
  Bacterial polypetide isolated from the Sargasso Sea
QIFSYLKNYFDKRNIVKDRNLKALVTAGPTREYIDPIRYISNESSGKQGHEIAVALNKLGIKTVLITGPSKLTAPKGIKVKKIISAEEMLSEVKKSLPVDLAVCTAAVTDFKPAKKSKNKIKKDELNFKSINFIKNDDILDFLSKNNKNRPKIVAGFSAETKNVIKNSSLKMKNKNCDLIFANDVSKKDIGFNSDFNKVSVIDQKGNIKIIPKNKKSFIANKIAHILLDKLLDDRNLIKRLSDNVSLPKYETEGSSGMDLAANINKKIEIKPGTTVLVPTGISVSIPKNFEIQIRPRSGLAAKNQISVLNTPGTIDADYRGEIKVILINLGTKSFMIENGTRIAQMVLCPIAKAKLKEVKILESTKRGSGGFGSTGT

SEQ ID NO: 172361 - protein, 145 aa, Unknown; identical to SEQ ID NO: 172310
  Bacterial polypetide isolated from the Sargasso Sea

SEQ ID NO: 172362 - protein, 145 aa, Unknown
  Bacterial polypetide isolated from the Sargasso Sea
MIKVLVKKLNSSAKLPSYKTNGASGMDLMACINEPIDLKPGESFLVPTGLSVAFPEEYEIQIRPRSGLAAKNSISILNTPGTIDSDYRGEIKIILFNHGNKNFKINKNDRIAQMILTPVIKMDLEETNELPVSIRGERGFGSTGK

SEQ ID NO: 172363 - protein, 78 aa, Unknown
  Bacterial polypetide isolated from the Sargasso Sea
LAAKNNISVLNTPGTIDSDYRGEIKIILYNHGSDNFVINNRDRIAQMVLTPIQKMELEEVKDLPESIRGKGGFGSTGK

SEQ ID NO: 172364 - protein, 146 aa, Unknown
  Bacterial polypetide isolated from the Sargasso Sea
MTEILIKRLSKDVALPKYETEGSSGLDLTANTDKQIKILPGRSEVIPTGLAVAIPKNFEIQIRPRSGLAAKSQISVLNTPGTIDSDYRGELKVILINLSDKIFVVEKGLRIAQMVLCPVVKATLKEVTELENTKRGSGGFGSTGIK

SEQ ID NO: 172365 - protein, 151 aa, Unknown
  Bacterial polypetide isolated from the Sargasso Sea
MKKVKLKILNPLIGNEIPIPKYETKGSAGLDLRACIKDKLILKPRKTEMIPMGFAMHLEDESLAALVIPRSGLGSKHGIVLGNLVGLIDSDYQGELMVPAWNRSEQEFEINSGDRIAQMIIVPIVQADFEIVEDFEESERGAKGFGSSGLD

SEQ ID NO: 172366 - protein, 103 aa, Unknown
  Bacterial polypetide isolated from the Sargasso Sea
KLILTGIYIKIPRGYEAQVRPRSGLALKKGITVLNSPGTIDSDYRGEIGVILINHSTVDYEVKSGERIAQLVFSKHENFHWENVKHIDSSSRGEGGFGSTGTN

SEQ ID NO: 172367 - protein, 145 aa, Unknown
  Bacterial polypetide isolated from the Sargasso Sea
MVKVLIKKLDPTVELPAYKTEGASGMDLMALLNEPINLKPNSSCLVPTGLSVAFSSDFEIQIRPRSGLAAKNSISVLNTPGTIDSDYRGEIKVILFNHGKSDFLINNKDRIAQMILTPVIKMDLEETDDLPETIRGEGGFGSTGK

SEQ ID NO: 172368 - protein, 157 aa, Unknown
  Bacterial polypetide isolated from the Sargasso Sea
MQDSPTRKIIDLKVLDKRIGDTFEMPDYQTSGSAGIDLLACLDEPMTIQPGDTELIPSGIAVYIRDPSLAAVLLPRSGLGHKKGLVLGNLVGLIDSDYQGQVFISCWNRGKENCVIEPGMRLAQMVFLPIQQVNFNLVEHFEESDRGEGGFGHTGEG

SEQ ID NO: 172369 - protein, 145 aa, Unknown
  Bacterial polypetide isolated from the Sargasso Sea
MVKVLIKKLDPAVQLPEYKTSGASGVDLIAFIKEPINLEPKTSVLIPTGLSVAFPEDYEIQIRPRSGLAAKNNISVLNTPGTIDSDYRGEIKVIIYNHGNENFSINDGDRIAQMILAPVVKMELEEKNDLPKSIRGKGGFGSTGK

SEQ ID NO: 172370 - protein, 145 aa, Unknown
  Bacterial polypetide isolated from the Sargasso Sea
MIKVLVKKLNPKVELPKYKTEGSSGMDLKALIEKPVIIKPQNSVLIPTGLSIAIPEDTEVQIRPRSGLAAKSSISVLNTPGTIDSDYRGEIKIILFNHGKEEFIVNNGDRIAQMILMPVIKAEFEEIKELPKTVRGSGGFGSTGK

SEQ ID NO: 172371 - protein, 145 aa, Unknown
  Bacterial polypetide isolated from the Sargasso Sea
MVKILIKKLNSKVKLPKYKTKGSSGMDLMAFLEKSVTILPQKSELIPTGLSIAIPKNTEVQIRPRSGLAVKNNISVLNTPGTIDSDYRGEIKVILYNHGNKGFIVNNEDRIAQMVLVPIIKANFEEVENLPETIRGKGGFGSTGK

SEQ ID NO: 172372 - protein, 152 aa, Unknown
  Bacterial polypetide isolated from the Sargasso Sea
MKKAIDLKILDPRIGTEFPLPAYATPGSAGLDLRACLDAEVQLAPGQTTLIPTGLAIHIGDANLCATILPRSGLGHKHGIVLGNLVGLIDSDYQGQLMVSMWNRSQEDFTIQPGDRIAQLVFMPVVQAEFNIVSDFDASDRGEGGFGHSGRQ

SEQ ID NO: 172373 - protein, 157 aa, Unknown
  Bacterial polypetide isolated from the Sargasso Sea
MQDSSKSKIIDLKILDKRIGDTFEMPDYQTIGSAGIDLLACLEDTLTLQPGNTELIPSGIAVYIRDPSLAAVLLPRSGLGHKKGLVLGNLVGLIDSDYQGQVFISCWNRGKEDCVIEPGMRLAQMVFLPIEQVSFNVVDSFDESDRGEGGFGHTGEG

SEQ ID NO: 172374 - protein, 103 aa, Unknown
  Bacterial polypetide isolated from the Sargasso Sea
KLIPTGIYIKIPRGYEAQVRPRSGLALKKGITVLNSPGTIDSDYRGEIGVILINHSAVDFEVKSGERIAQLVFSKHENFHWENVKHIDSSSRGEGGFGSTGTN

SEQ ID NO: 172375 - protein, 146 aa, Unknown
  Bacterial polypetide isolated from the Sargasso Sea
MIKILIKRLSKEVSLPKYETSGSSGMDLAANINSKVNIDPGKTAVIPTGLAVSIPKGYEVQIRPRSGLAAKKKITVLNTPGTIDADYRGEIKVILINLSKDSFEVEKGLRIAQMVVCPIVQAQLKEVDDLKQTERGEGGFGSTGTK

SEQ ID NO: 172376 - protein, 131 aa, Unknown
  Bacterial polypetide isolated from the Sargasso Sea
MPKYQSKEASGVDLCASIKSDITIPPWEKEIIACGISVSMPTGMEAQVRPRSGLAFKHGITVLNTPGTIDSDYRGEIKVILINLSKEKFIVRPLERIAQMVFSNVTKVEFKEVDNLDETNRGQGGFGSTGK

SEQ ID NO: 172377 - protein, 145 aa, Unknown
  Bacterial polypetide isolated from the Sargasso Sea
MIKVLVKKKDPSVKLPSYKTNGASGMDLMAYIDKSIELKPGESCLVPTGLSVAFPEEYEIQIRPRSGLAAKNNISVLNTPGTIDSDYRGEIKVILFNHGNKNFKIDNNDRIAQMILTPVVKIDLEETNELPESVRGVGGFGSTGK

SEQ ID NO: 172378 - protein, 145 aa, Unknown
  Bacterial polypetide isolated from the Sargasso Sea
MVKVLIKKLDEKVKLPEYKTTGSSGLDLTAFIEKKIVIKPGENALVPTGISIAIPEDSEVQIRPRSGLAAKNNISVLNTPGTIDSDYRGEIKVILFNHGDKDFTVNNDDRIAQMILMPILKVDFETVETLPETIRGSGGFGSTGK

SEQ ID NO: 172379 - protein, 141 aa, Unknown
  Bacterial polypetide isolated from the Sargasso Sea
KTSKLKDFDIPSYQTDEAAGVDLSASIENSIKIRPWEREIIPCGISIAMPKGLEAQIRPRSGLAFKHGITILNTPGTIDSDYRGEIKVVLINLSKYEFTIHPKDRIAQMVFTNTIQVKFKEVENLNQTKRGDGGFGSTGKD

SEQ ID NO: 172380 - protein, 152 aa, Unknown
  Bacterial polypetide isolated from the Sargasso Sea
MNKISVPVIKLLNGADLPLPDYATADSAGLDLMAAIDAPKSLAPGERALIPSGLAIALPGGYEAQVRPRSGLAYKNGITVLNSPGTIDADYRGEVGIILINHGDETFVIERGMRIAQLVITAVSQLIWDEVETLPETTRGEEGFGSTGVKSG

SEQ ID NO: 172381 - protein, 145 aa, Unknown
  Bacterial polypetide isolated from the Sargasso Sea
MVKVLIKKLNPEAKLPNYKTKGSSGMDLMACLDRSIKIFPGKSAIVPTGLSIAIPDDTEVQIRPRSGLAAKSSISVLNTPGTIDSDYRGEIKIILFNHGDTEFVVNNNDRIAQMILVPILKVEFEEVKDLPNTIRGSGGFGSTGK

SEQ ID NO: 172382 - protein, 145 aa, Unknown
  Bacterial polypetide isolated from the Sargasso Sea
MIKVLVKKLKPSVKLPSYKTDGASGMDLMAYIDKSIELKPGESCLVPTGLSVAFPKEYEIQIRPRSGLAAKSNISVLNTPGTIDSDYRGEIKVILFNHGNKSFKINNNDRIAQMILTPVIKMDLEETNELPDSIRGAGGFGSTGK

SEQ ID NO: 172383 - protein, 145 aa, Unknown
  Bacterial polypetide isolated from the Sargasso Sea
MVKVLIKKLDPAVKIPSYKTSGASGMDLMAFIKEPIKLPAKKSCLVPTGISIAMSDDYEIQIRPRSGLAAKKNISILNTPGTIDSDYRGEIKIILFNHGDNEFIIQNKDRIAQMVLMPVHKINFEEVENLPDTVRGKGGFGSTGK

SEQ ID NO: 172384 - protein, 153 aa, Unknown
  Bacterial polypetide isolated from the Sargasso Sea
MANPPFSEVHIKKISKLKDFDVPSYQTDEAAGVDLSASIENSIKIRPWEREIIPCGISIAMPKGLEAQIRPRSGLAFKHGITILNTPGTIDSDYRGEIKVVLINLSKDEFTIHPKDRIAQMVFTKAIQVKFREVQNLDQTKRGDGGFGSTGKD

SEQ ID NO: 172385 - protein, 145 aa, Unknown
  Bacterial polypetide isolated from the Sargasso Sea
MVKVLVKKLNPKVQLPSYKTDGASGMDLMAFVENSVKIAPNNSALIPTGISVAMPNDVEIQIRPRSGLAAKSKISVLNTPGTIDSDYRGEIKVILFNHGSDEFIVNNKDRVAQMILTPILKIDFEEVDDLPKTIRGSGGFGSTGK

SEQ ID NO: 172386 - protein, 120 aa, Unknown
  Bacterial polypetide isolated from the Sargasso Sea
MDLSAFIENDILIKPNERELIPTGIAVSLPQNIEGQVRPRSGLSLKYGITVLNSPGTIDSDYRGEIKVILINHGNEDFIIKNNDRIAQLVFNEVVKVSFKEVKDLDQTSRNQKGFGSTGK

SEQ ID NO: 172387 - protein, 145 aa, Unknown
  Bacterial polypetide isolated from the Sargasso Sea
MVKILVKKINSKVKLPSYKTDGSSGMDLMAFLDKPISILPQQSRLIPTGLFIAIPDNTEVQIRPRSGLAVKNNISVLNTPGTIDSDYRGELKVILYNYGNEEFIVKNEDRIAQMVLMPIIKASFEEVENLPETIRGEGGFGSTGK

SEQ ID NO: 172388 - protein, 146 aa, Unknown
  Bacterial polypetide isolated from the Sargasso Sea
MIKVLIKKLNQKVKIPSYKTTGSSGVDLEAFLENPIEIGPNKSALIPTGLAIAIPEDTEVQIRPRSGLAAKSSIGVLNSPGTIDSDYRGEIKIILFNHGNEKFLVNNGDRIAQMVLMPVLKFEFEETKDLPDTLRGSGGFGSTGKK

SEQ ID NO: 172389 - protein, 146 aa, Unknown
  Bacterial polypetide isolated from the Sargasso Sea
MIKVLIKKLNQKVKIPSYKTTGSSGVDLEAFLENPIEIGPNKSALIPTGLAIAIPEDTEVQIRPRSGLAAKSSIGVINSPGTIDSDYRGEIKIILFNHGNEKFLVNNGDRIAQMVLMPVLKFEFEETKDLPDTLRGSGGFGSTGKK

SEQ ID NO: 172390 - protein, 145 aa, Unknown
  Bacterial polypetide isolated from the Sargasso Sea
MIKVQIKKLNSKVKIPKYKTEGSSGVDLEAFIEKPLIINPKSSKLIPTGISISMPKDCEVQIRPRSGLAAKSNISVLNTPGTIDSDYRGEIKIILFNHGNEKFTVNNGDRIAQMVLMPVLKFRFNEVDELTNTNRGSSGFGSTGK

SEQ ID NO: 172391 - protein, 129 aa, Unknown
  Bacterial polypetide isolated from the Sargasso Sea
ETKGSAGLDLRACIKEKLILKPGKTVMIPMGFAMHLEDESLAALVVPRSGLGSKHGIVLGNLIGLIDSDYQGELMVPAWNRSEQEFEINSGDRIAQMIIVPIVQADFEIVEDFEKSERGTKGFGSSGID

SEQ ID NO: 172392 - protein, 149 aa, Unknown
  Bacterial polypetide isolated from the Sargasso Sea
MLDKVQIRIVNNLVKSIPTYATKGSAGLDLRAAVIDKIHLRPNETLLIPTGLSIFIEDKNYAATLLPRSGLGHKNGIVLGNLVGLIDSDYQGELMISCWNRGKESYFIEPMERIAQMVFIRVEHPEFEIVEEFQNTDRGDKGFGSSGTK

SEQ ID NO: 172393 - protein, 145 aa, Unknown
  Bacterial polypetide isolated from the Sargasso Sea
MTKVLIKKIHSKAEIPSYKTVGASGVDLIAFIEKEVLISPGRSDMIPTGISVGIPKNHELQIRPRSGLAAKSQISVLNTPGTIDSDYRGEIKVILFNHGKSDFLVKNGDRIAQMVLVPILKIDFLEVDDLPETIRGDGGFGSTGK

SEQ ID NO: 172394 - protein, 145 aa, Unknown
  Bacterial polypetide isolated from the Sargasso Sea
MVKVLIKKLNSKVQLPKYKTDGSSGMDLMAFLENPINLKPQRSEIIPTGISIAIPEDTEVQIRPRSGLAAKSNISVLNTPGTIDSDYRGEIKIILFNHGKEDFVINNNDRIAQMIIMPIVKAEFEEVENLPKTLRGSGGFGSTGK

SEQ ID NO: 172395 - protein, 145 aa, Unknown
  Bacterial polypetide isolated from the Sargasso Sea
MAKVLIKKLASSVQLPTYKTSGASGMDLMAFISEPIILKPQFSCLIPTGISVAFSEEFEIQIRPRSGLAAKNNINVLNTPGTIDSDYRGEIKVILFNHGNKEFIINNNDRIAQMILTPVVKMELEETKTLPETIRGEGGFGSTGK

SEQ ID NO: 172396 - protein, 140 aa, Unknown
  Bacterial polypetide isolated from the Sargasso Sea
MIGSKIPLPKYETKGSAGLDLRACLDKKLVLKPGTTNMIPMGFAMHLDDKNLAALVVPRSGLGSKHGIVLGNLVGLIDSDYQGELMVPAWNRSEIDFEIHPGDRIAQMIIVPVMQANFEIVEEFTQTARGTKGFGSSGLN

SEQ ID NO: 172397 - protein, 147 aa, Unknown
  Bacterial polypetide isolated from the Sargasso Sea
MIDIKVKKIDDCVDLPAYETSSSAGMDIRAFLPNGNIDIAPQQTKLIGTGLIFEIPDGLEVQIRPRSGLALKNSITVLNSPGTIDADYRGEIKVILINHGSNNFEVTNKMRIAQMVVSKYEKINFKLVSDLNTTKRGSGGFGSTGTK

SEQ ID NO: 172398 - protein, 145 aa, Unknown
  Bacterial polypetide isolated from the Sargasso Sea
MAKVLIKRLSSKVELPKYKTEGSSGLDLMAFIEKSIKLNPNESVLVPTGISVAIAEDLEIQIRPRSGLAAKSNISVLNTPGTIDSDYRGEIKVILFNHSNNEFIINNKDRIAQMVLAPIIKAEFEEVDELPDTIRGEGGFGSTGK

SEQ ID NO: 172399 - protein, 146 aa, Unknown
  Bacterial polypetide isolated from the Sargasso Sea
MTKILIKPFSKKVLIPKYETSGSSGMDISAFIEKNIEINPGEKALISTGFSVSIPKGFEIQIRPRSGLAAKKGISVLNTPGTIDADYRGEIKVILINLGKEKFIVENGLRIAQMIVSPVIQAELEEVNELSETVRGTGGFGSTGTK

SEQ ID NO: 172400 - protein, 147 aa, Unknown
  Bacterial polypetide isolated from the Sargasso Sea
MAKILFKVLENGKGLYNLKKATKDSAGFDLVAAVSEDQILKKNQTVLIPCGFSIEMPENYEAQVRPRSGIALKNSVTVLNSPGTIDADYRGEIGVILINHGTKEFIISRGMRIAQIIFAELPKVKLEEVKKLKSTKRNTGGFGSTGT

SEQ ID NO: 172401 - protein, 99 aa, Unknown
  Bacterial polypetide isolated from the Sargasso Sea
MHVEIINKSNNPNPEYQTDQSAGMDLRAYLEKNENIAPGEYKLIPTGIYIKIPRGYEAQVRPRSGLALKKGITVLNSPGTIDSDYRGEIGVILINHSAV

SEQ ID NO: 172402 - protein, 143 aa, Unknown
  Bacterial polypetide isolated from the Sargasso Sea
MNPLIGNKIPVPKYETKGSAGLDLRACIKEKLILKPGKTVMIPMGFAMHLEDESLAALVVPRSGLGSKHGIVLGNLIGLIDSDYQGELMVPAWNRSEQEFEINSGDRIAQMIIVPIVQADFEIVEDFEKSERGTKGFGSSGID

SEQ ID NO: 172403 - protein, 145 aa, Unknown
  Bacterial polypetide isolated from the Sargasso Sea
MAKVLIKKLSSSVELPNYKTDGASGMDLMAFIKEPITLKPNSSCLVPTGISVAFSSDFEIQIRPRSGLAAKNNISVLNTPGTIDSDYRGEIKVILFNHGNSDFLINNKDRIAQMILTPVIKMDLEETENLPETIRGEGGFGSTGK

SEQ ID NO: 172404 - protein, 120 aa, Unknown
  Bacterial polypetide isolated from the Sargasso Sea
MDLMAFIKEPITLKPNSSCLVPTGLSVAFSKDFEIQIRPRSGLAAKNSISVLNTPGTIDSDYRGELKVILFNHGNNDFLINNKDRIAQMILTPVVKMDLEETDNLPETIRGEGGFGSTGK

SEQ ID NO: 172405 - protein, 145 aa, Unknown
  Bacterial polypetide isolated from the Sargasso Sea
MAKVLIKKLASSVKLPTYKTSGASGMDLMAFITEPIILKPQSSCLVPTGISVAFSEEFEIQIRPRSGLAAKNNISVLNTPGTIDSDYRGEIKVILFNHGNKEFIINNNDRIAQMILTPVVKMELEETETLPETIRGEGGFGSTGK

SEQ ID NO: 172406 - protein, 145 aa, Unknown
  Bacterial polypetide isolated from the Sargasso Sea
MAKVLIKRLDPAVKLPVYKTNGASGMDLIAFINKPINIKPKTSSLIPTGLSVAFSKDYEIQIRPRSGLAAKNNISVLNAPGTIDSDYRGEIKVILYNHGNNDFAINNGDRIAQMILAPVVKIELEETNNLPETIRGKGGFGSTGK

SEQ ID NO: 172407 - protein, 145 aa, Unknown; identical to SEQ ID NO: 172322
  Bacterial polypetide isolated from the Sargasso Sea

SEQ ID NO: 172408 - protein, 149 aa, Unknown
  Bacterial polypetide isolated from the Sargasso Sea
MLSEIKIILIDKHLEKIPSYSTPGSAGLDLRASLESDLVLNPNQTELVPTGISIYIENQSHAALILPRSGLGHKHGIVLGNLVGLIDSDYQGQLFVSCWNRSSVKYKIEPYDRIAQLIFINIEQPKFKVVDSFEESTRGKSGFGSSGKK

SEQ ID NO: 172409 - protein, 143 aa, Unknown
  Bacterial polypetide isolated from the Sargasso Sea
MNKLIGNEIPIPKYETKGSAGLDLRACIKDKLILKPGKTEMIPMGFAMHLEDEKLAALVVPRSGLGSKHGIVLGNLVGLIDSDYQGELMVPAWNRSKNEFVINSGDRIAQMIIVPIVQANFEIVEDFEKSERGTKGFGSSGID

SEQ ID NO: 172410 - protein, 152 aa, Unknown; identical to SEQ ID NO: 172352
  Bacterial polypetide isolated from the Sargasso Sea

SEQ ID NO: 172411 - protein, 149 aa, Unknown
  Bacterial polypetide isolated from the Sargasso Sea
MLKSIKLKILDKNLSKLPSFSTLGSAGLDLRASLTSPLIVKKQTTELIPTGIAIHINNNNYAGIILPRSGLGHKSGIVLGNLVGLIDSDYQGELKISCWNRSNKDYEIEPYDRIAQLVFINVNQPDFDVIEDFENSERGESGFGSSGKK

SEQ ID NO: 172412 - protein, 248 aa, Unknown
  Bacterial polypetide isolated from the Sargasso Sea
RPGANATGLFLFVMILRYSCRSLRYRERVMKKTGYRLLAVVVIVAAAGFGYWKLAGNPDALRKIVLEQCLPNQLQHQNPAPCAEVKPGAGYVVFKDRNGPLQYLLMPTYRINGTESPLLVEQYTPNFFWLAWQSRDFMSKTYGQDIPDSVVSLAINSRSGRTQNHFHIHISCLRPDVRAQLDANQAKISTRWLPLPGGLRGHEYLARRVTESELAQRSPFMMLAEEVPEARERMGSYALALARQSDDT

SEQ ID NO: 172413 - protein, 266 aa, Unknown
  Bacterial polypetide isolated from the Sargasso Sea
MNDIVLAFFLAVIQGITEFLPISSSAHLLLPSLLLGTKDLGLEFDIAVHAGTLCAVIYFFWGDLKQYAVSVLNVSEKDNPNKKVAINLIIATIPIVLIGGFFNDLISQRLITKEIIAFSNIIFASLLLGSFYFSKSTTKKHQNIFQLTMLMSFLIGCIQIFALIPGASRSGVVIMAGLFLGLNLRDASKFSFLLAIPTILGALVFLIGDSIASNLSLFRFELVLGFVISGLVAFFTIKYFLKFVEIVGLIPFFIYRMLLGVLLILL

SEQ ID NO: 172414 - protein, 255 aa, Unknown
  Bacterial polypetide isolated from the Sargasso Sea
MIQGITEFLPISSSGHLILISAFTEWNDQGIFTDIAVHVGTLGAVVMYLRKYIKNIIIDFFSFKKNYFTTNHLWGIKIIIATFPALIVGFIVYEYLMDYLRNVIVIAWSSIIFGIILYFADRKKNSTKKWEDLNFLEVIIIGFFQVLAFIPGASRAGVTITGARILNIKRESAAIFSMLLSIPIIIASLALSVIDIYTSNNSELNLIGPLVATIISFITALISIHFMMRILHYTNFNIFIIYRIILGITLLSIYA

SEQ ID NO: 172415 - protein, 221 aa, Unknown
  Bacterial polypetide isolated from the Sargasso Sea
MNEIIIGIIQGITEFLPISSSGHLVIFDTLSDSINLNTNDIAFLHIGTLFSIIVFYKDRLSQTFNSKNNLNHTMKTILIAIIPAVVIGLFSPIQEVIDNSDNLLTITGIAYLGFASLLLTYEFNKKNKEDGSVLFENINSKQAFYIGLAQAVALVPGVSRSGITLIVALYLGIKKSEAIYFSLLLGLPTIFGAWLLTFVQSSFAFNPEMIIPAIVSFAAGL

SEQ ID NO: 172416 - protein, 265 aa, Unknown
  Bacterial polypetide isolated from the Sargasso Sea
MDTLQVIFLALIQGLTEFLPISSSAHLILPSQLLGWSDQGLSFDVAVNTGSLFAVVIYFRHDILTLTKSWFGSLGGTQSQESKLAWWIILATIPAVIVGFTAKDFIETHFRNTLVIAITTIVFGLLLWVADRMSKAQLNEFQMGWKKALLIGFAQALALIPGTSRSGATMTAALMLGLTREAAARFSFLMSIPVSFGAAILVTKDLLESPAAIDYQALGLGIVVSFIAAYVCIHYFLKFISQIGMTPFVIYRLLLGGVLLAMLYL

SEQ ID NO: 172417 - protein, 192 aa, Unknown
  Bacterial polypetide isolated from the Sargasso Sea
MEEIKLLILGVIQGLTEFLPISSSGHIELAKTMFNMDFFYDGGLVVTLVLHIATALSTLWVFRKDILLLFKNFFKKNVNDSHIFLLKILISIIPASLAGFFFEKQIKILFNSNIFLTGSMLIITGLILYLSDKLKFDKKKVGYKHAFLIGLAQAFAILPGISRSGSTIVMALFLGISKKESSKFSFLMVIPL

SEQ ID NO: 172418 - protein, 200 aa, Unknown
  Bacterial polypetide isolated from the Sargasso Sea
MDTFQVIILALIQGLTEFLPISSSAHLILPAQLLGWEDQGLSFDVAVNTGSLFAVVIYFRNELWAMFKAWIASMVKGQHSDDSKLAWWIILATLPAVFFGFMAKDFIETHLRSAGVIAVTTVVFGLLLWWADKMSRRDLTVYQTGWRKALLIGFAQALALIPGTSRSGATMTAALMLGLSRDAAARFSFLMSVPVSLGAA

SEQ ID NO: 172419 - protein, 202 aa, Unknown
  Bacterial polypetide isolated from the Sargasso Sea
MALEIIVILSVIQGITEFLPISSSAHLIIIPELFLNIDSSRGFDVSLHFGSLLAVIYYLKKDLIKIISDTIYFKKDNKGFIILKNLIISTIPVIIVGFLVHINNLDIIRGLEVIGWTTLLFGILLGIADRNLKVIKYFKSLNLKDALVIGIAQTLAIIPGTSRSGIVITAGLYMGFSRFDASKYSLLLSIPVIIAATTLESI

SEQ ID NO: 172420 - protein, 181 aa, Unknown
  Bacterial polypetide isolated from the Sargasso Sea
MDLIQTLILAIIQGLTEFLPISSSAHLILISKIAGWNDQGLLFDISLHFGTLLAVLIYFKDDLCRMIEDPIKNRGKNIVHSDLMILVIATIPVVIAGGLFNDWIEANLRSSNVIASTSIIFGFLLLASDKVSSGGRNLTLQIGLLIGLAQILALIPGVSRSGITITMGLFMGLGRVESAQI

SEQ ID NO: 172421 - protein, 208 aa, Unknown
  Bacterial polypetide isolated from the Sargasso Sea
MDWMQALFLGLVQGLTEFLPISSTAHLRVVPHWLGWEDPGAEFSAVIQLGTLLAVLVYFWKDVQQLVVAVLVGLKNRKPFETAEAQLAWSIAAGTLPIGILGLGFKDWIKTEARAIWIIGTALIVLAVLLWLAERFSTANRSVAQLGFFRIQWIGLCQALALIPGCSRSGSTIMGGLMMGLKRDEAARFSFLLGLPAILASGFYELYG

SEQ ID NO: 172422 - protein, 142 aa, Unknown
  Bacterial polypetide isolated from the Sargasso Sea
FAVVLYFSTKFESKYSQLESISPIQSLIIGLAQCFALIPGTSRSGITISAALALGIDTKTASKFSFLLAVPTIGAIACYQLLGVDFESFVSEFENNLLGMVVSFIIAYLTIDFFIKFIDRIGFMPFIIYRIVLGALILFFLI

SEQ ID NO: 172423 - protein, 260 aa, Unknown
  Bacterial polypetide isolated from the Sargasso Sea
MIDILLIFFLAFVQGITEFLPISSSAHLLLPSLLFNVTDQGLAFDIAVHAGTLMAVIFYFKNDLKKITLSFISKNHDNDKKFGILLIIATIPIVIVGLFMSGFLESRVFGIKTIAYANISFAILLFLSFRFAKQNKSLANLTILGALFIGLIQTFALIPGASRSGTAITAALIFGLSLKEASKFSFMLAIPTIFGALTLMLLSLYSSEVTISVTPLLIGFFTSIIFAFYTIKYFLIFVEKVGMYPFVIYRIFLGIMLLAL

SEQ ID NO: 172424 - protein, 205 aa, Unknown
  Bacterial polypetide isolated from the Sargasso Sea
MDLLQILLLSFIQGLTEFLPISSSAHLILFSSFFNSNIQSLNFDVSVHLGTLFAALVYFKEEILKIISSFSRPNQEGRKLLTNLTVATLPILVLGYFVRDLVDIFLRSPEVIAYATIIFAFILYLSTKVKSKYSNLESITPKQSLIIGIAQCFALIPGTSRSGITISAALALGLTSKLASKFSFLLAIPTIGAIAWYQLLSLEFD

SEQ ID NO: 172425 - protein, 159 aa, Unknown
  Bacterial polypetide isolated from the Sargasso Sea
MSDPISALLLGILEGLTEFLPVSSTGHLLIAERWLGARSDFFNIVIQAGAILSVALVFRQRLWSLATGLGDPGNRDYVLKLATAFLVTALVGLPVRLAGWQLPETVTPVAWALVFGGVWMLLAEGFAARLPDRDSVTWKVAVGVGLAQVVAGVFPGTSR

SEQ ID NO: 172426 - protein, 258 aa, Unknown
  Bacterial polypetide isolated from the Sargasso Sea
MKLLESFILGVLQGIAEFLPISSSGHLLIAQELMNVNYQGNALEVATHLGTLLSIIVVFRNEIISLVTGIKNKKNQDYIIYVIIGTIPAIAFGLFVKIFIFDIIENIFVVAISLLITGLLLMKTKKIKIRFLPISLKIAILIGLSQAIAVFPGISRSGITIVTALYLGLCKEEATKFSFFLAIPAILGAGILTFFDQKSLILIANQPSFFALASTSSFVSGLIFLSFLLKVIRKDNFYLFSYYCFFASALSLAIFIIK

SEQ ID NO: 172427 - protein, 185 aa, Unknown
  Bacterial polypetide isolated from the Sargasso Sea
MDWMQAMFLGLVQGLTEFLPISSTAHLRVVPHWLGWEDPGAEFSAVIQLGTLLAVLVYFWKDVQQLVVAVLVGLKNRKPFETAEAQLAWSIAAGTLPIGILGLGFKEWIKTEARALWIIGTALIVLAVLLWLAERFSTANRRVAQLGFFRIQWIGLCQALALIPGCSRSGSTIMGGLMMGLKRDE

SEQ ID NO: 172428 - protein, 194 aa, Unknown
  Bacterial polypetide isolated from the Sargasso Sea
MQYTDTLFLAILQGLTEFLPISSSGHLVIGQELLNISLPGNAFEVVLHIGTLMSVLTVFRKEIKSLVVNINESSNQHYIYALIFGTIPAFLVGLFLKDYISLLFDNIRFVSLSLVFTGIMLITSKFINKRNVELTLFIGFVIGLAQAIAIIPGISRSGATICMAILMGLSAPAAARFSFLLSIPVIIGARYFNG

SEQ ID NO: 172429 - protein, 117 aa, Unknown
  Bacterial polypetide isolated from the Sargasso Sea
MTYLEGILLAIIQGLTEFLPISSSAHLILLSEFMGSNQNLFYDVSLHLGTLIAVCVYFRTDLIEMFNSVIKYKSLFNNLLLRQLFISCIPTLLLGFILVDLIDGYLRTSTVIATTTI

SEQ ID NO: 172430 - protein, 250 aa, Unknown
  Bacterial polypetide isolated from the Sargasso Sea
MLEILTGVLQGLTEFLPISSSGHLVIISSLSSELDLNTNDIAFLHIGTLFSIVFFYRKRIFEIFEDLDTFIFYFKIILAGIIPAVLIGLLTPIQNIIDESPNLILITGASYLIFSLLLIFSGKINNSEAFGIRDITVSQAFVIGIAQSVALLPGVSRSGVTLLTAIYLGVKKADAIYYSLLLGIPTIFGAWSLTFINDSFQVNTNIVLPTIVAMFTGLLAIRVLINFTTSSKLQYFGYYCLLLSVFCFIA

SEQ ID NO: 172431 - protein, 215 aa, Unknown
  Bacterial polypetide isolated from the Sargasso Sea
MDIVQVLFLSFIQGLTEFLPISSSAHLILFSDFFSSNIQSLNFDVSVHLGTLIAACVYFRDEILKILKSFTSSDKESTGKKLLVNLIIAALPILIIGFFIRDLVEIFLRSPEIIAYATISFAVILYLSTKVKTRYSQLDSISPIQSLIIGLAQCLALIPGTSRSGVTISAGLALGVESKVASRFSFLLAIPTIGAIACYQIISVDFASFASEYIS

SEQ ID NO: 172432 - protein, 248 aa, Unknown
  Bacterial polypetide isolated from the Sargasso Sea
MDWIQALVLGIVQGLTEFLPISSTAHLRIIPYLLDWQDPGTEFSAVIQLGTLMAVIIYFWNDVISLSRAAIVSLWHRKLFETSDSKLAWSIAAGTIPVVIAGLLFKDFIKTDARQLWVIGAALIIMAIGLYAAERLSKLNRQIGQLKFLQIQLIGLTQALALIPGCSRSGSTIIGGLIVGLKREEAARFSFLLGIPAILGSGIFEFLEMFEQGIIISEYQNLVIGVFASFVVGYLSIEFLLRFLRMYG

SEQ ID NO: 172433 - protein, 96 aa, Unknown
  Bacterial polypetide isolated from the Sargasso Sea
MFELQFLVLGLVQGITEFLPISSSAHLILISELTEWKDQGIFTDIAVHVGTLGAVILYLLKEIKKIIFDFFQFKNNSNFFFIKIIIATLPALIIGF

SEQ ID NO: 172434 - protein, 261 aa, Unknown
  Bacterial polypetide isolated from the Sargasso Sea
MDWIQALVLGIVQGLTEFLPISSTAHLRIIPSLLEWQDPGTEFSAVIQLGTLMAVMIYFRNDVISLSRAAIVSLWNRELFETTDSKLAWSIAAGTIPVTVFGLLFKDIIKTDARELWLVGAALIILAIGLYSAEHISRKNRHIDQLNFLKIQLIGLTQALALIPGCSRSGSTIMGGLIVGLKREEAARFSFLLGIPAILGSGIYELLDMFEEGIISSNYQNLVIGVLASFFVGYLSIEFLLRFLKIYGTLVFVIYRIVWAQ

SEQ ID NO: 172435 - protein, 234 aa, Unknown
  Bacterial polypetide isolated from the Sargasso Sea
LGFDGPKAATFEVVIQMGSILAVVAVFWRRLFGLIGIHFGQKPAQGHATLSLVHIILGMLPAVIIGLAIHSWIKANLFGPQTVMYALVAGGILLIIAEKFRPAVRSETLDDISYKQALGIGLFQCLALWPGFSRSGATISGGMLMGISRQAAAEFSFILAVPMMVAASGLDLYKSRDLLSMADFPMFAVGFITAFVVAMIAIKTFLALIRRLDFIPFAIYRFVVAFAVYLVFVA

SEQ ID NO: 172436 - protein, 181 aa, Unknown
  Bacterial polypetide isolated from the Sargasso Sea
MPAAVVGLLFIKYIKLYLFNPITVATMLVLGGLVILYAERRTHAVKIHDVDQISWKDALKVGCAQIISMIPGTSRSGATIIGGLFFGFDRKVAAEFSFFLAVPTMFAATFYDIFKHRDVLNFEQMPMFVVGFVAAFVSALIAVRTFVRFVSNHSYEVFAWYRIAFGLFILATWYFGWVSWS

SEQ ID NO: 172437 - protein, 216 aa, Unknown
  Bacterial polypetide isolated from the Sargasso Sea
MLSSIEILILSLVQGITEFLPISSAAHLVLITKYYSFINQDLLIDICLHLGSLMAIIFYFRNDLINFINNRNFLIKILIGTIPIIPVGYVLYETGLIQQLRNLEVVGWMSLLFGILLYLSDKRKIKSTIENNFTNKSAIIFGLFQVLSLIPGVSRSGITITAGRALGFNRYDSAKISFFLAIPALAAASFLGIYNIYKEGSVELNFLAIISVIFSF

SEQ ID NO: 172438 - protein, 173 aa, Unknown
  Bacterial polypetide isolated from the Sargasso Sea
MDFVQVLFLSFIQGLTEFLPISSSAHLILFSDFFSSNIQSLNFDVSVHLGTLIAACVYFKDEILQILNSFTDSDKESTGKKLLVNLIIAASPILIIGFFVRDLVEIFLRTPEIIAYATILFAVILFLSTKVKTRHSQLDSISPIQSLIIGLSQCLALIPGTSRSGITISAGLA

SEQ ID NO: 172439 - protein, 233 aa, Unknown
  Bacterial polypetide isolated from the Sargasso Sea
MDLIQIVVLSIVQGITEFLPISSSAHLILISKLFGWQDQGILFDIYVHGGSLFAIIYAFRKEVSVLIQRVFSPYNQNLLLCLIVATLPVALVGFLGGDFIEQNFRSLEFLILTTFLFAIFLYIADKYGRKTNSIESIDLKDSFIVGMFQIFALMPGVSRSAITMIGALILSYSREDAARFSFLLSIPTLSAVLLGSSIEAIQSEETIDWSILILGGLISFAISLLCINLFLSF

SEQ ID NO: 172440 - protein, 224 aa, Unknown
  Bacterial polypetide isolated from the Sargasso Sea
LGAILAVMWEFRAKVVGVLVGLPSDPKARRFSFNLFLAFIPAVIFGLAFADLIEHWLFNPITVATALILGGIVMLWAERREHPIQAESVDDMTWQLALKVGFAQCLALIPGTSRSGATIIGGLVCGLSRKAATEFSFFLAMPTMVAATAYSLVKYRDILQTSDLPIFAIGFVSTFIVAMITVRALLRFITNHSYAVFAWYRIAFGLLILATWQLHLIDWSTAQP

SEQ ID NO: 172441 - protein, 259 aa, Unknown
  Bacterial polypetide isolated from the Sargasso Sea
MDLIQTLILAIIQGLTEFLPISSSAHLILISKIVGWNDQGLLFDIALHFGTLLAVLIYFKDDLCRMIQDPIKNQGKNIIHSDLMILVIATIPIAIAGGLFNDWIEANLRSLNVIASASIVFGFLLLASDKVSSGGKNLTLQIGLIIGLAQIFALIPGVSRSGITITMGLFMGLGRVESARFSFLLAIPVIFAATIFQTYDLYTFGILDINYIDLLTGLTVSFLIAYYTIHLFLAFVMKIGMLPFVLYRVVLGSAIFMFL

SEQ ID NO: 172442 - protein, 263 aa, Unknown
  Bacterial polypetide isolated from the Sargasso Sea
MNEVLLSFLLGLIQGLTEFLPISSSAHLLFPTLLFGTDDLGLAFDIAVHAGTLLAVIYFFRTEIKLMIKSLISKNNNFNDSRKVAYLLIIATFPIVMAGLLGTDFIESNRNSIASIAYMNLLFAGFLLFAYKYSSSSKSLIELTIAGAIFIGVFQVFALFPGASRSGAAMTAALLIGLNLKDSSKFAFLLAIPTIFGALVFLIGDLVLYETQINIISLVVGFLTSSIVAFLTIKYFLIFVEKIGMYPFVIYRLLLGVLLLVLI

SEQ ID NO: 172443 - protein, 217 aa, Unknown
  Bacterial polypetide isolated from the Sargasso Sea
MGWLEAAVLGVVQGLTEFLPISSSGHVLIVSRLFGWGDPGAAFTAVTQIGTEIAVLIYFRRDLARILSTWFVSLRRPEVQGSIDARMGWYVIIGTLPIAILGFTFAPVIETAARNLWLVATVLIVFGIVLGLVDRWGAKTKALEALNAKDGLLFGFGQALALIPGVSRSGATISVGLAMGYSRSAATRYAFLLAIPAVLASGFYEATKIGSDVNAQW

SEQ ID NO: 172444 - protein, 266 aa, Unknown
  Bacterial polypetide isolated from the Sargasso Sea
MDTFQVIILALIQGLTEFLPISSSAHLILPAQLLGWEDQGLSFDVAVNTGSLFAVVIYFRHELWAMFKAWIASMVKGQHSDDSKLAWWIILATLPAVFFGFMAKDFIETHLRNAGVIAVTTVVFGLLLWWADKMSRRDLTVYQTGWRKALLIGFAQALALIPGTSRSGATMTAALMLGLSRDAAARFSFLMSVPVSLGAAILVGKDLAESPLPIDYQALTLGTVISFAAAYLCIHYFLKIISRMGMTPFVIYRLALGAVLCGFIFL

SEQ ID NO: 172445 - protein, 242 aa, Unknown
  Bacterial polypetide isolated from the Sargasso Sea
MDFLILLKALILGIVEGLTEFLPVSSTGHLIVVGDLINFYNEGKVFEVAIQLGAILAVVFEYRKRFISVATGITHDKKAQNFVLNLFVAFLPAAIVGLLFIKYIKLYLFNPITVATMLVLGGLVILYAERRTHAVKIHDVDEISWKDALKVGCAQIIAMIPGTSRSGATIIGGLFFGFDRKVAAEFSFFLAVPTMFAATFYDIFKHRDVLSFEQMPMFIVGFVAAFVSALIAVRTFVRFVSN

SEQ ID NO: 172446 - protein, 263 aa, Unknown
  Bacterial polypetide isolated from the Sargasso Sea
MALEIIIILSLIQGITEFLPISSSAHLIIIPEFFFNIDSSRGFDVSLHFGSLLAVIYYLKKDLMKIISDTMYFKIDNEGFIILKNLIISTIPVIIVGFLVHINNFDIIRSLEVIGWTTLIFGILLGIADRNLKVIKYFKSLNLKDALVIGIAQTLAIIPGTSRSGIVITAGLYMGFSRFDASKYSLLLSIPVIIAATTLESINLFIEKGFFFNNEMIMGIILSFCVALIAIRLFMNWINKASLKIFVAYRIMLGILILVYAYI

SEQ ID NO: 172447 - protein, 191 aa, Unknown
  Bacterial polypetide isolated from the Sargasso Sea
MIQFTLLALIQGITEFLPISSSAHLLIPGILFGWPDQGLEYDIAVHFGTLLAVIAYFRQDLIRMSCRMLSMSDNTSRDESRELIFNLVVATIPLVIAGFLFSNFIEEYLRDAGVIAISSLIFGLILGWVWLRRDVSRRKKITVGDAVFIGFAQCLAIIPGVSRSGITITAGLYLGLNIASAVKFSFLLAIP

SEQ ID NO: 172448 - protein, 276 aa, Unknown
  Bacterial polypetide isolated from the Sargasso Sea
MDWILICKALILGVVEGLTEFLPVSSTGHLIVAGSFLNFNDSHAKTFDVVIQFGAILAVCWEYRQRIASIVSGLPSRPDARRFTLNVVIATIPAIALGLLFEKKIKAVLFSPVPVAFALVVGGAIILWAEARQRERSEPPRVVSVDALTPLDALKVGIAQCFALIPGMSRSGSTIIGGMLFGLDRRVATEFSFFLAIPIIFGATLYETVKDWQAFTVDSLGLFVLGAVAAFVSAFVCVRWLLRYVASHDFTVFAWYRIAFGLFVLLVGYSGWLNWA

SEQ ID NO: 172449 - protein, 251 aa, Unknown
  Bacterial polypetide isolated from the Sargasso Sea
MLEILTGVLQGLTEFLPISSSGHLVIISSLSSELDLNTNDIAFLHIGTLFSIVFFYRKRIFEIFEDLDTFVFYFKIILAGIIPAVLIGLLTPIQNIIDESPNLILITGASYLIFSLLLIFSGKINNSEALSIRDITVSQAFVIGIAQSIALLPGVSRSGVTLLTAIYLGVKKADAIYYSLLLGIPTIFGAWSLTFINDSFQVNTNIVLPTIVAMFTGLLAIRVLINFTTSSKLQYFGYYCLLLSVFCFITN

SEQ ID NO: 172450 - protein, 258 aa, Unknown
  Bacterial polypetide isolated from the Sargasso Sea
MESILTIFEAIILGVIQGVTEFLPISSSGHLVIAQEILDMNPPGNLIEVATHLGTLISVITIYKNDIFNVLSDFIFSKNRKFVFFLLIATIPSILFGLGGRSIILSLFESTKMVSVCLIITGLILLSSNRIYKSESTFNLRNSFLIGISQAFAILPGISRSGMTITIGMMLGISSKEAARFSFLLAIPAICGAGILTAIEPIPESAKLKFETLLIAFLTSFLVGFFCLKWLLKILAKGKFHLFGYYCIIIGILTIIIF

SEQ ID NO: 172451 - protein, 278 aa, Unknown
  Bacterial polypetide isolated from the Sargasso Sea
MDWLMACKALILGVVEGLTEFLPVSSTGHLIVAGSLLNFTDDHAKTFDVVIQLGAILAVCWEFRRRIGSVVAGLPSRPDARRFTLNVIIATIPAVVLGLLFEKSIKAALFSPVPVAFALVAGGVVILWAEARQRARGQTAARVQHVDDLSPLDALKVGLAQCFALIPGMSRSGSTIIGGMLFGLERRVATEFSFFLAIPIIFGATAYELYKDWHLLSVDALGSFALGFVAAFISAFACVRWLLRYISAHDFTVFAWYRIGFGLLILLVGYSGALSWAD

SEQ ID NO: 172452 - protein, 268 aa, Unknown
  Bacterial polypetide isolated from the Sargasso Sea
MTTLEIIVLALLQGFTEFLPISSSAHLILPSQLLGWTDQGLAFDVAVHLGTLAAVLHYFRRDVGLISCSWFGSFKGQHDQHSRMGWLIILATIPAALFGLLIKDFIEIYARSALVIASTTIIFGLLLWYADVKAKQIKQTDQLTVKDVIIIGLAQAIALIPGTSRSGITMTAGLMLGLTRQAAARFSFLISIPIILLAGGYQSLKLLQSEQAVDWTALGLGTVLSFISAYVCIHFFLKVIEKMGMLPFVIYRLALGMFLLAFVFYFSH

SEQ ID NO: 172453 - protein, 259 aa, Unknown
  Bacterial polypetide isolated from the Sargasso Sea
MDLIQTLILAIIQGLTEFLPISSSAHLILISKIAGWNDQGLLFDIALHFGTLLAVLIYFKDDLCRMIEDPIKNQGKNIVHSDLMILVIATIPVVIAGGLFNDWIEVNLRSSNVIASTSIIFGFLLLVSDKVSSAGKNLTLQIGLVIGLAQTLALIPGVSRSGITITMGLFMGLGRVESARFSFLLAIPVILAASILQTYDLYSFGFLDIDYIHLLTGLTASFVIAYYTIHLFLAFVMKIGMLPFVLYRVVLGLAIFMFL

SEQ ID NO: 172454 - protein, 253 aa, Unknown
  Bacterial polypetide isolated from the Sargasso Sea
MNEIIIGIIQGITEFLPISSSGHLVIFDTLSDSINLNTNDIAFLHIGTLFSIVVFYKDRLSQTFNNKNNLNHTMKTILIAIVPAVVIGLFSPIQEVIDNSDNLLTITGIAYLGFASLLLTYEFNKKNKEDGSVLFENINSKQAFYIGLAQAVALVPGVSRSGITLIVALYLGIKKSEAIYFSLLLGLPTIFGAWLLTFVQSSFAFNPEMIIPAIVSFAAGLLAINILVNFTLNAKLKYFGFYCLALSALCLVN

SEQ ID NO: 172455 - protein, 266 aa, Unknown
  Bacterial polypetide isolated from the Sargasso Sea
MDTFQVIILALIQGLTEFLPISSSAHLILPAQLLGWEDQGLSFDVAVNTGSLFAVVIYFRNELWAMFKAWIASMVKGQHSDDSKLAWWIILATLPAVFFGFIAKDFIETHLRSAGVIAVTTVVFGLLLWWADKMSRRDLTVYQTGWRKALLIGFAQALALIPGTSRSGATMTAALMLGLSRDAAARFSFLMSVPVSLGAAILVGKDLAESPLPIDYQALTLGTVISFVAAYLCIHYFLKIISRMGMTPFVIYRLILGAVLCGFIFL

SEQ ID NO: 172456 - protein, 251 aa, Unknown
  Bacterial polypetide isolated from the Sargasso Sea
MLEFFTGVLQGITEFLPISSSGHLVILSSLSQDIDLNTNDIAFLHIGTLFSILIFYRKRIRKIFESTETFLFFLKVVVVGVIPASLVGFFTPIQNTIDESPQILLVTGISYVLFSILLIFSEKINNKESFSITELTTNNAFLIGLAQSFALLPGVSRSGVTLITAMYLGMKKADAIYFSLLLGIPTIFGAWGLTFVTQSYELSSGIIFPTMVAMITGLVAIKLLVDFTTNSKLQYFGYYCLLLGIICLVIN

SEQ ID NO: 172457 - protein, 190 aa, Unknown
  Bacterial polypetide isolated from the Sargasso Sea
MNYLEAFYLALIQGLTEFLPISSSAHLILLSEYLGSNQNLFYDISLHLGTLFAVCIYFKNDLKQMVYSFAKDRSPANNQLSVQLVISSLPTLILGFILVDLIDSHLRTSSIIAITTILFGVVLFVATFKKPEKSNMNEITLQEAFIIGLAQSLSLIPGTSRSGITISTGLFLGLDNKTASKFSFLMAIPT

SEQ ID NO: 172458 - protein, 271 aa, Unknown
  Bacterial polypetide isolated from the Sargasso Sea
MDWMQALLLGLVQGLTEFLPISSTAHLRVVPHWLGWEDPGAEFSAVIQLGTLLAVLVYFWKDVQQLVVAVLVGLKNRKPFETAEAQLAWSIAAGTLPIGILGLGYKDWIKTEARALWIIGTALIVLAVLLWLAERFPTANRSVAQLGFFRIQWIGLCQALALIPGCSRSGSTIMGGLMMGLKRDEAARFSFLLGLPAILASGFFELYELWQSDIPADEYRNLFLGILSSFIFGYLSIEFLLRFLRTHGTLVFVVYRIALGSAVLFFWWDLK

SEQ ID NO: 172459 - protein, 259 aa, Unknown
  Bacterial polypetide isolated from the Sargasso Sea
MDLIQALILAIIQGLTEFLPVSSSAHLILISKIVGWDDQGLLFDIALHFGTLLAVLIYFKDELYQMIEDPIRNRGKNIMQSDLMILIIATVPVVIAGGIFNDWIESNLRSSNVIALTSIIFGFLLLASDKFSSGGKNLTLQIGLLIGLAQILALIPGVSRSGITITMGLFMGLGRVESSKFSFLLAIPVIFAASVLQIYDLYSIGFSDVNYAHLLTGLTLSFVIAYYTIHWFLAFVMRIGMLPFVLYRVALGSAIFMLL

SEQ ID NO: 172460 - protein, 260 aa, Unknown
  Bacterial polypetide isolated from the Sargasso Sea
MDFLQILLLSFIQGLTEFLPISSSAHLILFSSFFNSNIQSLNFDVSVHLGTLFAALVYFKEEILKIINSLSRPNQEGRKLLINLTIATFPILVLGYFVRDLVDIFLRSPEVIAYATIIFAFILYLSTKVKSQYSNLESITPKQSLIIGIAQCFALIPGTSRSGITISAALALGLTSKVASKFSFLLAIPTIGAIACYQLLSLEFDTFIDEYRTNLIGIIISFVVAYSTIDFFMKFIERIGFMPFIIYRLILGSLILIAFI

SEQ ID NO: 172461 - protein, 259 aa, Unknown
  Bacterial polypetide isolated from the Sargasso Sea
MDLIQTLILAIIQGLTEFLPISSSAHLILISKIAGWNDQGLLFDIALHFGTLLAVLIYFKDDLCRMIQDPIKNRGKNIVHSDLMILVIATIPVVIAGGLFNDWIEANLRSSNVIASTSIIFGFLLLASDKVSSGGKNLTLQIGLVIGLAQMLALIPGVSRSGITITMGLFMGLGRVESARFSFLLAIPVILAASILQAYDLYSVGFLDINYIHLLTGLTVSFVIAYYTIHLFLAFVMKIGMLPFVLYRVVLGSAIFMFL

SEQ ID NO: 172462 - protein, 264 aa, Unknown
  Bacterial polypetide isolated from the Sargasso Sea
MSTYVIGDAHGCYDELQMLIKKIKFNKNKDSLIFLGDLVNRGRDSLKVLNFCINNSDCVTTVLGNHDLYLLRLMVNGSKHLSMNQVLNDDKKEVFFNWLIKKPLILKKIIKNRTYFIVHAGILPEWSLKEAMKYAKEIEMYLKKDPKHTLNAMWGNKPSKWKKGMNEDEFLRFVINCFTRMRWCHYNGSVNFQNKQLEQNDNYHPWFKKRELPDNHKIIFGHWAAIRGKTHKTNIFGLDTGCVWGGKLTALRLEDEKYFRVDKQ

SEQ ID NO: 172463 - protein, 271 aa, Unknown
  Bacterial polypetide isolated from the Sargasso Sea
MTTYAFGDLQGCYEELRLLLDHIEFDPSLDKLCFTGDLVNRGPDSLKVLEYLYSINESVVNVLGNHDFHLIALALTDRKLRSKDNSLSPILSSSNKINLIEWLRHQPLFHMEKESDTLIVHAGVHPSWTLEMVKKYSEEIQSVIRGDDASVFFKAMYSDDSWSTDLIGKKRFNAIVNSFTRMRYLNELGECNFEEKDSPEKVTNELIPWYLYPNRKVKNDLIVFGHWSSLGYFNDHNVVCLDGGCVWGGELVAVDVSKPDVPIRINSLKSK

SEQ ID NO: 172464 - protein, 237 aa, Unknown
  Bacterial polypetide isolated from the Sargasso Sea
MFLAGDLVNRGPDSLGTLRRVYELRDNVHTVLGNHDLHLLAVAQGSTDSRRKDTLTDILEAPDRDALLGWLQDCPLLVDIPEHQAVMTHAGIPPLWTLAEARERAREVEQVLRSPQVGEYFANMYGNQPAGWDDAQQGPERWRVITNHFTRMRFVNLAGELDLASKGEADAPPEGFIPWFQHPHRQATDTRILFGHWAALEGHTDVAKVDALDTGCVWGGSLTALRLDDLTRIACHC

SEQ ID NO: 172465 - protein, 266 aa, Unknown
  Bacterial polypetide isolated from the Sargasso Sea
MSHYVIGDVQGCYDELINLCSKIKFNPKKDTLIFAGDLVNRGPKSLEVLNFCLENKKSIKAVLGNHDFYLLYLIEHKKNNRSLKTILNADNISKIHKWLKKLPLLLKVKINGHNFWISHAGIPHIWNFKTAKKLSIEVQVALKEDSYNLLKNMWGDTPSKWNSKLVKYKRYRVIINYFTRMRFLDNKGALKLKKKNLKSEKNHIPWFKQTTHNLKEDESIIFGHWAALEGKTNLDNIIGLDTGCVWGNKLTAIRLEDKKLYQVRRK

SEQ ID NO: 172466 - protein, 266 aa, Unknown
  Bacterial polypetide isolated from the Sargasso Sea
MSHYVIGDVQGCYDELINLCSKIKFNPKEDTLIFAGDLVNRGPKSLEVLNFCLENKKSIKAVLGNHDFYLLYLIEHKKNNRSLKTILKADNISKIHKWLKKLPLLLKVKINGHNFWISHAGIPYMWDFKTAKKLSKEVQVALKDDSYNLLKNMWGDTPSKWNSKLVKYKRLRVIINYFTRMRFLDKKGVLKLKKKNLKSEKNHIPWFKQTTHNLKKDESIIFGHWAALEGKTNLDNIIGLDTGCVWGNKLTAIRLEDKKLYQVRRK

SEQ ID NO: 172467 - protein, 265 aa, Unknown
  Bacterial polypetide isolated from the Sargasso Sea
MSHYVIGDVQGCYDELINLCSKIKFNPKKDTLIFAGDLVNRGPKSLEVLNFCLENKKSIKAVLGNHDFYLLYLIEHKKNNRSLKTILNADNISKIHKWLKKLPLLLKVKINGHNFWISHAGIPHIWNFKTAKKLSKEVQVALKEDSYNLLKNMWGDTPSKWNSKLVKYKRYRVIINYFTRMRFLDNKGALKLKKKNLKSEKNHIPWFKQTTHNLKKDESIIFGHWAALEGKTNLDNIIGLDTGCVWGNKLTAIRLEDKKLYQVRR

SEQ ID NO: 172468 - protein, 260 aa, Unknown
  Bacterial polypetide isolated from the Sargasso Sea
WRCKGCYDELINLCSKIKFNPKKDTLIFAGDLVNRGPKSLEVLNFCLENRKSIKAVLGNHDFYLLYLIEHKKNNRSLKTILNADNISKIHKWLKKLPLLLKVKINGHDFWISHAGIPHMWNLKTAKKLSKEVQVALKEDSYNLLKNMWGDTPSKWNSKLVKYKRYRVIINYFTRMRFLDNKGALKLKKKNLKSEKNHIPWFKQTTHNLKKDESIIFGHWAALEGKTNLDNIIGLDTGCVWGNKLTAIRLEDKKLYQVRRK

SEQ ID NO: 172469 - protein, 232 aa, Unknown
  Bacterial polypetide isolated from the Sargasso Sea
AGDLVNRGPKSLEVLNFCLENKKSIKAVLGNHDFYLLYLIEHKKNNRSLKTILNANNISKIHKWLKKLPLLLKVKINGHNFWISHAGIPYIWDFKTAKKLSKEVEVALKEDSYNLLKNMWGDTPSKWNSKLVKYKRYRVIINYFTRMRFLDNKGALKLKKKNLKSEKNHIPWFKKTTHNLKEDESIIFGHWAALEGKTNLDNIIGLDTGCVWGNKLTAIRLEDKKLYQVRRK

SEQ ID NO: 172470 - protein, 265 aa, Unknown
  Bacterial polypetide isolated from the Sargasso Sea
MPSYVIGDVQGCFKQLQSLLKKIQFDPNQDQLWFCGDLVARGPDSLATLRFIRSLGNKAKVVLGNHDLHFLACVFGFAKVDTKDQLSELLNAPDLAELTHWLQQQPLMHFETERQLLMVHAGLAPDWPLSTALNAAAEVSAVLKETPEKLFAAMYGNTPALWSEVQSEEDRWRFTINSCTRMRFCLANGALELKEKRHPDKVSNLTPWYQFWQQKAHPQIFFGHWAALMGYSPVAGIHALDTGAVWGNYLTAYCIETAQRYSVSD

SEQ ID NO: 172471 - protein, 249 aa, Unknown
  Bacterial polypetide isolated from the Sargasso Sea
MSHYVIGDVQGCYDELINLCSKIKFNPKKDTLIFAGDLVNRGPKSLEVLNFCLENKKSIKAVLGNHDFYLLYLIEHKKNNRSLKTILNADNISKIHKWLKKLPLLLKVKINGHNFWISHAGIPHIWNFKTAKKLSIEVQVALKEDSYSLLKNMWGDTPSKWNSKLVKYKRYRVIINYFTRMRFLDNKGALKLKKKNLKSEKNHIPWFKQTTHNLKKDESIIFGHWAALEGKTNLDNIIGLDTGCVWGNK

SEQ ID NO: 172472 - protein, 302 aa, Unknown
  Bacterial polypetide isolated from the Sargasso Sea
MTSSSASTASTSSTAASAATASAAPLPLAFGDLQGCRTPFQQLLAKAAPPADTPLWFAGDLINRGSESLATLRDIIALGERAVPVLGNHDLHLLSVSAGIRKSKKGDTINDILSAPDAADLLEWVRHRPLAHFDNGMLMVHAGVLPQWDAALTMELADELQRALRAPNWKETLAGLYGNEPNRWTPGLKGIERLRLTCSALTRIRFCNAEGEMDFSSSGGLNSAPPGSMPWFDVPSRKTADVTMVFGHWAALGLTLRDNLIGLDSGCVWGEKLSAVRLAQNPAERTLTQVDCESCRAPAGGN

SEQ ID NO: 172473 - protein, 279 aa, Unknown
  Bacterial polypetide isolated from the Sargasso Sea
MTLPPIAIGDIQGCHSAFQSLLDKLSAPADTPLWIAGDVVNRGPGSLAALRAVVDLGPRATVVLGNHDLHLLAVSAGLRTERPGDTIGEILDAPDADALLDWVRHRPFVHVEDGKLLVHAGVLPQWDATLALELADELQRALRAPDWRDTLQGLYGNEPNQWSPNLKKRDRMRVAFNAFTRVRFCTPDGVMEFKANGGPDSAPPGYLPWFDVPGRRTEDVTVVFGHWAALGLMVRDNVVALDSGCVWGNQLSAVRLTADPARRTVTQVQCEACRTPGGE

SEQ ID NO: 172474 - protein, 241 aa, Unknown
  Bacterial polypetide isolated from the Sargasso Sea
DPHKDKLIFAGDLVNRGPKSLEVLNFCIKNRKSVKAVLGNHDFYLLYLIEHQKRNKSLKQILEADNLDEINKWLKGLPLLLKVKIKTKIYWIAHAGIPFLWDFKIAQQLSKEIQSAIKNDAYNLFTYMWGDTPSLWNPELEKYKRQRLIINYFTRMRFINKKGALKLKKKDLTPEKNHMPWFEQTKNNLKDNEKIIFGHWAALNGKTNLDNIIGLDTGCVWGNKLTAIRLEDEKLFHVNKK

SEQ ID NO: 172475 - protein, 272 aa, Unknown
  Bacterial polypetide isolated from the Sargasso Sea
MKTKSKFVIGDIQGCYKEFKNLLKLIDPNKENKFFCVGDLVNRGPESEKVIEYVLENKIKSVLGNHDLHLMAILMGVREHNDKKDTMQKIINKNRSIEIIEHFLTFPFAKILSHQNKKTLVVHAGILPSWSINDVLAANEELVSSLRSDPEKFLLTMYGNRRKAISKSTNKKNRRRYLVNVFTRMRFITNKNKLDLQTKVKKTSKEQYQPWFTYKHKSLKELDNIVFGHWAALNGVTNHNKIKGVDLGCVWGGSLAAININDKSIITVNSNK

SEQ ID NO: 172476 - protein, 278 aa, Unknown
  Bacterial polypetide isolated from the Sargasso Sea
MKYLVDMKSKSKFVIGDIQGCYKELKSLLKLIDPNKENKFFCVGDLVNRGPESEKVIEYVLENKIKSVLGNHDLHLMAILIGVKEHNDKKDTMHKILNKNKSIEIIEHLLTFPFAKVLSHQNKKSLVVHAGILPTWSLNDVLAANDELITSLKADPEKFLSTMYGNRRKAISKSTNKKNRRRYLVNVFTRMRFITSRNKLDLQTKIKKTSKEQYQPWFSYKHKSLKELDNIVFGHWAALNGVTNHNKIKGVDLGCVWGGSLAAININDKSIITVDSVK

SEQ ID NO: 172477 - protein, 268 aa, Unknown
  Bacterial polypetide isolated from the Sargasso Sea
MSHYVIGDVQGCFDELELLCKKIKFNPNKDKLIFAGDYVNRGPKSLEVLNFCLKNKKSIKGVLGNHDFYLLYLIEYKKRNKSLNAILDAKNINAIYKWLKKQPLLQKIKIKETKETFWISHAGIPYIWSFKTAKQLSDELNKVFKKDSYKILGNMWGDKPSKWKADLSGYKRYRTIINYFTRMRYLDHKGSLLLKKKDLKPKKNHIPWFKQTTSNLKPNEYIIFGHWAALDGKTKLDNIIGLDTGCVWGNKLTAMRLEDKKFFQVKKK

SEQ ID NO: 172478 - protein, 272 aa, Unknown
  Bacterial polypetide isolated from the Sargasso Sea
MKNKPTFVIGDIQGCYSEFRRLLKIIDPMKKNKIFCVGDLVNRGPYSERVVDYVLNNKIKSVLGNHDLHMMAMILGVHKKNDNKHTLQKILGKNKSIKIFEYFLKFPFAKLIVSNESKSLITHAGVLPSWSLNNVLSANEELTEALKSDPEKFLSNMYSDRRKDISKSTNKRNRARFLVNVFTRMRFITKDNKLDLQTKVKTSSREKYKPWFVYEHRCLDDVDNIVFGHWAALNGVTNHNFIRGVDLGCVWGGSLAAINLKDKSIITVESEL

SEQ ID NO: 172479 - protein, 272 aa, Unknown
  Bacterial polypetide isolated from the Sargasso Sea
MNNKSKFVIGDIQGCYKEFKNLLKLIDPNKENKFFCVGDLVNRGPESEKVVDYVLENKVKSVLGNHDLHLMAILAGVRKHNDKKDTMTKIISKNKSVEILDYFLNFPFAKVLSNETKKTLVVHAGVLPTWSIEDVKAANEELTSSLKSNPEKFLDQMYGDRRKAISKSTNKKNRRRYLVNVFTRMRFITKENKLDLNTKIKKSPKQKYQPWFNYKHKALKEVDSIVFGHWAALKGVTNNNKIKGVDLGCVWGGSLAAININDRSIITVDSQK

SEQ ID NO: 172480 - protein, 266 aa, Unknown
  Bacterial polypetide isolated from the Sargasso Sea
MSHYVIGDVQGCYDELAALCAKVKFNPQKDKLIFAGDLVNRGPKSLEVLNFCIENRKSVKSVLGNHDFYLLYLIEHQKRNKSLKEILEADNLDEINKWLKGLPLLLKIKIKTNVYWIAHAGIPFLWDFKIAQQLSKEIQSAIKKDAYNLFKYMWGDTPSLWNPELEKYKKQRLIINYFTRMRFTNKKGALKLKKKDLTPEKNHIPWFEQTKNNLKDNEKIIFGHWAALNGKTNLDNIIGLDTGCVWGNKLTAIRLEDEKLFHVSKK

SEQ ID NO: 172481 - protein, 268 aa, Unknown
  Bacterial polypetide isolated from the Sargasso Sea
MSHYVIGDVQGCFDELQLLCKKIKFNPNKDKLIFAGDYVNRGPKSLEVLDFCLKNKKSIKGVLGNHDFYLLYLIEYKKRNKSLNAILDAKNVNAIYKWLKKQPLLEKVKIKETKETFWIAHAGIPYIWSFKTAKQLSDEFKKVFKKDSYKILGNMWGDKPSKWKEDLSGYKRYRTIINYFTRMRYLDKKGSLLLKKKDLKPQKNHIPWFKQTISNLKPNEYIIFGHWAALDGKTKLDNIIGLDTGCVWGKKLTAMRLEDKKLFQVKKK

SEQ ID NO: 172482 - protein, 266 aa, Unknown
  Bacterial polypetide isolated from the Sargasso Sea
MSHYVIGDVQGCYDELINLCSKIKFNPKKDTLIFAGDLVNRGPKSLEVLNFCLENKKSIKAVLGNHDFYLLYLIEHKKNNKSLKTILNANNISKIHKWLKKLPLLLKIKINDHNFWISHAGIPCIWDLKTAKKLSKEVQVALKEDSYNLLKNMWGDTPSKWNSKLVKYKRYRVIINYFTRMRFLDNKGALKLKKKNLKSEKNHIPWFKQTTHNLKKDESIIFGHWAALEGKTNLDNIIGLDTGCVWGNKLTAIRLEDKKLYQVSRK

SEQ ID NO: 172483 - protein, 266 aa, Unknown
  Bacterial polypetide isolated from the Sargasso Sea
MSHYVIGDVQGCYDELVALCTKVKFEPQKDKLIFAGDLVNRGPKSLEVLNFCIENRESVKAVLGNHDFYLLYLIEHQKRNKSLKQILKADNLDEINKWLKRLPLLLKIKIKDNIYWIAHAGIPFLWDFKIAQQLSKEIQSAIKNDAYNLFEYMWGDTPSLWNPELEKYKRQRLIINYFTRMRFTNKKGALKLKKKDLTPEKNHIPWFEQTKNNLKDNEKIIFGHWAALNGKTNLDSIIGLDTGCVWGNKLTAIRLEDEKLFHVSKK

SEQ ID NO: 172484 - protein, 277 aa, Unknown
  Bacterial polypetide isolated from the Sargasso Sea
MATYAIGDIQGCYDELRILLDKIKFKSEQDQLLICGDIINRGPKSLETIEFLYSIKKNCHITLGNHDLHFLAVAEGVKEISDSDTFQTILEDVNLDIYVSWIRALPFHHISSLKIAGEMKPYIMTHAGIPPHWTREELEKYSLELTEILKGPDSKVLLENMYGNEPNHSSKCDSEIERLRLNINYFTRMRFCKNDGTLDLVNKGKPNENPYQMKPWFDWSLKILKEPFHILFGHWAALEGKTGKNNISALDTGCVWGKKLSALRLEDNRIFSCNKIN

SEQ ID NO: 172485 - protein, 269 aa, Unknown
  Bacterial polypetide isolated from the Sargasso Sea
MSHYVIGDVQGCYDELMLLCKKIKFNPKKDKLIFAGDLVNRGPKSLEVLNFCLENKKSIKAVLGNHDFYLLYLIEHKKRNKSLKKILSADNISKIQKWLKKLPLLLKLKIKNDVFWISHAGIPFVWELKKAKKLSKEIQVALKNDSFDLLKNMWGDTPSKWNNKLKGYSRYRIIINYFTRMRFLDNDGVLKLKKKNLKPEKNHVPWFEQTTHNLKNNETVIFGHWAALEGKTNLDNIIGLDTGCVWGNKLTAIRLEDKKLFQVKKNENI

SEQ ID NO: 172486 - protein, 268 aa, Unknown
  Bacterial polypetide isolated from the Sargasso Sea
MSHYVVGDVQGCFDELISLCKKIKFNPNKDKLIFAGDFVNRGPKSLEVLEFCLQNKRSVSGVLGNHDFYLLYLIEHKKRNKSLKPILESKNVNRIFKWLRKQPLVQKIKINKSKEVFYIVHAGIPFIWSLKTAKKLSNELQGVLKKDSYNILKKMWGDSPSRWKASLEGYKRYRTIINYFTRMRYLDVNGDLKLKKKDLKKEKNHIPWFQQTIINLKPKEFIVFGHWAALNGKTKFKNIIGLDTGCVWGKKLTAIRLEDKKIFQVNKL

SEQ ID NO: 172487 - protein, 268 aa, Unknown
  Bacterial polypetide isolated from the Sargasso Sea
MSHYVIGDVQGCFDELQLLCKKIKFNPNKDKLIFAGDYVNRGPKSLEVLNFCLKNKKSVKGVLGNHDFYLLYLIEYKKRNKSLNAILDAKNVNAIYKWLKKQPLLQKIKIKETKETFWISHAGIPYIWSFKTAKQLSDELNKVFKKDSYKILGNMWGDKPSKWKADLNGYKRYRTIINYFTRMRYLDQKGSLLLKKKDLKRQKNHIPWFKQTISNLKPNEYIIFGHWAALDGKTKLDNIIGLDTGCVWGNKLTAMRLEDKKLFQVKRK

SEQ ID NO: 172488 - protein, 278 aa, Unknown
  Bacterial polypetide isolated from the Sargasso Sea
MATYAVGDVQGCLSELEALLKHIDFSSSDRIIFLGDLINRGPDSLGTLRLIKSLGDQAITVLGNHDLHFLAILFGGHQETKSDTLTELIEAKDAEDLGHWLRTQPLIHYEDSLDALMAHAGVPFFWSTQKALSLAGEVHRITSSTEEKDGLDYRIFFKQMYGNNPNYWAEGLTGMDRYRAITNYFTRMRFLDFEGKMDFSFKGAKESAPDSLTPWYSFGQEGHQTRKVLFGHWASLNGVTGREEIIALDTGCVWGRCLTAYCMETKEFLSVKSLKSNK

SEQ ID NO: 172489 - protein, 163 aa, Unknown
  Bacterial polypetide isolated from the Sargasso Sea
MTQPYLDIQHLNKQFGAFQALKGISLTIEPGEFICFLGPSGCGKTTLLRAIAGLDLPDTGEIWQGGRNISRLPPQQRDFGIVFQSYALFPNLTVAQNIAFGLENQGLARVLIKERVDHWLGLVDLTAQSHKYPSQISGGQQQRVALARALALSPGLLLLDEPL

SEQ ID NO: 172490 - protein, 249 aa, Unknown
  Bacterial polypetide isolated from the Sargasso Sea
MKVSEEIVIEISNMNKWFGHFHVLRDIDLVVNKGERIVICGPSGSGKSTLIRCINRLEEHQKGIIKVDDVELNDDVKKIDKIRSEVGMVFQSFNLFPHLSALENCTLAPVWVRKMSKKEADELAMKYLEIVKIPEQALKYPGQLSGGQQQRVAIARALCMEPKIMLFDEPTSALDPEMIKEVLDTMIELAEDGMTMIVVTHEMGFARKVANRVIFMDEGQIIEQNSPNEFFNNPKSDRTKLFLSQIIDH

SEQ ID NO: 172491 - protein, 273 aa, Unknown
  Bacterial polypetide isolated from the Sargasso Sea
MVFQSYALYPHMNVYENMSFGLKIEKRPKEEINTKVMQAAKILKIEELLERKPKQLSGGQRQRVAIGRAITRNPKIFLFDEPLSNLDAALRAEMRVEISKLHNQIKTNMIYVTHDQVEAMTLADRIVILNQGNIEQVGTPEEIYNDPANIFVAQFIGTPKMNILDVKEENIVSENTINLLGKDIQFDKLKLNKSKHFVGIRPEHLKANQNTQFTFNPEIELIENLGNEKIVYMKKDEHQLSAKIPSNIEIGNSIGFDLSDIFIFDENGNRMKS

SEQ ID NO: 172492 - protein, 214 aa, Unknown
  Bacterial polypetide isolated from the Sargasso Sea
MKTLKIEELSKNFGSTEVLKKINLEIDEGNFLVLLGPSGCGKSTLLNIIAGLETINEGDVFIDDYNVSKVEPKDRNIAMVFQSYALYPSMNVRENMIFGLKQAKTSKEKIEEQLEKVSKFLQVDQLLERKPSQLSGGQRQRVAIGRALVREPRIFLFDEPLSNLDAKLRVEMRREIKKLHQQLKTTVVYVTHDQTEAMSLGTRIAIMNHGVIQQ

SEQ ID NO: 172493 - protein, 341 aa, Unknown
  Bacterial polypetide isolated from the Sargasso Sea
VLVVKDLNLDIAEGEFITMLGPSGSGKTTCLMMLAGFETPTNGEIYLDSNPISNIPPHKRGIGMVFQNYALFPHMTVYENLAFPLRVRKVSKEDTDKKVDKALSMVSLTGFENRMPGQLSGGQQQRVAVARALVFDPAVVLMDEPLGALDKNLRESMQYEIKHIHESIGVTVVYVTHDQGEALTMSNRIAVFNDGKVQQLSSPDQLYEAPVNSFVAEFIGENNTFSGEVTDVSKEKCKVKLDSGKEIVANPIRVKSKGEKTIVSLRPERAIINPEDKMDNRHNGKIEEVIYHGDHTRVRLNLLGNKDFILKVPNSSARMDIKVGNEINVGWNSQDSRALDP

SEQ ID NO: 172494 - protein, 213 aa, Unknown
  Bacterial polypetide isolated from the Sargasso Sea
MSKIVIKNLEKSFGENKVINNFNIDIKDGEFIVLVGPSGCGKSTLLRMVSGLESIDQGEIFLDTKLINNLIPSKREIAMVFQSYALYPHMNVFENMSFGLKMEKISKNEINEKVNHAATTLQIEDLLDRKPKQLSGGQRQRVAIGRAITRNPKVFLFDEPLSNLDAALRSEMRVEISKLHKKLKTNIIYVTHDQIEAMTLADRIVVLNKGIIE

SEQ ID NO: 172495 - protein, 241 aa, Unknown
  Bacterial polypetide isolated from the Sargasso Sea
MANIKFTGVHKSFGSNKIITDFNLSGKDDEFLVLVGPSGCGKSTLLRMIAGLEQIDEGEIFINDQKINDLHPSKRQTAMVFQSYALYPHMNVYENMSFGLKIEKRSKEEIQTKVMQAAKILKIEELLERRPKQLSGGQRQRVAIGRAITRNPKIFLFDEPLSNLDAALRSEMRVEISKLHNQIKTNMIYVTHDQVEAMTLADRIVILNLGNIEQVGTPDEIYNNPANIFVAQFIGTPKMNI

SEQ ID NO: 172496 - protein, 294 aa, Unknown
  Bacterial polypetide isolated from the Sargasso Sea
ISQLLVLWIGASMVLNGDLTLGQLIAFRIISGYVTQPLLRLSGIWQRIQELRVSFERLGDVVDTPMESDAVDQSKVALPSLNGRIRFDNVSFRFAPHKPDVLSHVNLEIQPGSFVAIVGQSGSGKSTLMKLLSRLYAPGEGRVLIDGYDIAKVELYSLRRQIGIVPQDPLLFSGSVQDNIALTSPDARSEEVVAAAEVACAHEFIMELPEGYSSDVGERGAGLSGGQRQRVAIARTLLSRPKLVIMDEATSALDYENERRISENLRLRLQDCTVLYITHRLSTVKRADQIVMMH

SEQ ID NO: 172497 - protein, 273 aa, Unknown
  Bacterial polypetide isolated from the Sargasso Sea
SFSLEVRGHSKADRRARAEELLELVALEGQGDKKVHELSGGQRQRVAIARALAIEPEVLLLDEPLSALDLKLRQKMRSELRAIQKRVGITFIYITHDQGEALTMSDRIAVMNEGKIEQVDTCQSVYEQPKTPFVASFVGENNPFYGEVTACNNSRIEVLCDGNEFVTDISGNDRPESKKLTVGQKIILFVRPESISIKSSKAETPNSFSAQLDSIEFEGHLRNLFLTTNSGMKVRLNVPNAEEIIHLTVGQTMDLTFSAQKAVVLPEGNVAVD

SEQ ID NO: 172498 - protein, 267 aa, Unknown
  Bacterial polypetide isolated from the Sargasso Sea
FGLKQAKTSKEKIEEQLKKVSSFLQVDSLLERKPSQLSGGQRQRVAIGRALVREPRIFLFDEPLSNLDAKLRVEMRREIKKLHQQLKTTVVYVTHDQTEAMSLGTKIAIMNHGVIQQNDTPENIYNKPSNTFVADFIGSPSMNLIKGNLKQNSDNVSFIAEGSNLEIPIKHYDFKNKSELSNNEVYFGIRPEHIYFKKLNEDDLEINLRADLSEYIGHEQIVTFNFSNQEILAKFPSTINVELNKETKLYVDLTQVSLFDSKNEERI

SEQ ID NO: 172499 - protein, 237 aa, Unknown
  Bacterial polypetide isolated from the Sargasso Sea
ISELLDRKPGQLSGGQRQRVALGRAMVREPVAFLMDEPLSNLDAALRVHMRSELSELHNSLKTTFVYVTHDQAEALTMSSRMAVMIDGNLLQLDTPQEVYDNPSSLSVAQFVGSPKINIFEGTSDSSGTVSFLNVNLKRKSSESNTDLHIGIRPEHLEITNESNDNTFSGIVAYRENLGSDIFFHVNIEDGSNKIIVRGLPQFTHQISNGSSVNIKRVSDKALLFNQAGMRVQFTNA

SEQ ID NO: 172500 - protein, 244 aa, Unknown
  Bacterial polypetide isolated from the Sargasso Sea
MSNLSTTYLSVNDLCKHFGAFQALKNISIEINEGEFACFLGPSGCGKTTLLRCIAGLETQSSGFISQKEIEISSLPPSARDFGIVFQSYALFPNLTVFSNISYGLINNKWRKDEIKSRVEHLLDLVGLKSHAEKYPSQLSGGEQQRVALARALATSPGLLLLDEPLSALDAKVRLYLRKQIKDLHRKLGITTIMVTHDQEEAQSMADRIFVMKDGEIIQSGTPREIYEKANSPFIADFIGITNF

SEQ ID NO: 172501 - protein, 182 aa, Unknown
  Bacterial polypetide isolated from the Sargasso Sea
MASIELKNIEKSFGSNKVINKFDIKINDGEFIVLVGPSGCGKSTLLRMISGLETVDKGEIYLDNKIINNLIPSKREIAMVFQSYALYPHMSVFENMAFGLKMEKISKSEINQKVNNAAATLQIEDLLERKPKQLSGGQRQRVAIGRAITRSPKVFLFDEPLSNLDAALRSEMRVEISKLHKK

SEQ ID NO: 172502 - protein, 292 aa, Unknown
  Bacterial polypetide isolated from the Sargasso Sea
MSNNQQFVRFDKVDKSYDGKILVVKDLNLDIAEGEFITMLGPSGSGKTTCLMMLAGFETPTNGEIFLDQNPISNIPPHKRGIGMVFQNYALFPHMTVYENLAFPLKVRKVAKDEIDKKVDKVLSMVSLSGFEKRMPGQLSGGQQQRVAVARALVFDPQVVLMDEPLGALDKNLRESMQYEIKHIHESIGVTVVYVTHDQGEALTMSNRIAVFNDGKVQQLSSPDKLYEEPVNSFVAEFIGENNTFTGEVTDISESKCKVRLDSGVEIFSNPIRVKSKGEKTIVSLRPERAII

SEQ ID NO: 172503 - protein, 356 aa, Unknown
  Bacterial polypetide isolated from the Sargasso Sea
MAVASGAYKKVLEGDQTPKKVLVKIDRVTKKFDETIAVDDVSLEIKKGEIFALLGGSGSGKSTLLRMLAGFERPTEGRIYLDGVDITDMPPYERPINMMFQSYALFPHMTVAQNIAFGLQQDKIPKAEVDARVAEMLKLVQMSQYAKRKPHQLSGGQRQRVALARSLAKRPKLLLLDEPMGALDKKLRSQMQLELVEIIERVGVTCVMVTHDQEEAMTMAERIAIMHLGWIAQIGSPIDIYETPTSRLVCEFIGNVNIFDTQVVDDAEGHAVLKCPDLDRDIYVGYGIATSVEDKSVTYAIRPEKLLVTTEMPTCEHNWSSGKVHDIAYLGGHSVFYVELPSGKLVQSFVANAERR

SEQ ID NO: 172504 - protein, 289 aa, Unknown
  Bacterial polypetide isolated from the Sargasso Sea
MNDTSQSFVKFEKIDKSYDGEVLVVKNLNLDIAKGEFVTMLGPSGSGKTTTLMMLAGFETPTNGEIFLDTKPISKIPPYEREIGMVFQNYALFPHMTVAENLSFPLEVRKISKPDIKEKVQKALDMVELGNFGTRFPAQLSGGQQQRVALARALVFEPRLVLMDEPLGALDKNLREQMQYEIKHIHDRIGITVVYVTHDQSEALTMSNRIAVFNDGVVQQLSTPDILYEKPENSFVAKFIGENNTLNGVVKEINGSSCEVELEGGFGTVKALKINVNEVGEKTQLSIDQ

SEQ ID NO: 172505 - protein, 244 aa, Unknown
  Bacterial polypetide isolated from the Sargasso Sea
MEQYLSVKNINKFFGDFQALNDVSFDVKEGEFVCILGPSGCGKTTLLRVIAGLESQSQGLINQNNKDISLLPPDQRDFGIVFQSYALFPNLSVKNNISFGLKTRKQNKETIDKRVDELLELVGLSDHINKFSAQLSGGEQQRVALARALAPSPGLLLLDEPLSALDAKVRQYLRLEIKNLQRQLGVTTIMVTHDQEEALTMADRIILMNNGVIEQEGSPQDLYSKPKTAFSANFIGTTNLFKAK

SEQ ID NO: 172506 - protein, 187 aa, Unknown
  Bacterial polypetide isolated from the Sargasso Sea
MIRLEKLSREFQVGNQVVHALDEVDLEIKENEYVSIMGVSGSGKSTLLNILGLLDTPTSGDYILSGINTSKMDDDEMAGIRSTKIGFVFQSFHLIPRLTAFENIEMPMILSGMNPKERSEKVSSALEKVGLTDRSDHKPEQLSGGQRQRVAIARSIVMEPDVLLADEPTGNLDTSSGNEVVKLIEEL

SEQ ID NO: 172507 - protein, 262 aa, Unknown
  Bacterial polypetide isolated from the Sargasso Sea
MSENSISIRNVGKYFGTGATTVKALDDVSVEIANNEFFTLLGPSGCGKTTLLRLIAGFENPTFGSIMLGENDISHLPPYERSVNTVFQNYALFPHLSVAQNISFGLEMLRQSRKEIDRTVDEMLALVHMEDLKDRRTDQISGGQQQRVALARALAPKPDVLLLDEPLSALDYKLRRGMQIELKRLQLETGITFIFVTHDQEEALTMSDRIAVMNEGQILQVGAPDEIYNAPKQRFVADFIGESNFLDVEIIDKIDGEIPSAT

SEQ ID NO: 172508 - protein, 224 aa, Unknown
  Bacterial polypetide isolated from the Sargasso Sea
MSKNLDFVKFEKVDKSYDGKVLVVKDLNLDIAEGEFITMLGPSGSGKTTCLMMLAGFETPTNGEIYLDKNPISNIPPHKRGIGMVFQNYALFPHMTVYENLAFPLKVRKFQKDEIDKKVDKALSMVSLSGFENRMPGQLSGGQQQRVAVARSLVFDPQLVLMDEPLGALDKNLRESMQYEIKHIHESIGVTVVYVTHDQSEALTMSNRIAVFNDGKVQQLSSPD

SEQ ID NO: 172509 - protein, 314 aa, Unknown
  Bacterial polypetide isolated from the Sargasso Sea
KTTCLMMLAGFETPTNGEIYLDKNPISNIPPHKRGIGMVFQNYALFPHMTVYENLAFPLRVRKIAKDEADKKIDKALSMVSLSGFENRMPGQLSGGQQQRVAVARALVFDPSVVLMDEPLGALDKNLRESMQYEIKHIHESIGVTVVYVTHDQGEALTMSNRIAVFNDGKVQQLSSPDELYEKPVNSFVAEFIGENNTFAGEISEISNDKCKVRIAGGEIIANPVSVKNKGEKTTVSIRPERALINSSSKMDNNFKGKIEEIIYHGDHTRVRLNLLGNSEFILKVPNSSENMDIKLGNHINIGWNSHDARALDP

SEQ ID NO: 172510 - protein, 298 aa, Unknown
  Bacterial polypetide isolated from the Sargasso Sea
MSVNKEFVKFDKVDKSYDGKVLVVKDLQLDIAEGEFITMLGPSGSGKTTCLMMLAGFETPTNGEIYLDGNAISSIPPHKRGIGMVFQNYALFPHMTVYENLAFPLRVRKIPKDEADKKIDKALSMVSLQGFAQRMPGQLSGGQQQRVAVARSLVFDPQLVLMDEPLGALDKNLRESMQYEIKHIHESIGVTVVYVTHDQSEALTMSNRIAVFNDGKVQQLSSPDELYEKPVNSFVAEFIGENNTFAGEVSDISDGKCKVKLASADILANPISVKGKGERTTVSLRPERALINPSDKMD

SEQ ID NO: 172511 - protein, 283 aa, Unknown
  Bacterial polypetide isolated from the Sargasso Sea
QSYALYPSMNVKENMIFGLKQAKTSKEKIEEQLEKVSKFLQVDQLLERKPSQLSGGQRQRVAIGRALVREPRIFLFDEPLSNLDAKLRVEMRREIKKLHQQLKTTVVYVTHDQTEAMSLGTNIAIMNHGVIQQNDTPEKIYNKPSNTFVADFIGSPSMNLIKGNLKENSGDLFFTVSGSNLEIPIKNYDFKDKSNLNNKEIFFGIRPEHIFFKKFNESDFEIDLRANLSEYIGHEQIMTFDYANQEVLAKFPSTIKIDLGKETNLYFDLTQASLFDAKTEERI

SEQ ID NO: 172512 - protein, 209 aa, Unknown
  Bacterial polypetide isolated from the Sargasso Sea
CGPSGSGKSTLIRCVNALEPFQTGSVNVCGISVEKNGINATDIQRRVGMVFQQFNLFPHLSVLKNCTLAPCRVLGLSVVEAESKAMHYLERVRIPEQASKYPADLSGGQQQRVAIARALTMEPELMLFDEPTSALDPEVVTEVLDTMVDLAETGMTMICVTHEMGFAKQVADRVVFMDEGKIIEIATPEKFFSEPTHERTKFFLSRVLG

SEQ ID NO: 172513 - protein, 290 aa, Unknown
  Bacterial polypetide isolated from the Sargasso Sea
IFINDQKINDLHPSKRETAMVFQSYALYPHMNVYENMSFGLKIEKRSKEEIKTKVMQAAKILKIEELLERKPKQLSGGQRQRVAIGRAITRNPKIFLFDEPLSNLDAALRAEMRVEISKLHNQIKTNMIYVTHDQVEAMTLADRIVILNLGNIEQVGTPDEIYNNPSNIFVAQFIGTPKMNILPLNSENIISNNKINFLGNEISFKHIKFDKKKYFIGIRPEHFNMSNESQYKFKPKIDIVENLGNEKIIYMSNNNFEISAKVSSQINFENELKFDSKDIFIFDEKGNRI

SEQ ID NO: 172514 - protein, 244 aa, Unknown
  Bacterial polypetide isolated from the Sargasso Sea
MADPIIKIENMNKWFGDFQVLKEINLEVEKNKKIVVCGPSGSGKSTLIRCINRLEEHQKGTIIVDGTELTENTKNIEAIRAEVGMVFQQFNLFPHLSILDNCTLAPIWVKKMPKKDAENLAMKQLEQVQIVDQAQKFPGQLSGGQQQRCAIARALCMEPKIMLFDEPTSALDPEMIKEVLDAMVNLAKAGMTMIVVTHEMGFAKEVADEVIFMDEGMIVEKAETKEFFANPKSDRTKLFLSQIL

SEQ ID NO: 172515 - protein, 246 aa, Unknown
  Bacterial polypetide isolated from the Sargasso Sea
MSDSIISLKNVNKWFGDFHVLQDVNLEVKKKERIVVCGPSGSGKSTMIRCINRLEEHQEGTIIVDGIELTGNLKNIDSVRKEVGMVFQQFNLFPHLTAKENITLAPIWVKKLPKSEAEELAMRQLEIVKIPEQANKYPGQLSGGQQQRVAIARSLAMNPNIMLFDEPTSALDPEMIKEVLDVMVDLAEGGMTMIVVTHEMGFAKTVANRMVFMDEGKIVEEASPDKFFNNPESERTKLFLSQILNH

SEQ ID NO: 172516 - protein, 324 aa, Unknown
  Bacterial polypetide isolated from the Sargasso Sea
CSRDQTVKAQNVEMVSRWRWQEFYSQYIARTFEKTITGTALNQTSQVLQKISQLMVLWIGASMVLNGDLTLGQLIAFRIISGYVTQPLLRLSTIWQSIQELRVSFERLADVIDTPEESDEVDKSKVMLPPLQGEVRFEDLSFRFRPGQPEVLKDVNLEIKAGTFVGIVGQSGSGKSTLMKLLPRLYEPGEGRILIDGYDIAKVELYSLRRQIGIVPQDPLLFSGTVSENIALTNPEASSEEIVRAARLANAHEFIMELPSGYSTPVGERGAALSGGQRQRVAIARTLLSNPKLLVMDEATSALDYETERKVCDNLLENLDDQTV

SEQ ID NO: 172517 - protein, 314 aa, Unknown
  Bacterial polypetide isolated from the Sargasso Sea
SFVTALLLAYDPVKKLVNLNAQLQEGLAASERIFSVLDVRPKIIDNTNAIELSDITGEILIKDLCFSYDGTFPILSNLSMTIPAGKTIALVGHSGSGKSTLLNLVTRFFDPASGCILIDGRDIQTVKLSSLRQHFAIVSQDISLFNDTIKTNICYGDPDAPNEKIIEAAKNAAAHDFIKQLPNGYDTEIGENGVKLSGGQRQRVAIARAMLKDAPILLLDEATSALDSESEKAVQKALQRLMRNRTTIVIAHRLSTIQSADMIYVLEEGRVAEFGQHNELLKQDGVYANLYKIQFAEKGKANNLQIPAERNTER

SEQ ID NO: 172518 - protein, 227 aa, Unknown
  Bacterial polypetide isolated from the Sargasso Sea
MIRLEKLSREFQVGNQVVHALDEVDLEIKENEYVSIMGVSGSGKSTLLNILGLLDTPTSGDYILSGINTSKMDDDEMAGIRSTKIGFVFQSFHLIPRLTAFENIEMPMILSGMNPKERSEKVSSALEKVGLTDRSDHKPEQLSGGQRQRVAIARSIVMEPDVLLADEPTGNLDTSSGKEVVKLIEELNIAGLTLIVVTHDREMGERSNRLIELRDGKIINDQNQKKA

SEQ ID NO: 172519 - protein, 182 aa, Unknown
  Bacterial polypetide isolated from the Sargasso Sea
IVDGNELTEDTKDIEKIRAEVGMVFQQFNLFPHLSILDNCTLAPIWVKKMPKAKAEEFGMMQLEKVQIGDQAKKFPGQLSGGQQQRAAIARALCMEPKIMLFDEPTSALDPEMIKEVLDAMVNLAKGGMTMIVVTHEMGFAKEVADEVIFMDEGMIVERASTKEFFANPKSDRTKLFLSQIL

SEQ ID NO: 172520 - protein, 244 aa, Unknown
  Bacterial polypetide isolated from the Sargasso Sea
MSKKEDFVKFDKVDKSYDGKVLVVKDLNLDIEEGEFVTMLGPSGSGKTTCLMMLAGFETPTNGEIYLDKNPISNIPPHKRGIGMVFQNYALFPHMTVFENLAFPLKVRKMSQVEIEKKVDKALSMVSLGGFANRMPGQLSGGQQQRVAVARALVFDPSVVLMDEPLGALDKNLRESMQYEIKHIHESIGVTVVYVTHDQGEALTMSNRIAVFNDGKVQQLSSPDKLYEEPVNSFVAEFMEKIIP

SEQ ID NO: 172521 - protein, 279 aa, Unknown
  Bacterial polypetide isolated from the Sargasso Sea
MSKNTEFVKFDKVDKSYDGKVLVVKDLNLNISEGEFITMLGPSGSGKTTCLMMLAGFETPTNGEIYLDSNPISNIPPHKRGIGMVFQNYALFPHMTVYENLAFPLRVRKVQKDEIDKKVDKALSMVSLSGFESRMPAQLSGGQQQRVAVARALVFDPAVVLMDEPLGALDKNLRESMQYEIKHIHENIGVTVVYVTHDQGEALTMSNRIAVFNDGKVQQLSSPDKLYEEPVNSFVAEFIGENNTFGGEVTDISKDVCKVKLQNGEILANPVSVTSKGDK

SEQ ID NO: 172522 - protein, 277 aa, Unknown
  Bacterial polypetide isolated from the Sargasso Sea
MFHLEVNQLHKSYGDTKVFEGIEFGIRKGELVTLLGPSGCGKSTLLRALAGLTPVDGGQVRVAGEDITWQEPQKRGIGMVFQSYALFPNMTVRDNVAFGLKMKPQPGRDLAASVQEALELVELTGFERRYPAELSGGQRQRVALARALVVQPRILLLDEPLSALDARIRRSLRQQIREIQQRLELTTIFVTHDQEEALTMSDRIFLMNKGSIVQSGTPEQIYTRPASEFVASFIGNYNLLDGEQASTLFGPRVQGQLALRPESLSLLPAGARSDEPH

SEQ ID NO: 172523 - protein, 235 aa, Unknown
  Bacterial polypetide isolated from the Sargasso Sea
IEIQDGEFIVLVGPSGCGKSTLLRMISGLETVDDGEIFLDKKLINNLIPSKRGIAMVFQSYALYPHMNVYENMSFGLKMEKLSKNEIDQKVNEAANTLQIKDLLERKPKELSGGQRQRVAIGRAITRNPKLFLFDEPLSNLDAALRSEMRVEISKLHEKMKSNIIYVTHDQVEAMTLADRIVILNNGNIEQFGTPNEIYSDPNNIFVAEFIGSPKMNIIKIDKENIINSNTVNIF

SEQ ID NO: 172524 - protein, 204 aa, Unknown
  Bacterial polypetide isolated from the Sargasso Sea
MENPMNATAPVALSVKNIHKSFGDHHVLKGISLDAHQGDVISILGASGSGKSTFLRCLNLLETPDDGSVALGGEELKMKRRGDGKLQPSDRRQVDRVRSQLGMVFQNFNLWSHMTVLENLIEGPMRVQKRSRAESVEEAEALLAKVGLAEKRGHYPAHLSGGQQQRVAIARALAMHPKVMLFDEPTSALDPELVGEVLRVMRSL

SEQ ID NO: 172525 - protein, 192 aa, Unknown
  Bacterial polypetide isolated from the Sargasso Sea
MSENFVDINNIAKRWNGQLGVEDISLNFAKGSFVALLGPSGCGKSTTLRLLSGLEQADQGTIKIDGVDVTDKPPSERNLSMVFQSYALFPHLTVKENVIFGLKVRKTPPKERQEKLMRALEITGLVGFENRKPAELSGGQRQRVALARAIVANQPLCLMDEPLSNLDAKLRNSVRKDIKKLPSRSGHHSRIC

SEQ ID NO: 172526 - protein, 219 aa, Unknown
  Bacterial polypetide isolated from the Sargasso Sea
MKTLKIEDLSKNFGTTEVLKKINLDIDEGNFLVLLGPSGCGKSTLLNIIAGLETINEGNVYIDDYNVSKVEPKDRNIAMVFQSYALYPSMNVKENMIFGLKQAKASKEKIEEQLKKVSSFLKVDELLNRKPSQLSGGQRQRVAIGRALVREPRIFLFDEPLSNLDAKLRVEMRREIKKLHQTLKTTVVYVTHDQTEAMSLGTKIAIMNHGVIQQNDTPE

SEQ ID NO: 172527 - protein, 190 aa, Unknown
  Bacterial polypetide isolated from the Sargasso Sea
SKVNEMLDLVGLPKRVAESYPSQLSGGQRQRVAIARALIMRPEVVICDEPTSALDVSVQSQILNLLQDLRLELGLTYLMISHNLAVVEHMADRVAVMYLGRIVEEAESAVLFKEPKHPYTRALLSSVLTPDPRLGVPDTQLGTIFPNPIDPPTGCSFHPRCASRIDICSQKTPAPHLEKQHMAECHLFSK

SEQ ID NO: 172528 - protein, 262 aa, Unknown
  Bacterial polypetide isolated from the Sargasso Sea
ETPTNGEIYLDKNPISNIPPHKRGIGMVFQNYALFPHMTVYENLAFPLKVRKFQKDEIDKKVDKALSMVSLSGFEHRMPGQLSGGQQQRVAVARSLVFDPQLVLMDEPLGALDKNLRESMQYEIKHIHESIGVTVVYVTHDQSEALTMSNRIAVFNDGKVQQLSSPDKLYEEPVNSFVAEFIGENNTFAGQVTNMSAKECKVKLNDGTEIVANPISVKSNGDKTTVSLRPERALINTKEKMDNNFKGKIEEVIYHGDHTRVR

SEQ ID NO: 172529 - protein, 288 aa, Unknown
  Bacterial polypetide isolated from the Sargasso Sea
MKDRSKEDEVADININTVNKYYGDVHVIKDVSLDIKSQSFTVLVGPSGCGKSTMLRMIAGLEDINSGTISIDGQVVNDLPPKQRNIAMVFQSYALYPHMTVFDNMAFGLKLEKRSKDEINERVQEAARILQIEDYLHRKPKQLSGGQRQRVAIGRAITRKPKVFLFDEPLSNLDAALRVQMRVELAKLHDQLNATMIYVTHDQTEAMTLANDIVVLDEGIVSQKGSPMDLYNDPNNLFVGGFIGSPKMNFISTKITSKSNDKTEVDLMGSKKISIPKTSASASEGDAG

SEQ ID NO: 172530 - protein, 187 aa, Unknown
  Bacterial polypetide isolated from the Sargasso Sea
MGAIKINSVGKVYPNGTRALEDVNIEIKNGEFVVLVGPSGCGKTTLLRMVAGLEDITEGEISIDKKIVNEVAPKDRDIAMVFQNYALYPHMSVYDNMAFSLKLRKLAKEEIDQKVKEAAKILEIDELLERKPKALSGGQRQRVAMGRAIVRKPEAFLMDEPLSNLDAKLRVQMRAELGQLHTQLETT

SEQ ID NO: 172531 - protein, 170 aa, Unknown
  Bacterial polypetide isolated from the Sargasso Sea
VLIDNKNVNRVRASERDLAMVFQSYALYPHLTVRRNLETPLRLRDYNAFERLPLIGNFSPSKKEKTESINQLVNKTSETLKISELLDRKPGQLSGGQRQRVALGRAMVREPVAFLMDEPLSNLDAALRVHMRSELSELHNSLKTTFVYVTHDQAEALTMYSRMAVMIDGN

SEQ ID NO: 172532 - protein, 222 aa, Unknown
  Bacterial polypetide isolated from the Sargasso Sea
MEQYLSVKNINKYFGEFQALKNVSFDVKEGEFVCILGPSGCGKTTLLRVIAGLESQSDGLINQNHKDISLLPPDQRDFGIVFQSYALFPNLSVKNNISFGLKTRKQNKEIIDKRVDELLKLVGLSDHINKFSAQLSGGEQQRVALARALAPSPGLLLLDEPLSALDAKVRQYLRLEIKNLQRQLGVTTIMVTHDQEEALTMADRIILMNNGVIEQEGSPQDL

SEQ ID NO: 172533 - protein, 132 aa, Unknown
  Bacterial polypetide isolated from the Sargasso Sea
GLSEEYYNRFPNQLSGGQRQRVAIARAIILKPQILICDEPTSALDVTIQSQILDLLNDLKQKLKITIILISHDISVVKYFSDRIIVMYNGQIVETGNSEEIINNPKETYTKKLMSSVFSLKQNNKILDDNFI

SEQ ID NO: 172534 - protein, 277 aa, Unknown
  Bacterial polypetide isolated from the Sargasso Sea
SGEIYLEGEPISSIPPYKRGIGMVFQNYALFPHMTVNENLAFPLEVRKLSKSEIDEKVHKALSMVELQDFGTRMPLQLSGGQQQRVALARALVFEPRLVLMDEPLGALDKKLREQMQYEIKHIHERIGITVVYVTHDQSEALTMSNRIAVFNDGKIQQISTPDVLYEKPDNSFVAQFIGENNQLRGKVKSVNGKNCVVETENGDEIVSLKINVNNVGEQSLLSLRPERVWVNVENDGYENNFEAKVEELIYLGDHVRTRVKVCGDDQFIVKIPNSSD

SEQ ID NO: 172535 - protein, 303 aa, Unknown
  Bacterial polypetide isolated from the Sargasso Sea
THVIKDVSLDIKSVSFTVLVGPSGCGKSTILRMIAGLEEINSGTISIDDKVVNDLPPKERNIAMVFQSYALYPHMTVFDNMAFGLKIEKKSKEEIEQRVMEAAKILQIEEYLERKPKQLSGGQRQRVAIGRAITRKPKVFLFDEPLSNLDAALRVQMRVELAKLHDQLNATMIYVTHDQTEAMTLANDIVVLDQGIVSQKGSPMNLYNNPDNLFVGGFIGSPKMNFIDSKILSKSSKSSEVDIMGTGKLNVPKISENIKEGDSIKIGIRPEHLILNAESDSLWESKVFVVEKLGSGTYLYLEK

SEQ ID NO: 172536 - protein, 254 aa, Unknown
  Bacterial polypetide isolated from the Sargasso Sea
MSFGLKLKKNLREEIQTKVMQAAKILKIEELLERRPKQLSGGQRQRVAIGRAITRNPKIFLFDEPLSNLDAALRSEMRVEISKLHNQIKTNMIYVTHDQVEAMTLADRIVILNLGNIEQVGTPDEIYNNPANIFVAQFIGTPKMNILPLNNENIISENKIKFLGNQIIFEKTKFDKKKYFLGIRPEHFNLSNESQFKFKPKIDLVENLGNEKIVYMSNDNLELSAKISSQEDFQNQINFDSKDIFIFDENGRRI

SEQ ID NO: 172537 - protein, 205 aa, Unknown
  Bacterial polypetide isolated from the Sargasso Sea
MNDASQSFVKFEKIDKSYDGEVLVVKNLNLDIAKGEFVTMLGPSGSGKTTTLMMLAGFETPTNGEIFLDTKPISKIPPYEREIGMVFQNYALFPHMTVAENLSFPLEVRKISKPDIKEKVQKALDMVELGNFGTRFPAQLSGGQQQRVALARALVFEPRLVLMDEPLGALDKNLREQMQYEIKHIHDRIGITVVYVTHDQSEALT

SEQ ID NO: 172538 - protein, 233 aa, Unknown
  Bacterial polypetide isolated from the Sargasso Sea
MKDRSKEDEVADININTVNKYYGDVHVIKDVSLDIKSQSFTVLVGPSGCGKSTMLRMIAGLEDINSGTISIDGQIVNDLPPKQRNIAMVFQSYALYPHMTVFDNMAFGLKLEKRSKDEINERVQEAARILQIEDYLLRKPKQLSGGQRQRVAIGRAITRKPKVFLFDEPLSNLDAALRVQMRVELAKLHDQLNATMIYVTHDQTEAMTLANDIVVLDEGIVSQKGTPMELYNN

SEQ ID NO: 172539 - protein, 155 aa, Unknown
  Bacterial polypetide isolated from the Sargasso Sea
MEDFVKFERIDKSYDGEVLVVKDLNVDIAEGEFLTLLGPSGSGKTTTLMMLAGFETPTNGEIYLKGTPISKIAPYERGIGMVFQNYALFPHMTVQENLAFPLEVRKMSKADAQEKVKAALDMVELGEFGTRFPAQLSGGQQQRVALARALVLNLN

SEQ ID NO: 172540 - protein, 285 aa, Unknown
  Bacterial polypetide isolated from the Sargasso Sea
AGLEDIVEGEIQLDDKVMNQIHPRDRDIAMVFQNYALYPQMNVFDNIAFSLQIRKISKDEIVKKVNWAAEILNLTEYLKRLPKELSGGQRQRVAMGRALVRDPKVFLFDEPLSNLDAKLRSHMRYEIRKLHNDLQTTTIYVTHDQIEAMTMADEIVVMNNGIIEQIGSPFEIYAKPNNTFVADFIGSPSINFMKGIVTDNNSVKLNSIELPLKTIKLSSGSEVYFGVRPVDVLLDSTSKLTVNVDLVETTGSETHLSTFFDNEHFHIVVPGGQTDIKIGDKLNIS

SEQ ID NO: 172541 - protein, 175 aa, Unknown
  Bacterial polypetide isolated from the Sargasso Sea
MGAIDIKSAGKIYPNGTRALEDVSITINDGEFVVLVGPSGCGKTTLLRMVAGLEDITEGEIAIGDKTVNEVAPKDRDIAMVFQNYALYPHMSVFDNMAFSLKLRKLPKNEIEKKVKDAAKTLEIGELLDRKPKALSGGQRQRVAMGRAIVRNPQAFLMDEPLSNLDAKLKSSDEG

SEQ ID NO: 172542 - protein, 182 aa, Unknown
  Bacterial polypetide isolated from the Sargasso Sea
DGIELTGNLKNIDNVRKEVGMVFQQFNLFPHLSVKENITLAPIWVKKMPKAEAEELAMRQLEIVKIPEQANKYPGQLSGGQQQRVAIARSLAMNPNIMLFDEPTSALDPEMIKEVLDVMVDLANGGMTMIVVTHEMGFAKTVADRMVFMDEGKIVEEASPDKFFNNPESDRTKLFLSQILHQ

SEQ ID NO: 172543 - protein, 258 aa, Unknown
  Bacterial polypetide isolated from the Sargasso Sea
MGVHKSFGSNKIITDFNLSGKDDEFLVLVGPSGCGKSTLLRMIAGLEQIDEGEIFINDQKINDLHPSKRQTAMVFQSYALYPHMNVYENMSFGLKIEKRSKEEIQTKVMQAAKILKIEELLERRPKQLSGGQRQRVAIGRAITRNPKIFLFDEPLSNLDAALRSEMRVEISKLHNQIKTNMIYVTHDQVEAMTLADRIVILNLGNIEQVGTPDEIYNNPANIFVAQFIGTPKMNILPLNNENIISENKIKFLGNEITF

SEQ ID NO: 172544 - protein, 246 aa, Unknown
  Bacterial polypetide isolated from the Sargasso Sea
IDSKTINSKVKEIAELVYIPELLKRKPAQLSGGQQQRVALARALIRKPDILLLDEPLANLDAKLRLEMRSEIKRIQKETGITAILVTHDQVEAMSMCDRIALMKDGKIIQLSTPDEMYKNPKDKFVAGFIGNPPISFVEGFYKNGMFSTKDLNINLAKNLNISENTDLTLGIRPEHFGPQYEDKISGKISFVETQGREDLYDVNFNDYVTIRSIQPSENRVELNSEVNWGILTEGILLFDKDGKRL

SEQ ID NO: 172545 - protein, 255 aa, Unknown
  Bacterial polypetide isolated from the Sargasso Sea
YGLENQRVPKPEIRKRVVELLELVGLPEQTSKYPAQLSGGQQQRVALARALATSPGLLLLDEPLSALDARVRASLRQEIRALHQRLGITTILVTHDQEEALSMADRIVVMDHGSIEQVGTPEEIYSTPASPFVADFIGVMNFMEAEVLASGTIRVGETSLSCDTTNVSSGEKVRMTVRPEDLRCHTKTVDLPNGLPVHVDTLEFLGSFCRLKLKGPEGFSTLRADLSLQQVHQLKAAPDVPLTVEFPPDSLRLFP

SEQ ID NO: 172546 - protein, 270 aa, Unknown
  Bacterial polypetide isolated from the Sargasso Sea
AACQSIFAVLDEEIEKDAGSLDANKIKGNISFNNVTFTYPGKHTPAIDSMNLDAPAGTSIALVGRSGSGKSTMSSLLTRFYLPEQGQITLDNTDINEFKLTELRKNIALVSQQVTLFNDTIANNIAYGVAENVSREAIEKAAKLAHVMEFAELLEDGLDTMIGEDGSALSGGQRQRVAIARALLLDAPVLILDEATSALDTESERMIQDALVTLQQDRTSIIIAHRLSTIENADQILVIDQGKIIEQGKHQDLLNKGGAYAQLHALQFGE

SEQ ID NO: 172547 - protein, 232 aa, Unknown
  Bacterial polypetide isolated from the Sargasso Sea
MKKAEVKFENITKKFNETTAVDNVSCKFEAGTLTTLLGPSGCGKTTSLRIIAGLERATSGKILVDDEDVTLLPATDRDVSMVFQSYALFPHMSVIENVSYGLKMINVNKEEYIQKSLETLKLVNLEGYENRMPSELSGGQQQRVAVARAIVLEPKVLLFDEPLSNLDAKLRRQVREDIREIQQKLGVTTIYVTHDQEEALAISDKVIVMNNAVIAQEGSPKDLYNYPKKINL

SEQ ID NO: 172548 - protein, 191 aa, Unknown
  Bacterial polypetide isolated from the Sargasso Sea
MADSKKNQTKVSPSVIKISSLNKWFGNFHVLQDIDLTVSQGEKIIICGPSGSGKSTLIRCINRLEEHQEGTIIVNGTELSHDLKDIDAVRSEVGMVFQSFNLFPHLTALENCTLALIWVRKTPKAEAEATAMQYLERVKIPEQAHKYPGQLSGGQQQRVAIARSLCMKPKIMLFDEPTSALDPEMIKEVLD

SEQ ID NO: 172549 - protein, 269 aa, Unknown
  Bacterial polypetide isolated from the Sargasso Sea
MSEIIIKNLNKSYGKNKVINSFNIDIRDGEFIVLVGPSGCGKSTLLRMISGLETVDEGEIFLDKKLINNLIPSKRGIAMVFQSYALYPHMNVYENMSFGLKMEKLSKSEIDKKVTEAASTLQIKDLLERKPKELSGGQRQRVAIGRAITRNPKLFLFDEPLSNLDAALRSEMRVEISKLHEKMKSNIIYVTHDQVEAMTLADRIVILNNGNVEQFGTPNEIYSDPNNIFVAEFIGSPKMNIIKIDKENIINGDTIKVLNNEIKLKQINL

SEQ ID NO: 172550 - protein, 244 aa, Unknown
  Bacterial polypetide isolated from the Sargasso Sea
MSDKIIQITEMNKWFGDFQVLKDINLEVEKNKKIVVCGPSGSGKSTLIRCINRLEEHQKGSIIVDGNELTEDTKDIEKIRAEVGMVFQQFNLFPHLSILDNCTLAPIWVKKMPKKDAEELALQHLEKVQIADQASKYPGQLSGGQQQRCAIARALCMEPKIMLFDEPTSALDPEMIKEVLDAMVNLAKAGMTMIVVTHEMGFAKEVADEVIFMDEGMIVERAETKEFFANPKSDRTKLFLSQIL

SEQ ID NO: 172551 - protein, 237 aa, Unknown
  Bacterial polypetide isolated from the Sargasso Sea
MAKNNEFVKFDKVDKSYDGKVLVVKDLNLDIAEGEFITMLGPSGSGKTTCLMMLAGFETPTNGEIYLDGNPISNIPPHKRGIGMVFQNYALFPHMTVYENLAFPLRVRKISKDETDKKVEKALSMVSLTGFGSRMPAQLSGGQQQRVAVARALVFDPAVVLMDEPLGALDKNLRESMQYEIKHIHESIGVTVVYVTHDQSEALTMSNRIAVFNDGKVQQLSSPDKLYEEPSKFIVAE

SEQ ID NO: 172552 - protein, 315 aa, Unknown
  Bacterial polypetide isolated from the Sargasso Sea
GRNTLKGVTKTYGSQSVLNDINLDIADGEFLTLVGPSGCGKSTTLRIIAGLETQSTGDVFIDGSTVNETRPSKRDLAMVFQSYALYPHLTVHQNLITPLKLRDLTALERVPLFGHLMPERSKKMSTISAEVQKVAEILKIEPLLDRKPGQLSGGQRQRVALGRAMVRNPAAFLMDEPLSNLDASLRVHMRAELSELHRELKATFIYVTHDQAEALTMSDRIAVMMDGDLLQLGPPDEVYENPTDIRVAEFIGSPKMNILPASCDAKGSVDCLGQKIKIALTKNKKQTLSIGIRPEHLVLPSGAKSSFSGKLTYKE

SEQ ID NO: 172553 - protein, 197 aa, Unknown
  Bacterial polypetide isolated from the Sargasso Sea
MSEAQQPYLRIEDLTKHFGEFVAVRELSLEINGGEFVCFLGPSGCGKTTLLRAIAGLNPQTTGRITQNGQDISSLPPSERDFGIVFQSYALFPNLTVFQNIAYGLENQRVPKSEIRKKVVELLELVGLPEQTSKYPAQLSGGQQQRVALARALATSPGLLLLDEPLSALDARVRASLRQEIRALHQRLGITTILVTH

SEQ ID NO: 172554 - protein, 174 aa, Unknown
  Bacterial polypetide isolated from the Sargasso Sea
MSDPIIKIQNMNKWFGDFQVLKNINLEVEANKKIVVCGPSGSGKSTLIRCINRLEEHQEGDIIVDGNELSEKTKDIEKIRAEVGMVFQQFNLFPHLSILDNCTLAPIWVKKMPKKEAQELALDQLKKVQIDDQANKFPGQLSGGQQQRCAIARALCMQPKIMLFDEPTSALDPE

SEQ ID NO: 172555 - protein, 206 aa, Unknown
  Bacterial polypetide isolated from the Sargasso Sea
MSENSIISLQNVNKWFGDFQVLKDVNLEVKKKERIVVCGPSGSGKSTMIRCINRLEEHQEGKIVVDGIELTGNLKNIDSVRKEVGMVFQQFNLFPHLSVKENITLAPIWVKKMPKAEAEELAMKQLEIVKIPEQANKYPGQLSGGQQQRVAIARSLAMNPNIMLFDEPTSALDPEMIKEVLDVMVDLAEGGMTMIVVTHEMGFAKT

SEQ ID NO: 172556 - protein, 253 aa, Unknown
  Bacterial polypetide isolated from the Sargasso Sea
MSGVTLEKIVKRYGSTVAVDDISLNIKEGEFLTLLGPSGCGKTTTLRLISGFIQPTSGAIHFGEKDVTGIAPQHRQIGMVFQDYALFPHLTVSENISFGLVERKYEKHAIKERVDELLALIKLENAAERYPSEISGGQAQRVAVARAVAHPPSVLLMDEPLGALDLKLRETMQTELRRIQQELGITAVYVTHDQSEAMNMSDRIVVMNSGVIEQIGSPKDIYTNPQSVFVANFIGQVNILNCHVVKNDRETTE

SEQ ID NO: 172557 - protein, 303 aa, Unknown
  Bacterial polypetide isolated from the Sargasso Sea
VKSTLLRLVAGLEDVTQGEIEIDGQRVDHLPPAKRGIAMVFQSYALYPHMNVYQNMSFGLRLAKTDKKITDQKVRDAAEILQITELLDRKPKELSGGQRQRVAIGRAIVRDPMVFLFDEPLSNLDAKLRVQMRIELTKLHRELNATMIYVTHDQVEAMTMADKIVVLREGYVEQVGAPLDLYHKPANIFVAGFIGSPAMNFMDGTTSGISDKAVELELNSKLKIKIPCTPGNDAATGSPVSVGVRPEHLELTSDKEAKLRGEVFAVERLGGETYLYVSTESNKELTVHAAGDKVVSVGDSVSI

SEQ ID NO: 172558 - protein, 248 aa, Unknown
  Bacterial polypetide isolated from the Sargasso Sea
MKKKIGKEIISAENVVKKFGDFAALKGVTAKIFEKEVVVVLGPSGSGKSTFIRTINRLEPHNSGKIVVDGVEINDDVKNLQKVRSNVGMVFQQFNLFPHLSVLRNITLAPQKVKGLSRAEANDVAMSLLERVGIPEQAEKFPSQLSGGQQQRVAIARALAMQPKIMLFDEPTSALDPEMIKEVLEVMTELAESGMTMICVTHEMGFARSVADRFLFFDEGLIVEEGTPEHFFKNPKEERTKLFLSQIL

SEQ ID NO: 172559 - protein, 226 aa, Unknown
  Bacterial polypetide isolated from the Sargasso Sea
MSDKIIQITEMNKWFGDFQVLKNINLEVEKNKKIVVCGPSGSGKSTLIRCINRLEEHQQGSIIVDGNELTEDTKDIEKIRAEVGMVFQQFNLFPHLSILDNCTLAPIWVKKMPKKDAEELALQHLEKVQIADQASKYPGQLSGGQQQRCAIARALCMEPKIMLFDEPTSALDPEMIKEVLDAMVNLAKAGMTMIVVTHEMGFAKEVADEVIFMDEGMIVERAETKE

SEQ ID NO: 172560 - protein, 264 aa, Unknown
  Bacterial polypetide isolated from the Sargasso Sea
MKTLKIEELSKNFGSTEVLKKINLEIDEGNFLVLLGPSGCGKSTLLNIIAGLETINEGNVFIDDYNVSKVEPKDRNIAMVFQSYALYPSMNVRENMIFGLKQAKTSKEKIEEQLEKVSKFLQVDQLLERKPSQLSGGQRQRVAIGRALVREPRIFLFDEPLSNLDAKLRVEMRREIKKLHQQLKTTVVYVTHDQTEAMSLGTRIAIMNHGVIQQNDTPEIIYNKPSNTFVADFIGSPSMNLINGTLKETSSEISFTASGFYIEI

SEQ ID NO: 172561 - protein, 239 aa, Unknown
  Bacterial polypetide isolated from the Sargasso Sea
IKINDVNKWFGDFQVLKNINLDVKPKQKIVVCGPSGSGKSTLIRCINRLEEHQEGTIIVDGNELNENTKNIEEIRAEVGMVFQQFNLFPHLSILDNCTLAPIWVKKMPKKKAEELALKQLEQVQIADQAYKFPGQLSGGQQQRSAIARALCMEPKIMLFDEPTSALDPEMIKEVLDAMVNLAKGGMTMIVVTHEMGFAKEVADEVIFMDEGMIVEKNTTKEFFANPKSDRTKLFLSQIL

SEQ ID NO: 172562 - protein, 294 aa, Unknown
  Bacterial polypetide isolated from the Sargasso Sea
MASKKDFVKFDKVDKSYDGKILVVKDLQLDIAEGEFITMLGPSGSGKTTCLMMLAGFETPTNGEIYLDGNAISSIPPHKRGIGMVFQNYALFPHMTVYENLAFPLRVRKIPKDEADKKIDKALSMVSLQGFAARMPGQLSGGQQQRVAVARSLVFDPQLVLMDEPLGALDKNLRESMQYEIKHIHESIGVTVVYVTHDQSEALTMSNRIAVFNDGKVQQLSSPDELYEKPVNSFVAEFIGENNTFVGEVSDIFDGKCKVKLANAEILANPISVRGKGEKTTVSLRPERALINPS

SEQ ID NO: 172563 - protein, 265 aa, Unknown
  Bacterial polypetide isolated from the Sargasso Sea
KVLVVKDLNLDINEGEFITMLGPSGSGKTTCLMMLAGFETPTNGEIYLDSKPISRIPPHKRGIGMVFQNYALFPHLTVYENLAFPLKVRKLAKDDIDKKVDKALSMVSLSGFEKRMPNQLSGGQQQRVAVARSLVFDPQLVLMDEPLGALDKNLRESMQYEIKHIHENIGVTVVYVTHDQSEALTMSSRIAVFNDGKVQQLSSPDKLYEEPVNSFVAEFIGENNTFSGQVTDISGGKCKVKLDTGAEIISNPIRVKTKGEKTKVS

SEQ ID NO: 172564 - protein, 116 aa, Unknown
  Bacterial polypetide isolated from the Sargasso Sea
SGAALKYPGQLSGGQLQRVAIARALCMQPQLMLFDEPTSALDPEMIKEVLDTMVELAEDGMTMICVTHEMGFARKVADRVIFMDEGQIIEQNEPEAFFNNPQSDRTKLFLSQILGH

SEQ ID NO: 172565 - protein, 299 aa, Unknown
  Bacterial polypetide isolated from the Sargasso Sea
MPARSIGVVRKPMHRPPWTPERNAAMANLFDVPQFIEDAPSRGLNRVAPDTAQHAVVFDNVGKLFANTRGVSTAALSNVTLKVARGEVFGIIGRSGAGKSTLLRLVNGLEKPSSGVVRVNGVSVGELDERGLVTLRRRIGMVFQHFNLLSAKTVRENIALPLKIAGAPKAAIDKKVDGLLDLVGLSSKRDAYPASLSGGQKQRVGIARALVTDPDILLCDEATSALDPETTQAILALLRDINQRLKLTIVLITHEMQVIREVCDTVAVIERGEVVETGSVWRVFGDPQHDATRALLRTL

SEQ ID NO: 172566 - protein, 180 aa, Unknown
  Bacterial polypetide isolated from the Sargasso Sea
MSSELMIEMKNVHKWFGELHVLNDINLEINKGEKIVICGPSGSGKSTLIRCINRLEEHQRGNIIVEGTELTNDSRSIERIRGEVGMVFQQFNLFPHLSILDNCSLAPIWVRKLPKAEAKEKAMEYLKRVQIDDQAHKYPAQLSGGQQQRAAIARALCMEPRIMLFDEPTSALDPEMIKEV

SEQ ID NO: 172567 - protein, 177 aa, Unknown
  Bacterial polypetide isolated from the Sargasso Sea
MSKIVIKNLEKSFGDNKVINKFNIDIKDGEFIVLVGPSGCGKSTLLRMVSGLESIDQGEIFLDTKLINNLIPSKREIAMVFQSYALYPHMNVFENMSFGLKMEKIPKNEIKEKVYSAAATLQIEDLLDRKPKQLSGGQRQRVAIGRAITRNPKVFLFDEPLSNLDAALRSEMRVEIS

SEQ ID NO: 172568 - protein, 122 aa, Unknown
  Bacterial polypetide isolated from the Sargasso Sea
LVSQEPALFTGSIADNIKYGQPDASLEDVRHAASLANALQFIDALPEGFDTQVGSRGVQLSGGQKQRVAIARAIVRNPRLLILDEATSALDAKSEQIVQAALDGLVAASSCTTLVIAHRLST

SEQ ID NO: 172569 - protein, 213 aa, Unknown
  Bacterial polypetide isolated from the Sargasso Sea
MADVKMSSIYKSFGNTEVIHGVDLEIEDHEFVVFVGPSGCGKSTLLRLIAGLEDVTQGEIEIDGQRVDHLPPAKRGIAMVFQSYALYPHMNVYQNMSFGLRLAKTDKNITDQKVREAAEILQITELLDRKPKELSGGQRQRVAIGRAIVRDPKVFLFDEPLSNLDAKLRVQMRIELTKLHRELNATMIYVTHDQVEAMTMADKIVVLREGYVE

SEQ ID NO: 172570 - protein, 206 aa, Unknown
  Bacterial polypetide isolated from the Sargasso Sea
MEVLDLIQMQEYATRKPNQLSGGQQQRVALARALAPEPKVLLLDEPLSALDLKLRQAMRVELKTLQRETGITFVFVTHDQEEALTMSDRIAVINEGEIQQIGKPEEIYESPNNKFVANFIGEANLLSAVCNSLGENGTCKLNTGHELRLSIPSHIQKGDELTIFIRPERIKISKSSADESSVSISEFTYLGNAASIQMHANNQVIH

SEQ ID NO: 172571 - protein, 286 aa, Unknown
  Bacterial polypetide isolated from the Sargasso Sea
IINNLIPSKRGIAMVFQSYALYPHMNVYENMSFGLKNEKLDKNEIDKKVKDAAKTLQIEDLLERKPRQLSGGQRQRVAIGRAITRNPKLFLFDEPLSNLDAALRSEMRVEISKLHKKLSTNMIYVTHDQVEAMTLADKIVILNQGVIEQYGSPDEIYNNPNNIFVAEFIGSPRMNILKIDKGKIKNGNTINIFNSDIQFNGYKFNDDIYLGIRPEHIKADNSQDIKAKIKIDLIENLGFDKIIYSSVDGEEFRIKTSSNIDKNHSQISFSKGNVYFFDSNKNRIKN

SEQ ID NO: 172572 - protein, 214 aa, Unknown
  Bacterial polypetide isolated from the Sargasso Sea
MSDSIIQINNMNKWFGDFQVLKKINLEVKPKEKIVVCGPSGSGKSTLIRCINRLEEHQEGNIIVDGTELTEDTKNIEQIRAEVGMVFQQFNLFPHLSILDNCTLAPIWVKKMPKKDAEELALKHLERVQILDQAQKYPGQLSGGQQQRAAIARALCMEPKIMLFDEPTSALDPEMIKEVLDVMVNLAKQGMTMIVVTHEMGFAKEVADQMIFMD

SEQ ID NO: 172573 - protein, 137 aa, Unknown
  Bacterial polypetide isolated from the Sargasso Sea
RKLPKREAEELAVEYLTRVKIPEQAHKYPGQLSGGQQQRVAIARSLCMQPKIMLFDEPTSALDPEMIKEVLDVMIELAETGMTMLVVTHEMGFASKVADRVIFMDEGQIIEQNKPQAFFNKPKSDRTKLFLSQILGH

SEQ ID NO: 172574 - protein, 165 aa, Unknown
  Bacterial polypetide isolated from the Sargasso Sea
MTEEPIISFDKVNKWFGDFHVLRDIDLNVTKGERIVICGPSGSGKSTLIRCINRLEAHQRGSIIVDGIELNDDLKNIDSIRSEVGMVFQSFNLFPHMTVKDNLVIGQHLVRRVPKRDAEDIAITYLKRVKILDQIDKYPGQLSGGQQQRVAIARSLCMKPKNYVI

SEQ ID NO: 172575 - protein, 229 aa, Unknown
  Bacterial polypetide isolated from the Sargasso Sea
MVEQVRRLGKIELISLSKYFGESAAVDEISLSIPAASYCCLLGPSGCGKTTTLRLIAGHETASDGSVLISNREVTDAPPASRGTAMMFQNYALFPHLNCLENVAFSLRMQGINKEERNSRATELLSLVHMDSFSGRMPSQLSGGQQQRIALARALITKPDVLLLDEPLSALDPFLRTRMRAELRQLQKKLGITFVHVTHSQDEAMALSDLVVVMQSGRIEQAGHPREVF

SEQ ID NO: 172576 - protein, 148 aa, Unknown
  Bacterial polypetide isolated from the Sargasso Sea
MSKKADFVKFDKVDKSYDGKVLVVKDLNLDIEEGEFVTMLGPSGSGKTTCLMMLAGFETPTNGEIFLDNNPISNIPPHKRGIGMVFQNYALFPHMTVFENLAFPLKVRKMSQEDIEKKVDKALSMVSLGGFANRMPGQLSGGQQQRVA

SEQ ID NO: 172577 - protein, 177 aa, Unknown
  Bacterial polypetide isolated from the Sargasso Sea
MIGGLHVNNLSHAFGNETVVNGVSVFVAPGEVVCLLGPSGCGKTTLLRVAAGLERLQKGQVRIGETMVDDGATGLHVPSNQRDIGLMFQDYALFPHLSVRENIRFGVSANTPSRWAWAEVALAQMGLSHHADSYPHTLSGGQQQRVALLRALATKPSVLLLDEPFSGLDIARRAAVR

SEQ ID NO: 172578 - protein, 208 aa, Unknown
  Bacterial polypetide isolated from the Sargasso Sea
NLLLRFHDVQSGRILIDGQDIAQVTQDSLRRHIGMVTQDTSLLHRSMRDNILYGRPDASEADLHQAAERAEAADFIATLTDLQGRTGYDAHVGERGVKLSGGQRQRVAIARVMLKDAPILLLDEATSALDSEVEAAIQQSLDGLMKGKTVIAIAHRLSTIAAMDRLIVMDGGRIVEEGTHAQLLGQGGVYARLWGHQSGGFLGESEED

SEQ ID NO: 172579 - protein, 243 aa, Unknown
  Bacterial polypetide isolated from the Sargasso Sea
MSVNKEFVKFDKVDKSYDGKVLVVKDLQLDIAEGEFITMLGPSGSGKTTCLMMLAGFETPTNGEIYLNGNAISSIPPHKRGIGMVFQNYALFPHMTVYENLAFPLRVRKIPKDEADKKIDKALSMVSLQGFASRMPGQLSGGQQQRVAVARSLVFDPQLVLMDEPLGALDKNLRESMQYEIKHIHENIGVTVVYVTHDQSEALTMSNRIAVFNDGKVQQLSSPDELYEKPVNSFVAEFIGENN

SEQ ID NO: 172580 - protein, 160 aa, Unknown
  Bacterial polypetide isolated from the Sargasso Sea
MVFQQFNLFPHLSILDNCTLAPIWVKKLPKKDAEELALKHLERVQILDQAQKFPGQLSGGQQQRVAIARALCMEPKIMLFDEPTSALDPEMIKEVLDVMVNLANQGMTMIVVTHEMGFAKEVADSMIFMDEGKIVEKADTKEFFANPKNERTKLFLSQIL

SEQ ID NO: 172581 - protein, 251 aa, Unknown
  Bacterial polypetide isolated from the Sargasso Sea
LGPSGCGKSTLLRIVAGLEKATDGRVLIDAQDVTEQEPGTRDIAMVFQNYALYPHMTVFKNIAYGLKNRKISGVEINSRVKEVAETLQIEEYLDRKPSHLSGGQRQRVAMGRAIARNPKVFLFDEPLSNLDAKLRVQVRLEISRLQSELGVTSLYVTHDQVEAMTLGHRLVLMNDGRIEQIGEPLQVYESPETLFVAGFIGSPPMNLVPGELNEKGDFILGTTVNIKLDDVQTKSKNVTLGIRPEHLFTDE

SEQ ID NO: 172582 - protein, 259 aa, Unknown
  Bacterial polypetide isolated from the Sargasso Sea
EVLRKINLEIDEGNFLVLLGPSGCGKSTLLNIIAGLETINEGNVFIDDYNVSKVEPKDRNIAMVFQSYALYPSMNVKENMIFGLKQAKTSKEKIEEQLEKVSTFLQVDKLLERKPSQLSGGQRQRVAIGRALVREPRIFLFDEPLSNLDAKLRVEMRREIKKLHQQLKTTVVYVTHDQTEAMSLGTKIAIMNHGVIQQNDTPEIIYNKPSNTFVADFIGSPSMNLIKGKIIHNSNNISFIADGSTLEVPINNYDFKEKS

SEQ ID NO: 172583 - protein, 238 aa, Unknown
  Bacterial polypetide isolated from the Sargasso Sea
MVFQNYALFPHMTVQENLAFPLEVRKISKSDTETKVKQALDMVELGSFGTRFPAQLSGGQQQRVALARALVFEPRLVLMDEPLGALDKNLREQMQYEIKHIHDRIGITVVYVTHDQSEALTMSNRIAVFNDGVVQQLSTPDILYEKPENSFVAKFIGENNTLNGTVKEINGNMCTIDLDDNQGTVKALKINVNTVGDKTQLSIRPERVIINSDNQENNFKGKILELIYLGDHIRARLD

SEQ ID NO: 172584 - protein, 172 aa, Unknown
  Bacterial polypetide isolated from the Sargasso Sea
LKNIEQIRAEVGMVFQQFNLFPHLSILDNCTLAPIWVKKLPKKEAEELALKHLERVQILDQAQKYPGQLSGGQQQRCAIARALCMEPKIMLFDEPTSALDPEMIKEVLDVMVNLAKQGMTMIVVTHEMGFAKEVADQMIFMDEGMIVEKADTKEFFANPKSDRTKLFLSQIL

SEQ ID NO: 172585 - protein, 287 aa, Unknown
  Bacterial polypetide isolated from the Sargasso Sea
VSGIDLEIKNNEFVVLVGPSGCGKSTTLRMIAGLEEVTEGEILIGGELVNDVPPKDRDIAMVFQNYALYPHMTVFQNMSFGLRLRKYPKDDIRKRVEDAAEVLGITELLNRRPKQLSGGQRQRVAMGRAIVRNPRVFLFDEPLSNLDAKLRGQMRIEIKRVHQHLKTTTVYVTHDQVEAMTLADRVVVMNAGLIDQVGTPGELYHSPRTRFVAGFIGSPAMNFLDCELGESDGGLVIKTGSELTLPVPSGRVERYRGHVGKPLTLGIRPEHITEERVTEMVSLFSRR

SEQ ID NO: 172586 - protein, 184 aa, Unknown
  Bacterial polypetide isolated from the Sargasso Sea
MTQKKVNAIEVKNVTKVYRSSNSETKALRNANLTIYDNEFFTLLGPSGCGKTTLLRLIAGFEDITEGSINLFDQEIVNLPPNKRPVNTVFQQYSLFPHLNVYENVAFGLRRLKKDESLVKSRTFEVLELVQMKEYANRKPNQLSGGQQQRVALARALAPEPKVLLLDEPLSALDLKLRQAMRFE

SEQ ID NO: 172587 - protein, 275 aa, Unknown
  Bacterial polypetide isolated from the Sargasso Sea
KVVNDLPPKERNIAMVFQSYALYPHMTVFDNMAFGLKIEKKSKEEIEQRVMEAAKILQIEEYLERKPKQLSGGQRQRVAIGRAITRKPKVFLFDEPLSNLDAALRVQMRVELAKLHDQLNATMIYVTHDQTEAMTLANDIVVLDQGIVSQKGSPMNLYNNPDNLFVGGFIGSPKMNFIDSIILSKSSKSSEVDIMGTGKLNVPKISENIQEGDSIKIGIRPEHLILNAESDSLWESKVFVVEKLGSGTYLYLEKEGDPLVVQTDGDTDIKVGDTV

SEQ ID NO: 172588 - protein, 212 aa, Unknown
  Bacterial polypetide isolated from the Sargasso Sea
MSIIKTVDVKKWFGDFQALKGISMEVAEGEVLVICGPSGSGKSTFIRCINRLEQHQEGEIVVDGIELTNDLKNIEAIRSEVGMVFQSFNLFPHLTVMQNITLAPIWVRKKSRSESEEKAMELLERVGIPEQAQKFPGQLSGGQQQRVAIARALAMEPKIMLFDEPTSALDPEMIKEVLDAMKELAESGMTMIVVTHEMGFAKEVADRVMLFD

SEQ ID NO: 172589 - protein, 194 aa, Unknown
  Bacterial polypetide isolated from the Sargasso Sea
MSDPIIKIENVNKWFGDFQVLKDINLEVEKNKKIVVCGPSGSGKSTLIRCINRLEEHQKGNIIVDGTELSENTKNIEQIRAEVGMVFQQFNLFPHLSILDNCTLAPIWVKKMPKVQAEELAMKQLKQVQIADQANKYPGQLSGGQQQRCAIARALCMEPKIMLFDEPTSALDPEMIKEVLDAMVNLAKAGMTMM

SEQ ID NO: 172590 - protein, 215 aa, Unknown
  Bacterial polypetide isolated from the Sargasso Sea
MSDKIIQIKEMNKWFGDFQVLKNINLDVEKNKKIVVCGPSGSGKSTLIRCINRLEEHQEGSIVVDGTELTEETKNIEQIRAEVGMVFQQFNLFPHLSILDNCTLAPIWVKKMPKKDAEVLALKHLEKVQIADQAYKYPGQLSGGQQQRCAIARALCMEPKIMLFDEPTSALDPEMIKEVLDAMVNLAKAGMTMIVVTHEMGFAKEVADEVIFMDE

SEQ ID NO: 172591 - protein, 186 aa, Unknown
  Bacterial polypetide isolated from the Sargasso Sea
MSTVELKGIEKSFGTNKVINNFDIKIEHGEFIVLVGPSGCGKSTLLRMISGLESVDVGEIFLDEKLINNLIPSKREIAMVFQSYALYPHMNVYENMSFGLKTEKLDKKEIDKKVLAAAKTLQIEDLLDRKPRQLSGGQRQRVAIGRAITRNPKLFLFDEPLSNLDAALRSEMRVEISKLHKKLNTN

SEQ ID NO: 172592 - protein, 201 aa, Unknown
  Bacterial polypetide isolated from the Sargasso Sea
MKKAEVKFENITKKFNETVAVDNVSCTFEAGTLTTLLGPSGCGKTTSLRIIAGLERATSGKILVENEDVTLLPATDRDVSMVFQSYALFPHMSVLENVSYGLKMINVPKEEFTEKSLETLKLVNLEGYENRMPSELSGGQQQRVAVARAIVLKPKVLLFDEPLSNLDAKLRRQVREDIREIQQKLGVTTIYVTHDQEEALA

SEQ ID NO: 172593 - protein, 248 aa, Unknown
  Bacterial polypetide isolated from the Sargasso Sea
RKIDMSDPIIKINNMNKWFGDFQVLKDINLEVEKNKKIVVCGPSGSGKSTLIRCINRLEEHQKGTIVVDGTELTEETKNIEHIRAEVGMVFQQFNLFPHLSILDNCTLAPIWVKKLPKKDAEELALKQLKQVQIDDQANKYPGQLSGGQQQRCAIARALCMEPKIMLFDEPTSALDPEMIKEVLDAMVSLAKAGMTMIVVTHEMGFAKEVADEVIFMDEGMIIEKAETKEFFANPKSDRTKLFLSQIL

SEQ ID NO: 172594 - protein, 255 aa, Unknown
  Bacterial polypetide isolated from the Sargasso Sea
MKKAEVKFENITKKFYQTVAVDNVSCTFEAGTLTTLLGPSGCGKTTSLRIIAGLERATSGKILVENEDVTLLPATDRDVSMVFQSYALFPHMSVLENVSYGLKMINVPKEEFTEKSLETLKLVNLEGYENRMPSELSGGQQQRVAVARAIVLKPKVLLFDEPLSNLDAKLRRQVREDIREIQQKLGVTTIYVTHDQEEALAISDKVIVMNNAIIAQQGSPKELYNFPKTKFVANFIGDANVVKAEIINQNNNIYE

SEQ ID NO: 172595 - protein, 245 aa, Unknown
  Bacterial polypetide isolated from the Sargasso Sea
RVEKVLEMVELGQFGARRPAQLSGGQQQRVALARALVFEPDLVLMDEPLGALDKNLREQMQYEIKHIHENLGMTVVYVTHDQTEALTMSDRIAVFNEGVIQQLAPPNELYEKPENAFVADFIGENNRLTGTIKETNGSECLVAVEEAIITATNVHEQPEGSSVILSLRPERVVLNPEVGALKNIFEAEVLELIYLGDHVRCRMSICTNDDFVVKIPNDYTNISLNKGDVVKIGWQVTDCRALNTT

SEQ ID NO: 172596 - protein, 288 aa, Unknown
  Bacterial polypetide isolated from the Sargasso Sea
GKTTLLMVLAGFTNPDYGSVKFGDEEVILKPPHLRGIGMVFQNYALFPHMTVEQNVGYPQKLRGVSTSETKRSVEEALSTVKLEGLGHRGINELSGGQRQRVALARAIVFKPKILLMDEPLSALDKKLREEMQIELRQLHDTLNMTTVYVTHDQKEALTMSDRITVINDGELMQLGTPNEIYEHPNNHFIADFIGESSLLPVAVRNGKVSLNGEDITLAEGAEKTGDFLLVVRPEKAFLADKKIKGSNYFVGKLIDSIFQGESQLLVVKLNADDDDGHEVRVRVPNES

SEQ ID NO: 172597 - protein, 224 aa, Unknown
  Bacterial polypetide isolated from the Sargasso Sea
MSKNTEFVKFDKVDKSYDGKVLVVKDLNLDIAEGEFITMLGPSGSGKTTCLMMLAGFETPTNGEIYLDKNPISNIPPHKRGIGMVFQNYALFPHMTVYENLAFPLRVRKLNKDEIDKKVDKALSMVSLSGFANRMPGQLSGGQQQRVAVARALVFDPAVVLMDEPLGALDKNLRESMQYEIKHIHESIGVTVVYVTHDQGEALTMSNRIAVFNDGKVQQLSSPD

SEQ ID NO: 172598 - protein, 213 aa, Unknown
  Bacterial polypetide isolated from the Sargasso Sea
MGAIDIKSAGKIYPNGTRALEDVNITINDGEFVVLVGPSGCGKTTLLRMVAGLEDITEGEISIGDKTVNDVAPKDRDIAMVFQNYALYPHMSVFDNMAFSLKLRKLSKDEIDQKVKDAAKTLEISELLDRKPKALSGGQRQRVAMGRAIVRNPQAFLMDEPLSNLDAKLRVQMRAELGQLHTQLQTTTLYVTHDQVEAMTMGDRVAVIRKGEL

SEQ ID NO: 172599 - protein, 276 aa, Unknown
  Bacterial polypetide isolated from the Sargasso Sea
ISPHWSVFLRILHTGLKKEGLQKESIEEKVQKMLALVKLEGYENRKPNQLSGGQSQRVALARSLVKEPKVLLLDEPMAALDKKLRQSTQFELMDIHYELGITFVIVTHDQEEAMTLSDRIAIMEQGQFVQIGSPNLIYENPRSKFVADFLGNINLLEATITEQNDKEIVVDCAALGGELKFDQTEQANASEMTVALRPEKVMIEKNIPTNDDQSHIKGIVEDFGYFGNLSIYRVKTKSGHVIQVSKQNRDRVEQSIKWEDEVYLSWDNDSLMLLGE

SEQ ID NO: 172600 - protein, 164 aa, Unknown
  Bacterial polypetide isolated from the Sargasso Sea
MTNGGGIQEGNIVDLKSIQKTFDRIKAVNNVSIGIKEGEFFSLLGPSGCGKTTLLRVIAGFEVPEMGEVLINEKVVNSVPPNKRPTNMVFQNYAIFPHLNVAENVGYGLRNSKLDKNLLQKRVRETLSLVGLEGFDTRSSTALSGGQRQRVALARALILNLECC

SEQ ID NO: 172601 - protein, 198 aa, Unknown
  Bacterial polypetide isolated from the Sargasso Sea
MATLKVSNLTKSFGNTKVLKRINLEVNDGEFIVLLGPSGCGKSTLLNMIAGLESVDEGDILIDEYVVNRVEPKDRNIAMVFQSYALYPAMTVRNNVIFGLKQRKVSKEHIENSLNNFSKMLKIDQLLDRKPAQLSGGQRQRVAMGRALVREPQIFLFDEPLSNLDAKLRVEMRHEINKLHESLGTTMIYVTHDQVEAM

SEQ ID NO: 172602 - protein, 165 aa, Unknown
  Bacterial polypetide isolated from the Sargasso Sea
RAEVGMVFQQFNLFPHLSILDNCSLAPIWVKKLPKKQAEEIAMNNLKRVQIDDQALKFPGQLSGGQQQRAAIARALCMEPKIMLFDEPTSALDPEMIKEVLDVMVDLAKGGMTMIVVTHEMGFAKEVADYMIFMDEGKIVERAKTKEFFENPKSDRTKLFLSQIL

SEQ ID NO: 172603 - protein, 213 aa, Unknown
  Bacterial polypetide isolated from the Sargasso Sea
MASIKIDKVNKFFGSTHVIKDVSLDIKSESFTVLVGPSGCGKSTILRMIAGLEEINSGTISIDDKVVNDLPPKERNIAMVFQSYALYPHMTVFDNMAFGLKIEKKSKEEIEQRVMEAAKILQIQEYLERKPKQLSGGQRQRVAIGRAITRKPKVFLFDEPLSNLDAALRVQMRVELAKLHDQLNATMIYVTHDQTEAMTLANDIVVLDQGIVS

SEQ ID NO: 172604 - protein, 269 aa, Unknown
  Bacterial polypetide isolated from the Sargasso Sea
MASIELKNIEKSFGSNKVINKFDIKIKDGEFIVLVGPSGCGKSTLLRMISGLETVDKGEIYLDNKIINNLIPSKREIAMVFQSYALYPHMSVFENMAFGLKMEKIPKSEVNKKVNDAAATLQIEDLLERKPKQLSGGQRQRVAIGRAITRSPKVFLFDEPLSNLDAALRSEMRVEISKLHKKINSNIIYVTHDQVEAMTLADRIVVLNKGNIEQYGTPNEIYSNPNNIFVAEFIGSPKMNIIKINKEQISNSNTFHLFNNKITFNNLKL

SEQ ID NO: 172605 - protein, 174 aa, Unknown
  Bacterial polypetide isolated from the Sargasso Sea
EKTKDIEKIRAEVGMVFQQFNLFPHLSILDNCTLAPIWVKKMPKKEAQELALDQLKKVQIDDQANKFPGQLSGGQQQRCAIARALCMQPKIMLFDEPTSALDPEMIKEVLDAMVSLAKGGMTMIVVTHEMGFAKEVADEVIFMDEGMIIEKADTKEFFANPKSDRTKLFLSKIL

SEQ ID NO: 172606 - protein, 186 aa, Unknown
  Bacterial polypetide isolated from the Sargasso Sea
MKDKMSEPIIKIENVNKWFGDFQVLKDINLDVSAKQKIVVCGPSGSGKSTLIRCINRLEEHQKGTIVVDGTELSENTKNIEQVRAEVGMVFQQFNLFPHLSILDNCTLAPIWVKKMPKKEAQDLAMKQLEQVQIADQANKFPGQLSGGQQQRSAIARALCMQPKIMLFDEPTSALDPEMIKEVLDA

SEQ ID NO: 172607 - protein, 286 aa, Unknown
  Bacterial polypetide isolated from the Sargasso Sea
KRVNDLEPKDRDVAMVFQSYALYPNMNVYENIRFPLKVRGINPASHDEKVRRASTMVELDDFLHRKPAELSGGQRQRVALARAIVREPNVFLMDEPLSNLDAKLRVSTRAQIKNLSHELAVTTIYVTHDQIEAMTLAHRVVVMEKGIIQQVGTPTEIYERPANTFVASFIGNPAMNLIKGQIKSGVFSAGAVEIKGFKVPDGGYTIGFRAEDANVVSMKSNINAPTYSLELLGDATAVTVRIDGQLVSVRSDKSYRAEIGSNVSISVPKEICHLFDAQTGARIEVC

SEQ ID NO: 172608 - protein, 196 aa, Unknown
  Bacterial polypetide isolated from the Sargasso Sea
RCINRLEEHQRGNIIVEGTELTNDSRSIERIRGEVGMVFQQFNLFPHLSILDNCSLAPIWVRKLPKAEAKEKAMEYLKRVQIDDQAHKYPAQLSGGQQQRAAIARALCMEPRIMLFDEPTSALDPEMIKEVLDVMVGLAQGGMTMIVVTHEMGFAKEVADSIIFMDEGQIVEAKNPKDFFDNPESERTKTFLSQIL

SEQ ID NO: 172609 - protein, 195 aa, Unknown
  Bacterial polypetide isolated from the Sargasso Sea
CINRLEEHQQGDIIVDGNTLTEDTKNIEQIRAEVGMVFQQFNLFPHLSIVDNCTLAPIWVKKMPKKEAEELALKHLERVQILDQAQKFPGQLSGGQQQRVAIARALCMEPKIMLFDEPTSALDPEMIKEVLDVMVNLANQGMTMIVVTHEMGFAKEVADKMIFMDEGMIVEKADTKEFFANPKSDRTKLFLSQIL

SEQ ID NO: 172610 - protein, 282 aa, Unknown
  Bacterial polypetide isolated from the Sargasso Sea
NKNRTSLSILNISQTFVIMIGITLMLVLTVFGIQNKTISVGGFVVINAYMLQLYQPLNFLGTIYREIRQSLVDMENMFNLLKEKNSIDDSGSDNLKNDNAEIIFKNIFFGYENKRTIIKNISFSIPEGKSLAIVGPTGAGKSTISKLLFRFYDPDSGEILINKKNIKKYKQNSLRQMIGVVPQDTVLFNDTIFYNISYGLIDSSEEDVINAAKIAGIHDFIESIPNKYNTIVGERGLKLSGGEKQRVAIARAVLKNPSILFFDEATSALDTNTEKEINKNLN

SEQ ID NO: 172611 - protein, 138 aa, Unknown
  Bacterial polypetide isolated from the Sargasso Sea
APIKVLNIDRDTAKKKAIHNLELVGMGDFLEARPSQLSGGQKQRVAIARALTMDPDLILFDEPTSALDPEMVGEVLSAIRNLRDLGLTMIIVTHEMDFAKKVSDKVIFMDGGKILEEGSPEEIFENPKFERTRDFVNF

SEQ ID NO: 172612 - protein, 204 aa, Unknown
  Bacterial polypetide isolated from the Sargasso Sea
GSGKSTLIRCINRLEEHQKGNIIVEGTELTNDSRSIERIRGEVGMVFQQFNLFPHLSILDNCSLAPIWVRKLPKAEAKEKAMEYLKRVQIDDQAHKYPAQLSGGQQQRAAIARALCMEPRIMLFDEPTSALDPEMIKEVLDVMVGLAQGGMTMIVVTHEMGFAKEVADSIIFMDEGQIVEAKNPKDFFDNPESERTKTFLSQIL

SEQ ID NO: 172613 - protein, 249 aa, Unknown
  Bacterial polypetide isolated from the Sargasso Sea
FIDGVDITELSPDKRPTNMVFQNYAIFPHLNVEKNIQFGLRKLGLSNDEINNRVKDVLTLVKLEGYEERFSNQLSGGQRQRVALARALVRQPKVLLLDEPLGALDKKLRDEMQLELRTLQKNIGITFVFVTHDQQEAISMSDRVAVMNNGKIQQLSAPNELYKNPENIFVSDFIGETNFLKAMTKSIEGGFINASIEGLGEFKIKNNLNIAENSSDVVCSVRPESMMISKVKSDWDICLEAKIRQTSYL

SEQ ID NO: 172614 - protein, 236 aa, Unknown
  Bacterial polypetide isolated from the Sargasso Sea
VAKILKIEDLLDRKPKQLSGGQRQRVAIGRAITRNPKLFLFDEPLSNLDAALRSEMRVEISKLHRKLKSNIVYVTHDQIEAMTLADKIVIMNKGKIEQFGSPDDIYNNPNNIFVAEFIGNPKMNIFNVKTDDIINKNTFKFLGKEIKFENLSFENGLYVGIRPEDISLENKSELSAEISVDLVENLGSEKIIYSHLNQTEIRIKNAQNIENKNITIYLQKNKLYLFDNNKNRIKSL

SEQ ID NO: 172615 - protein, 283 aa, Unknown
  Bacterial polypetide isolated from the Sargasso Sea
DRHIGMVFQSYALYPSMTVEKNLSFGLRMMNTPKNIINEKIDKAANLLQINELLKRKPSQLSGGQRQRVAIGRALVRDAKVFLFDEPLSNLDAKLRAELRYEIKKLHRDLSNTMIYVTHDQIEAMTLADRISVMKDGLIQQLDTPKQIYNKPANLFVAGFIGSPSMNFLKASYDKPNKKIIVGKKQIDISKYENINNLMNDQEVVFGIRPENINIEKNENSIQCKVELVEPMGADTLVWTSVEGNPISIRLEGSSNFNLNDEINISFDINKSSIFDSKSEERI

SEQ ID NO: 172616 - protein, 244 aa, Unknown
  Bacterial polypetide isolated from the Sargasso Sea
MSDPIIKIEGMNKWFGDFQVLKDVNLSVEKNKKIVVCGPSGSGKSTLIRCINRLEEHQKGSIIVDGKELSENTKDIEKIRAEVGMVFQQFNLFPHLSILDNCTLAPIWVKKMPKKEAEELAMKQLKQVQIVDQANKFPGQLSGGQQQRCAIARALCMEPKIMLFDEPTSALDPEMIKEVLDAMVNLAKAGMTMIVVTHEMGFAKEVADEVIFMDEGMIVEKAETKEFFANPKSDRTKLFLSQIL

SEQ ID NO: 172617 - protein, 289 aa, Unknown
  Bacterial polypetide isolated from the Sargasso Sea
MNDTSQSFVKFENIDKSYDGEALVVKNLNLDIAKGEFVTMLGPSGSGKTTTLMMLAGFETPTNGEIYLDTKPISKIPPYEREIGMVFQNYALFPHMTVAENLSFPLEVRKISKPDIKEKVQKALDMVELGNFGTRFPAQLSGGQQQRVALARALVFEPRLVLMDEPLGALDKNLREQMQYEIKHIHDRIGITVVYVTHDQSEALTMSNRIAVFNDGVVQQLSTPDILYEKPENSFVAKFIGENNTLNGVVREVNGSSCTVELDGGFGMVKALKINVNEVGEKTQLSIRP

SEQ ID NO: 172618 - protein, 170 aa, Unknown
  Bacterial polypetide isolated from the Sargasso Sea
DIEKIRAEVGMVFQQFNLFPHLSILDNCTLAPIWVKKTPKKQAEEFAMKQLEQVQIADQAAKFPGQLSGGQQQRAALARALCMEPKIMLFDEPTSALDPEMIKEVLDAMVNLAKGGMTMIVVTHEMGFAKEVADEVVFMDEGMIVERAKTKDFFANPKNERTKLFLSQIL

SEQ ID NO: 172619 - protein, 220 aa, Unknown
  Bacterial polypetide isolated from the Sargasso Sea
NLEVQAKQKIVVCGPSGSGKSTLIRCINRLEEHQQGNIIVDGNELDENTKNIEAIRAEVGMVFQQFNLFPHLSILDNCTLAPIWVKKMPKKDAEELAMQQLEKVQIADQAAKFPGQLSGGQQQRCAIARALCMQPKIMLFDEPTSALDPEMIKEVLDAMVNLANAGMTMIVVTHEMGFAKEVADEVIFMDEGMIVEKAKTKEFFDNPKSDRTKLFLSQIL

SEQ ID NO: 172620 - protein, 278 aa, Unknown
  Bacterial polypetide isolated from the Sargasso Sea
MSENDSFVKFEKVDKSYDGEILVVKDLNLDVPKGEFLTMLGPSGSGKTTVLMMLAGFETPTSGEIYLDGNPISSIPPNKRGIGMVFQNYALFPHMTVKENLAFPLEVRKMQKSEIDEKVSNALSMVELQDFGNRMPLQLSGGQQQRVALARSLVFEPRLVLMDEPLGALDKNLREQMQYEIKHIHEKIGITVVYVTHDQSEALTMSNRIAVFNDGKVQQISSPDVLYEKPNSSFVAQFIGENNQLKGKVKSINGENCVITTESGDDIQALKININSSG

SEQ ID NO: 172621 - protein, 287 aa, Unknown
  Bacterial polypetide isolated from the Sargasso Sea
MAQVKLKNVNKSFGQTKVIKDVHLSIEKGEFVVFVGPSGCGKSTLLRLIAGLENLSNGEIIIADRPVMDLPPSERGIAMVFQSYALYPHMSVFQNMAFSLSLRKFSKAEIRTRVEAAAKILQMEHLLDRRPAALSGGQRQRVAIGRAIVRDPDVFLFDEPLSNLDAALRHDTRVEIAKLHKQLDATTIYVTHDQVEAMTLADKIVVLRDGEVMQVGSPIDLFNLPDNEFVAGFLGSPQMNFFDGNLSKVTKNGSSGSFKGQGLEAIGIRLTSKNKKINDTVRLGIVH

SEQ ID NO: 172622 - protein, 163 aa, Unknown
  Bacterial polypetide isolated from the Sargasso Sea
MSKKEDFVKFDKVDKSYDGKVLVVKDLNLDIEEGEFVTMLGPSGSGKTTCLMMLAGFETPTNGEIYLDKNPISNIPPHKRGIGMVFQNYALFPHMTVFENLAFPLRVRKISKDDIDKKVEKALSMVSLSGFGNRMPGQLSGGQQQRVAVARALVFDPASCFNG

SEQ ID NO: 172623 - protein, 180 aa, Unknown
  Bacterial polypetide isolated from the Sargasso Sea
DGQSVRGNAATIRNIRLEAGMVFQQFNLFPQMTALENVMFGPMQVRGASRAEARDQAMALLDKVGLESRANHYPSELSGGQQQRVAIARALAIRPRLMLFDEPTSALDPELRHEVLKVMQDLATEGMTMIVVTHEIGFAKRVGTRLLFMDQGGIAEDGHPVELIDRPPTPRLKEFLKHVS

SEQ ID NO: 172624 - protein, 227 aa, Unknown
  Bacterial polypetide isolated from the Sargasso Sea
MSKIIELKKVNKWFDKFQVLKDIDLEVQPREKIVICGPSGSGKSTLIRCINRLEEHQEGNIIVDGTELSESTKNIEKIRAEVGMVFQQFNLFPHLSILDNCSLAPIWVKKFPKKQAEEIAMNNLKRVQIDDQALKFPGQLSGGQQQRAAIARALCMEPKIMLFDEPTSALDPEMIKEVLDVMVDLAKGGMTMIVVTHEMGFAKEVADYMIFMDEGKIVERAKTKEFF

SEQ ID NO: 172625 - protein, 172 aa, Unknown
  Bacterial polypetide isolated from the Sargasso Sea
MSKIVIKNLEKSFGDNKVITNFNININDGEFIVLVGPSGCGKSTLLRMISGLESINQGEIFLDEKLINNLLPSKREIAMVFQSYALYPHMSVFENMSFGLKMEKIDKDEINQKVNDAAATLQIKDLLERKPKQLSGGQRQRVAIGRAITRNPKVFLFDEPLSNLDAALRSEM

SEQ ID NO: 172626 - protein, 290 aa, Unknown
  Bacterial polypetide isolated from the Sargasso Sea
ELLTELQEEFNMSILFITHDLNIVKKFSDDVCVMKEGEIIEAGSVEEIFSNPSHSYTKKLLDSIPGKKETFNEEEEILLDAGQVNINYVVSRSLFGKPKEFLNAVKKVDIKIFKGSTTGLVGESGSGKSSLARALLGIEDADGAIEFDGIAIKDLDLKSMRDFKKYFQIVFQDPFGSLSPRMTIGEIVGEGLKVHEPELSKKDRILKIVSALKDVELDESSYSRFPHELSGGQRQRVAIARAIILRPKLILLDEPTSALDVSIQMQILNLLKDLQSKLGLAYLCISHDLR

SEQ ID NO: 172627 - protein, 255 aa, Unknown
  Bacterial polypetide isolated from the Sargasso Sea
LLNIIAGLETINEGDVFIDDYNVSKVEPKDRNIAMVFQSYALYPSMNVKENMIFGLKQAKTSKEKIQEQLEKVSKFLQVDQLLERKPSQLSGGQRQRVAIGRALVREPRIFLFDEPLSNLDAKLRVEMRREIKKLHQQLKTTVVYVTHDQTEAMSLGTNIAIMNHGVIQQNDTPEKIYNNPSNTFVADFIGSPSMNLIKGNLKENSGDIFFTVSGSNLEIPIKNYDFKDKSNLNNKEVFFGIRPEHIFFKKFNES

SEQ ID NO: 172628 - protein, 234 aa, Unknown
  Bacterial polypetide isolated from the Sargasso Sea
MADVKMSSIHKSFGNTEVIHGVDLKIEDHEFVVFVGPSGCGKSTLLRLIAGLEDVSQGEIEIDGQRVDDLPPAKRGIAMVFQSYALYPHMNVYQNMSFGLRLAKTDKNITDQKVREAAEILQITELLDRKPKELSGGQRQRVAIGRAIVRDPKVFLFDEPLSNLDAKLRVQMRIELTKLHRELNATMIYVTHDQVEAMTMADKIVVLREGFVEQVGAPLDLYHKPANKFVAGFH

SEQ ID NO: 172629 - protein, 240 aa, Unknown
  Bacterial polypetide isolated from the Sargasso Sea
MITIKSMHKWFGDFHVLKNINLEVKRGAKIVICGPSGSGKSTLIRCINRLEEHQQGSIVVDGTELTSDLKNIEIVRSEVGMVFQHFNLFPHLTALENCSLAPIWVRKTPKSEAEESAMEYLKRVKIPEQAHKYPGQLSGGQQQRVAIARSLCMNPRIMLFDEPTSALDPEMIKEVLEVMTELAESGMTMLVVTHEMGFATAVADSVIFMDEGEIIESNDPHNFFHNPQHDRTKLFLSQIL

SEQ ID NO: 172630 - protein, 185 aa, Unknown
  Bacterial polypetide isolated from the Sargasso Sea
MDDKNFIKISNLSKNFDDVVAVDNVNISIGKGEFFSLLGPSGCGKTTLLRILAGFEYPSEGSVSIDGSDVTDIPANLRPTNMVFQNYAIFPHINVKRNIEFGLRKEKISTEEVNQRVSEALKMVKLEGYENRFSNQLSGGQRQRVALARALVKRPKVLLLDEPLGALDKKLREEMQIELRNLQRS

SEQ ID NO: 172631 - protein, 200 aa, Unknown
  Bacterial polypetide isolated from the Sargasso Sea
STLIRCINRLEEHQKGSIVVDGTELSENTKNIEQIRAEVGMVFQQFNLFPHLSILDNCTLAPIWVRKMPKKQAQELAMQELEKVQISDQAQKFPGQLSGGQQQRCAIARALCMEPKIMLFDEPTSALDPEMIKEVLDAMVNLAKGGMTMIVVTHEMGFAKEVADEVIFMDEGMIVEKAETKEFFANPKSERTKLFLSQIL

SEQ ID NO: 172632 - protein, 189 aa, Unknown
  Bacterial polypetide isolated from the Sargasso Sea
MGKIIELKKVNKWFDKFQVLKDIDLEVSPQEKIVICGPSGSGKSTLIRCINRLEEHQEGNIIVDGTELFESTKNIEKIRAEVGMVFQQFNLFPHLSILDNCSLAPIWVKKLPKKQAEEIAMNNLKRVQIDDQALKFPGQLSGGQQQRAAIARALCMEPKIMLFDEPTSALDPEMIKEVLDVMVDLAKGG

SEQ ID NO: 172633 - protein, 220 aa, Unknown
  Bacterial polypetide isolated from the Sargasso Sea
MSADVELKNISVTFGSFYAAKNVSVKIKEGEFFSFLGPSGCGKTTLLRAISGFLDPSEGKVLIGGQDMAGIGPNKRPTSLIFQNLALFPLMSVADNIAFSLEVRGTGKAERRKRADELLELIALTGQGDKKVHELSGGQRQRVAIARALAIEPEVLLLDEPLSALDLKLRQKMRTELRAIQKRVGITFIYITHDQGEALTMSDRVDVMNEGELEQVDYVT

SEQ ID NO: 172634 - protein, 63 aa, Unknown
  Bacterial polypetide isolated from the Sargasso Sea
MPKAEAEELAMRQLEIVKIPEQANKYPGQLSGGQQQRVAIARSLAMNPNIMLFDEPTSALDPE

SEQ ID NO: 172635 - protein, 138 aa, Unknown
  Bacterial polypetide isolated from the Sargasso Sea
VRKMPKKQADDLAMRYLEIVKIPEQALKYPGQLSGGQQQRVAIARALCMEPKIMLFDEPTSALDPEMIKEVLDTMIDLAQDGMTMIVVTHEMGFARKVANRVIFMDEGQIIEQNSPKDFFEKPKSERTKLFLSQILDH

SEQ ID NO: 172636 - protein, 244 aa, Unknown
  Bacterial polypetide isolated from the Sargasso Sea
MSDKIIEMKDVNKWFGDFQVLKDVNLNVNQKQKIVVCGPSGSGKSTLIRCINRLEEHQKGTIIVDGNELTEDTKDIEKIRAEVGMVFQQFNLFPHLSILDNCTLAPMWVKKMPKKKAEELAMKQLEQVQIADQAKKFPGQLSGGQQQRCAIARALCMEPKIMLFDEPTSALDPEMIKEVLDAMVNLAKGGMTMIVVTHEMGFAKEVADEVIFMDEGMIVERAPTKEFFANPKSDRTKLFLSQIL

SEQ ID NO: 172637 - protein, 259 aa, Unknown
  Bacterial polypetide isolated from the Sargasso Sea
MTAPLSLATLAPEPDPRSVLIRIEGLNKHYGAFHVLRDIDLQVREGERIVLCGPSGSGKSTLIRCINRLEVAQQGSIQVDGIDLAATTREAAQVRSDIGMVFQHFNLFPHMSVLDNCLLAPTSVRGLSRKDAEERARMYLSKVGIESQAHKYPSQLSGGQQQRVAIARALCMKPRIMLFDEPTSALDPEMVAEVLDVLVQLAGTGMTMLCVTHEMGFARQVAERVLFLEGGQIIEDSPPQVFFNQPRTDRAKAFLAQIL

SEQ ID NO: 172638 - protein, 193 aa, Unknown
  Bacterial polypetide isolated from the Sargasso Sea
LPRLYEPGEGRILIDGYDIAKVELYSLRRQIGIVPQDPLLFSGTVSENIALTNPEASSEEIVRAARLANAHDFIMELPSGYSTPVGERGASLSGGQRQRVAIARTLLSNPKLLVMDEATSALDYETERKVCDNLLENLDDQTVFFITHRLSTIRQADVIVMLHQGAVVEVGTHEELMKHRGRYYALYRQQEST

SEQ ID NO: 172639 - protein, 180 aa, Unknown
  Bacterial polypetide isolated from the Sargasso Sea
MNDSSQSFVKFEKIDKSYDGEVLVVKNLNLDIAKGEFVTMLGPSGSGKTTTLMMLAGFETPTNGEIFLDTKPISKIPPYEREIGMVFQNYALFPHMTVAENLSFPLEVRKMSKADIKEKVQKALDMVELGNFGTRFPAQLSGGQQQRVALARALVFEPRLVLMDEPLGALDKNLREQMQY

SEQ ID NO: 172640 - protein, 208 aa, Unknown
  Bacterial polypetide isolated from the Sargasso Sea
MSAIKVENLVKNWGTFVAVDNVSFETGDAEFVALLGPSGCGKSTTLRLIAGLEQTSSGRITIKGRDVTDAPSARRNLSMVFQSYALFPHLTVAENITFGLSVRHVPRAERQERLKETVEILGLGHLLDRKPSQLSGGQQQRVALGRALISRTPVCLLDEPLSNLDAKLRTEMRNEIRSLQRRLGITMIFVTHDQSEAMSMADRVILMR

SEQ ID NO: 172641 - protein, 236 aa, Unknown
  Bacterial polypetide isolated from the Sargasso Sea
MNKWFGSFHVLRDIDLTVNRGERIVVCGPSGSGKSTLIRCINALEEHQTGQIIVDGTELTSDIKNIDRIRSEVGMVFQHFNLFPHLSILENCTLAPIWVRKIPKKEAEETAMHFLEKVKIPEQADKYPGQLSGGQQQRVAIARSLCMRPRIMLFDEPTSALDPEMIKEVLDTMIELAEDGMTMICVTHEMGFARQVANRVIFMDDGQIVEQNEPEQFFRNPQSDRTKLFLSQILGH

SEQ ID NO: 172642 - protein, 243 aa, Unknown
  Bacterial polypetide isolated from the Sargasso Sea
TSTTSPHAFGDEMVVNGVSVFVAPGEVVCLLGPSGCGKTTLLRVAAGLERLQKGQIRIGETMVDDGATGLHVPPDQRGVGLMFQDYALFPHLSVRENIRFGVGADTQARRAWAETALGQMGLSRHGDSYPHTLSGGQQQRVALLRALATEPSVLLLDEPFSGLDVARRAAVRGQSLDMLRDTGVATLLVTHDPEEAMFMADRILVMNNGRVVQDGSPEQTYFQPDTEFVADLFGYCEQIDGLG

SEQ ID NO: 172643 - protein, 220 aa, Unknown
  Bacterial polypetide isolated from the Sargasso Sea
MSQKDSFVKFEKVDKSYDGEILVVKDLNLDVPKGEFLTMLGPSGSGKTTVLMMLAGFETPTSGEIYLDGNPISSIPPNKRGIGMVFQNYALFPHMTVKENLAFPLEVRKMQKTEIDEKVGNALAMVELQDFGNRMPLQLSGGQQQRVALARSLVFEPRLVLMDEPLGALDKNLREQMQYEIKHIHEKIGITVVYVTHDQSEALTMSNRIAVFNDGKIQQI

SEQ ID NO: 172644 - protein, 235 aa, Unknown
  Bacterial polypetide isolated from the Sargasso Sea
KNNVKNFKTVSINNLSHFYGKNENKKQVLNDVNLNIDKGELVLLKGPSGCGKTTLLTLIGALRTCQSGDLTVLNNQLNGASRKTRQILRRSIGMIFQGHNLLRCLTAEQNVQMGSDLIKGLTYLQRREIARNWLSAVGLEEHHKKLPNDLSGGQKQRVAIARALSANPKLLLADEPTSALDSVTGREIVTLLRKLAKEQNCSVLMVTHDPRISDMADRILNMEDGKIYSAHSELI

SEQ ID NO: 172645 - protein, 228 aa, Unknown
  Bacterial polypetide isolated from the Sargasso Sea
NITKHYEMGSQIVKALDGINIAVEQNDYLAFIGSSGSGKSTMLNILGCLDRPTSGQYHLNGKNVERLVQNELSEIRNLEIGFIFQSFNLLPRADALGNVMQPLIYRDIGFRRRKEMAMEALIRVGLEERVDHLPNQLSGGQRQRVAIARALVTQPSILLADEPTGNLDSRTTVEIMELFDELHSEGHTLIVVTHEDEIARHCHRVVEMKDGIIHADSSSVEITMTTNN

SEQ ID NO: 172646 - protein, 127 aa, Unknown
  Bacterial polypetide isolated from the Sargasso Sea
EDSAMEYLKRVKIPEQANKYPGQLSGGQQQRVAIARSLCMNPRIMLFDEPTSALDPEMIKEVLEVMTELAESGMTMLVVTHEMGFATAVADSVIFMDEGEIIESNDPHNFFNNPQHERTKLFLSQIL

SEQ ID NO: 172647 - protein, 184 aa, Unknown
  Bacterial polypetide isolated from the Sargasso Sea
MSESIIQISNMNKWFGDFQVLKGINLEVKPKQKIVVCGPSGSGKSTLIRCINRLEEHQEGNIVVDGTELTEDTKNIEQIRAEVGMVFQQFNLFPHLSILDNCTLAPIWVKKLPKKDAEELALKHLERVQILDQAQKYPGQLSGGQQQRAAIARALCMEPKIMLFDEPTSALDPEMIKEVLDVMV

SEQ ID NO: 172648 - protein, 227 aa, Unknown
  Bacterial polypetide isolated from the Sargasso Sea
MTRSSNQPFIQIQNVSKHFGEFCALDSVSLDIELGQKLVICGPSGSGKSTLIRCINRLEIHEKGEIFIDGKIVDGSLAGQDVLRNNVGMVFQQFNLFPHLTILENLMLGPVRARQLPESEARDLAMQYLERVRIPEQLDKYPAQLSGGQQQRVAIARALCMMPKIMLFDEPTSALDPEMIAEVLDVIEELADSGMTMICVTHEMGFARQVADMMLFMDHGKIVETGP

SEQ ID NO: 172649 - protein, 292 aa, Unknown
  Bacterial polypetide isolated from the Sargasso Sea
KDLNLDIAEGEFITMLGPSGSGKTTCLMMLAGFETPTNGEIYLDSNPISNIPPHKRGIGMVFQNYALFPHMTVYENLAFPLKVRKVTKEDIDKKVDKALSMVSLSGFENRMPGQLSGGQQQRVAVARALVFDPQVVLMDEPLGALDKNLRESMQYEIKHIHESIGVTVVYVTHDQGEALTMSNRIAVFNDGKVQQLSSPDKLYEEPVNSFVAEFIGENNTFAGEVTDISKDKCKVRLDSGTEIISNPIRVKSKGEKTIVSLRPERAIINPESKMDNKHSGKIEEVIYHGDHT

SEQ ID NO: 172650 - protein, 246 aa, Unknown
  Bacterial polypetide isolated from the Sargasso Sea
KIVMGNIIELKKVNKWFDKFQVLKDIDLEVAPQEKIVICGPSGSGKSTLIRCINRLEEHQEGNIIVDGTELAENTKNIEKIRAEVGMVFQQFNLFPHLSILDNCTLAPIWVKKLPKKEAEEVAMKNLTRVQIDDQALKFPGQLSGGQQQRAAIARALCMEPKIMLFDEPTSALDPEMIKEVLDVMVDLAKGGMTMIVVTHEMGFAKEVADYMIFMDEGKIVERAKTKEFFDNPKSDRTKLFLSQIL

SEQ ID NO: 172651 - protein, 190 aa, Unknown
  Bacterial polypetide isolated from the Sargasso Sea
MTPILETVDLECSFWISTGMFSPKKALAAVNGVSVQLLKGQVLGLVGESGCGKSTLAKMLLGLQKPTKGNILFDGQPFERLSQFERAARVQPIFQDPYSSLNPRKTIFEIITLPLSVHKVGTSRDWLQKAREMMDLCGLASRYLNSYPSQLSGGQRQRVAIARALVMKPEVVICDEPTSALDVSVQSQIL

SEQ ID NO: 172652 - protein, 247 aa, Unknown
  Bacterial polypetide isolated from the Sargasso Sea
MSEESIISLKNVNKWFGDFHVLQDVNLEVKKKERIVVCGPSGSGKSTMIRCINRLEEHQEGSIVVDGIELTGNLKNIDNVRKEVGMVFQQFNLFPHLSVKENITLAPIWVKKMPKAEAEELAMRQLEIVKIPEQANKYPGQLSGGQQQRVAIARSLAMNPNIMLFDEPTSALDPEMIKEVLDVMVDLANGGMTMIVVTHEMGFAKTVADRMVFMDEGKIVEEASPDKFFNNPESDRTKLFLSQILHQ

SEQ ID NO: 172653 - protein, 239 aa, Unknown
  Bacterial polypetide isolated from the Sargasso Sea
MNDTSQSFVKFEKIDKSYDGEVLVVKNLNLDIAKGEFVTMLGPSGSGKTTTLMMLAGFETPTNGEIFLDTKPISKIPPYEREIGMVFQNYALFPHMTVAENLSFPLEVRKISKPDIKEKVQKALDMVELGSFGTRFPAQLSGGQQQRVALARALVFEPRLVLMDEPLGALDKNLREQMQYEIKHIHDRIGITVVYVTHDQSEALTMSNRIAVFNDGVVQQLSTPDILYEKPEILFVLNL

SEQ ID NO: 172654 - protein, 250 aa, Unknown
  Bacterial polypetide isolated from the Sargasso Sea
MSDPIIKIEGMNKWFGDFQVLKDIDLEVEKNKKIVVCGPSGSGKSTLIRCINRLEEHQKGTIIVDGTELTENTKNIEAIRAEVGMVFQQFNLFPHLSILDNCTLAPVWVKKMPKKDAEELAMKQLEQVQIADQAKKFPGQLSGGQQQRCAIARALCMEPKIMLFDEPTSALDPEMIKEVLDAMVNLAKAGMTMIVVTHEMGFAKEVADEVIFMDEGMIVEKAETKDFFANPKNDRTKLFLVKYYNLSKLQ

SEQ ID NO: 172655 - protein, 195 aa, Unknown
  Bacterial polypetide isolated from the Sargasso Sea
MSDPIIKIENMNKWFGDFQVLKDINLSVEKNKKIVVCGPSGSGKSTLIRCINRLEEHQKGSIIVDGTELDENTKNIEAIRAEVGMVFQQFNLFPHLSILDNCTLAPIWVKKMPKKQAEELAMKQLEQVQISDQAKKFPGQLSGGQQQRCAIARALCMEPKIMLFDEPTSALDPEMIKEVLDAMVNLAKARYDHDS

SEQ ID NO: 172656 - protein, 287 aa, Unknown
  Bacterial polypetide isolated from the Sargasso Sea
NFKIERGEFFALLGPSGCGKTTLLRMVAGFEIPDSGEISIDNQLMSGIPPNLRPVNMVFQNYAIFPHMDVRGNIAFGMRKSGLSKTELNRRIDETLELIKLQGYGKRRAEELSGGQRQRVALARALIKQPKVLLLDEPLGALDKKLREQMQIELRQLQQQVGISFLFVTHDQEEALTLSDRIAVMSEGNVMEIASPGQLYENPSSRFVADFIGSMNFFPGEVTKSENSKIRISTDYMGEIDMPTSNSKFGVKSRVWIAIRPEKFKPLFSAPRDLSKVKQGVMGPSAY

SEQ ID NO: 172657 - protein, 204 aa, Unknown
  Bacterial polypetide isolated from the Sargasso Sea
GSGKSTLIRCINRLEEHQKGQIVVDGNELSEKTKDIEKIRAEVGMVFQQFNLFPHLSILDNCTLAPIWVKKTPKKQAEEFAMKQLEQVQISDQANKFPGQLSGGQQQRAALARALCMEPKIMLFDEPTSALDPEMIKEVLDAMVNLAKAGMTMIVVTHEMGFAKEVADEVVFMDEGMIVERAKTKDFFANPKNERTKLFLSQIL

SEQ ID NO: 172658 - protein, 273 aa, Unknown
  Bacterial polypetide isolated from the Sargasso Sea
MVFQSYALYPHMNVFENMSFGLKIEKRPKEEINSKVMHAAKILKIEELLDRRPKQLSGGQRQRVAIGRAITRNPKIFLFDEPLSNLDAALRAEMRVEISKLHNQIKTNMIYVTHDQVEAMTLADRIVILNQGNIEQVGTPEEIYNDPANIFVAQFIGTPKMNILEIGEENIKSENTLTLLGNEIKLNDIKLKRKKHFIGIRPEHLNVNGDLNFKFTPEIELIENLGNEKIVYMKKDNYLINAKISNGIEIKNQIGFKLNDIFIFNENGQRIKS

SEQ ID NO: 172659 - protein, 227 aa, Unknown
  Bacterial polypetide isolated from the Sargasso Sea
MIRLEKLSREFQVGNQVVHALDEVDLEIKENEYVSIMGVSGSGKSTLLNILGLLDTPTSGDYILSGINTSKMDDDEMAGIRSTKIGFVFQSFHLIPRLTAFENIEMPMILSGMNPKERSEKVSSALEKVGLTDRSDHKPEQLSGGQRQRVAIARSIVMEPDVLLADEPTGNLDTSSGNEVVKLIEELNIAGLTLIVVTHDREMGERSNRLIELRDGKIINDQNQKKA

SEQ ID NO: 172660 - protein, 237 aa, Unknown
  Bacterial polypetide isolated from the Sargasso Sea
MENVNKWFGDFQVLKDINLEVNQKQKIVVCGPSGSGKSTLIRCINRLEEHQKGRITVDGNELTEDTKDIEKIRAEVGMVFQQFNLFPHLSILDNCTLAPIWVKKMPKKAAEELAMKQLEQVQIVDQAKKFPGQLSGGQQQRSAIARALCMQPKIMLFDEPTSALDPEMIKEVLDAMVNLAKGGMTMIVVTHEMGFAKEVADEVIFMDEGMIVEKQPTKDFFANPKSDRTKLFLSQIL

SEQ ID NO: 172661 - protein, 180 aa, Unknown
  Bacterial polypetide isolated from the Sargasso Sea
MEKKYSENTKDIEKIRAEVGMVFQQFNLFPHLSILDNCTLAPIWVKKMPKKQAEEVAMKNLERVQIADQAKKFPGQLSGGQQQRCALARALCMEPKIMLFDEPTSALDPEMIKEVLDAMVDLAKAGMTMIVVTHEMGFAKEVADNMIFMDEGRIVEKAKTKDFFNNPKSDRTKLFLSQIL

SEQ ID NO: 172662 - protein, 297 aa, Unknown
  Bacterial polypetide isolated from the Sargasso Sea
KTYEKMAVKSTTSLSVVNIGQGGIIALGLTLMMIMAGFDIQNGQLTIGDFVAVNTYLLQLYLPLNFLGWVYRELRQALVDMERMFGLLDEKPDIADREGAAPLVISGGDLIFDNVHFSYGDHAILKGVSFRVPAGKRVAIVGPSGSGKTTISRLLFRFYDPQSGAVRLDGQDLRDVTQNSLRAAIAVVPQDTVMFNASIGYNIGYGREDATQADIANAARLAAIDVFIAKLPQGYETMVGERGLKLSGGEKQRVAIARAILKRPSVFLFDEATSALDSRTEKEIQHALNNGLKTKRP

SEQ ID NO: 172663 - protein, 189 aa, Unknown
  Bacterial polypetide isolated from the Sargasso Sea
MSEPIIKIEGMNKWFGDFQVLKNIDLKVEKNKKIVVCGPSGSGKSTLIRCINRLEEHQKGTIIVDGTELTENTKNIEAIRAEVGMVFQQFNLFPHLSILDNCTLAPIWVKKMPKKDAEQLAMKQLEQVQIADQAQKFPGQLSGGQQQRCAIARALCMEPKIMLFDEPTSALDPEMIKEVLDAMVNLAKA

SEQ ID NO: 172664 - protein, 245 aa, Unknown
  Bacterial polypetide isolated from the Sargasso Sea
MASVEFKNVTKKFGAFTAASDLNIEIGDGEFVCLLGPSGCGKTTSLRMMAGLEFPTSGQVLIDGKDVTYLHPKDRQISMVFQDYALYPHMNLEDNIAYPLKVRGEATDKRHARAKEVADVLKIGDLMKRLPSQISGGQQQRTSLARALVYPSQVYLFDEPLSNLDAKLRLEARGFLNHLQHDLGITAVYVTHDQAEAMALATRVAVMDQGQIVQYAPPIEIYRRPANTFVANFVGNPPMNLLPVE

SEQ ID NO: 172665 - protein, 302 aa, Unknown
  Bacterial polypetide isolated from the Sargasso Sea
IAMALANEPELLIADEPTTALDVTVEKALLELLSDLQKEFGMSILFITHDLNIVKRFSDEVCVMKEGKIVESGKVKDIFDNPKHPYTIKLLNSIPGKKAELNLENEQLLIGRKVDIKYPITKNIFGKTVDFLNAVKKVDITIHSGSTTGLVGESGSGKSSLARALLGIEKAEGNIIFDGRNIHQLNSSETRRFKKDFQIVFQDPFGSLSPRMTVGEIVGEGLRVHEPSLIRSEREKKIIKALEDVELDKSSFSRFPHELSGGQRQRVAIARAIILEPKLILLDEPTSALDVSIQMQILHLLK

SEQ ID NO: 172666 - protein, 235 aa, Unknown
  Bacterial polypetide isolated from the Sargasso Sea
MPNNLDFVKFDKVDKSYDGKVLVVKDLNLDIAEGEFITMLGPSGSGKTTCLMMLAGFETPTNGEIYLDKNPISNIPPHKRGIGMVFQNYALFPHMTVYENLAFPLKVRKFQKDEIDKKVDKALSMVSLSGFEHRMPGQLSGGQQQRVAVARSLVFDPQLVLMDEPLGALDKNLRESMQYEIKHIHESIGVTVVYVTHDQSEALTMSNRIAVFNDGKVQQLSSPDKLYEEPVNSFV

SEQ ID NO: 172667 - protein, 282 aa, Unknown
  Bacterial polypetide isolated from the Sargasso Sea
MIAGLEKIDEGEIFFNDQKINELHPSKRQTAMVFQSYALYPHMNVYENMSFGLKIEKRPKEEINQKVMQAAKILKIEELLERKPKQLSGGQRQRVAIGRAITRNPKIFLFDEPLSNLDAALRAEMRVEISKLHNQIKTNMIYVTHDQVEAMTLADRIVILNKGNIEQVGTPEEIYNDPANIFVAQFIGTPKMNILEINEKDLISDNSIKLLGNEIDFDSLKLKKSKHFVGIRPEHLKANQKTQFTFNPEIELIENLGNEKIAYMKKDHYQLSAKIPSNVELS

SEQ ID NO: 172668 - protein, 283 aa, Unknown
  Bacterial polypetide isolated from the Sargasso Sea
MAEIKLRNLSKSWGNFVAVKDFNLTIADKEFLVLLGPSGCGKTTTMRMIAGLEDVSEGEIFIDGKLVNNLEPKDRDISMVFQSYALYPNMNVYDNIRFPLKVRKINKSTQDSKVKKAAQMVELTDYLNRKPAELSGGQKQRVALARAIVREPNVFLMDEPLSNLDAKLRVSTRAQIKNLSHELAITTIYVTHDQVEAMTLADRVVVMKQGVVQQVGSPTDIYDMPANSFVAGFIGSPAMNLIEGKISKGVFSSQNTLIKGLKADDGEIILGFRAEDAMVIKEK

SEQ ID NO: 172669 - protein, 247 aa, Unknown; identical to SEQ ID NO: 172652
  Bacterial polypetide isolated from the Sargasso Sea

SEQ ID NO: 172670 - protein, 166 aa, Unknown
  Bacterial polypetide isolated from the Sargasso Sea
IEPEVGMVFQQFNLFPHLSILDNGTLAPIWVKKLPKKQAEELAMKNLTRVQIDDQALKFPGQLSGGQQQRAAIARALCMEPKIMLFDEPTSALDPEMIKEVLDVMVDLAKGGMTMIVVTHEMGFAKEVADNMIFMDEGKIVEKAKTKEFFENPKSERTKLFLSQIL

SEQ ID NO: 172671 - protein, 186 aa, Unknown
  Bacterial polypetide isolated from the Sargasso Sea
MSKIVIKNLKKSFGDNKVISNFNIDIKDGEFIVLVGPSGCGKSTLLRMISGLESINQGEIFLDEKLINNLLPSKREIAMVFQSYSLYPHMSVFENMSFGLKMEKIPKSEINQKVNNAAATLQIKDLLERKPKQLSGGQRQRVAIGRAITRNPKVFLFDEPLSNLDAALRSEMRVEISKLHKKLNSN

SEQ ID NO: 172672 - protein, 259 aa, Unknown
  Bacterial polypetide isolated from the Sargasso Sea
MNDTSQSFVKFEKIDKSYDGEVLVVKNLNLDIAKGEFVTMLGPSGSGKTTTLMMLAGFETPTNGEIFLDTKPISKIPPYEREIGMVFQNYALFPHMTVAENLSFPLEVRKISKPDIKEKVQKALDMVELGNFGTRFPAQLSGGQQQRVALARALVFEPRLVLMDEPLGALDKNLREQMQYEIKHIHDRIGITVVYVTHDQSEALTMSNRIAVFNDGVVQQLSTPDILYEKPENSFVAKFIGENNTLNGVVREVNGILMY

SEQ ID NO: 172673 - protein, 238 aa, Unknown
  Bacterial polypetide isolated from the Sargasso Sea
MAKNNEFVKFDKVDKSYDGKVLVVKDLNLDIAEGEFITMLGPSGSGKTTCLMMLAGFETPTNGEIYLDGNPISNIPPHKRGIGMVFQNYALFPHMTVYENLAFPLKVRKFSKDETDKKVEKALSMVSLSDFGSRMPAQLSGGQQQRVAVARALVFDPAVVLMDEPLGALDKNLRESMQYEIKHIHESIGVTVVYVTHDQSEALTMSNRIAVFNDGKVQQLSSPDKLYEEPVNSFVAEF

SEQ ID NO: 172674 - protein, 203 aa, Unknown
  Bacterial polypetide isolated from the Sargasso Sea
MSDPIIKIEGMNKWFGDFQVLKDIDLAVEKNKKIVVCGPSGSGKSTLIRCINRLEEHQKGTIVVDGTELTENTKNIEAIRAEVGMVFQQFNLFPHLSILDNCTLAPVWVKKMPKKDAEQLAMKQLEQVQIADQAYKFPGQLSGGQQQRCAIARALCMEPKIMLFDEPTSALDPEMIKEVLDAMVNLAKAGMTMIVVTHEMGFA

SEQ ID NO: 172675 - protein, 238 aa, Unknown
  Bacterial polypetide isolated from the Sargasso Sea
MSDKIIEMKSVNKWFGDFQVLKDVNLNVNQKQKIVVCGPSGSGKSTLIRCINRLEEHQKGTIIVDGNELTEDTKNIEKIRAEVGMVFQQFNLFPHLSILDNCTLAPIWVKKMPKKQAEEMAMNELKKVQIADQAKKFPGQLSGGQQQRSAIARALCMEPKIMLFDEPTSALDPEMIKEVLDAMVNLAKGGMTMIVVTHEMGFAKEVADEVIFMDEGMIVERAPTKDFFANPKNDRTKL

SEQ ID NO: 172676 - protein, 184 aa, Unknown
  Bacterial polypetide isolated from the Sargasso Sea
MAQNSDKILSNDVVVSMDHVNKWFGQFHVLRDINLQVNKGERIVVCGPSGSGKSTLIRCLNRLEQHQQGDIHVHGIELNNDVKNIDEIRREVGMVFQHFNLFPHLSILENCMLAPIWVRKTPRSEAERTAMHFLTRVKIPEQAHKYPGQLSGGQQQRVAIARALCMQPQLMLFDEPDLGTWTQK

SEQ ID NO: 172677 - protein, 188 aa, Unknown
  Bacterial polypetide isolated from the Sargasso Sea
MSEAIIKIENMNKWFGDFQVLKDINLEVEKNKKIVVCGPSGSGKSTLIRCINRLEEHQKGSIVVDGTELNENTKNIEQIRAEVGMVFQQFNLFPHLSILDNCTLAPIWVRKMPKKKAQELAMNELEKVQISDQAQKFPGQLSGGQQQRCAIARALCMEPKIMLFDEPTSALDPEMIKEVLDAMVNLAK

SEQ ID NO: 172678 - protein, 261 aa, Unknown
  Bacterial polypetide isolated from the Sargasso Sea
MIVDLIHIEKSFDKVKAVNNVCLGIKEGEFFSLLGPSGCGKTTLLRIIAGFEKTENGDVFINGKNVNFVAPNNRPTNMVFQNYAIFPHLNVSENVGYGLRNTNFSKDEISKKIDEALKLVGLKGLNKRASSALSGGQRQRVALARALILKPRVLLLDEPLSALDKNLREQMQFELRQLQKSVGITFILVTHDQTEALTMSDRVGVMFNGKVDQVATPEQIYNKPRTKMVAAFIGNMNFFETECIGESSKTITVFHKDLGNL

SEQ ID NO: 172679 - protein, 303 aa, Unknown
  Bacterial polypetide isolated from the Sargasso Sea
SFGDQKVLHNVSLLVPSGQLVCLLGPSGCGKTTFLRLAAGLEELQSGEILINGKVVADSEHSVPPQNRKIGLMFQDFALFPHLTATENVLFGLQNLPPPERNERASGMLDKVGMTQHAGKYPHMLSGGQQQRVALARALAPEPELLLLDEPFSGLDIEMRLRIREQTLEVLKGSGVATLMVTHDAEEAMFMADRIKVIGESGHVLQAGRPHEIFYHPRHQFVAKLFGKTNCIQGIVNKGAVNTPFGEVSCIGFMDGERVEILIRPEGVQLSDKNDGVPATILSTHLLGHDSLMRVRLDQEKNG

SEQ ID NO: 172680 - protein, 244 aa, Unknown
  Bacterial polypetide isolated from the Sargasso Sea
MADIELRSINKFFGKTHVIKDFSLNIKSQSFTTLVGPSGCGKSTLLRMIAGLEETNSGKISIGGEEVNNLPPKERNIAMVFQSYALYPHMTVFDNMAFGLKLEKRPKDEVKQRVHEAAKILQIEDYLLRKPKQLSGGQRQRVAIGRAITRKPKVFLFDEPLSNLDAALRVQMRIELAKLHDHLDATMVYVTHDQTEAMTLSDEIVVLDQGEISQQGKPIELYNNPKNLFVGGFIGSPKDEFCQC

SEQ ID NO: 172681 - protein, 282 aa, Unknown
  Bacterial polypetide isolated from the Sargasso Sea
NEGEFITMLGPSGSGKTTCLMMLAGFETPTNGEIYLDSKPISRIPPHKRGIGMVFQNYALFPHLTVYENLAFPLKVRKLSKDDIDKKVDKALSMVSLSGFEKRMPNQLSGGQQQRVAVARSLVFDPQLVLMDEPLGALDKNLRESMQYEIKHIHENIGVTVVYVTHDQSEALTMSSRIAVFNDGKVQQLSSPDKLYEEPVNSFVAEFIGENNTFSGEVTDIAGGKCKVKLDTGAEIISNPIRVKSKGEKTKVSLRPERAIIDPEDKMDNKHKGKIEEIIYHG

SEQ ID NO: 172682 - protein, 247 aa, Unknown
  Bacterial polypetide isolated from the Sargasso Sea
MTVAIRATELVKSYSQGVRALDGVTLEVNSGEVLVVMGPSGSGKSTLIRTFNGLESLDGGALDVLGVRLDATHAERQVREIRKRVGMVFQQFNLFPHLSILDNITLAPIKVQQRAKAAAEQRAMDLLDQMGIREQAHKYPAQLSGGQQQRVAIARALALDPEVMLFDEPTSALDPERVKEVLDAMRQLAKGGMTMVVVTHELGFAREVADRVMFMDRGQVVETSDPENFFSNAREERSRRFLNQMQH

SEQ ID NO: 172683 - protein, 244 aa, Unknown
  Bacterial polypetide isolated from the Sargasso Sea
MSEAIIKIKDVNKWFGDFQVLKNINLEVIQKQKIVVCGPSGSGKSTLIRCINRLEEHQEGNIIVDGNELTEDTKDIEKIRAEVGMVFQQFNLFPHLSILDNCTLAPIWVKKMPKKQAEELAMNQLKQVQIQDQANKFPGQLSGGQQQRCAIARALCMQPKIMLFDEPTSALDPEMIKEVLDAMVNLAKQGMTMIVVTHEMGFAKEVADEVIFMDEGMIVEKANTKEFFANPKSDRTKLFLSQIL

SEQ ID NO: 172684 - protein, 161 aa, Unknown
  Bacterial polypetide isolated from the Sargasso Sea
MSDPIIKIESMNKWFGDFQVLKDINLSVEKNKKIVVCGPSGSGKSTLIRCINRLEEHQDGKITVDGNELSENTKNIEAIRADVGMVFQQFNLFPHLSILDNCTLAPIWVKKMSKKNAEELALKQLEQVQISDQSQKFPGQLSGGQQQRAAIARALCMEPKI

SEQ ID NO: 172685 - protein, 257 aa, Unknown
  Bacterial polypetide isolated from the Sargasso Sea
AGLEEINSGTISIDGQVVNELPPKERNIAMVFQSYALYPHMTVFDNMAFGLKIEKKSKDEITERVMEAAKILQIEEYLERKPKQLSGGQRQRVAIGRAITRKPKVFLFDEPLSNLDAALRVQMRVELAKLHDQLNATMIYVTHDQTEAMTLADDIVVLDQGIVSQKGSPLKLYNEPENLFVGGFIGSPKMNFINTKVISSNSSSTEVEILGQGKIIIPKTSNSVSAGDSVKIGIRPEHILINSEEKWWESKVFVIEN

SEQ ID NO: 172686 - protein, 313 aa, Unknown
  Bacterial polypetide isolated from the Sargasso Sea
VISKFNLEVEKGKFIVLLGPSGCGKSTLLRMIAGLEKIDNGKILLENNPLNDLLPSKRQIAMVFQSYALYPHMNVFQNISFGLKSEKISKNDIKDKVIEAAKILQIEKLLDRRPKELSGGQRQRVAIGRAITRNPKLFLFDEPLSNLDASLRSEMRVEISKLHKKLKSNIVYVTHDQIEAMTLADKIVIMNKGKIEQFGSPSEIYDNPNNIFVAEFIGNPKINIFKIKAEDILNKNTFKLFNKEIKIENLKFENEFYVGIRPEHISLENKSEFAININIDLIENLGSEKIIYSNLDNTEIRIRCSQNIKDKNI

SEQ ID NO: 172687 - protein, 290 aa, Unknown
  Bacterial polypetide isolated from the Sargasso Sea
NTVNKYFGDVHVIKDISLDIKSQSFTVLVGPSGCGKSTMLRMIAGLEDINSGTISIDGQVVNDLPPKQRNIAMVFQSYALYPHMTVFDNMAFGLKLEKRSKDEINERVNEAARILQIEDYLQRKPKQLSGGQRQRVAIGRAITRKPKVFLFDEPLSNLDAALRVQMRVELAKLHNELEATMIYVTHDQTEAMTLADDIVVLDTGIVSQKGSPLELYDKPNNMFVGGFIGSPKMNFISSKILSKSSDATEVDIMGMSKISVSKMSASSSEGDSVTLGIRPEHLVVNGDADG

SEQ ID NO: 172688 - protein, 241 aa, Unknown
  Bacterial polypetide isolated from the Sargasso Sea
ALKMVQLEGYENRYSNQLSGGQRQRIALARALVKQPKVLLLDEPLGALDKKLREEMQIELRNLQKSLGITFIFVTHDQEEAMTMSDRIAVMDEGNILQVSPPREIYHNPKNKFVSQFIGNINILDADLKSFSNENLSIEVDCFGSMQLKNYKQIIENDKINIAIRPEEITISKISDSNYDYNFQGYVKNISFYGESTYYYVLLNNSEKILMVSKNETKEPFSENDNCFVNFNSNNVKIIKD

SEQ ID NO: 172689 - protein, 206 aa, Unknown
  Bacterial polypetide isolated from the Sargasso Sea
MSDKIIQIAEMNKWFGDFQVLKNINLEVEKNKKIVVCGPSGSGKSTLIRCINRLEEHQEGSIIVDGNELTADTKDIEKIRAEVGMVFQQFNLFPHLSILDNCTLAPIWVKKMPKKDAEDLAIQHLEKVQIADQANKYPGQLSGGQQQRCAIARALCMEPKIMLFDEPTSALDPEMIKEVLDAMVSLAKAGMTMIVVTHEMGFAKEV

SEQ ID NO: 172690 - protein, 234 aa, Unknown
  Bacterial polypetide isolated from the Sargasso Sea
MNKWFGDFQVLKNINLEVEANKKIVVCGPSGSGKSTLIRCINRLEEHQEGDIIVDGNELSEKTKDIEKIRAEVGMVFQQFNLFPHLSILDNCTLAPIWVKKMPKKEAQELALDQLKKVQIDDQANKFPGQLSGGQQQRCAIARALCMQPKIMLFDEPTSALDPEMIKEVLDAMVSLAKGGMTMIVVTHEMGFAKEVADEVIFMDEGMIIEKADTKEFFANPKSDRTKLFLSQIL

SEQ ID NO: 172691 - protein, 267 aa, Unknown
  Bacterial polypetide isolated from the Sargasso Sea
LRVAAGQTCALCGPSGSGKSTIIQLLERFYDPQSGVVLLDGVDIKTLNVRWLRSQLGLVGQEPVLFQGTVAENIAYGTPRDISQAEIEEAAQMANAHDFITKSLSDGYSTQVGQGGGKLSGGQKQRVAIARAIAKQPAVLLLDEATSALDTKSEKVVQAALDAIMVRQRRTTLVIAHRLSTIRTAETLAVLTDGRVVEEGTYEKLMALEDGVFRGLAEKQERLLAADRRRSLASGGGEEAVAAAAAALEDAAEGGEAVVVEVEEAAV

SEQ ID NO: 172692 - protein, 235 aa, Unknown
  Bacterial polypetide isolated from the Sargasso Sea
MSNNKEFVKFDKVDKSYDGKVLVVKDLNLDIAEGEFITMLGPSGSGKTTCLMMLAGFETPTNGEIYLDSNPISNIPPHKRGIGMVFQNYALFPHMTVYENLAFPLRVRKISKEDIDKKVDKALSMVSLSGFENRMPGQLSGGQQQRVAVARALVFDPKVVLMDEPLGALDKNLRESMQYEIKHIHENIGVTVVYVTHDQGEALTMSNRIAVFNDGKVQQLSSPDKLYEEPVNSFV

SEQ ID NO: 172693 - protein, 300 aa, Unknown
  Bacterial polypetide isolated from the Sargasso Sea
DREFVALVGPSGCEKSTLLRMIAGLETTTSGDIAIGDKVVNDVMPSDRKVAMVFQSYALYPHMTVKQNMSFGLEVTGHPKQEIISKVEKAANILQLGDLLERKPKQLSGGQRQRVAIGRAIVRDPEVFLFDEPLSNLDAELRVQMRVELALLHKQLNATMIYVTHDQVEAMTLADKIVVLRDGVIEQIGAPMELYNKPANEFVAGFIGSPRMNMVPVKTAIDAGWKGSKIAGAVRIGVRPEHLVKSKTGLEGIIFHVEHLGGQTLTHIKLPDETDLTLVEPGEHTYNRGDKITVQPEAKT

SEQ ID NO: 172694 - protein, 246 aa, Unknown
  Bacterial polypetide isolated from the Sargasso Sea
SEESIISLKNVNKWFGDFHVLQDVNLEVKKKERIVVCGPSGSGKSTMIRCINRLEEHQEGSIVVDGIELTGNLKNIDNVRKEVGMVFQQFNLFPHLSVKENITLAPIWVKKMPKAEAEELAMRQLEIVKIPEQANKYPGQLSGGQQQRVAIARSLAMNPNIMLFDEPTSALDPEMIKEVLDVMVDLANGGMTMIVVTHEMGFAKTVADRMVFMDEGKIVEEASPDKFFNNPESDRTKLFLSQILHQ

SEQ ID NO: 172695 - protein, 278 aa, Unknown
  Bacterial polypetide isolated from the Sargasso Sea
GCGKTTTMRMIAGLEQETTGEVYINDIKVNEMEPKDRDVAMVFQSYGLYPNMSVFENIRFPLKIRKIDPNTHSKRVERAAEMVELSEYLHRKPSELSGGQRQRVALARAIVREPNVFLMDEPLSNLDAKLRVSTRAQIKHLHHEMQVTTLYVTHDQIEAMTLADRVVVLNKGIIQQIGTPFEIYNKPQNLFVAGFIGNPGMNLIPGKIKNNTFESGLIRLDGFKIGDGDITVGFRAEDAIIQTTKTKPKNSNEFSSAIYSIELLGDSTMISFQISGTL

SEQ ID NO: 172696 - protein, 191 aa, Unknown
  Bacterial polypetide isolated from the Sargasso Sea
MVFDNLIIRARSLSKSYGSEDVLTDFNIDIWYGSIFGILGVSGSGKTTALRLLAGFENPDQGTIEMHNKVIFDEKTNVPPEKRKIGMVFQDYALFPHLTVEKNIAFGLSKEEIKNGRLDEVISMTNLSSYRKKFPQDISGGQQQRVALARALAPKPEVVLLDEPFTSLDAQMARDLREEVVSLLRATKTTG

SEQ ID NO: 172697 - protein, 195 aa, Unknown
  Bacterial polypetide isolated from the Sargasso Sea
VCGPSGSGKSTLIRCINRLEEHQKGNITVDGIELSEETKNIEAIRAEVGMVFQQFNLFPHLSILDNCTLAPIWVKKMPKKQAEELAMKQLEQVQISDQANKFPGQLSGGQQQRCAIARALCMEPKIMLFDEPTSALDPEMIKEVLDAMVNLAKAGMTMIVVTHEMGFAKEVADEVIFMDEGMIVEKAETKEFFAN

SEQ ID NO: 172698 - protein, 233 aa, Unknown
  Bacterial polypetide isolated from the Sargasso Sea
YLSIRGLHKSYGSTPIFSEIDCEIGKGEFITLLGPSGCGKSTLLRCIAGLTGVNGGQIILDGQDLVPLTPQKRGIGMVFQSYALFPNMNVAQNVAFGLRMQKIKGSEAEQRVKQVLELVELNDFAERYPHQLSGGQCQRVALARSLVTRPRLLLLDEPLSALDARIRKHLREQIRSIQQELGLTTIFVTHDQEEALVMSDRIVLMNAGKIVQSGDAESLYSAPVDAFAAGFIG

SEQ ID NO: 172699 - protein, 244 aa, Unknown
  Bacterial polypetide isolated from the Sargasso Sea
MSDKIIQITEMNKWFGDFQVLKNINLEVEKNKKIVVCGPSGSGKSTLIRCINRLEEHQEGSIIVDGNELTADTKDIEKIRAEVGMVFQQFNLFPHLSILDNCTLAPIWVKKMPKKDAEDLAIQHLEKVQISDQANKYPGQLSGGQQQRCAIARALCMEPKIMLFDEPTSALDPEMIKEVLDAMVNLAKAGMTMIVVTHEMGFAKEVADEVIFMDEGMIVERAETKEFFANPKSDRTKLFLSQIL

SEQ ID NO: 172700 - protein, 211 aa, Unknown
  Bacterial polypetide isolated from the Sargasso Sea
MARERNDLVLEHVSHRFDTAVAVDDASLTVGASEVVCLVGPSGSGKTTLLRIAAGLEPLQQGRVLIGGEVMGDARMSVSPEDRNVGLVFQDYALFPHLTVRGNIAFGLKQLSTDQRDEQVSQALERTGMSGYASSYPHQLSGGQQQRVALARALAPRPRIVLLDEPFSGLDASLRHRVRDQAAAILRDSGIATLMVTHDPEEAMYLADRIA

SEQ ID NO: 172701 - protein, 252 aa, Unknown
  Bacterial polypetide isolated from the Sargasso Sea
ESENYMNNGPVIKINNLNKWFGSFQVLKNIDLQIMKGEKIVICGPSGSGKSTLIRCINRLEEHQEGQIFVNGIELTNDLKNIEDIRKEVGMVFQSFNLFPHLTVLDNCTLALQWVRKMPREDAEQFAMEYLERVQIPEQAMKFPGQLSGGQQQRVAIARSLCMNPEIMLFDEPTSALDPEMIKEVLDVMVDLAETGMTMLVVTHEMGFASRVADRIIFMDEGEIIEQNSPKTFFENPENERTKLFLSQILAH

SEQ ID NO: 172702 - protein, 299 aa, Unknown
  Bacterial polypetide isolated from the Sargasso Sea
TEFVKFDKVDKSYDGKVLVVKDLNLNISEGEFITMLGPSGSGKTTCLMMLAGFETPTNGEIYLDSNPISNIPPHKRGIGMVFQNYALFPHMTVYENLAFPLRVRKVQKDEIDKKVDKALSMVSLSGFESRMPAQLSGGQQQRVAVARALVFDPAVVLMDEPLGALDKNLRESMQYEIKHIHENIGVTVVYVTHDQGEALTMSNRIAVFNDGKVQQLSSPDKLYEEPVNSFVAEFIGENNTFGGEVTDISKNVCKVKLQNGEILANPISVNSKGDKTTVSIRPERALINPKDKMDNNQTG

SEQ ID NO: 172703 - protein, 192 aa, Unknown
  Bacterial polypetide isolated from the Sargasso Sea
RLEEHQEGDIIVDGNELSEKTKDIEKIRAEVGMVFQQFNLFPHLSILDNCTLAPIWVKKMPKKEAQELALDQLKKVQIDDQANKFPGQLSGGQQQRCAIARALCMQPKIMLFDEPTSALDPEMIKEVLDAMVSLAKGGMTMIVVTHEMGFAKEVADEVIFMDEGMIIEKADTKEFFANPKSDRTKLFLSQIL

SEQ ID NO: 172704 - protein, 311 aa, Unknown
  Bacterial polypetide isolated from the Sargasso Sea
MNVNHQVLVEFVDVQKTYDGTELVIKNLNLKIHKGEFLTLLGPSGSGKTTCLMMLAGFETPTHGVVMLGDIELNNVPPHKRGIGMVFQNYALFPHMSVYENLAFPLEVRKLNKGDVKARVEKVLEMVELGQFGARRPAQLSGGQQQRVALARALVFEPDLVLMDEPLGALDKNLREQMQYEIKHIHENLGMTVVYVTHDQTEALTMSDRIAVFNEGVIQQLAPPNELYEKPENAFVADFIGENNRLTGTIKETNGSECLVAVEEEIITATNVHEQPEGSSVILSLRPERVVLNPEVGALKNIFEAEVLELI

SEQ ID NO: 172705 - protein, 171 aa, Unknown
  Bacterial polypetide isolated from the Sargasso Sea
MKQENALEAVNVSCIFRINQGLLKGSKPLVAVNGVSLQIPKGKVVGLVGESGCGKSTLANILLGLQRPTSGDVLYSGKTAAGFSNRHIARRIQPIFQDPYSSLNVTKTVKSIISLPLRIHKIGNPASWDSKVNEMLDLVGLPKRVAESYPSQLSGGQRQRVAIARALIMRT

SEQ ID NO: 172706 - protein, 192 aa, Unknown
  Bacterial polypetide isolated from the Sargasso Sea
MTEKIIQMENVNKWFGDFQVLKDINLQVSEKQKIVVCGPSGSGKSTLIRCINRLEEHQKGKIVVDGFELSEKTKNIEQIRAEVGMVFQQFNLFPHLSILDNCTLAPIWVKKTPKKKAEELAMKQLEQVQIADQAAKFPGQLSGGQQQRAALARALCMEPKIMLFDEPTSALDPEMIKEVLDAMVNLAKQGMT

SEQ ID NO: 172707 - protein, 212 aa, Unknown
  Bacterial polypetide isolated from the Sargasso Sea
KIVVCGPSGSGKSTLIRCINRLEEHQEGSIVVDGTELTEETKNIEQIRAEVGMVFQQFNLFPHLSILDNCTLAPIWVKKMPKKDAEALALKHLEKVQIADQAYKYPGQLSGGQQQRCAIARALCMEPKIMLFDEPTSALDPEMIKEVLDAMVNLAKAGMTMIVVTHEMGFAKEVADEVIFMDEGMIVEQAETKEFFANPKSDRTKLFLSQIL

SEQ ID NO: 172708 - protein, 222 aa, Unknown
  Bacterial polypetide isolated from the Sargasso Sea
MSSSIINIENVNKWFGDFQVLKDINLEVQPKQKIVVCGPSGSGKSTLIRCINRLEEHQEGKIIVDGTELSENTKNIEQIRAEVGMVFQQFNLFPHLSILDNCTLAPIWVKKMPKKQAEELAMQQLEQVQIADQAYKFPGQLSGGQQQRSAIARALCMQPKIMLFDEPTSALDPEMIKEVLDAMVNLAKGGMTMIVVTHEMGFAKEVADEVIFMDEGMIVEKK

SEQ ID NO: 172709 - protein, 276 aa, Unknown
  Bacterial polypetide isolated from the Sargasso Sea
MKTLKIEDLSKNFGTTEVLKKINLDIDEGNFLVLLGPSGCGKSTLLNIIAGLETINEGNLYIDDYNVSKVEPKDRNIAMVFQSYALYPSMNVKENMIFGLKQAKASKEKIEEQLKKVSSFLKVDELLNRKPSQLSGGQRQRVAIGRALVREPRIFLFDEPLSNLDAKLRVEMRREIKKLHQTLKTTVVYVTHDQTEAMSLGTKIAIMNLGVIQQNDTPENIYNKPSNTFVADFIGSPSMNLIKGNIIKKSDQLSFVGEGDNNGIQIPINNYNFKEK

SEQ ID NO: 172710 - protein, 234 aa, Unknown
  Bacterial polypetide isolated from the Sargasso Sea
MNKWFGDFQVLKDINLDVEANKKIVVCGPSGSGKSTLIRCINRLEEHQKGSIIVDGTELSEQTKNIEQIRAEVGMVFQQFNLFPHLSILDNCTLAPIWVKKMPKKEAEELALKQLKQVQIDDQAYKYPGQLSGGQQQRCAIARALCMEPKIMLFDEPTSALDPEMIKEVLDAMVNLAKAGMTMIVVTHEMGFAKEVADEVIFMDEGMIVEKAETKEFFANPKSDRTKLFLSQIL

SEQ ID NO: 172711 - protein, 304 aa, Unknown
  Bacterial polypetide isolated from the Sargasso Sea
KEDEFLVLVGPSGCGKSTLLRMIAGLEKIDEGEIFINDQKINELHPSKRQTAMVFQSYALYPHMNVYENMSFGLKIEKRPKEEINSKVMQAAKILKIEELLERKPKQLSGGQRQRVAIGRAITRNPKIFLFDEPLSNLDAALRAEMRVEISKLHNQIKTNMIYVTHDQVEAMTLADRIVILNQGNIEQVGTPEEIYNDPANIFVAQFIGTPKMNILEVSEQNIISENTIKILENNIQFDQLKLNKSKHFVGIRPEHLKANQENQFSFNPEIELIENLGNEKIAYMKKNEHQLSAKVPSNIEMEI

SEQ ID NO: 172712 - protein, 186 aa, Unknown
  Bacterial polypetide isolated from the Sargasso Sea
MSKIIELKNVNKWFDKFQALKDINLEVNQQEKIVICGPSGSGKSTLIRCINRLEEHQDGQIIVDGKEISENTKDLEKIRAEVGMVFQQFNLFPHLSILDNCTLAPIWVKKMPKKDAEELAMKNLERVQIADQAKKFPGQLSGGQQQRSALARALCMEPKIMLFDEPTSALDPEMIKEVLDAMGGSC

SEQ ID NO: 172713 - protein, 203 aa, Unknown
  Bacterial polypetide isolated from the Sargasso Sea
MKGMNVNHQILVEFVDVQKTYDGTELVIKNLNLKIHKGEFLTLLGPSGSGKTTCLMMLAGFETPTHGVVMLGDIELNNVPPHKRGIGMVFQNYALFPHMSVYENLAFPLEVRKLNKVDVKARVEKVLEMVELGQFGARRPAQLSGGQQQRVALARALVFEPDLVLMDEPLGALDKNLREQMQYEIKHIHENLGMTVVYVTHDQ

SEQ ID NO: 172714 - protein, 156 aa, Unknown
  Bacterial polypetide isolated from the Sargasso Sea
MTLKKVNAIEVKNVTKVYRSSNTETRALRNANLTIYDNEFFTLLGPSGCGKTTLLRLIAGFEDITEGSINLFDQEIVNLPPNKRPVNTVFQQYSLFPHLDVYENVAFGLRRLKKDESLTKKRTMEVLELVQMKDYATRKPNQLSGGQQQRVALARA

SEQ ID NO: 172715 - protein, 170 aa, Unknown
  Bacterial polypetide isolated from the Sargasso Sea
MVFDNLIIRARSLSKSYGSEDVLTDFNIDIWYGSIFGILGVSGSGKTTALRLLAGFENPDQGTIEMHNKVIFDEKTNVPPEKRKIGMVFQDYALFPHLTVEKNIAFGLSKEEIKNGRLDEVISMTNLSSYRKKFPQDISGGQQQRVALARALAPKPEVVLLDEPFTSLDA

SEQ ID NO: 172716 - protein, 209 aa, Unknown
  Bacterial polypetide isolated from the Sargasso Sea
MGAIDIKSAGKIYPNGTRALEDVNITINDGEFVVLVGPSGCGKTTLLRMVAGLEDITEGEISIGDKTVNDVAPKDRDIAMVFQNYALYPHMSVYDNMAFSLKLRKLAKDEIDQKVKDAAKTLEISELLDRKPKALSGGQRQRVAMGRAIVRNPQAFLMDEPLSNLDAKLRVQMRAELGQLHTQLQTTTLYVTHDQVEAMTMGDRVAVIR

SEQ ID NO: 172717 - protein, 238 aa, Unknown
  Bacterial polypetide isolated from the Sargasso Sea
MSTIIQMKEVNKWFGDFQVLKDINLEVSEKQKIVVCGPSGSGKSTLIRCINRLEEHQKGQIIVDGNELSEKTKDIEKIRAEVGMVFQQFNLFPHLSILDNCTLAPIWVKKTPKKKAEELAMKQLEQVQIADQATKFPGQLSGGQQQRAALARALCMEPKIMLFDEPTSALDPEMIKEVLDAMVNLAKGGMTMIVVTHEMGFAKEVADEVVFMDEGMIVERAKTKDFFANPKNERTKLF

SEQ ID NO: 172718 - protein, 167 aa, Unknown
  Bacterial polypetide isolated from the Sargasso Sea
AHPQASGDGFQQFNLFPHLSILENITLAPMRVQKQTRVQAEAKARSLLEQMGISEQAEKYPAQLSGGQQQRVAIARALALNPEIMLFDEPTSALDPERVKEVLDAMRTLANQGMTMVVVTHELGFAREVADRVLFMDSGRVIESADAKTFFNQAQQERTRKFLNQIN

SEQ ID NO: 172719 - protein, 182 aa, Unknown
  Bacterial polypetide isolated from the Sargasso Sea
IVDGNELTEDTKNIEKIRADVGMVFQQFNLFPHLSILDNCTLAPIWVKKMPKSDAEELAMKQLEQVQIVDQAKKFPGQLSGGQQQRSAIARALCMQPKIMLFDEPTSALDPEMIKEVLDAMVNLAKGGMTMIVVTHEMGFAKEVADEVIFMDEGMIVERAPTKEFFANPKSDRTKLFLSQIL

SEQ ID NO: 172720 - protein, 218 aa, Unknown
  Bacterial polypetide isolated from the Sargasso Sea
MAENTAKIPGVSDEVAISIRNMNKWYGDFHVLRDIDLTVQRGERIVICGPSGSGKSTLIRCINALEEHQKGEIVVDGTVLSSDLKNIDKIRSEVGMCFQHFNLFPHLTILENCTLAPIWVRKMPKAEAEEIAMHFLTKVKIPEQADKYPGQLSGGQQQRVAIARSLCMKPRIMLFDEPTSALDPEMIKEVLDTMVSLAEEGMTMLCVTHEMGFARQVA

SEQ ID NO: 172721 - protein, 191 aa, Unknown
  Bacterial polypetide isolated from the Sargasso Sea
MDIIENSPILEVRNLKKNYDKLSVLKDISFSAYAGSVISFIGSSGSGKSTLLRCCNLLEIPQAGEIIFKGEAVSWTNKTDSRQLSDKKQIIKFRTNLSMVFQSFNLWSHLSILDNVIEAPVTVLRKDRHIMRDVAYSLLEKVGIADKADAWPAQLSGGQQQRAAIARALAMEPDALLFDEPTSALDPELNK

SEQ ID NO: 172722 - protein, 198 aa, Unknown
  Bacterial polypetide isolated from the Sargasso Sea
LIRCINRLEEHQKGSIIVDGTELNEDTKNIEQIRAEVGMVFQQFNLFPHLSILDNCTLAPIWVKKLPKKQAQDLAMEQLEKVQIADQAQKFPGQLSGGQQQRCAIARALCMEPKIMLFDEPTSALDPEMIKEVLDAMVNLAKGGMTMIVVTHEMGFAKEVADEVIFMDEGMIVEKADTKEFFANPKSDRTKLFLSQIL

SEQ ID NO: 172723 - protein, 282 aa, Unknown
  Bacterial polypetide isolated from the Sargasso Sea
MQDKNNVVDLSKALPITIRSLTKKYGSLYALDSIDLDVSSGEFLTLLGPSGSGKTTLLMAIAGFNRPDSGSIRFGNTEMILAPPHKREVGMVFQNYALFPHMTVAGNIGFPLKLRGFASTECRQRVDEALSTVQLSDLGDRRIDQLSGGQKQRVALARAFVFSPRILLMDEPLSALDKKLREQMQIELKQLHRKLGVTTVYVTHDQREALTMSDRIAVINHGKFEQIDTPQSIYNKPANPFVADFIGESAMLPMKKNSSGDLFYQDLLISSGYSNSSNEEWL

SEQ ID NO: 172724 - protein, 182 aa, Unknown
  Bacterial polypetide isolated from the Sargasso Sea
VVDGIELTNDLRNIEKIRSEVGMVFQQFNLFPHLTVLDNITLAPIWVRKKPRAEAESMARALLERVGIPEQAEKFPGQLSGGQQQRVAIARSLAMEPRVMLFDEPTSALDPEMIKEVLDVMKELARSGITMMVVTHEMGFAREVADRIMFMEGGEIVEVGTPEHFFTNPTEDRTKLFLSQIL

SEQ ID NO: 172725 - protein, 108 aa, Unknown
  Bacterial polypetide isolated from the Sargasso Sea
MSSRDVSVEVQGVSKSFGSVIALNSVSLDIFKGEFFSLLGPSGCGKTTLLRMIGGFEVPDDGSILIEGSDTDGLPPYERSTNMIFQHLALFPHMNVWDNVAFGLKMKG

SEQ ID NO: 172726 - protein, 180 aa, Unknown
  Bacterial polypetide isolated from the Sargasso Sea
MEQNLRENTKNIEQIRAEVGMVFQQFNLFPHLSILDNCTLAPIWVKKMPKKQAEELAMQQLEQVQIADQAHKYPGQLSGGQQQRSAIARALCMKPKIMLFDEPTSALDPEMIKEVLDAMVNLAKGGMTMIVVTHEMGFAKEVADEVIFMDEGMIVEKNTTKEFFANPKSDRTKLFLSQIL

SEQ ID NO: 172727 - protein, 270 aa, Unknown
  Bacterial polypetide isolated from the Sargasso Sea
IFGLKQAKTSKEKIEEQLKKVSSFLKVDELLHRKPSQLSGGQRQRVAIGRALVREPRIFLFDEPLSNLDAKLRVEMRREIKKLHQTLKTTVVYVTHDQTEAMSLGTKIAIMNHGVIQQNDTPENIYNKPNNTFVADFIGSPSMNLIEGRLIQNSDKISFIADGSEESNQIPIDNYNFKKSSGLKDKQIFFGIRPEHIHFKKLNENDFEVNFKANLSEYIGHEQIITYNFSQQEILAKFPSTINIELNKEMKLYFDLSQISIFDKDSKERI

SEQ ID NO: 172728 - protein, 239 aa, Unknown
  Bacterial polypetide isolated from the Sargasso Sea
MKKAEVKFQNITKKFNETTAVDNVSCSFEAGTLTTLLGPSGCGKTTSLRIIAGLERATSGKILIDREDVTLLPATDRDVSMVFQSYALFPHMSVIENVSYGLKMIKINKDEYIQKSLETLKLVNLEGYENRMPSELSGGQQQRVAVARAIVLEPKVLLFDEPLSNLDAKLRRQVREDIREIQQKLGVTTIYVTHDQEEALAISDKVIVMNNAVIAQEGSPKDLYNFPKNKFVANFIGDA

SEQ ID NO: 172729 - protein, 199 aa, Unknown
  Bacterial polypetide isolated from the Sargasso Sea
TLIRCINRLEEHQKGTIIVDGTELSENTKNIEQVRAEVGMVFQQFNLFPHLSILDNCTLAPIWVKKMPKKEAEELAMKQLTQVQISDQANKFPGQLSGGQQQRCAIARALCMQPKIMLFDEPTSALDPEMIKEVLDAMVNLAKGGMTMIVVTHEMGFAKEVADEVIFMDEGMIIEKAETKEFFANPKSDRTKLFLSQIL

SEQ ID NO: 172730 - protein, 284 aa, Unknown
  Bacterial polypetide isolated from the Sargasso Sea
PPYEENWDGFSNYALFPHMTVQENLSFPLEVRKLSKADTKEKVQKALDMVELGDFGTRFPAQLSGGQQQRVALARALVFEPRLVLMDEPLGALDKNLREQMQYEIKHIHDRIGITVVYVTHDQSEALTMSNRIAVFNDGVVQQLSTPDILYEKPENSFVAQFIGENNRMTGTIKSMENNYCLVDLDNKAGVVKALKVNVGNVGEKTQLSVRPERVSLGSDDNGENLFTGKVEELIYLGDHIRVRLDVCGNNEFIVKVPNEGSFNYSEGDSIKLNWNPDDIRALD

SEQ ID NO: 172731 - protein, 207 aa, Unknown
  Bacterial polypetide isolated from the Sargasso Sea
MSEDSIISLQNVNKWFGDFHVLKDVDLEVKKKERIVVCGPSGSGKSTMIRCINRLEEHQEGTIIVDGIELTGNLKNIDSVRKEVGMVFQQFNLFPHLSVKENITLAPIWVKKMPKAEAEELAMQQLEIVKIPEQADKYPGQLSGGQQQRVAIARSLAMKPNIMLFDEPTSALDPEMIKEVLDVMIDLAEGGMTMIVVTHEMGFAKTV

SEQ ID NO: 172732 - protein, 225 aa, Unknown
  Bacterial polypetide isolated from the Sargasso Sea
MANIKFTGVHKSFGSNKIITDFNLLGKEDEFLVLVGPSGCGKSTLLRMIAGLEKIDEGEIFINEQKINELHPSKRQTAMVFQSYALYPHMNVYENMSFGLKIEKRPKEEINTKVMQAAKILKIEELLERKPKQLSGGQRQRVAIGRAITRNPKIFLFDEPLSNLDAALRAEMRVEISKLHNQIKTNMIYVTHDQVEAMTLADRIVILNQGNIEQVGTPEEIYNDP

SEQ ID NO: 172733 - protein, 182 aa, Unknown
  Bacterial polypetide isolated from the Sargasso Sea
IVDGNELTEDTKDIEKIRAEVGMVFQQFNLFPHLSILDNCTLAPIWVKKMPKKEAEDLALQHLEKVQIADQANKYPGQLSGGQQQRCAIARALCMEPKIMLFDEPTSALDPEMIKEVLDAMVNLAKAGMTMIVVTHEMGFAKEVADEVIFMDEGMIVERAETKEFFANPKSDRTKLFLSQIL

SEQ ID NO: 172734 - protein, 199 aa, Unknown
  Bacterial polypetide isolated from the Sargasso Sea
LIKTVNGLEPVQQGVITVDGTVVNDKKTDLAKLRSRVGMVFQHFELFPHLSIIENLTLAQVKVLKRDKKPARDKAQKLLERVGLSAHAEKFPAQLSGGQQQRVAIARALCMDPIAMLFDEPTSALDPEMINEVLDVMVELANEGMTMMVVTHEMGFARKVANRVIFMDEGKIVEDSPKEEFFANPKSDRAKDFLAKILH

SEQ ID NO: 172735 - protein, 259 aa, Unknown
  Bacterial polypetide isolated from the Sargasso Sea
KLEKRSKDEINERVNEAARILQIEDYLQRKPKQLSGGQRQRVAIGRAITRKPKVFLFDEPLSNLDAALRVQMRVELAKLHNELEATMIYVTHDQTEAMTLADDIVVLDTGIVSQKGSPLELYDKPNNMFVGGFIGSPKMNFISSKILSKSSDATEVDIMGMSKISVPKMSASSSEGDSVSLGIRPEHLVVNGDSDGSWESKVFVVEKLGDVTYLYLEKDGEPLVAETEGHSEIKVGDTVKVGFPAGRCQLFDSSGQAFK

SEQ ID NO: 172736 - protein, 188 aa, Unknown
  Bacterial polypetide isolated from the Sargasso Sea
MAFDNLLIRTRSVSKSYDEEQVLSDFNLDVWKGSITGILGSSGSGKTTALRLIAGFDRPDAGIIEMKNEVIVSDEVWLPPEKRNIGMVFQDYALFPHLTVEKNIAFGLGKNDLEKGRLKEVIDMCNLSGLINKFPQELSGGQQQRVALARALAPNPEVVLLDEPFTSLDAQMARVLRDEVGELLKNTE

SEQ ID NO: 172737 - protein, 270 aa, Unknown
  Bacterial polypetide isolated from the Sargasso Sea
MSVADNIAFSLEVKGISKTKRRDRAEELLELIALSGQGDKKVHELSGGQRQRVAIARALAIEPEVLLLDEPLSALDLKLRQKMRTELRAIQKRVGITFIYITHDQGEALTMSDRVAVMNEGELEQVGLCDDVYDYPHTPFVATFVGENNPFYGKVKSVDNHKVTIESQGNTFLAKAGKIDDQNKHNFKIGDEVIMFIRPESIFINNNSNKLDNNFVAKINTIEFEGNLKNIYLSINSSMNVRFSVPNAVDTTDLSTNKDVQLTFSSEKAV

SEQ ID NO: 172738 - protein, 197 aa, Unknown
  Bacterial polypetide isolated from the Sargasso Sea
IEEADGSIEFDGIDIKKLDLKNMRSFKKHFQIVFQDPFGSLSPRMTIGEIIGEGLKVHEPGLSQEDRLAKIISSLKDVELDEGSYSRFPHELSGGQRQRVAIARAIILRPKLILLDEPTSALDVSIQMQILYLLKDLQSRLGLAYLCISHDLRVIRFLSDQVYVMKDGIIVEHGSSDEVFEEPKHNYTKELLAASIA

SEQ ID NO: 172739 - protein, 234 aa, Unknown
  Bacterial polypetide isolated from the Sargasso Sea
PSQLSGGQRQRVAIGRALVREPRIFLFDEPLSNLDAKLRVEMRREIKKLHQQLKTTVVYVTHDQTEAMSLGTNIAIMNHGVIQQNDTPENIYNKPSNTFVADFIGSPSMNLIKGNLKESSNKVSFITHGSNIEIPINGYDFKEKSNLDNKEVFFGIRPEHIFFKKSNEEDFEINLRADLSEYIGHEQIMTFNFENQEVLAKFPSTVKIDLSKNTKLFFDLTQISLFDAKTEERI

SEQ ID NO: 172740 - protein, 130 aa, Unknown
  Bacterial polypetide isolated from the Sargasso Sea
AEVLARKYLERVHIPEQAEKYPAQLSGGQQQRVAIARSLCMEPRIMLFDEPTSALDPEMISEVLDVMVELAEEGMTMVCVTHEMSFARKVADTMVFMDSGEIVEIAPPDQFFSAPESERTQKFLNQILQY

SEQ ID NO: 172741 - protein, 296 aa, Unknown
  Bacterial polypetide isolated from the Sargasso Sea
NAISSIPPHKRGIGMVFQNYALFPHMTVYENLAFPLRVRKIPKDEADKKIDKALSMVSLQGFAQRMPGQLSGGQQQRVAVARSLVFDPQLVLMDEPLGALDKNLRESMQYEIKHIHENIGVTVVYVTHDQSEALTMSNRIAVFNDGKVQQLSSPDELYEKPVNSFVAEFIGENNTFGGEVSDISGGKCKVKLANAEILANPISVRGKGEKTTVSLRPERALINPNDKMDNIHKGKIEEVIYHGDHTRVRINLLGNSEFILKVPNSSSNLDIKLGNEIKIGWNSEDARALDPKINTN

SEQ ID NO: 172742 - protein, 252 aa, Unknown
  Bacterial polypetide isolated from the Sargasso Sea
GDEIEKRVKDVLSLVKLEGYEERFSNQLSGGQRQRVALARALVRQPKVLLLDEPLGALDKKLRDEMQLELRTLQKNIGITFVFVTHDQQEAISMSDRVAVMNNGKIQQLSAPNELYKNPENIFVSDFIGETNFLKAETKSNDGEFINVSIEELGEFKIKNNLNITSNSSNVVCSIRPESMMISREKSDWDVCLDAEIRQTSYLGEMTRFYVEAKGIEKLITVSSQHFDNQSFEDNKCFVSISLEDISLLNKK

SEQ ID NO: 172743 - protein, 261 aa, Unknown
  Bacterial polypetide isolated from the Sargasso Sea
FNIPPHKRGIGMVFQNYALFPHMTVYENLSFPLKVRKLSKEDIDKKVDKALSMVSLSGFEKRMPGQLSGGQQQRVAVARSLVFDPQLVLMDEPLGALDKNLRESMQYEIKHIHESIGVTVVYVTHDQGEALTMSNRIAVFNDGKVQQLSSPDKLYEQPVNSFVAEFIGENNTFTGEVTDISKDKCKIKLNTGNEIFANPIRVKSKGEKTIVSLRPERAIIDPENKIENKFKGKIEEVIYHGDHTRVRLDILGNKEFILKVP

SEQ ID NO: 172744 - protein, 264 aa, Unknown
  Bacterial polypetide isolated from the Sargasso Sea
MRKVFGQNIEAVKNLDLVIQEGEFIVLVGPSGCGKTTTLRMIAGFEEPTAGEVIIDDVIVNDLDPKDRNLGMVFQSHALFPHKTVFENIEFGPRMKKMPLDKRKKRVEEVAEMVHITPLLNKLPSQCSGGEAQRVALARTLITEPGSFLLDEPLSSLDAKLRREMRAEIDRLHQELKKTFVYVTHDQEEAMTLADRIVVMRAGEIEQQGTPMEIYGDPSSYFVADFFGSPSMNLIDGQISRNSSQESFVFEGCGLSLDLPQLEG

SEQ ID NO: 172745 - protein, 276 aa, Unknown
  Bacterial polypetide isolated from the Sargasso Sea
MAKVELKNLTKKYGEVIAVQNMNLTIPHNEFLVLVGPSGCGKSTTLRMIAGLEEITGGDIYIGDQLVTEKDPKDRNVSMVFQNYALYPHMTVEENLGFSLKIAKVEKKEIEERVKNAVQILGLQELQKRKPSQLSGGQRQRVAMGRAIVRRPDAFLFDEPLSNLDAKLRTQMRTEIKKLHQQLKTTVIYVTHDQVEAMTLADRIIIMKDGFIEQIGSPVEVFNNPVNVFVATFIGSPPMNIIECSVLERNNELMIEIDDNIILKCPKSIMSKIKNS

SEQ ID NO: 172746 - protein, 147 aa, Unknown
  Bacterial polypetide isolated from the Sargasso Sea
AHDFITALPDGYETVVGDRGSSLSGGERQRVAIARAMLKDAPILLLDEATSALDAESEQQVQAALDRLTANRTTLVIAHRLATVMNADNILVMDDGTVVETGTHEELQRQDGLYARLSRLQFRDTGSIDDGKSEQVDGAVNPERASA

SEQ ID NO: 172747 - protein, 171 aa, Unknown
  Bacterial polypetide isolated from the Sargasso Sea
MGTISLRNISKSFGSTQVLKDLNVDIKDGEFLTLVGPSGCGKSTLLRIIAGLEQQTSGDVLIDDKNVNKIRASERDLAMVFQSYALYPHLTVRRNLETPLRLRDYNSFERLPLIGNFSPNKKNKTESINQLVNKTSETLKISELLDRKPGQLSGGQRQRVALGRAMVREPV

SEQ ID NO: 172748 - protein, 251 aa, Unknown
  Bacterial polypetide isolated from the Sargasso Sea
TLLPATDRDVSMVFQSYALFPHMSVLENVSYGLKMINVPKEEFIEKSLETLKLVNLEGYENRMPSELSGGQQQRVAVARAIVLKPKVLLFDEPLSNLDAKLRRQVREDIREIQQKLGVTTIYVTHDQEEALAISDKVIVMNNAIIAQQGSPKELYNFPKTKFVANFIGDANVVKAEIINQNNNIYEVQLAEMKINIESDQKLESSVSVSLRPEKITISKSPEENSIHASVNNASFVGNSYQYIVNSKVGKI

SEQ ID NO: 172749 - protein, 197 aa, Unknown
  Bacterial polypetide isolated from the Sargasso Sea
MGAIDIKSAGKIYPNGTRALEDVNITINDGEFVVLVGPSGCGKTTLLRMVAGLEDITEGEISIGDKTVNDVAPKDRDIAMVFQNYALYPHMSVFDNMAFSLKLRKLPKDEIDQKVKDAAKTLEISELLDRKPKALSGGQRQRVAMGRAIVRNPQAFLMDEPLSNLDAKLRVQMRAELGQLHTQLQTTTLYVTHDQVK

SEQ ID NO: 172750 - protein, 237 aa, Unknown
  Bacterial polypetide isolated from the Sargasso Sea
MASVSLKNLNKYFGNILVVNNVSVDIADGEFLVFVGPSGCGKTTTLRMLAGLESISDGEIQIGDHTVNHLPPGARDVAMVFQNYALYSHMTVGKNLGFALKARRFDDDDIKKRVLRVAKMLDLEEMLDRKPRQLSGGQRQRVALGRAIVRNPQVFLMDEPLSNLDALLRLQTRKELIELTGELKSTVIYVTHDQVEAMTMGHRLAVMNEGEVVQLDTPENIYKYPSSRFVAEFIGSP

SEQ ID NO: 172751 - protein, 280 aa, Unknown
  Bacterial polypetide isolated from the Sargasso Sea
QTVQGLQISVERLADVVDAEPEQPLDSRPIALPLINGKIEFDQVDFRFNEHAPLVVKQVSFTIEPGQFIGIVGQSGSGKSTIMKLLPRMYKAASGSIRIDDYDISKVDIDSLRQQIGIVPQDSMLFDGSIRDNIALNSPDSTDEDIIYAAKVACAHAFIMDLPNGYDSRVGERGSALSGGQRQRVAIARAILARPRLLILDEATSALDYLTERTVCENLRRELKGDTVFFITHRLGTIRNADNILLMDSGLLQETGSHAELLKKRGLYYALYRQQDASVN

SEQ ID NO: 172752 - protein, 189 aa, Unknown
  Bacterial polypetide isolated from the Sargasso Sea
MIDAKNVTRNFSISRGMFRGKQILRAVSGVDLTVKKGEVLALVGESGCGKTTLAKILLGLLPQTTGSVDLCGQPIIDVPRLELARTIQPIFQDPYSSLNPRKTIGSIIGLPMRVQGLEDSATIRRQVEKTMDLVGLAARHYNAYPNQLSGGQRQRVAIARALVNRPQVVVCDEPTSALDVSVQSQILIC

SEQ ID NO: 172753 - protein, 196 aa, Unknown
  Bacterial polypetide isolated from the Sargasso Sea
MKLLPRLYEPGEGRILIDGYDIAKVELYSLRRQIGIVPQDPLLFSGTVSENIALTNPEAPSEDIVRAARLANAHDFIMELPSGYSTPVGERGAALSGGQRQRVAIARTLLSNPKLLVMDEATSALDYETERKVCDNLLENLDDQTVFFITHRLSTIRQADVIVMLHQGAVVEVGTHEELMNHRGRYYALYRQQEST

SEQ ID NO: 172754 - protein, 329 aa, Unknown
  Bacterial polypetide isolated from the Sargasso Sea
MSVNKEFVKFDKVTKSYDGKVLVVKDLQLDIAEGEFITMLGPSGSGKTTCLMMLAGFETPTNGEIYLDGNAISSIPPHKRGIGMVFQNYALFPHMTVYENLAFPLRVRKIPKDEADKKIDKALSMVSLQGFASRMPGQLSGGQQQRVAVARSLVFDPQLVLMDEPLGALDKNLRESMQYEIKHIHESIGVTVVYVTHDQSEALTMSNRIAVFNDGKVQQLSSPDELYEKPVNSFVAEFIGENNTFNGEVSDISGGKCKVKLPDAEIMANPISVKSKGERTKVSLRPERALINPKDKMDNIHNGKIEEVIYHGDHTRVRINLLGNSEIYI

SEQ ID NO: 172755 - protein, 271 aa, Unknown
  Bacterial polypetide isolated from the Sargasso Sea
MNTQQSDFVVFEKIDKSYDGEVLVVKNLNLNISKGEFVTMLGPSGSGKTTTLMMLAGFETPTNGEIFLDSLPISKIPPYERQIGMVFQNYALFPHMTVQENLAFPLEVRKISKSETKDKVQKALDMVELGNFGTRFPAQLSGGQQQRVALARALVFEPRLVLMDEPLGALDKNLREQMQYEIKHIHDRIGITVVYVTHDQSEALTMSNRIAVFNDGVVQQLSTPDVLYEKPENSFVAKFIGENNTLNGTVKDINGTMCTVELDDNHGTVRA

SEQ ID NO: 172756 - protein, 224 aa, Unknown
  Bacterial polypetide isolated from the Sargasso Sea
NYPIWKIECQRNLSGGQQQRVALARALIVQPRVLLLDEPLSNLDAHLRFEMRDLIRNLQQSMGITTIFVTHDQEEAVVLADQVALILDGKLKQYAQPDVFYKKPIDVVTAKFFGGQNFIKGTSKNNSFSSNIGKLSLPKDCLQGNGILTFRPENVQIGKGPKSVNTIKAKIIEKIFLGTQTRLKLSIKDEVIQAIANPNEVDEKETGIEIDINIPPSSLWVINN

SEQ ID NO: 172757 - protein, 251 aa, Unknown
  Bacterial polypetide isolated from the Sargasso Sea
MSENNGFVVFDKIDKSYDGEVLVVKNLNLNISKGEFVTMLGPSGSGKTTTLMMLAGFETPTNGEIYLQGKAISKIPPYDRQIGMVFQNYALFPHMTVQENLSFPLEVRKLPKSDIKEKVSKALDMVELGDFGSRFPAQLSGGQQQRVALARALVFEPQLVLMDEPLGALDKNLREQMQYEIKHIHERIGITVVYVTHDQSEALTMSNRIAVFNDGVVQQLSTPDVLYEKPENSFVAKFIGENNTLNGTVKE

SEQ ID NO: 172758 - protein, 171 aa, Unknown
  Bacterial polypetide isolated from the Sargasso Sea
MSTDQVIHLEKVNKWYDDFHVLKDIDLIVNKGQKIVICGPSGSGKSTMIRCINRLEAHQKGTIVVHGTELTNDLKNIDLIRKNVGMVFQQFNLFPHLSVLDNISLAPIWVKKMPKNEAEDIAMSYLEKVKIPEQAKKFPGQLSGGQQQRVAIARSLAMNPDIMLFDEPTSA

SEQ ID NO: 172759 - protein, 278 aa, Unknown
  Bacterial polypetide isolated from the Sargasso Sea
SWYGLSNYALFPHMSVFLNIGFPLKLRKTPSDKIKEKVHDALKTVQLSDYADRKIDQLSGGQRQRVALARAFVFGPRILLMDEPLSALDKKLREQMQIELKQLHRKLGVTTVYVTHDQREALTMSDRIAVINEGKIQQLGTPKEIYNLPNSSFVADFIGESSFLQLNRKGNDLYFSSEKIITNKKLNKNKEWAMVIRPERLSIVNKSYRKNSSNIHFSGEISELVFQGETALALVKLMEGNFLSVRLSTKSSDDFDNLKTGTKIQLCMNRKDVIIITH

SEQ ID NO: 172760 - protein, 242 aa, Unknown
  Bacterial polypetide isolated from the Sargasso Sea
MSDPIIKIENVNKWFGDFQVLKDINLEVEKNKKIVVCGPSGSGKSTLIRCINRLEEHQKGSIVVDGTTLDENTKNIEQVRAEVGMVFQQFNLFPHLSILDNCTLAPIWVKKMPKQKAEELAMKQLEQVQIADQAQKYPGQLSGGQQQRCAIARALCMEPKIMLFDEPTSALDPEMIKEVLDAMVNLAKAGMTMIVVTHEMGFAKEVADEVIFMDEGMIVEKAVTKDFFANPKSDRTKLFLSQ

SEQ ID NO: 172761 - protein, 279 aa, Unknown
  Bacterial polypetide isolated from the Sargasso Sea
MKTLKIEELSKNFGSTEVLRKINLEIDEGNFLVLLGPSGCGKSTLLNIIAGLETINEGKVHIDDYNVSKVEPKDRNIAMVFQSYALYPSMNVRENMIFGLKQAKVSKEKIEEQLEKVSKFLQVDSLLDRKPSQLSGGQRQRVAIGRALVREPRIFLFDEPLSNLDAKLRVEMRREIKKLHQQLKTTVVYVTHDQTEAMSLGTNIAIMNHGVIQQNDTPENIYNKPSNTFVADFIGSPSMNLIKGNLKESLNKVSFITRGSIIEIPINGYDFKEKSNLDN

SEQ ID NO: 172762 - protein, 156 aa, Unknown
  Bacterial polypetide isolated from the Sargasso Sea
MNSATEKTFVKFEKIDKSYDGEVLVVKNLNLDIAKGEFVTMLGPSGSGKTTTLMMLAGFETPTNGEIYLDGMPISKIPPYEREIGMVFQNYALFPHMTVQENLAFPLEVRKMSKAETKEKVQKALDMVELGEFGTRFPAQLSGGQQQRVALARALV

SEQ ID NO: 172763 - protein, 196 aa, Unknown
  Bacterial polypetide isolated from the Sargasso Sea
MKLLPRLYEPGEGRILIDGYDIAKVELYSLRRQIGIVPQDPLLFSGTVSENIALTNPEASSEEIVRAAWLANAHDFIMELPSGYSTPVGERGAALSGGQRQRVAIARTLLSNPKLLVMDEATSALDYETERKVCDNLLENLDDQTVFFITHRLSTIRQADVIVMLHQGAVVEVGTHQELMNHRGRYYALYRQQEST

SEQ ID NO: 172764 - protein, 206 aa, Unknown
  Bacterial polypetide isolated from the Sargasso Sea
MSDSIIQIKNVNKWFGDFQVLKDINLEVKPKEKIVVCGPSGSGKSTLIRCINRLEEHQQGDIIVDGNTLTENTKNIEQIRAEVGMVFQQFNLFPHLSIVDNCTLAPIWVKKMPKKDAEELALKHLERVQILDQAQKFPGQLSGGQQQRVAIARALCMEPKIMLFDEPTSALDPEMIKEVLDVMVDLANQGMTMIVVTHEMGFAKEV

SEQ ID NO: 172765 - protein, 200 aa, Unknown
  Bacterial polypetide isolated from the Sargasso Sea
MIRCINRLEVHQKGDIIVNDVELTGDLKNLEAIRSDVGMVFQSFNLFPHLTVLENCTLAPIWVKGLPKKEANDLAMELLTRVKIPEQALKFPGQLSGGQQQRVAIARSLCMQPKIMLFDEPTSALDPEMIKEVLDTMIELAETGMTMLVVTHEMGFAKKVADSVIFMDEGEIIEQNDPKNFFNNPQNDRTKLFLSQILNH

SEQ ID NO: 172766 - protein, 247 aa, Unknown
  Bacterial polypetide isolated from the Sargasso Sea
MAEVKLNNVSKRWGSFVGVDNFNITIPDKEFLVLLGPSGCGKTTTMRMIAGLEDPTEGNVIIDGNVVNDVEPKDRDVAMVFQSYALYPNMNVYENIRFPLKVRGTPSETHDAKVKRASSMVELDDFLHRKPAELSGGQRQRVALARAIVREPNVFLMDEPLSNLDAKLRISTRAQIKNLSHELAVTTIYVTHDQVEAMTLADRVVVMNHGVVQQVGTPTEIYNSPLNTFETGFIGSPAMNLLEGTIS

SEQ ID NO: 172767 - protein, 210 aa, Unknown
  Bacterial polypetide isolated from the Sargasso Sea
MSNSIIQISNMNKWFGDFQVLKDINLDVEKNKKIVVCGPSGSGKSTLIRCINRLEEHQKGSIIVDGTELTEETKNIEQIRAEVGMVFQQFNLFPHLSILDNCTLAPIWVKKMPKKDAEELALKQLKQVQIDDQAYKYPGQLSGGQQQRCAIARALCMEPKIMLFDEPTSALDPEMIKEVLDAMVNLAKAGMTMIVVTHEMGFAKEVADEV

SEQ ID NO: 172768 - protein, 277 aa, Unknown
  Bacterial polypetide isolated from the Sargasso Sea
AGFETATYGQIYLDGLPINNVPPHKRDIGMVFQNYALFPHMTVAENLAFPLKVRKIGRSEVENRVKRALDMVQLSNFEDRRPAQLSGGQQQRVAVARALVFDPKLVLMDEPLGALDKQLREQMQYEIKHIHDNLGITVVYVTHDQSEALTMSNRIAVFNDGVIQQLAAPVDIYERPDNSFVAQFIGENNKLVGTIIKQNGDVCSVKLETGEHVTALAINTDGPGKQTMLSLRPERVALNPDEGKCDTKVLGTVKELIYLGDHIRTRISVCGCDDFIV

SEQ ID NO: 172769 - protein, 195 aa, Unknown
  Bacterial polypetide isolated from the Sargasso Sea
MSADVELQNVSVTFGSFYAAKNVSVKIKEGEFFSFLGPSGCGKTTLLRAISGFQDPSEGKVLIGGQDMAGIGPNRRPTSLIFQNLALFPLMSVADNIAFSLEVRGVNKIKRRERADELLELIALSGQGDKKVHELSGGQRQRVAIARALAIEPEVLLLDEPLSALDLKLRQKMRTELRAIQKRVGITFIYITHDQ

SEQ ID NO: 172770 - protein, 208 aa, Unknown
  Bacterial polypetide isolated from the Sargasso Sea
SGAGKSTVFNVLTRLVDPETGAVTIGGVRTDAMRLADLRGMFSVVSQDALLFEDSLRENILLGREDVSEEQLQEVLEAAHVSDFLPRLPQGLDSPAGTRGSNLSGGQRQRVAIARALLRDTPILLLDEATSALDAASEQVVQAALDRLSTGRTTLVIAHRLSTIRNADKIVVMDAGRVVEQGTHDELIAREGAYARLHAMQFEDEQPG

SEQ ID NO: 172771 - protein, 273 aa, Unknown
  Bacterial polypetide isolated from the Sargasso Sea
IFPHLNVEKNIQFGLRKLGLINDEIDKRVKGVLSLVKLEGYEERFSNQLSGGQRQRVALARALVRQPKVLLLDEPLGALDKKLRDEMQLELRALQKNIGITFVFVTHDQQEAISMSDRVAVMNDGKIQQLSAPNELYKNPKNIFVSDFIGETNFLKAETKLNDGEFINVSIEGLGEFKIKNNLNIAANSLDVVCSVRPESMMISKVKSDWDICLDAKICQTSYLGEMTRFYVEAKGIDKIITVSSQHFDNQSFENNECFISMSLEDISLLNKK

SEQ ID NO: 172772 - protein, 171 aa, Unknown
  Bacterial polypetide isolated from the Sargasso Sea
KNIEQIRAEVGMVFQQFNLFPHLSILDNCTLAPIWVKKMPKKDAEELALKHLERVQILDQAQKYPGQLSGGQQQRVAIARALCMEPKIMLFDEPTSALDPEMIKEVLDVMVNLAKQGMTMIVVTHEMGFAKEVADQMIFMDEGMIVEKADTKEFFANPKSDRTKLFLSQIL

SEQ ID NO: 172773 - protein, 288 aa, Unknown
  Bacterial polypetide isolated from the Sargasso Sea
SCIFRINQGLLKGSKPFFAVNGVSLQIPKGKVVGLVGESGCGKSTLANILLGLQRPTSGDVLYSGKTAAGFSNRHIARRIQPIFQDPYSSLNVTKTVKSIISLPLRIHKIGNPASWDSKVNEMLDLVGLPKRVAESYPSQLSGGQRQRVAIARALIMRPEVVICDEPTSALDVSVQSQILNLLQDLRLELGLTYLMISHNLAVVEHMADRVAVMYLGRIVEEAESAVLFKEPKHPYTRALLSSVLTPDPRLGVPDTQLGTIFPNPIDPPAGCSFHPRCASRIDICSQK

SEQ ID NO: 172774 - protein, 197 aa, Unknown
  Bacterial polypetide isolated from the Sargasso Sea
MASIELKNIEKSFGTNKVINKFNIKINDGEFVVLVGPSGCGKSTLLRMISGLESVDIGEIYLDNKLINNLIPSKREIAMVFQSYALYPHMSVFENMAFGLKMEKISKSEINQKVNSAAATLQIEDLLERKPKQLSGGQRQRVAIGRAITRSPKVFLFDEPLSNLDAALRSEMRVEISKLHKKMNSNIIYVTHDQIEA

SEQ ID NO: 172775 - protein, 247 aa, Unknown
  Bacterial polypetide isolated from the Sargasso Sea
DKYWSESIIEIKNVNKWFGDFQVLKDINLEVQAKQKIVVCGPSGSGKSTLIRCINRLEEHQQGNIIVDGNELDENTKNIEAIRAEVGMVFQQFNLFPHLSILDNCTLAPIWVKKMPKKDAEELAMQQLEKVQIADQAAKFPGQLSGGQQQRCAIARALCMQPKIMLFDEPTSALDPEMIKEVLDAMVNLANAGMTMIVVTHEMGFAKEVADEVIFMDEGMIVEKAKTKEFFDNPKNDRTKLFLSQIL

SEQ ID NO: 172776 - protein, 170 aa, Unknown
  Bacterial polypetide isolated from the Sargasso Sea
SIERIRGEVGMVFQQFNLFPHLSILDNCSLAPIWVRKLPKAEAKDKAMEYLKRVQIDDQAHKYPAQLSGGQQQRAAIARALCMEPRIMLFDEPTSALDPEMIKEVLDVMVGLAKGGMTMIVVTHEMGFAKEVADTIIFMDEGQIVEAKNPKDFFDNPESERTKTFLSQIL

SEQ ID NO: 172777 - protein, 162 aa, Unknown
  Bacterial polypetide isolated from the Sargasso Sea
MDVELRAINKNFGKVKAVNDLSLEIKQGEFLVLLGPSGCGKTTALRMIAGLETIEQGELFIEGQLMNEVLPKYRDVAMVFQSYALYPHMTVEENVGYPLKMRKIKGQERKDSILQACGQVQINDLLERYPKQLSGGQRQRVALARALVRRPKVFLMDEPLSN

SEQ ID NO: 172778 - protein, 244 aa, Unknown
  Bacterial polypetide isolated from the Sargasso Sea
MSDKIIQITEMNKWFGDFQVLKNINLEVEKNKKIVVCGPSGSGKSTLIRCINRLEEHQQGSIVVDGNELTEDTKDIEKIRAEVGMVFQQFNLFPHLSILDNCTLAPIWVKKMPKKDAEDLAIQHLEKVQIADQANKYPGQLSGGQQQRCAIARALCMEPKIMLFDEPTSALDPEMIKEVLDAMVNLAKAGMTMIVVTHEMGFAKEVADEVIFMDEGMIVEKAETKEFFANPKSDRTKLFLSQIL

SEQ ID NO: 172779 - protein, 192 aa, Unknown
  Bacterial polypetide isolated from the Sargasso Sea
MISLSKYFGESAAVDGISLTIPAASYCCLLGPSGCGKTTTLRLIAGHETASDGSVLISNREVTGAPPARRGTAMMFQNYALFPHLNCLENVAFSLRMQGIDKEERNSRAMELLSLVHMETYRERMPSQLSGGQQQRIALARALITKPDVLLLDEPLSALDPFLRTRMRAELRQLQKKLGITFVHVTHSQDEA

SEQ ID NO: 172780 - protein, 190 aa, Unknown
  Bacterial polypetide isolated from the Sargasso Sea
MYSVDLKNVTKKWGDVTAVDQVNLHINEGEFVVLLGPSGCGKTTTMRLVAGLEDITDGEIKIGDEVVNDVDPRKRDVSMVFQNYSLFPHMTVRNNIAYPLKMKKIPSSEHDKLIKEVSSLVELQDLLHRKPAELSGGQRQRVALARAIVRQPRVFLMDEPLSNLDAILRVTTRAELKNLHHRLGVTTIYV

SEQ ID NO: 172781 - protein, 223 aa, Unknown
  Bacterial polypetide isolated from the Sargasso Sea
KDINLAVEKNKKIVVCGPSGSGKSTLIRCINRLEEHQKGTIIVDGTELTENTKNIEAIRAEVGMVFQQFNLFPHLSILDNCTLAPVWVKKMPKKDAEELAMKQLEQVQISDQAAKFPGQLSGGQQQRCAIARALCMEPKIMLFDEPTSALDPEMIKEVLDAMVNLAKAGMTMIVVTHEMGFAKEVADEVIFMDEGMIVERAETKEFFANPKNDRTKLFLSQIL

SEQ ID NO: 172782 - protein, 163 aa, Unknown
  Bacterial polypetide isolated from the Sargasso Sea
MSKDSIISLQNVNKWFGDFHVLQDVNLEVKKKERIVVCGPSGSGKSTMIRCINRLEEHQEGTIIVDGIELTGNLKNIDSVRKEVGMVFQQFNLFPHLSVKENITLAPIWVKKMPKAEAEELAMQQLEIVKIPEQADKYPGQLSGGQQQRVAIARSLAMKPNIM

SEQ ID NO: 172783 - protein, 267 aa, Unknown
  Bacterial polypetide isolated from the Sargasso Sea
MIGNFSPSKKEKTESINQLVNKTSETLKISELLDRKPGQLSGGQRQRVALGRAMVREPVAFLMDEPLSNLDAALRVHMRSELSELHNSLKTTFVYVTHDQAEALTMSSRMAVMIDGNLLQLDTPQEVYDNPSSLSVAQFVGSPKINIFKGTADSSGTISFLNVNLKRKSSESNTDLHIGIRPEHLEITNESNENTFSGTVAYRENLGSDIFFHVNIEDGSNKIIVRGLPQFTHQISNGSSVNIKRVSNKALLFNQAGMRVQFNNAMG

SEQ ID NO: 172784 - protein, 153 aa, Unknown
  Bacterial polypetide isolated from the Sargasso Sea
MEHSMTHLTLQAVTRRFNTTYAVDSVDLSVPDGKLVCFLGPSGCGKTTLLRMIAGLETPSAGSIHFAGRDITHLPANQRDFGMVFQSLALFPHMTVAQNVAYPLKLRKTAKDAQARRVAELLDLIQLPHMANRPVTQLSGGQRQRVAIARAIA

SEQ ID NO: 172785 - protein, 96 aa, Unknown
  Bacterial polypetide isolated from the Sargasso Sea
AQRQRVAIARALARKPRLLIFDEATSALDNRTQAIVTKSLDKLPMTRIMIAHRLSTIRKADRIIVIEKGQLIEQGDYETLMSNDGLFTRLMKQQIK

SEQ ID NO: 172786 - protein, 250 aa, Unknown
  Bacterial polypetide isolated from the Sargasso Sea
MVGKSFGDNKVINNFNFQGKDDEFLVLVGPSGCGKSTLLRMIAGLEQIDEGEIQINNEVINEMHPSKRHTAMVFQSYALYPHMNVYDNMSFGLKIEKKTKEEIHTKVLSAAKTLKIEDLLERRPKELSGGQRQRVAIGRAITRNPKIFLFDEPLSNLDAALRAEMRVEISRLHQKIKTNMIYVTHDQVEAMTLADRIVILNNGNIEQVGTPNEIYTNPDNIFVAQFIGTPKMNIFKINSENIISNNKINI

SEQ ID NO: 172787 - protein, 218 aa, Unknown
  Bacterial polypetide isolated from the Sargasso Sea
DVAPQEKIVICGPSGSGKSTLIRCINRLEEHQEGNIIVDGTELAENTKNIEKIRAEVGMVFQQFNLFPHLSILDNCTLAPIWVKKLPKKEAEELAMKNLTRVQIDDQALKFPGQLSGGQQQRAAIARALCMEPKIMLFDEPTSALDPEMIKEVLDVMVDLAKGGMTMIVVTHEMGFAKEVADCMIFMDEGKIVEKAKTKEFFENPKSDRTKLFLSQIL

SEQ ID NO: 172788 - protein, 298 aa, Unknown
  Bacterial polypetide isolated from the Sargasso Sea
MSQKDSFVKFEKVDKSYDGEILVVKDLNLDVPKGEFLTMLGPSGSGKTTVLMMLAGFETPTSGEIYLDGNPISSIPPNKRGIGMVFQNYALFPHMTVKENLAFPLEVRKMQKSEIDEKVGNALAMVELQDFGNRMPLQLSGGQQQRVALARSLVFEPRLVLMDEPLGALDKNLREQMQYEIKHIHEKIGITVVYVTHDQSEALTMSNRIAVFNDGKIQQISSPDVLYEKPNSSFVAQFIGENNQLKGKVKSINGENCIVTTESGDDIHALKVNVSNNGDGSLVSLRPERVAINSSENF

SEQ ID NO: 172789 - protein, 185 aa, Unknown
  Bacterial polypetide isolated from the Sargasso Sea
MTQKKVNAIEVKNVTKVYRSSNSETRALRNANLTIYDNEFFTLLGPSGCGKTTLLRLIAGFEDITEGSINLFDQEIVNLPPNKRPVNTVFQQYSLFPHLNVYENVAFGLRRLKKDESLVKSRTFEVLELVQMREYANRKPNQLSGGQQQRVALARALAPEPKVLLLDEPLSALDLKLRQAMRFEL

SEQ ID NO: 172790 - protein, 272 aa, Unknown
  Bacterial polypetide isolated from the Sargasso Sea
GPSGCGKSTLLRMISGLETVDEGEIFLDNKLINNLIPSKRGIAMVFQSYALYPHMNVYENMSFGLKMEKHSKSDIEKKVNQTAKTLQIQDLLNRKPKELSGGQRQRVAIGRAITRNPKLFLFDEPLSNLDAALRSEMRVEISKLHKKMNSNIIYVTHDQVEAMTLADRIVILNNGNIEQFGTPNEIYADPNNVFVAEFIGSPKMNIIKLEKENIVNNNIINFFNNEIMFENINFKDEIYLGIRPEDISVKDSHPIKIDVNVDLVENLGFEKI

SEQ ID NO: 172791 - protein, 223 aa, Unknown
  Bacterial polypetide isolated from the Sargasso Sea
MAKNQQFVRFDKVDKSYDGKVLVVKDLNLDIAEGEFITMLGPSGSGKTTCLMMLAGFETPTNGEIYLDANPISNIPPHKRGIGMVFQNYALFPHMTVYENLAFPLKVRKFSKEDIDKKVDKALSMVSLSGFENRMPGQLSGGQQQRVAVARALVFDPQVVLMDEPLGALDKNLRESMQYEIKHIHESIGVTVVYVTHDQGEALTMSNRIAVFNDGKVQQLSSP

SEQ ID NO: 172792 - protein, 175 aa, Unknown
  Bacterial polypetide isolated from the Sargasso Sea
TEETKNIEQIRAEVGMVFQQFNLFPHLSILDNCTLAPIWVKKMPKKDAETLALKHLEKVQIADQAYKYPGQLSGGQQQRCAIARALCMEPKIMLFDEPTSALDPEMIKEVLDAMVNLAKAGMTMIVVTHEMGFAKEVADEVIFMDEGMIVEQAETKEFFANPKSDRTKLFLSQIL

SEQ ID NO: 172793 - protein, 246 aa, Unknown
  Bacterial polypetide isolated from the Sargasso Sea
MKNIIKFEKVSKSFGDLKVLNQLNLEVKDGEKLALIGPSGSGKTTILRILMTLETIDDGFVSVNNEYLWHETINDKIVPATDKHLQKMRDQIGMVFQQFNLFPHLTAIENVKQPQILVKKKNEIEAKEKAEDLFNMIGLSDKIDHYPHQLSGGQQQRVAIARALAMDPKIMLFDEVTSALDPELVDEVLAVLRKLAADSDTTMLTVTHEMNFAQDFADRVLFFDAGQIVESGSPKKVFSNPKEERT

SEQ ID NO: 172794 - protein, 201 aa, Unknown
  Bacterial polypetide isolated from the Sargasso Sea
MATIELKNIEKSFGANKVIDKFNIKINHGEFIVLVGPSGCGKSTLLRMISGLESVDEGEIHLDKKIINNLIPSKRGIAMVFQSYALYPHMNVYENMSFGLKNEKLDKNEIDKKVKDAAKTLQIEDLLERKPRQLSGGQRQRVAIGRAITRNPKLFLFDEPLSNLDAALRSEMRVEISKLHKKLSTNMIYVTHDQVEAMTLA

SEQ ID NO: 172795 - protein, 271 aa, Unknown
  Bacterial polypetide isolated from the Sargasso Sea
MNSGIEKTFVKFEKIDKSYDGEVLVVKNLNLDIAKGEFVTMLGPSGSGKTTTLMMLAGFETPTNGEIYLDGMPISRIPPYEREIGMVFQNYALFPHMTVQENLAFPLEVRKISKQETKEKVQKALDMVELGEFGTRFPAQLSGGQQQRVALARALVFEPRLVLMDEPLGALDKNLREQMQYEIKHIHDRIGITVVYVTHDQSEALTMSNRIAVFNDGVVQQLSTPDILYEAPENSFVAQFIGENNRMTGTIKSMENNYCSVELENGAGTVK

SEQ ID NO: 172796 - protein, 245 aa, Unknown
  Bacterial polypetide isolated from the Sargasso Sea
MSSELMIEMKNVHKWFGELHVLNDINLEINKGEKIVICGPSGSGKSTLIRCINRLEEHQRGNIIVEGTELTNDSRSIERIRGEVGMVFQQFNLFPHLSILDNCSLAPIWVRKLPKAEAKEKAMEYLKRVQIDDQAHKYPAQLSGGQQQRAAIARALCMEPRIMLFDEPTSALDPEMIKEVLDVMVGLAQGGMTMIVVTHEMGFAKEVADSIIFMDEGQIVEAKNPKDFFDNPESERTKTFLSQIL

SEQ ID NO: 172797 - protein, 253 aa, Unknown
  Bacterial polypetide isolated from the Sargasso Sea
MANIKFTGVHKSFGSNKIISDFNLLGKEDEFLVLVGPSGCGKSTLLRMIAGLEKIDEGEIFINDQKINELHPSKRQTAMVFQSYALYPHMNVYENMSFGLKIEKRPKEEINTKVMQAAKILKIEELLERKPKQLSGGQRQRVAIGRAITRNPKIFLFDEPLSNLDAALRAEMRVEISKLHNQIKTNMIYVTHDQVEAMTLADRIVILNQGNIEQVGTPEEIYNDPANIFVAQFIGTPKMNILEVSETNIISEN

SEQ ID NO: 172798 - protein, 220 aa, Unknown
  Bacterial polypetide isolated from the Sargasso Sea
MSSAEQSKANGSEIMITIESMHKWFGDFHVLKNINLEVKRGAKIVICGPSGSGKSTLIRCINRLEEHQQGSIVVDGTELTSDLKNIEIVRSEVGMVFQHFNLFPHLTALENCTLAPIWVRKTPKAEAENSAMEYLKRVKIPEQANKYPGQLSGGQQQRVAIARSLCMNPRIMLFDEPTSALDPEMIKEVLEVMTELAESGMTMLVVTHEMGFATAVADSV

SEQ ID NO: 172799 - protein, 166 aa, Unknown
  Bacterial polypetide isolated from the Sargasso Sea
MVFDNLIIRARSLSKSYGSEDVLKDFNIDIWYGSIFGILGVSGSGKTTALRLLAGFENPDQGTIEMHNKVIFDEKTNLPPEKRKIGMVFQDYALFPHLTVEKNIAFGLSKEEIKNGRLDEVIGMTNLSSYRKKFPQDISGGQQQRVALARALAPKPEVVLLDEPFT

SEQ ID NO: 172800 - protein, 227 aa, Unknown
  Bacterial polypetide isolated from the Sargasso Sea
EDLLERKPKQLSGGQRQRVAIGRAITRNPKLFLFDEPLSNLDAALRSEMRVEISKLHKTLNTNMIYVTHDQVEAMTLADKIVILNKGNIEQYGTPSEIYKNPNNIFVAEFIGTPKMNILKINKEKIKNNNIIKLFNNEIKFENNKFNDDIYIGIRPEDISLKNTGEVKLDIKIDLVENLGFEKIIYSSISNIEFRIKTTEDISNENEEISFDRNKIYLFDKYKNRIR

SEQ ID NO: 172801 - protein, 254 aa, Unknown
  Bacterial polypetide isolated from the Sargasso Sea
MADVKMTSIYKSFGNTEVIHGVDLEIEDHEFVVFVGPSGCGKSTLLRLIAGLEDVTQGEIEIEGQRVDHLPPAKRGIAMVFQSYALYPHMNVYQNMSFGLRLAKTDKNITDQKVREAAEILQITELLDRKPKELSGGQRQRVAIGRAIVRDPKVFLFDEPLSNLDAKLRVQMRIELTKLHRELNATMIYVTHDQVEAMTMADKIVVLREGYVEQVGAPLDLYHKPANIFVAGFIGSPAMNFMDGTISGISDKSV

SEQ ID NO: 172802 - protein, 306 aa, Unknown
  Bacterial polypetide isolated from the Sargasso Sea
LLLAYDPVKKLVNLNAQLQEGLAASERIFGVLDVRPKIIDSTNATEITDVTGEILVKDLCFSYDGTSPILSNLSMTVPAGKTVALVGHSGSGKSTLLNLVIRFFDPVSGSILIDGRDIQTVKLSSLRQHFAIVSQDISLFNGTIKTNICYGNPDAPNEKIIEAAKNAAAHDFITQLPNGYDTEIGENGVKLSGGQRQRVAIARAMLKDAPILLLDEATSALDSESEKAVQKALQRLMRNRTTIVIAHRLSTIQSADMIFVLEEGRVAEFGQHKELLKQDGVYANLYKIQFAEKGKANNLQIPAERN

SEQ ID NO: 172803 - protein, 292 aa, Unknown
  Bacterial polypetide isolated from the Sargasso Sea
MSADVELQNISVTFGSFYAAKDVSVKIKEGEFFSFLGPSGCGKTTLLRAISGFLDPSQGKVLIGGKDMAGIGPNKRPTSLIFQNLALFPLMSVSDNIAFSLEVRGTGKTERRKRADELLELIALSGQGDKKVHELSGGQRQRVAIARALAIEPEVLLLDEPLSALDLKLRQKMRTELRAIQKRVGITFIYITHDQGEALTMSDRVAVMNEGELEQVGLCDDVYDYPNTPFVATFVGENNPFYSKVISINDNEVKVESQGNTFVATPGKINENQNHSFSIGDEVIMFIRPESI

SEQ ID NO: 172804 - protein, 261 aa, Unknown
  Bacterial polypetide isolated from the Sargasso Sea
LSFGLRMMNTPKNIINEKIAKAANLLQINELLKRKPSQLSGGQRQRVAIGRALVRDAKVFLFDEPLSNLDAKLRAELRYEIKKLHRDLSNTMIYVTHDQIEAMTLADRISVMKDGLIQQLDTPKQIYNKPANLFVAGFIGSPSMNFLNAKFDKSNQNIIFGKKQIDISKYESINNLTTDQEVVFGIRPENINIEKNEHSIHCKVELVEPMGADTLVWTSVEGNPISIRLEGSSNYNLNDEINISFDIKKSSIFDSRSEERI

SEQ ID NO: 172805 - protein, 281 aa, Unknown
  Bacterial polypetide isolated from the Sargasso Sea
RYWNGFSNYALFPHMTVFENLAFPLRVRKISKEDIEKKVDKALSMVSLSEFGNRMPGQLSGGQQQRVAVARALVFDPSVVLMDEPLGALDKNLRESMQYEIKHIHESIGVTVVYVTHDQGEALTMSNRIAVFNDGKVQQLSSPDKLYEEPVNSFVAEFIGENNTFAGEISDISNGSCKVKLAKGEIIANPISVKSVGEKTTVSIRPERALINPKDKMDNNQKGKIEEVIYHGDHTRVRLNLLGNSEFILKVPNSSQNLDIKLGNEINIGWNSQDARALDPK

SEQ ID NO: 172806 - protein, 245 aa, Unknown
  Bacterial polypetide isolated from the Sargasso Sea
MSQISLQNLKKSFGKTQVIHDLSIDVKDGELIVIVGPSGCGKSTLLRMVAGLEDANEGNILIDNKKVNELEPMERNIAMVFQNYALYPHMTVFGNMAYGLKIAKVPKEEIESRVQKAAEILELGELLERKPNQLSGGQRQRVAMGRAIVRNPVAFLFDEPLSNLDAKLRVQMRLEIKKLQTQLKTTSLYVTHDQVEAMTLADRMIVMNEGNVEHIGTPLEVYTKPKTLFTAHFIGSPAMNILKGN

SEQ ID NO: 172807 - protein, 273 aa, Unknown
  Bacterial polypetide isolated from the Sargasso Sea
LTVRRNLETPLRLRDYNAFERLPLIGNFSPSKKEKTESINQLVNKTSETLKISELLDRKPGQLSGGQRQRVALGRAMVREPVAFLMDEPLSNLDAALRVHMRSELSELHNSLKTTFVYVTHDQAEALTMSSRMAVMIDGNLLQLDTPQEVYDNPSSLSVAQFVGSPKINIFKGTADSSGTVSFLNVNLKRKSSESNTDLHIGIRPEHLEITNESNENTFSGIVAYRENLGSDIFFHVNIEDGSNKIIVRGLPQFTHQISNGSSVNIKRVSNKA

SEQ ID NO: 172808 - protein, 216 aa, Unknown
  Bacterial polypetide isolated from the Sargasso Sea
MVPEIEIKNVSKWFGEFQALKNVSLTTMQGEIVVVCGPSGSGKSTLVRCINRLETHQEGTIKVRGVELTDKMSSIAEIRSEVGMVFQQFNLFPHLTALQNITLGPIKALGLSKKDAEEKASKLLERVKIPEQANKLPKHLSGGQQQRVAIARSLCMEPKIMLFDEPTSALDPEMISEVLDVMVDLAEEGMTMVVVTHEMGFARKVADRMVFMDEGS

SEQ ID NO: 172809 - protein, 168 aa, Unknown
  Bacterial polypetide isolated from the Sargasso Sea
MASIELKNIEKSFGTNKVINKFDIKINDGEFVVLVGPSGCGKSTLLRMISGLESVDTGEIYLDNKLINNLIPSKREIAMVFQSYALYPHMNVFENMAFGLKMEKIPKSEINQKVNSAAATLQIEDLLERKPKQLSGGQRQRVAIGRAITRSPKVFLFDEPLSNLDAAL

SEQ ID NO: 172810 - protein, 299 aa, Unknown
  Bacterial polypetide isolated from the Sargasso Sea
LGPSGSGKTTTLMMLAGFETPTNGEIYFDGRPINNIPPHKRGIGMVFQNYALFPHLSVYENLAFPLKVRKVDKSEIEERINKTLKMVSLTGYENRMPAQLSGGQQQRVAVARALVFDPKLVLMDEPLGALDKNLRESMQYELKHIHESLGVTVVYVTHDQGEALTMSNRIAVFNDGKVQQLSGPNELYETPVNSFVASFIGENNTFTGTVKEIASGSAKIETDSGETIVANPIAVSSSGEKSRISLRPERVSIDPNEQLENKFTSEIREIIYHGDHTRVRVNLLGNDDFILKVPNASSD

SEQ ID NO: 172811 - protein, 178 aa, Unknown
  Bacterial polypetide isolated from the Sargasso Sea
VEINDDVKNLQSVRSNVGMVFQQFNLFPHLSVLRNITLAPQKVKGLTRSESNEIAMSLLERVGIPEQSDKFPSQLSGGQQQRVAIARALAMQPKIMLFDEPTSALDPEMIKEVLEVMTELAESGMTMIVVTHEMGFAKNVADRFLFFDEGLIVEEGTPKHFFENPKEDRTKLFLSQIL

SEQ ID NO: 172812 - protein, 185 aa, Unknown
  Bacterial polypetide isolated from the Sargasso Sea
MSIDDATTAANDRLADSEDMIVCVDVDKFYGDFQALKGVTATIKEGEVAVVCGPSGSGKSTWIRCINRLEVHQGGDIVVDGIELTNDLRNIEKIRSEVGMVFQQFNLFPHLTVLDNITLAPIWVRKKPRAEAEAMARALLDRVGIPEQAEKFPGQLSGGQQQRVAIARSLAMEPRVMLFDEPTSA

SEQ ID NO: 172813 - protein, 256 aa, Unknown
  Bacterial polypetide isolated from the Sargasso Sea
MSKKEDFVKFDKVDKSYDGKVLVVKDLNLDIEEGEFVTMLGPSGSGKTTCLMMLAGFETPTNGEIYLDKNPISNIPPHKRGIGMVFQNYALFPHMTVFENLAFPLRVRKISKDDIDKKVEKALSMVSLSGFGNRMPGQLSGGQQQRVAVARALVFDPSVVLMDEPLGALDKNLRESMQYEIKHIHESIGVTVVYVTHDQGEALTMSNRIAVFNDGKVQQLSSPDKLYEEPVNSFVAEFIGENNTFAGEISDISNGS

SEQ ID NO: 172814 - protein, 268 aa, Unknown
  Bacterial polypetide isolated from the Sargasso Sea
NVEKNIQFGLRKLGLSNDEIDKRIKDVLTLVKLEGYEERFSNQLSGGQRQRVALARALVRQPKVLLLDEPLGALDKKLRDEMQLELRTLQKNIGITFVFVTHDQQEAISMSDRVAVMNDGKIQQLSEPNELYKNPKNIFVSDFIGETNFLKAETTSSDGELINVSIEELGEFKIKNNLNIAANSSEVVCSVRPESMMISKVKSDWDICLDAKICQTSYLGEMTRFYVEAKGIDKIITVSSQHFDNQSFENNECFISISLEDISLLNKK

SEQ ID NO: 172815 - protein, 162 aa, Unknown
  Bacterial polypetide isolated from the Sargasso Sea
VGMVFQQFNLFPHLSVLRNILLAPQKVKGLTRSESNEIAMSLLERVGIPEQSDKFPSQLSGGQQQRVAIARALAMQPKIMLFDEPTSALDPEMIKEVLEVMTELAESGMTMIVVTHEMGFAKNVADRFLFFDEGLIVEEGTPKHFFENPKEDRTKLFLSQIL

SEQ ID NO: 172816 - protein, 296 aa, Unknown
  Bacterial polypetide isolated from the Sargasso Sea
LLGPSGCGKSTLLNIIAGLETINEGNVFIDDYNVSKVEPKDRNIAMVFQSYALYPSMNVRENMIFGLKQAKTSKEKIEEQLEKVSKFLQVDQLLERKPSQLSGGQRQRVAIGRALVREPRIFLFDEPLSNLDAKLRVEMRREIKKLHQQLKTTVVYVTHDQTEAMSLGTRIAIMNHGVIQQNDTPENIYNKPSNTFVADFIGSPSMNLIKGTLKETSGEISFTASGSNVEIPIKDYEFKDKSNLNNKEVYFGLRPEHIYFKKSNESDFEINLRADLSEYIGHEQIMTFDYANQEIL

SEQ ID NO: 172817 - protein, 242 aa, Unknown
  Bacterial polypetide isolated from the Sargasso Sea
MAKGNKTIKNIKKSRTVSINNLSHFYGKNENKKKVLNDVNLNIDKGELVLLKGPSGCGKTTLLTLIGALRTCQSGDLTVLNNQLNGASRKTRQILRRSIGMIFQGHNLLRCLTAEQNVQMGADLIKDLTYLQRREIARNWLSAVGLEEHHKKFPNDLSGGQKQRVAIARALSANPKLLLADEPTSALDSVTGREIVTLLRKLAKEQNCSVLMVTHDPRISDMADRILNMEDGKIFGAHSELK

SEQ ID NO: 172818 - protein, 244 aa, Unknown
  Bacterial polypetide isolated from the Sargasso Sea
MSDPIIKIQNMNKWFGDFQVLKNINLEVEANKKIVVCGPSGSGKSTLIRCINRLEEHQEGDIIVDGNELSEKTKDIEKIRAEVGMVFQQFNLFPHLSILDNCTLAPIWVKKMPKKEAQELALDQLKKVQIDDQANKFPGQLSGGQQQRCAIARALCMQPKIMLFDEPTSALDPEMIKEVLDAMVSLAKGGMTMIVVTHEMGFAKEVADEVIFMDEGMIIEKANTNEFFANPKSDRTKLFLSQIL

SEQ ID NO: 172819 - protein, 229 aa, Unknown
  Bacterial polypetide isolated from the Sargasso Sea
FQVLQDVNLEVKKKERIVVCGPSGSGKSTMIRCINRLEEHQEGTIIVDGIELTGNLKNIDSVRREVGMVFQQFNLFPHLSVKENITLAPIWVKKMPKADAEELAMKQLEIVKIPEQANKYPGQLSGGQQQRVAIARSLAMNPNIMLFDEPTSALDPEMIKEVLDVMVDLAEGGMTMIVVTHEMGFAKTVANRMVFMDEGRIVEEAAPDKFFNNPESDRTKLFLSQILNH

SEQ ID NO: 172820 - protein, 269 aa, Unknown
  Bacterial polypetide isolated from the Sargasso Sea
MLDGNIISNIPPHKRGIGMVFQNYALFPHMTVYENLAFPLRVRKMEKDEIDKKVDKALSMVSLNGFETRMPGQLSGGQQQRVAVARALVFDPAVVLMDEPLGALDKNLRESMQYEIKHIHESIGVTVVYVTHDQSEALTMSNRIAVFNDGKVQQLSNPSELYEKPVNSFVAEFIGENNTFNGEVSDISGDECKVKLSNGEIIASAISVKSKGEKTTVSLRPERALIEPSEKMDNMFSGKIEEVIYHGDHTRVRINLLGNPEFILKVPNS

SEQ ID NO: 172821 - protein, 228 aa, Unknown
  Bacterial polypetide isolated from the Sargasso Sea
  misc_feature (38)..(38): Xaa can be any naturally occurring amino acid
DGKAISSILPHKRGIGMVFQNYALFPHMTVYENLAFPXRVRKIPKDEADKKIDKALSMVSLQGFASRMPGQLSGGQQQRVAVARSLVFDPQLVLMDEPLGALDKNLRESMQYEIKHIHESIGVTVVYVTHDQSEALTMSNRIAVFNDGKVQQLSSPDELYEKPVNSFVAEFIGENNTFAGEVSDISGGKCKVKLSNAEILANPISVKGKGERTTVSLRPERALINPTS

SEQ ID NO: 172822 - protein, 294 aa, Unknown
  Bacterial polypetide isolated from the Sargasso Sea
IVRRFSDEVCVMKEGKIVESGKVKDIFDNPQHSYTVKLLNSIPGKKAELNLENEQLLTGRKVDIKYPITKNIFGKTVDFLNAVKKVDITIHSGSTTGLVGESGSGKSSLARALLGIEKAEGNIIFDGRNIHQLNSSETRTFKKDFQIVFQDPFGSLSPRMTIGEIVGEGLRVHEPSLSRDEREKKIIKALEDVELDYSSFSRFPHELSGGQRQRVAIARAIILEPKLILLDEPTSALDVSIQMQILHLLKDLQSRLGLAFLCISHDLKVIRFLSDYVYVMKDGIIVEDGTQKIC

SEQ ID NO: 172823 - protein, 274 aa, Unknown
  Bacterial polypetide isolated from the Sargasso Sea
TRRISGGDILLGSNIINDLPPAKRGTAMMFQNYALFPHLSCLDNVAFALKMRGIKKNIRYEKSLEMLKLVQMEDYSDRYPNQLSGGQQQRVALARALITNPSILLLDEPLSALDPFLRIKMRSELKTLQKKLGISFIHVTHSQDEAMALADMIVVMNNGKIEQVGDPYEVFNKPKNEFIANFVGGHNVISKNNKSYSIRMDHIRIINNIKSKDSYPMTVSEIEYQGQIVKVTGLTKDFGRLSVSIGDEIFLKNKFDIDDEIFLSWDKTKENSLV

SEQ ID NO: 172824 - protein, 238 aa, Unknown
  Bacterial polypetide isolated from the Sargasso Sea
MSDKIIQIKEMNKWFGDFQVLKNINLDVEKNKKIVVCGPSGSGKSTLIRCINRLEEHQEGSIVVDGTELTEETKNIEQIRAEVGMVFQQFNLFPHLSILDNCTLAPIWVKKMPKKDAEALALKHLEKVQIADQAYKYPGQLSGGQQQRCAIARALCMEPKIMLFDEPTSALDPEMIKEVLDAMVNLAKAGMTMIVVTHEMGFAKEVADEVIFMDEGMIVEQAETKEFFANPKSDRTKL

SEQ ID NO: 172825 - protein, 150 aa, Unknown
  Bacterial polypetide isolated from the Sargasso Sea
EIGFVFQTFNLLPRASALHNVELPLIYAGVPVSTRKNRAIEALKLVELEDRMNHRPNELSGGQRQRVAIARALVNDPSIVLADEPTGNLDSKTGVEIMAVFERLHRKGHTIILITHEVDIAKHAHRVIHILDGTVERDEMNHPRNTHKAD

SEQ ID NO: 172826 - protein, 295 aa, Unknown
  Bacterial polypetide isolated from the Sargasso Sea
LDGNPISKIPPYEREIGMVFQNYALFPHMTVQENLSFPLEVRKISKSDTKEKVQKALDMVELGEFGTRFPAQLSGGQQQRVALARALVFEPRLVLMDEPLGALDKNLREQMQYEIKHIHDRIGITVVYVTHDQSEALTMSNRIAVFNDGVIQQLSTPDILYEKPENSFVAQFIGENNRMTGTIKDMDDTYCNVELDNGAGNVKALKVNVGNSGEKTQLSVRPERVSLGSEGDGTNIFTGKVEELIYLGDHIRVRLDVCGNNEFIVKVPNEGSFNYKEGDSIKLNWNPNDIRALDI

SEQ ID NO: 172827 - protein, 250 aa, Unknown
  Bacterial polypetide isolated from the Sargasso Sea
MSQDPIISFHDVSKSFGDVKAVNRANFEIQRGEFFALLGPSGCGKTTLLRMVAGFEIPDSGEISIDSQPMSGTPPNLRPVNMVFQNYAIFPHMDVRRNIAFGMRNSGLSKTKLNRRIDETLELIKLQGYGKRKADELSGGQRQRVALARALIKQPKVLLLDEPLGALDKKLREQMQIELRQLQQQVGITFLFVTHDQEEALTLSDRIAVMTEGHVMEIASPAQLYENPSSRFVADFIGSMNFFPGEVTKS

SEQ ID NO: 172828 - protein, 228 aa, Unknown
  Bacterial polypetide isolated from the Sargasso Sea
MSESIIKIKDVNKWFGDFQVLKNINLDVQTTQKIVVCGPSGSGKSTLIRCINRLEEHQEGSIIVDGNELTEDTKNIEMIRAEVGMVFQQFNLFPHLSILDNCTLAPIWVKKMPKKDAEALAMKQLEQVQIVDQASKFPGQLSGGQQQRCAIARALCMQPKIMLFDEPTSALDPEMIKEVLDAMVNLAKQGMTMIVVTHEMGFAKEVADEVIFMDEGMIVEKAKTKDFF

SEQ ID NO: 172829 - protein, 152 aa, Unknown
  Bacterial polypetide isolated from the Sargasso Sea
HLTVLENCTLGPIWVRQTPKAEAEDAAMHYLERVKIPEQAKKYPGQLSGGQQQRVAIARSLCMSPKIMLFDEPTSALDPEMIKEVLDVMVELADTGMTMIVVSHEMGFAKTVADRVIFMDEGEIIEQNDPHQFFDNPQHDRTKLFLSQILAH

SEQ ID NO: 172830 - protein, 248 aa, Unknown
  Bacterial polypetide isolated from the Sargasso Sea
MSSELMIEMKNVHKWFGELHVLNDINLEINKGEKIVICGPSGSGKSTLIRCINRLEEHQRGNIIVEGTELTNDSRSIERIRGEVGMVFQQFNLFPHLSILDNCSLAPIWVRKLPKAEAKEKAMEYLKRVQIDDQAHKYPAQLSGGQQQRAAIARALCMEPRIMLFDEPTSALDPEMIKEVLDVMVGLAQGGMTMIVVTHEMGFAKEVADSIIFMDEGQIVEAKNPKDFFDNPESERTKTFLSQNFIIW

SEQ ID NO: 172831 - protein, 267 aa, Unknown
  Bacterial polypetide isolated from the Sargasso Sea
DAPIIIDGMDDETGLKPTDLKGSIECIDITFAYPSRPHILVANHFDFSAAAGQTVALVGPSGCGKSTTVLLLERFYDPVSGVITIDGHDLKTLNVRHVRKQIGLVGQEPVLFSGSIFSNIAKGLHGERATMEEVEAAAKLANAHSFISGLEHGYHTDVGERGNQLSGGQKQRVAIARAIIRKPTVLLLDEATSALDNESEKVVQAALDDLLRAQRRTTIVIAHRLSTIRDADKICFISGGKVAEQGSHNELLDSNGLYAEMVASAGR

SEQ ID NO: 172832 - protein, 173 aa, Unknown
  Bacterial polypetide isolated from the Sargasso Sea
MLPMEPTVELNGVWHCYGNASEGWTLQGVDLQVAQGELLGLLGPSGCGKTTLLRLIAGFERPQRGTVKLAQRTVAGEGAWMEPERKGVGMVFQDYALFPHLNAWQNASFGLPQRHPNPERVAWLFELLGLHGLEQRYPHQLSGGQRQRLALARALAPAPKVVLLDEPFSSLDV

SEQ ID NO: 172833 - protein, 259 aa, Unknown
  Bacterial polypetide isolated from the Sargasso Sea
GSRQVHLAADAGRFERPTEGRLFLDGVDITDMPPYERPINMMFQSYALFPHMTVAQNIAFGLKQDGLPKAEVDARVEEMLKLVQMTQYARRKPHQLSGGQRQRVALARSLAKRPKLLLLDEPMGALDKKLRSKMQLELVEIIERVGVTCVMVTHDQEEAMTMAERIAIMHLGCIEQIGSPMDIYETPASRLVCEFIGNVNLFDGLLVEDEQDHATIACADLEQPIYVGHGISSRAENKKVTYALRPEKLLMSLHKPEEI

SEQ ID NO: 172834 - protein, 188 aa, Unknown
  Bacterial polypetide isolated from the Sargasso Sea
MANIKFTGVHKSFGSNKIIKDFNLLGKEDEFLVLVGPSGCGKSTLLRMIAGLEKIDEGEIFINDQKINELHPSKRQTAMVFQSYALYPHMNVYENMSFGLKIEKRPKEEINTKVKQAAKILKIEELLERKPKQLSGGQRQRVAIGRAITRNPKIFLFDEPLSNLDAALRAEMRVEISKLHNQIKTNMI

SEQ ID NO: 172835 - protein, 282 aa, Unknown
  Bacterial polypetide isolated from the Sargasso Sea
IAGLEEPDKGGQIIFNDEDVSKLQIEKRNVGMVFQSYALFPNMNVKENIGYGLKVRKLDKDQIDKRVSEMLEMMHITDLSNRNIDQLSGGQRQRVALARAIAVRPRVLLLDEPLTALDAILRDRLRVEIDILLRSLGITAIYVTHDQSEAMALGDRIVVMSNGQISQVGTPRNIYFKPANEFVADFIGTVNRIHVKNLKNFSSFEEEELLFRPDDIDIVEKKNCHFSGTIKAQFFLGEKTRLIVNLDSKEEISVEGKFKGEYEIGSEIFMIINTDALIELPK

SEQ ID NO: 172836 - protein, 221 aa, Unknown
  Bacterial polypetide isolated from the Sargasso Sea
MKDRSKEDEVADINIKSVNKYFGDVHVIKDVSVDIKSQSFTVLVGPSGCGKSTMLRMIAGLEDINSGTISIDDQVVNDLPPKERNIAMVFQSYALYPHMTVFDNMAFGLKLEKRSKEEINERVIEAAKILQIEEYLKRKPKQLSGGQRQRVAIGRAITRKPKVFLFDEPLSNLDAALRVQMRVELAKLHDQLNATMIYVTHDQTEAMTLADDIVVLNEGVI

SEQ ID NO: 172837 - protein, 278 aa, Unknown
  Bacterial polypetide isolated from the Sargasso Sea
NKRPTSLIFQNLALFPLMTVADNIAFSLEVRGTGKTERRKRADELLELIALTGQGDKKVHELSGGQRQRVAIARALAIEPEVLLLDEPLSALDLKLRQKMRTELRAIQKRVGITFIYITHDQGEALTMSDRVAVMNEGELEQVGLCDDVYDYPNTPFVATFVGENNPFYAKVLSVNNNEVKVESQGNTFIATAGKINENQNHSFSTGDEVIMFIRPESIFIKNENNKLDNNFSAKVSTIEFEGNLKNIYLKINSNMDVRFSVPNAVDTSELSSNTDVE

SEQ ID NO: 172838 - protein, 289 aa, Unknown
  Bacterial polypetide isolated from the Sargasso Sea
PPYEREIGMVFQNYALFPHMTVQENLAFPLEVRKISKSDVTTRVKKALDMVELGEFGNRFPAQLSGGQQQRVALARALVFEPRLVLMDEPLGALDKNLREQMQYEIKHIHDRIGITVVYVTHDQSEALTMSNRIAVFNDGVVQQLSTPDVLYEKPENSFVAQFIGENNRFTGIVKKIEGDLCDVEVNGGGQVKALKVNVNSEGDETELSVRPERVTINSNKELENNFEGEVRELIYLGDHIRIRLNVCNNDEFIVKTPNEGVLSLTEGDKINVSWSSEDIRALDSKNSQ

SEQ ID NO: 172839 - protein, 296 aa, Unknown
  Bacterial polypetide isolated from the Sargasso Sea
LTLANHFGNVKAVNNANFKIERGEFFALLGPSGCGKTTLLRMVAGFEIPDSGQISIDNQLMSGIPPNLRPVNMVFQNYAIFPHMDVRGNIAFGMRKSGLSKTELNRRIDETLELIKLQGYGNRRAEELSGGQRQRVALARALIKKPKVLLLDEPLGALDKKLREQMQIELRQLQQQVGITFLFVTHDQEEALTLSDRIAVMSEGNVMEIASPEQLYENPSSRFVADFIGSMNFFPGEVTKSENSKIRISTDYMGEIDIPTSNSKFGVTSRVWIAIRPEKFKPLFSAPRDLSKVMQG

SEQ ID NO: 172840 - protein, 210 aa, Unknown
  Bacterial polypetide isolated from the Sargasso Sea
MSKIIIKNLEKSFGENKVINNFNIDIKDGEFIVLVGPSGCGKSTLLRMVSGLESIDQGEIFLDTKLINNLIPSKREIAMVFQSYALYPHMNVFENMSFGLKMEKIPKNEIKEKVYNAAATLQIENLLDRKPKQLSGGQRQRVAIGRAITRNPKVFLFDEPLSNLDAALRSEMRVEISKLHKKLKSNIIYVTHDQIEAMTLADRIVVLNKG

SEQ ID NO: 172841 - protein, 284 aa, Unknown
  Bacterial polypetide isolated from the Sargasso Sea
IGMVFQNYALFPHMTVGENLAFPLKVRKMASSEVDEKVRKALDMVQMVAFIDRKPAQLSGGQQQRIALARALVFEPELVLMDEPLGALDKQLREHMQYEIKHIHENLGVTVVYVTHDQSEALTMSNRIAVFDDGIIQQLADPVTLYEKPENAFVAQFIGENNRLNGTVESVTKSVATVKLDLGHTVKALSVNNDIKGSRTTLSVRPERCVLSSKKSSSLSMLDARIEELIYLGDHVRCRMNVAGEDQFIVKVPNTSGQLGFKVGAKLYVGWKTEDCRALDYVRH

SEQ ID NO: 172842 - protein, 217 aa, Unknown
  Bacterial polypetide isolated from the Sargasso Sea
MNNIIRFDKVSKSFGDLKVLNQLNLEVKDGEKLALIGPSGSGKTTILRILMTLETIDDGYVTVNNEYLWHEKINDKIVPATDNHLQKMRDQIGMVFQQFNLFPHLTAIENVKQPQILVKKKNEIEAKEKAEDLFNMVGLSDKIDHYPHQLSGGQQQRVAIARALAMDPKIMLFDEVTSALDPELVDEVLAVLRKLAADSDTTMLTVTHEMNFAQRFC

SEQ ID NO: 172843 - protein, 186 aa, Unknown
  Bacterial polypetide isolated from the Sargasso Sea
DADKPLKGQQKLIRQLRQQAGFVFQNFNLFPHRTALENVIEGPVQVKKEPREAALAHARALLAKVGLSGKEDAYPKRLSGGQQQRVAIARALAMRPQVILFDEPTSALDPELVGEVLTTIRDLAEEKRTMVIVTHEMAFARDVADRAIFIDQGHIVEQGPAKTLFTAPQHERTRQFLSKFLLDRSL

SEQ ID NO: 172844 - protein, 198 aa, Unknown
  Bacterial polypetide isolated from the Sargasso Sea
PTVNRLEPIEQGQILFDGVDIHGSSTRLNQLRTRIGFVFQSFNLFPHVSVLENIMMSPVKVLGEKRAEARRHAGELLERVGLSHKADVYPAQLSGGQQQRVAIARALAMKPPVMLFDEPTSALDPEMVGEVLSVMRGLAQEGMTMMCVTHEMNFARDVADTIWFMDQGQILEKAEPDKFFTAPQHPRARRFLNDLLVH

SEQ ID NO: 172845 - protein, 255 aa, Unknown
  Bacterial polypetide isolated from the Sargasso Sea
MSEAAQLQVSDEVAISIENMNKWYGAFHVLRDIDLTVNRGERIVIAGPSGSGKSTLIRCINALEEHQKGKITVDGTLLSSDLKNIDKIRSEVGMVFQHFNLFPHLTILENCTLAPIWVRKTPKREAEEIAMHFLEKVKIPEQADKYPGQLSGGQQQRVAIARSLCMKPRIMLFDEPTSALDPEMIKEVLDTMVSLAEEGMTMLCVTHEMGFARQVANRVIFMDQGQIVEQNEPEEFFNNPKSERTKLFLSQILGH

SEQ ID NO: 172846 - protein, 278 aa, Unknown
  Bacterial polypetide isolated from the Sargasso Sea
MASKKDFVKFDKVDKSYDGKVLVVKDLQLDIAEGEFITMLGPSGSGKTTCLMMLAGFETPTNGEIYLDGKAISSIPPHKRGIGMVFQNYALFPHMTVYENLAFPLRVRKIPKDEADKKIDKALSMVSLQGFAARMPGQLSGGQQQRVAVARSLVFDPQLVLMDEPLGALDKNLRESMQYEIKHIHESIGVTVVYVTHDQSEALTMSNRIAVFNDGKVQQLSSPDELYEKPVNSFVAEFIGENNTFGGEVSDISGGKCKVKLANAEILANPISVKGKGE

SEQ ID NO: 172847 - protein, 238 aa, Unknown
  Bacterial polypetide isolated from the Sargasso Sea
MSDNIIQINNMNKWFGDFQVLKGINLEVKPKQKIVVCGPSGSGKSTLIRCINRLEEHQEGEIIVDGTELTEDTKNIEQIRAEVGMVFQQFNLFPHLSILDNCTLAPIWVKKMPKKEAEQLALKHLERVQILDQAQKYPGQLSGGQQQRVAIARALCMEPKIMLFDEPTSALDPEMIKEVLDVMVNLAKQGMTMIVVTHEMGFAKEVADQMIFMDEGMIVERADTKEFFANPKNDRTKL

SEQ ID NO: 172848 - protein, 239 aa, Unknown
  Bacterial polypetide isolated from the Sargasso Sea
IKIENVNKWFGDFQVLKDINLDVSAKQKIVVCGPSGSGKSTLIRCINRLEEHQKGTIIVDGTELSENTKNIEQVRAEVGMVFQQFNLFPHLSILDNCTLAPIWVKKMPKKEAQELAMKQLEQVQIADQANKFPGQLSGGQQQRSAIARALCMQPKIMLFDEPTSALDPEMIKEVLDAMVNLAKGGMTMIVVTHEMGFAKEVADEVIFMDEGMIVEKAVTKEFFANPKSDRTKLFLSQIL

SEQ ID NO: 172849 - protein, 181 aa, Unknown
  Bacterial polypetide isolated from the Sargasso Sea
GSRLIMSENSIISLQNVNKWFGDFQVLKDVNLEVKKKERIVVCGPSGSGKSTMIRCINRLEEHQEGKIVVDGIELTGNLKNIDSVRKEVGMVFQQFNLFPHLSVKENITLAPIWVKKMPKAEAEELAMKQLEIVKIPEQANKYPGQLSGGQQQRVAIARSLAMNPNIMLFDEPTSALDPEM

SEQ ID NO: 172850 - protein, 265 aa, Unknown
  Bacterial polypetide isolated from the Sargasso Sea
SNKVINKFNIKINDGEFIVLVGPSGCGKSTLLRMISGLETVDKGEIYLDNKIINNLIPSKREIAMVFQSYALYPHMSVFENMAFGLKMEKIPKSEINQKVNNAAATLQIEDLLERKPKQLSGGQRQRVAIGRAITRSPKVFLFDEPLSNLDAALRSEMRVEISKLHKKMNSNIIYVTHDQVEAMTLADRIVVLNKGNIEQYGTPNEIYSNPNNIFVAEFIGSPKMNIIKINKEEISNSNTFHLFNNKITFNNLKFEDEIYIGIRP

SEQ ID NO: 172851 - protein, 176 aa, Unknown
  Bacterial polypetide isolated from the Sargasso Sea
LTEETKNIEQIRAEVGMVFQQFNLFPHLSILDNCTLAPIWVKKMPKKDAETLALKHLEKVQIADQAYKYPGQLSGGQQQRCAIARALCMEPKIMLFDEPTSALDPEMIKEVLDAMVNLAKAGMTMIVVTHEMGFAKEVADEVIFMDEGMIVEQAETKEFFANPKSDRTKLFLSQIL

SEQ ID NO: 172852 - protein, 202 aa, Unknown
  Bacterial polypetide isolated from the Sargasso Sea
STMIRCINRLEEHQEGSIVVDGIELTGNLKNIDNVRKEVGMVFQQFNLFPHLSVKENITLAPIWVKKMPKAEAEELAMRQLEIVKIPEQANKYPGQLSGGQQQRVAIARSLAMNPNIMLFDEPTSALDPEMIKEVLDVMVDLANGGMTMIVVTHEMGFAKTVADRMVFMDEGKIVEEASPDKFFNNPESDRTKLFLSQILHQ

SEQ ID NO: 172853 - protein, 181 aa, Unknown
  Bacterial polypetide isolated from the Sargasso Sea
MQEIMIEAKNIIKDFKISRGIFKPKDNLRAVDNVSIKVKRGEVIGIVGESGCGKTTFSKILMGLLPPSSGYVNLCGKPVFSINNLERANLVQPIFQDPYSSLNPRKTIGSIITLPVKVQGNKDPETSKKQVLETMDLVGLQSRMYDQYPNQLSGGQRQRVAIARALINRPEVVVCDEPTSA

SEQ ID NO: 172854 - protein, 174 aa, Unknown
  Bacterial polypetide isolated from the Sargasso Sea
LKNIDSVRREVGMVFQQFNLFPHLSVKENITLAPIWVKKMPKAEAEELAMQQLEIVKIPEQANKYPGQLSGGQQQRVAIARSLAMKPNIMLFDEPTSALDPEMIKEVLDVMVELAEGGMTMIVVTHEMGFAKTVANRMVFMDEGRIVEEAAPEKFFNNPESDRTKLFLSQILNH

SEQ ID NO: 172855 - protein, 228 aa, Unknown
  Bacterial polypetide isolated from the Sargasso Sea
SGSGKSTLLRLILRVYDVTSGKISIDGHDVRDLRLDSLRESVAVVPQDTVLFNDTLDHNIRYGRPAASDEEVALAASRARLDKTVEQMPKGLGTMVGERGVKLSGGEKQRVAIARAFLREPRMLVADEATSALDTATEQGILESLEDVARGRTAVFVAHRLSTVRSCDRIIVMEQGKIVEEGTHAELLDGTSRGEKVGMYAAMWKAQAQEEEEKENKPKPDDVVITAG

SEQ ID NO: 172856 - protein, 158 aa, Unknown
  Bacterial polypetide isolated from the Sargasso Sea
MSDSIIQIKNMNKWFGDFQVLKDINLDVEKNKKIVVCGPSGSGKSTLIRCINRLEEHQKGSIIVDGTELTEETKNIEQIRAEVGMVFQQFNLFPHLSILDNCTLAPIWVKKMPKKDAEELALRQLKQVQIDDQANKYPGQLSGGQQQRCAIARALCME

SEQ ID NO: 172857 - protein, 213 aa, Unknown
  Bacterial polypetide isolated from the Sargasso Sea
MKKAEVKFENITKKFNETVAVDNVSCTFEAGTLTTLLGPSGCGKTTSLRIIAGLERATSGKILVENEDVTLLPATDRDVSMVFQSYALFPHMSVLENVSYGLKMINVPKEEFIEKSLETLKLVNLEGYENRMPSELSGGQQQRVAVARAIVLKPKVLLFDEPLSNLDAKLRRQVREDIREIQQKLGVTTIYVTHDQEEALAISDKVIVMNNAI

SEQ ID NO: 172858 - protein, 255 aa, Unknown
  Bacterial polypetide isolated from the Sargasso Sea
MAEIELKNISKSFSDTQVIKSLDLSIADGEFITIVGPSGCGKSTLLRIIAGLETQSSGDVIIEGREVNKIRASDRDLAMVFQSYALYPHLTVKQNLSVPLKLRELSKIERIPIFNWFLPNRHSKLKEINNKVQKASDTLKITHLLERKPGQLSGGQQQRVAVGRAMVREPVAFLMDEPLSNLDAALRVHMRAEISELHRDLKTTFVYVTHDQAEALTMSDRMAVMMDGEILQLDTPNEIYKNPSNLIVAEFIGSP

SEQ ID NO: 172859 - protein, 202 aa, Unknown
  Bacterial polypetide isolated from the Sargasso Sea
MSEAIIKINDVNKWFGDFQVLKNINLEVQPKQKIVVCGPSGSGKSTLIRCINRLEEHQEGNIVVDGNELTEDTKDIEKIRAEVGMVFQQFNLFPHLSILDNCTLAPIWVKKMPKKEAEELAMKQLKQVQIDDQASKFPGQLSGGQQQRCAIARALCMQPKIMLFDEPTSALDPEMIKEVLDAMVNLAKQGMTMIVVTHEMGF

SEQ ID NO: 172860 - protein, 243 aa, Unknown
  Bacterial polypetide isolated from the Sargasso Sea
DVLTLVKLEGYEERFSNQLSGGQRQRVALARALVRQPKVLLLDEPLGALDKKLRDEMQLELRTLQKNIGITFVFVTHDQQEAISMSDRVAVMNDGKIQQLSAPNELYKNPKNIFVSDFIGETNFLKAETKSSDGEFINVSIEELGEFKIKNNLNIAANSSNVVCSVRPESMMISKVKSDWDICLDAKIRQTSYLGEMTRFYVEVQGIDKTITVSSQHFDNQSFENNECFISISLEDISLLNKK

SEQ ID NO: 172861 - protein, 212 aa, Unknown
  Bacterial polypetide isolated from the Sargasso Sea
MSQKDSFVKFDNVDKSYDGETLVVKGLNLDIPQGEFLTMLGPSGSGKTTTLMMLAGFETPTSGEIYLEGEPISSIPPYKRGIGMVFQNYALFPHMTVNENLAFPLEVRKLSKSEIGEKVHKALSMVELQDFGTRMPLQLSGGQQQRVALARALVFEPRLVLMDEPLGALDKKLREQMQYEIKHIHENIGITVVYVTHDQSEALTMSNRIAVF

SEQ ID NO: 172862 - protein, 299 aa, Unknown
  Bacterial polypetide isolated from the Sargasso Sea
SGSISQKEIEISSLPPSARDFGIVFQSYALFPNLTVFSNISYGLINNKWRKDEIKSRVEHLLDLVGLKSHAGKYPSQLSGGEQQRVALARALATSPGLLLLDEPLSALDAKVRLYLRKQIKDLHRKLGITTIMVTHDQEEAQSMADRIFVMKDGEIIQSGTPREIYEKANTPFIADFIGITNFIDASVVNQDKVFCKDIQLECNTTGLAEERSVKIAIRPESILLSQKKTNEQNCIQGTIKENEFLGSFQRLYIESPSLSEELLMIDIANTSQTNFDLNQGSMIYFIFPPDQIKVYPNS

SEQ ID NO: 172863 - protein, 232 aa, Unknown
  Bacterial polypetide isolated from the Sargasso Sea
MSDPIIKINNMNKWFGDFQVLKDINLDVEKNKKIVVCGPSGSGKSTLIRCINRLEEHQKGTIIVDGTELTEETKNIEQIRAEVGMVFQQFNLFPHLSILDNCTLAPIWVKKLPKKEAEELALKQLKQVQIDDQAYKYPGQLSGGQQQRCAIARALCMEPKIMLFDEPTSALDPEMIKEVLDAMVSLAKAGMTMIVVTHEMGFAKEVADEVIFMDEGMIIEKAETKEFFANPK

SEQ ID NO: 172864 - protein, 239 aa, Unknown
  Bacterial polypetide isolated from the Sargasso Sea
MATLELRNVNKSYGSGLADTLKNIELAIDSGEFLILVGPSGCGKSTLMNCIAGLEEISGGAILVDGADISGMSPKDRDIAMVFQSYALYPTMTVKDNIAFGLKMRKLPPAEIEAEVARVAKLLQIEHLLTRKPGQLSGGQQQRVAMGRALARRPKIYLFDEPLSNLDAKLRVEMRTEIKLMHQRLKTTTVYVTHDQIEAMTLGDKVAVMKDGIIQQFGTPQEIYNDPANQFVASFIGSP

SEQ ID NO: 172865 - protein, 275 aa, Unknown
  Bacterial polypetide isolated from the Sargasso Sea
HKREVGMVFQNYALFPHMSVFENIGFPLKLRKAPNNQIKEKVYDALKTVQLSDYADRKIDQLSGGQRQRVALARAFVFGPRILLMDEPLSALDKKLREQMQIELKQLHRKLGVTTVYVTHDQREALTMSDRIAVINEGKIEQLGTPKEIYNSPNSSFVADFIGESSFLQLNRKGNDLYFSSEKIITNKKLNKNKEWAMVIRPERLSIVNKSYRKNSSNIHFSGEISELVFQGETALALVKLMEENFLSIRLSTKSSDDFDNLKTGNKIQLCMNRK

SEQ ID NO: 172866 - protein, 150 aa, Unknown
  Bacterial polypetide isolated from the Sargasso Sea
MSDKIIQMENVNKWFGDFQVLKDINLEVNQKQKIVVCGPSGSGKSTLIRCINRLEEHQKGRITVDGNELTEDTKDIEKIRAEVGMVFQQFNLFPHLSILDNCTLAPIWVKKMPKKQAEELAMKQLQQVQIADQAKKFPGQLSGGQQQRCA

SEQ ID NO: 172867 - protein, 230 aa, Unknown
  Bacterial polypetide isolated from the Sargasso Sea
FGDFQVLKDINLEVEKNKKIVVCGPSGSGKSTLIRCINRLEEHQKGSIVVDGVELSEDTKNIEAIRAEVGMVFQQFNLFPHLSILDNCTLAPIWVKKMPKKKAEELAMKQLEKVQIADQAKKFPGQLSGGQQQRCAIARALCMEPKIMLFDEPTSALDPEMIKEVLDAMVNLAKAGMTMIVVTHEMGFAKEVADEVIFMDEGMIVERAETKQFFANPKSDRTKLFLSQIL

SEQ ID NO: 172868 - protein, 168 aa, Unknown
  Bacterial polypetide isolated from the Sargasso Sea
EQIRAEVGMVFQQFNLFPHLSILDNCTLAPIWVKKMPKRKAEDLAIKQLKQVQIEDQASKFPGQLSGGQQQRCAIARALCMEPKIMLFDEPTSALDPEMIKEVLDAMVNLAKAGMTMIVVTHEMGFAKEVADEVIFMDEGMIIEKAETKEFFANPKSDRTKLFLSQIL

SEQ ID NO: 172869 - protein, 299 aa, Unknown
  Bacterial polypetide isolated from the Sargasso Sea
EKEDEFLVLVGPSGCGKSTLLRMIAGLEKIDEGEIFINDKKINELHPSKRQTAMVFQSYALYPHMNVYENMSFGLKIEKRPKEEINSKVMQAAKILKIEDLLERKPKQLSGGQRQRVAIGRAITRNPKIFLFDEPLSNLDAALRAEMRVEISKLHNQIKTNMIYVTHDQVEAMTLADRIVILNQGNIEQVGTPEDIYDDPANIFVAQFIGTPKMNILDVNEENIVSENTIKLLGNDIQFNKLKLNKSKHFMGIRPEHLKANQNTQFTFNPEIELIENLGNEKIVHMKKGEHSIECKNSK

SEQ ID NO: 172870 - protein, 238 aa, Unknown
  Bacterial polypetide isolated from the Sargasso Sea
MSKNNAFVKFDKVDKSYDGKVLVVKDLNLDIAEGEFITMLGPSGSGKTTCLMMLAGFETPTNGEIYLDNNPISNIPPHKRGIGMVFQNYALFPHMTVYENLAFPLRVRKISKEDIDKKVDKALSMVSLSGFESRMPAQLSGGQQQRVAVARALVFDPTVVLMDEPLGALDKNLRESMQYEIKHIHESIGVTVVYVTHDQGEALTMSNRIAVFNDGKVQQLSSPDKLYEEPVNSFVAEF

SEQ ID NO: 172871 - protein, 277 aa, Unknown
  Bacterial polypetide isolated from the Sargasso Sea
MSQNDSFVKFEKVDKSYDGEILVVKDLNLDVPKGEFLTMLGPSGSGKTTVLMMLAGFETPTSGEIYLDGNPISSIPPNKRGIGMVFQNYALFPHMTVKENLAFPLEVRKMQKSEIDEKVGNALAMVELQDFGNRMPLQLSGGQQQRVALARSLVFEPRLVLMDEPLGALDKNLREQMQYEIKHIHEKIGITVVYVTHDQSEALTMSNRIAVFNDGKIQQISSPDILYEKPNSSFVAQFIGENNQLKGKVKSINGENCIVTKESGDDIHALKINGIIT

SEQ ID NO: 172872 - protein, 233 aa, Unknown
  Bacterial polypetide isolated from the Sargasso Sea
KEVTTVDPANRGVGMVFQNYALYPHMTVEENMSFGLRMNNAPKTKINKKVGEAAKILQLTELMKRKPASLSGGQRQRVAIGRAIVKGSKVFLFDEPLSNLDAELRVEMRIELTRLHKELGATIIYVTHDQTEAMTMADKIVVLRDGCVEQIGKPLELYANPDNKFVAGFLGSPSMNFLEAKFDGKDLKIPSLENLKIKKFPKLSKENLKVTIGVRPQDVLFKRSTKGKKDRIC

SEQ ID NO: 172873 - protein, 300 aa, Unknown
  Bacterial polypetide isolated from the Sargasso Sea
FRKFEKIDKSYDGEVLVVRNLNLDIAKGEFVTMLGPSGSGKTTTLMMLAGFETPTNGEIFLDTKPISKIPPYEREIGMVFQNYALFPHMTVSENLSFPLEVRKISKADTKDKVQKALDMVELGMFGSRFPAQLSGGQQQRVALARALVFEPRLVLMDEPLGALDKNLREQMQYEIKHIHDRIGITVVYVTHDQSEALTMSNRIAVFNDGVVQQLSTPDILYEKPENSFVAKFIGENNTLNGVVKEVNGSTCIVDLDNGHGTVKALKVNINGAGDKTQLSIRPERVTIDSSNPDANNFSGK

SEQ ID NO: 172874 - protein, 232 aa, Unknown
  Bacterial polypetide isolated from the Sargasso Sea
MSFLKLTDVTKFYGSTCAVQAMNLTVQKGEFVSLLGPSGCGKTTTLQMVAGFEAVTSGRIELDGKDITHAKANTRGLGIVFQSYALFPHMTVAANVSFGLEMRKVPKAERAERVAQALALVHLEKHAARYPRELSGGQRQRVALARALVIEPPVLLLDEPLSNLDAKLREEMQFELRQIQRKVGTTTIMVTHDQSEAMSISDRVVVMEAGRATQIDHPHRVYEHPRTRFIST

SEQ ID NO: 172875 - protein, 182 aa, Unknown
  Bacterial polypetide isolated from the Sargasso Sea
MAGSQNGIDHRVSLLSQSQATVAVRDLWHRYDGPGGPWTLRGIDLELAAGELVGLLGPSGCGKTTLLRLIAGFERPSQGSVHLQQRPVAGNGHWLPPERRGIGMVFQDYALFPHLTAWQNACFGLRPGQDDSRAAWLLELLGLQGLELRYPHQLSGGQKQRLALARALAPAPKLVLLDEPFS

SEQ ID NO: 172876 - protein, 274 aa, Unknown
  Bacterial polypetide isolated from the Sargasso Sea
CTFEAGTLTTLLGPSGCGKTTSLRIIAGLERATSGRILVENEDVTLLPATDRDVSMVFQSYALFPHMSVLENVSYGLKMINVPKEEFTEKSLETLKLVNLEGYENRMPSELSGGQQQRVAVARAIVLKPKVLLFDEPLSNLDAKLRRQVREDIREIQQKLGVTTIYVTHDQEEALAISDKVIVMNNAIIAQQGSPKELYNFPKTKFVANFIGDANVVKAEIINQNNNIYEIQLAEMKINIESDQKLESSVSVSLRPEKITISKSPEENSIHASV

SEQ ID NO: 172877 - protein, 237 aa, Unknown
  Bacterial polypetide isolated from the Sargasso Sea
MASPDSFVKFDKVDKSYDGEVLVVKDLNLDIPKGEFLTMLGPSGSGKTTTLMMLAGFETPTGGEIFLEGEAINKIPPNKRGIGMVFQNYALFPHLTVNENLAFPLEVRKLNKSEIEEKVKKTLDMVELGEFGNRMPLQLSGGQQQRVALARSLVFEPRLVLMDEPLGALDKKLREQMQYEIKHIHERIGITVVYVTHDQAEALTMSNRIAVFNDGKIQQISSPDVLYEKPENAFVAN

SEQ ID NO: 172878 - protein, 290 aa, Unknown
  Bacterial polypetide isolated from the Sargasso Sea
MSELSLEELTKVYPNGFKAVDGLSVDIADGEFLVLVGPSGCGKSTALRMVAGLEEITSGELSIGGESMNEVEPKDRNVAMVFQNYALYPHLDVEKNIGFALKLSGLPKPEIDAKVLEAATILELEPLLKNKPAQLSGGQRQRVAMGRAIVRDPSVFLMDEPLSNLDAKLRVQMRAEITRLQHKLEATTLYVTHDQVEAMTMGDRVAVMKDGVLQQIDSPSSLYDSPNNLFVAGFIGAPAMNLREAKLDNAAGEWSLKVGGIKIPLARGILEKRRSLAGYEGKNIVVGIRP

SEQ ID NO: 172879 - protein, 274 aa, Unknown
  Bacterial polypetide isolated from the Sargasso Sea
KGGQIIFNDEDVSKLHIEKRNVGMVFQSYALFPNMNVKENIGYGLKVRQLDKDQIEKRVSEMLNMMHITDLSFRNIDQLSGGQRQRVALARAIAVRPRVLLLDEPLTALDAILRDRLRVEIDFLLRSLGITAIYVTHDQSEAMALGDRIVVMSDGQISQVGTPRNIYFNPANEFVADFIGTMNRINANNLKNFNSFKGKELLFRPDDIDIVEKKNCHFTGIVKASFFLGEKTRLVVNLNSKEEITVEGKFKDEYKIGSEICLRINSDSLINLSK

SEQ ID NO: 172880 - protein, 244 aa, Unknown
  Bacterial polypetide isolated from the Sargasso Sea
MSDPIIKIEGMNKWFGDFQVLKDIDLSVEKNKKIVVCGPSGSGKSTLIRCINRLEEHQKGTIIVDGTELTENTKNIEAIRAEVGMVFQQFNLFPHLSILDNCTLAPIWVKKMPKKDAEELAMKQLEQVQIVDQAQKFPGQLSGGQQQRCAIARALCMEPKIMLFDEPTSALDPEMIKEVLDAMVNLAKAGMTMIVVTHEMGFAKEVADEVIFMDEGMIVEKAETKEFFANPKSDRTKLFLSQIL

SEQ ID NO: 172881 - protein, 219 aa, Unknown
  Bacterial polypetide isolated from the Sargasso Sea
MNKFFGTVQAVKDFSINVKPGEFLVLLGPSGCGKTTALRMMAGLEATSSGQIIISEEDVTNLQPKYRDIAMVFQSYALYPHKTVAENIGFPFKVRGIKGKERDNAVKEAASQVRMEHLLDRYPKQLSGGERQRVALARAIVRRPAVFLMDEPLSNLDAKLRIYMRAELKRMQHELGITTVYVTHDQVEAMTLAHRVAIMNQGVLQQIGSPREVYDKPSN

SEQ ID NO: 172882 - protein, 177 aa, Unknown
  Bacterial polypetide isolated from the Sargasso Sea
MSQKDSFVKFDNVDKSYDGEVLVVKGLNLDIPQGEFLTMLGPSGSGKTTTLMMLAGFETPTSGEIYLEGEPISSIPPYKRGIGMVFQNYALFPHMTVNENLAFPLEVRKLPKAEIDEKVYKALSMVELQDFGTRMPMQLSGGQQQRVALARALVFEPRLVLMDEPLGALDKKLREQM

SEQ ID NO: 172883 - protein, 199 aa, Unknown
  Bacterial polypetide isolated from the Sargasso Sea
MSVKKDFVKFDKVDKSYDGKVLVVKDLQLDIAEGEFITMLGPSGSGKTTCLMMLAGFETPTNGEIYLDGKAISSIPPHKRGIGMVFQNYALFPHMTVYENLAFPLRVRKIPKDEADKKIDKALSMVSLQGFAQRMPGQLSGGQQQRVAVARSLVFDPQLVLMDEPLGALDKNLRESMQYEIKHIHENIGVTVVYVTHDQ

SEQ ID NO: 172884 - protein, 244 aa, Unknown
  Bacterial polypetide isolated from the Sargasso Sea
MSDKIIQITEMNKWFGDFQVLKNINLEVEKNKKIVVCGPSGSGKSTLIRCINRLEEHQEGSIIVDGNELTADTKDIEKIRAEVGMVFQQFNLFPHLSILDNCTLAPIWVKKMPKKDAEDLAIQHLEKVQISDQANKYPGQLSGGQQQRCAIARALCMEPKIMLFDEPTSALDPEMIKEVLDAMVNLAKAGMTMIVVTHEMGFAKEVADEVIFMDEGMIVEKAETKEFFANPKSDRTKLFLSQIL

SEQ ID NO: 172885 - protein, 231 aa, Unknown
  Bacterial polypetide isolated from the Sargasso Sea
MAKVELKNLTKKYGEVVAVQNMNLTIPHNEFLVLVGPSGCGKSTTLRMIAGLEEITGGDIYIGDQLVTEKDPKDRNVSMVFQNYALYPHMTVEENLGFSLKIAKVEKKEIEERVKNAVQILGLQELQKRKPSQLSGGQRQRVAMGRAIVRRPDAFLFDEPLSNLDAKLRTQMRTEIKKLHQQLKTTVIYVTHDQVEAMTLADRIIIMKDGFIEQIGSPVEVFNNPVNVFVP

SEQ ID NO: 172886 - protein, 190 aa, Unknown
  Bacterial polypetide isolated from the Sargasso Sea
YALFPHMTVFENLAFPLKVRKISQLEIEKKVDKALSMVSLGGFANRMPGQLSGGQQQRVAVARALVFDPSVVLMDEPLGALDKNLRESMQYEIKHIHESIGVTVVYVTHDQGEALTMSNRIAVFNDGKVQQLSSPDKLYEEPVNSFVAEFIGENNTFGGEVSEISNGTCRVKLEKGEIIANPISVKSVGE

SEQ ID NO: 172887 - protein, 218 aa, Unknown
  Bacterial polypetide isolated from the Sargasso Sea
MANIKFTGIHKSFGSNKIIKDFNLQGKEDEFLVLVGPSGCGKSTLLRMIAGLEKIDEGEIFINEQKINELHPSKRQTAMVFQSYALYPHMNVYENMSFGLKIEKRPKEEINTKVMQAAKILKIEELLERKPKQLSGGQRQRVAIGRAITRNPKIFLFDEPLSNLDAALRAEMRVEISKLHNQIKTNMIYVTHDQVEAMTLADRIVILNQGNIEQVGTP

SEQ ID NO: 172888 - protein, 186 aa, Unknown
  Bacterial polypetide isolated from the Sargasso Sea
MAEIELKSISKSFSSTEVIKSLDLSISNGEFITIVGPSGCGKSTLLRIIAGLENQSTGDVIIDGNVVNNTKASERDLAMVFQSYALYPHLTVQQNLMVPLKLRRLSILERFPIIGWFMPNRRSKLDELLSKVQAASETLQITHLLDRKPGQLSGGQQQRVAVGRAMVREPVAFLMDEPLSNLDAGL

SEQ ID NO: 172889 - protein, 200 aa, Unknown
  Bacterial polypetide isolated from the Sargasso Sea
MTEKKNNTYLEVNNLSKSFGNFEAIKNIGIKINEGEFVCFLGPSGCGKTTLLRCIAGLETQTTGSVIQKDIDISNQPPSNRDFGIVFQSYALFPNLSVFSNISYGLINNKWKKDDIKKRVDELLDLVNLTEHASKYPSQLSGGEQQRVALARALATSPGLLLLDEPLSALDAKVRVFLRKQIRDLQRKLGVTTIMVTHDQ

SEQ ID NO: 172890 - protein, 235 aa, Unknown
  Bacterial polypetide isolated from the Sargasso Sea
MTSKGQIELIGLSKSFDAVIAVDSINLTIQSGTYCCLLGPSGCGKSTTLRLIAGHETPTSGDILISNKNVTVRPPAKRGTAMMFQNYALFPHLNCLENVAFSLKMAGDKKAERNERAMAMLSLVEMQDLKNRLPSQLSGGQQQRVALARALVGNPDVLLLDEPLSALDPFLRKQMRAELKQLQRKLNISFVHVTHSQEEAMALADLVVVMRDGHIEQADKPRTVFKEPTNEFVAE

SEQ ID NO: 172891 - protein, 162 aa, Unknown
  Bacterial polypetide isolated from the Sargasso Sea
MSNLSTAYLSVNDLCKHFGAFQALKNISIEINEGEFACFLGPSGCGKTTLLRCIAGLETQSSGSISQKEIEISSLPPSARDFGIVFQSYALFPNLTVFSNISYGLINNKWGKDEIKSRVEHLLDLVGLKSHAGKYPSQLSGGEQQRVALARALATSPGLLFA

SEQ ID NO: 172892 - protein, 216 aa, Unknown
  Bacterial polypetide isolated from the Sargasso Sea
MNDTNPSFVKFQKIDKSYDGEILVVKNLNLDIAKGEFVTMLGPSGSGKTTTLMMLAGFETPTNGEIFLDNSPISKIPPYEREIGMVFQNYALFPHMTVAENLSFPLEVRKISKSETKEKVQKALDMVELGNFGTRFPAQLSGGQQQRVALARALVFEPRLVLMDEPLGALDKNLREQMQYEIKHIHDRIGITVVYVTHDQSEALTMSNRIAVFNDG

SEQ ID NO: 172893 - protein, 125 aa, Unknown
  Bacterial polypetide isolated from the Sargasso Sea
MTYLNRVHIPEQAAKYPGQLSGGQQQRVAIARSLCMQPKIMLFDEPTSALDPEMIKEVLDVMIELAEDGMTMIVVTHEMGFAKKAANKVVFMDQGEVVESAPTEQFFSQPDSDRTKLFLSQILTH

SEQ ID NO: 172894 - protein, 216 aa, Unknown
  Bacterial polypetide isolated from the Sargasso Sea
MPFLEFENIDKSFGENNVISKFNLEVEKGKFIVLLGPSGCGKSTLLRMIAGLEKIDKGKIFLENNLLNDLLPSKRQIAMVFQSYALYPHMNVFQNISFGLKSEKISKIEIKNKVIEAAKILKIEELLDRRPKELSGGQRQRVAIGRAITRNPKLFLFDEPLSNLDAALRSEMRVEISKLHKKLKSNIVYVTHDQIEAMTLADKIVIMNKRKIEQFG

SEQ ID NO: 172895 - protein, 216 aa, Unknown
  Bacterial polypetide isolated from the Sargasso Sea
NQQEKIVICGPSGSGKSTLIRCINRLEEHQEGEIIVDGKEISENTKDIEKIRAEVGMVFQQFNLFPHLSILDNCTLAPIWVKKMPKKQAEEVAMKNLERVQIADQAKKFPGQLSGGQQQRCALARALCMEPKIMLFDEPTSALDPEMIKEVLDAMVDLAKAGMTMIVVTHEMGFAKEVADNMIFMDEGRIVEKAKTKDFFNNPKSDRTKLFLSQIL

SEQ ID NO: 172896 - protein, 265 aa, Unknown
  Bacterial polypetide isolated from the Sargasso Sea
MSEIIIENLNKKYGKNHVIQDVSLNIKSQSFSVFVGPSGCGKSTILRMIAGLEDINSGTISIDGNIVNDLSPKDRNIAMVFQSYALYPHMTVYNNMAFGLKLEKLTKDEIDSRVYDAAKILQIEELLQRKPKQLSGGQRQRVAIGRAITRKPKVFLFDEPLSNLDAALRVQMRVELAKLHDQLDATMIYVTHDQTEAMTMADKIVVLDQGKISQSGSPMDLYHNPKNLFVGGFIGSPKMNFIKTKVLKKSSKSISIDLLGQKAFH

SEQ ID NO: 172897 - protein, 117 aa, Unknown
  Bacterial polypetide isolated from the Sargasso Sea
GLSAHADKYPPQLSGGQQQRVAIARALCMDPIAMLFDEPTSALDPEMINEVLDVMVELANEGMTMMVVTHEMGFARKVANRVIFMDEGKIVEDSDKEAFFANPQSDRAKDFLAKILH

SEQ ID NO: 172898 - protein, 215 aa, Unknown
  Bacterial polypetide isolated from the Sargasso Sea
MATLELRNVNKSYGSGLADTLKNIELAIDSGEFLILVGPSGCGKSTLMNCIAGLESISGGAILVDGADISGMSPKDRDIAMVFQSYALYPTMTVKDNIAFGLKMRKLPPAEIEAEVARVAKLLQIEHLLARKPGQLSGGQQQRVAMGRALARRPKIYLFDEPLSNLDAKLRVEMRTEIKLMHQRLKTTTVYVTHDQIEAMTLGDKVAVMKDGIIQ

SEQ ID NO: 172899 - protein, 204 aa, Unknown
  Bacterial polypetide isolated from the Sargasso Sea
GKSTMIRCINRLEAHQKGHIVVHGTELTNDLKNIDMIRKNVGMVFQQFNLFPHLSVIDNISLAPIWVKKMPKKEAEDIAMSYLEKVKIPEQAQKFPGQLSGGQQQRVAIARSLAMNPDIMLFDEPTSALDPEMIKEVLDVMIQLAEEGMTMLVVTHEMGFAKTVADQMIFMDEGKIVEQATPDEFFNNPKSDRTKLFLSQILNH

SEQ ID NO: 172900 - protein, 235 aa, Unknown
  Bacterial polypetide isolated from the Sargasso Sea
MSDSIIKIESMNKWFGDFQVLKDINLEVEKNKKIVVCGPSGSGKSTLIRCINRLEEHQKGTIIVDGTELTENTKNIEAIRAEVGMVFQQFNLFPHLSILDNCTLAPIWVKKMPKKNAEELAMKQLEQVQIADQAQKFPGQLSGGQQQRCAIARALCMEPKIMLFDEPTSALDPEMIKEVLDAMVNLAKAGMTMIVVTHEMGFAKEVADEVIFMDEGMIVEKAETKEFFANPKSDR

SEQ ID NO: 172901 - protein, 314 aa, Unknown
  Bacterial polypetide isolated from the Sargasso Sea
YINPFGYNKIIADFNLLGIEDEFLVLVGPSGCGKSTLLRMIAGLEKIDDGEIFINDQKINELHPSKRQTAMVFQSYALYPHMNVYENMSFGLKIEKRPKEEINQKVMQAAKILKIEELLERKPKQLSGGQRQRVAIGRAITRNPKIFLFDEPLSNLDAALRAEMRVEISKLHNQIKTNMIYVTHDQVEAMTLADRIVILNQGNIEQVGTPEEIYNDPANIFVAQFIGTPKMNILEINEIDVISDNSIKLLGNETVFDSLKLKKSKHFVGIRPEHLKANQKTQFTFNPEIELIENLGNEKIAYMKKDHYQLSAKI

SEQ ID NO: 172902 - protein, 290 aa, Unknown
  Bacterial polypetide isolated from the Sargasso Sea
VTWKEPKDRHIGMVSQSYALYPSMTVEKNLSFGLRMMNTPKNIINEKIDKAANLLQINELLKRKPSQLSGGQRQRVAIGRALVRDAKVFLFDEPLSNLDAKLRAELRYEIKKLHRDLSNTMIYVTHDQIEAMTLADRISVMKDGLIQQLDTPKQIYNKPANLFVAGFIGSPSMNFLKASYDKSNKKIIVGKKQIDISKYENINNLMNDQGVVFGIRPENINIEKNENSMQCKVELVEPMGADTLVWTSVEGNPISIRLEGSSNFNLNDEISISFDINKSSIFDSKSEERI

SEQ ID NO: 172903 - protein, 265 aa, Unknown
  Bacterial polypetide isolated from the Sargasso Sea
MAEVEVRLVSKRYDEVWAVRQISFIVSAGSFTSILGPSGCGKTTTLRLIAGFSSPDEGQVFLDGENIDDLPPWQRNLGVVFQNYALFPFMNVQDNVAFGLRRRRLNNTEISNRVEKALDLVGLPDLERRYPRQLSGGQQQRVALARALVIQPKVLLLDEPLSNLDAKLRSEMRFELKRIQRETGVTSIFVTHDQEEALTLSDQIVVMNNGEIEILGAPKVIWEDPRSAFVANFLGVENLIPAHISELVTQGAYAIVEGYDEPYNY

SEQ ID NO: 172904 - protein, 207 aa, Unknown
  Bacterial polypetide isolated from the Sargasso Sea
GPSGSGKSTLIICINRLEEHQKGTIVVDGTELTENTKNIEAIRAEVGMVFQQFNLFPHLSILDNCTLAPIWVKKMPKKQAEELAMKQLEQVQIVDQAQKFPGQLSGGQQQRCAIARALCMEPKIMLFDEPTSALDPEMIKEVLDAMVNLAKAGMTMIVVTHEMGFAKEVADEVIFMDEGMIIEKAETKEFFVNPKSDRTKLFLSQIL

SEQ ID NO: 172905 - protein, 273 aa, Unknown
  Bacterial polypetide isolated from the Sargasso Sea
MKCLETKNLDVAYGKKQIIFGFDFELDECQIGCLLGPSGCGKTTVLRSIAGFEQPSKGEIILNGKKLNGIKTYVAPEKRNIGMVFQDIALFPHLSVEENIQFGMRSWSREKREKRSQELLDLIGMLQFMKKYPHQLSGGQQQRIALARALAPKPSLLLMDEPFSSLDVELREQLAREVRLILKHENISALLVTHDQNEAFAMGDYICVLQQGRVQQTDSAYNLYHNPKNRFVAEFIGEGSIFSGIVVSKNKIETALGIIEGILPESVKLMADV

SEQ ID NO: 172906 - protein, 244 aa, Unknown
  Bacterial polypetide isolated from the Sargasso Sea
MSDKIIQISEMNKWFGDFQVLKNINLEVEKNKKIVVCGPSGSGKSTLIRCINRLEEHQKGSIIVDGNELTEDTKDIEKIRAEVGMVFQQFNLFPHLSILDNCTLAPIWVKKMPKKDAEELAIQHLEKVQIADQANKYPGQLSGGQQQRCAIARALCMEPKIMLFDEPTSALDPEMIKEVLDAMVNLAKAGMTMIVVTHEMGFAKEVADEVIFMDEGMIVERAETKEFFANPKSDRTKLFLSQIL

SEQ ID NO: 172907 - protein, 186 aa, Unknown
  Bacterial polypetide isolated from the Sargasso Sea
MSADVELQNVSVTFGSFYAAKNVSVKIKEGEFFSFLGPSGCGKTTLLRAISGFLDPSEGKVLIGGQDMAGIGPNKRPTSLIFQNLALFPLMSVADNIAFSLEVRGVNKIKRRERADELLELIALSGQGDKKVHELSGGQRQRVAIARALAIEPEVLLLDEPLSALDLKLRQKMRTELRAISKKSWK

SEQ ID NO: 172908 - protein, 170 aa, Unknown
  Bacterial polypetide isolated from the Sargasso Sea
NIEQIRAEVGMVFQQFNLFPHLSILDNCTLAPIWVKKMPKKDAEELALKHLERVQILDQAYKFPGQLSGGQQQRVAIARALCMEPKIMLFDEPTSALDPEMIKEVLDVMVNLAKQGMTMIVVTHEMGFAKEVADSMIFMDEGKIVEKADTKEFFANPKSDRTKLFLSQIL

SEQ ID NO: 172909 - protein, 170 aa, Unknown
  Bacterial polypetide isolated from the Sargasso Sea
MSDTIIKMEQVNKWFGDFQVLKDINLEVGLKQKIVVCGPSGSGKSTLIRCINRLEEHQKGKIIVDGNELSEKTKDIEKIRAEVGMVFQQFNLFPHLSILDNCTLAPIWVKKTPKKKAEEFAMQQLEQVQISDQARKFPGQLSGGQQQRAALARALCMEPKIMLFDEPTSA

SEQ ID NO: 172910 - protein, 244 aa, Unknown
  Bacterial polypetide isolated from the Sargasso Sea
MSESIIQINNMNKWFGDFQVLKSINLEVKPKEKIVVCGPSGSGKSTLIRCINRLEEHQEGNIIVDGTELTEDTKNIEQIRAEVGMVFQQFNLFPHLSILDNCTLAPIWVKKMPKKEAEELALKHLERVQILDQAQKYPGQLSGGQQQRCAIARALCMEPKIMLFDEPTSALDPEMIKEVLDVMVNLAKQGMTMIVVTHEMGFAKEVADQMIFMDEGMIVEKADTKEFFANPKSDRTKLFLSQIL

SEQ ID NO: 172911 - protein, 189 aa, Unknown
  Bacterial polypetide isolated from the Sargasso Sea
EHQEGNIIIDGTEISEDTKNIEQVRAEVGMVFQQFNLFPHLSILDNCTLAPIWVKKLPKKEAEELALKHLERVQILDQAQKFPGQLSGGQQQRVAIARALCMEPKIMLFDEPTSALDPEMIKEVLDVMVNLANQGMTMIVVTHEMGFAKEVADSMIFMDEGKIVEKADTKEFFANPKNERTKLFLSQIL

SEQ ID NO: 172912 - protein, 164 aa, Unknown
  Bacterial polypetide isolated from the Sargasso Sea
MSDPIIQINNMNKWFGDFQVLKDINLDVEKNKKIVVCGPSGSGKSTLIRCINRLEEHQKGSIIVDGTELTEDTKNIEQIRAEVGMVFQQFNLFPHLSILDNCTLAPIWVKKMPKKQAEELALKQLKQVQIDDQAHKYPGQLSGGQQQRCAIARALCMEPKNYAL

SEQ ID NO: 172913 - protein, 220 aa, Unknown
  Bacterial polypetide isolated from the Sargasso Sea
MADPIIQIKNMNKWFGEFQVLKDINLDVEANKKIVVCGPSGSGKSTLIRCINRLEEHQKGSIVVDGTELSEETKNIEQIRAEVGMVFQQFNLFPHLSILDNCTLAPIWVKKMPKKDAEELALKQLKQVQIEDQANKYPGQLSGGQQQRCAIARALCMEPKIMLFDEPTSALDPEMIKEVLDAMVNLAKAGMTMIVVTHEMGFAKEVADEVIFMDEGMIVE

SEQ ID NO: 172914 - protein, 211 aa, Unknown
  Bacterial polypetide isolated from the Sargasso Sea
MGSSDSFVKFDKVDKSYDGEVLVVKDLNVDIPKGEFLTMLGPSGSGKTTTLMMLAGFETPTGGEIYLEGEAINKIPPNKRGIGMVFQNYALFPHLTVNENLAFPLEVRKLNKSDIEEKVKKTLDMVELGQFGNRMPLQLSGGQQQRVALARSLVFEPRLVLMDEPLGALDKKLREQMQYEIKHIHERIGITVVYVTHDQSEALTMSNRIAV

SEQ ID NO: 172915 - protein, 263 aa, Unknown
  Bacterial polypetide isolated from the Sargasso Sea
RARSLTKSYGPEQVLTDFNLDVWKGSIFGILGVSGSGKTTALRLLAGFENPDSGSIEMHDRIVFDQETTIPPEDRNIGMVFQDYALFPHLNVEKNIAFGLSTKDINNGRLEEVLEMCNLKKYRNKFPQDISGGQQQRVALARALAPKPDVVLLDEPFTSLDAHMARELRDEVVHLLRETETTAILVTHDQEEALSVCDIVSVLEDGKVMQSATPQEIYLNPVSQNVANSVGDPNIIKGFSKNGRVETALGTFVSAYEGALDVS

SEQ ID NO: 172916 - protein, 155 aa, Unknown
  Bacterial polypetide isolated from the Sargasso Sea
MSESIIQINNMNKWFGDFQVLKGINLEVKPKQKIVVCGPSGSGKSTLIRCINRLEEHQEGNIIVDGTELTEDTKNIEQIRAEVGMVFQQFNLFPHLSILDNCTLAPIWVKKMPKKEAEELALKHLERVQILDQAQKYPGQLSGGQQQRVAIARAL

SEQ ID NO: 172917 - protein, 278 aa, Unknown
  Bacterial polypetide isolated from the Sargasso Sea
DGFSSYALYPHKTVSENIAFPLKVRKISGDARDKAILDAAKQVHMEDLLDRYPRQLSGGQRQRVALARAIVRQPDIFLMDEPLSNLDAKLRVHMRTELKRMQHEMGITTVYVTHDQVEAMTLANRVAIMNEGILQQIAPPKEIYGNPKNVFVAGFMGSPAMNFIDGTIENNEMNILERKFGLNENLENQNALLGIRPEHASITEKDKGHLNAKVFTTDQAGDHTLVNLNVGEQSIVVKMPSDFEVDFDKEVGITFSLEDSYLFQKNNGERIEVRLVDK

SEQ ID NO: 172918 - protein, 229 aa, Unknown
  Bacterial polypetide isolated from the Sargasso Sea
GDFQVLKDINFDVQANKKIVVCGPSGSGKSTLIRCINRLEEHQEGTIIVDGNELSENTKDIENIRANVGMVFQQFNLFPHLSILDNCTLAPIWVKKMPKKDAEELALNQLKKVQIDDQANKFPGQLSGGQQQRCAIARALCMEPKIMLFDEPTSALDPEMIKEVLDAMVNLAKGGMTMIVVTHEMGFAKEVADEVVFMDEGMIVERAETKEFFANPKSDRTKLFLSQIL

SEQ ID NO: 172919 - protein, 219 aa, Unknown
  Bacterial polypetide isolated from the Sargasso Sea
VVNPGHKVAIVGPTGAGKSTISKLLFRFYDPSSGIISIDNQNIKDVTQSSLRSNIGVVPQDTVLFNDTIKYNIAYSKPEASIEEINNAVKLSSIDRFIANLEIGYDTIVGERGLKLSGGEKQRVAIARALLKNPKIFIFDEATSALDSKTEKSIEKSLKKLSNKNSTLVIAHRLSTIIDADKIIVLENGIIAEQGSHKELIKKNGLYAEMWLRQQEQLN

SEQ ID NO: 172920 - protein, 175 aa, Unknown
  Bacterial polypetide isolated from the Sargasso Sea
DLKNIDAVRREVGMVFQSFNLFPHLSVIENCTLAPIWVRKTPQAEAEKLAMEYLDRVKIPEQAHKYPGQLSGGQQQRVAIARSLCMKPKIMLFDEPTSALDPEMIKEVLDVMVDLADSGMTMLVVTHEMGFAAQVADQVIFMDEGQIVEQNTPSEFFDNPQSDRTKLFLSQILSH

SEQ ID NO: 172921 - protein, 286 aa, Unknown
  Bacterial polypetide isolated from the Sargasso Sea
IDEGEIFINDQKINELHPSKRQTAMVFQSYALYPHMNVYENMSFGLKIEKRPKEEINTKVMQAAKILKIEELLERKPKQLSGGQRQRVAIGRAITRNPKIFLFDEPLSNLDAALRAEMRVEISKLHNQIKTNMIYVTHDQVEAMTLADRIVILNQGNIEQVGTPEEIYNDPANIFVAQFIGTPKMNILDVKEEDIVSENTIKLLGNDIQFNNLKLKKSKHFVGIRPEHLKAIQNTKFTFNPEIELIENLGNEKIAYMKKDEHQLSAKIPSNVEIGSSIGFNLNDIF

SEQ ID NO: 172922 - protein, 256 aa, Unknown
  Bacterial polypetide isolated from the Sargasso Sea
MKKAEVKFENITKKFNETVAVDNVSCSFEAGTLTTLLGPSGCGKTTSLRIIAGLERATEGKIMIDNEDVTLLPATDRDVSMVFQSYALFPHMSVIENVSYGLKMIKENKEEYTKKSLETLKLVNLEGYENRMPSELSGGQQQRVAVARAIVLKPKVLLFDEPLSNLDAKLRRQVREDIREIQQKLGVTTIYVTHDQEEALAISDKVIVMNNAVIAQEGTPKILYNHPKNKFVANFIGDANVVKAEVINKQSNKYEL

SEQ ID NO: 172923 - protein, 173 aa, Unknown
  Bacterial polypetide isolated from the Sargasso Sea
MSDSIIQISNMNKWFGDFQVLKGINLEVKPKQKIVVCGPSGSGKSTLIRCINRLEEHQEGNIVVDGTELTEDTKNIEQIRAEVGMVFQQFNLFPHLSILDNCTLAPIWVKKMPKKEAEELALKHLERVQILDQAQKYPGQLSGGQQQRAAIARALCMEPKIMLFDEPTSALDP

SEQ ID NO: 172924 - protein, 302 aa, Unknown
  Bacterial polypetide isolated from the Sargasso Sea
MKSLSEIEFLSVSKYYDDHLAVDKINLKIPANTYCCLLGPSGCGKTTSLRMLAGHENVSKGEILLGNQLVNLLPPSERGTAMMFQDYALFPHMNCLDNIAFSLKVRGINKPERYAKANKLLDLVQMNEYGLRKPAQLSGGQQQRVALARALITDPKVLLLDEPLSALDPFLRIRMRAELKKIQRELGISFIHVTHAQDEAMALADQIVVMKEGKIEQIANPKDLFNCPANEFVARFMGGQNIIHLESGSYAIRKDKIKLDNKKHKNSKSHTTSGVINSIEFQGNQVHISLSIQGDTEDFSIF

SEQ ID NO: 172925 - protein, 207 aa, Unknown
  Bacterial polypetide isolated from the Sargasso Sea
GPSGSGKSTLIRCVNRLEEHQEGSIIVDGTELSESTKNIEKTRAEVGMVFQQFNLFPHLSILDNCSLAPIWVKKLPKKQAEEIAMNNLKRVQIDDQALKFPGQLSGGQQQRAAIARALCMEPKIMLFDEPTSALDPEMIKEVLDVMVDLARGGMTMIVVTHEMGFAKEVADYMIFMDEGKIVERAKTKEFFENPKSDRTKLFLSQIL

SEQ ID NO: 172926 - protein, 280 aa, Unknown
  Bacterial polypetide isolated from the Sargasso Sea
GDVHVIKDVSLDIKSQSFTVLVGPSGCGKSTMLRMIAGLEDINSGTISIDGQVVNDLPPKQRNIAMVFQSYALYPHMTVFDNMAFGLKLEKRSKDEINDRVQEAARILQIEDYLHRKPKQLSGGQRQRVAIGRAITRKPKVFLFDEPLSNLDAALRVQMRVELAKLHDQLNATMIYVTHDQTEAMTLANDIVVLDEGIVSQKGSPMELYNNPNNLFVGGFIGSPKMNFISTKITSKNNDKTEVDLMGSSKISIPKTSASASEGDIVQLGIRPEHLVVNQD

SEQ ID NO: 172927 - protein, 223 aa, Unknown
  Bacterial polypetide isolated from the Sargasso Sea
MTKSDSIIKISKLNKWYGKFHALKDIDLSVGRTEKIVICGPSGSGKSTLIRCINRLEVHQEGSIQVDGIELTDDIKQITEIRSDVGMVFQHFNLFPHLTVLENCSLAPIWVRKKSKVEAEEMAMQLLEKVRIPDQADKYPGQLSGGQQQRVAIARALCMQPRIMLFDEPTSALDPEMIKEVLETMIELADSGMTMIVVTHEMGFANRVADRIIFMDEGQLSSK

SEQ ID NO: 172928 - protein, 243 aa, Unknown
  Bacterial polypetide isolated from the Sargasso Sea
MSGSIIQMKKVTSVRRLSVLKDINLDVAEKQKIVVCGPSGSGKSTLIRCINRLEEHQKGTIIVDGFELSEKTKNIEQIRAEVGMVFQQFNLFPHLSILDNCTLAPIWVKKTPKKQAEEIAMKQLEQVQIADQAKKFPGQLSGGQQQRAALARALCMEPKIMLFDEPTSALDPEMIKEVLDAMVNLAKAGMTMIVVTHEMGFAKEVADEVVFMDEGMIVERAKTKEFFDNPKSDRTKLFLSQIL

SEQ ID NO: 172929 - protein, 214 aa, Unknown
  Bacterial polypetide isolated from the Sargasso Sea
  misc_feature (9)..(9): Xaa can be any naturally occurring amino acid
  misc_feature (44)..(44): Xaa can be any naturally occurring amino acid
GGQRQRVAXARAIVREPNVFLMDEPLSNLDAKLRVSTRAQIKNXSHELAVTTVYVTHDQVEAMTLADRVVVMKEGIIQQVGSPTEIYNKPANAFVASFIGSPAMNLIEGEIFNKKFNADLTSVSGLNIENSKVTLGFRAEDASVVKSGGQINAPIYTLEILGDATMVTVKIGQSLVSIKTEKNYRANIEDYVSIHIPSKKCHLFDHKTGDRIGR

SEQ ID NO: 172930 - protein, 162 aa, Unknown
  Bacterial polypetide isolated from the Sargasso Sea
MVFDNLIIRARSLSKSYGSEDVLTDFNIDIWYGSIFGILGVSGSGKTTALRLLAGFENPDQGTIEMHNKVIFDEKTNVPPEKRKIGMVFQDYALFPHLTVEKNIAFGLSKEEIKNGRLDEVISMTNLSSYRKKFPQDISGGQQQRVALARALAPKPEVVLLD

SEQ ID NO: 172931 - protein, 265 aa, Unknown
  Bacterial polypetide isolated from the Sargasso Sea
RAISGFLDPSEGKVLIAGQDMAGIGPNKRPTSLIFQNLALFPLMSVSENIVFSLEVRGVGKQERQKRADELLDLIALSGQGDKKVHELSGGQRQRVAIARALAIEPKVLLLDEPLSALDLKLRQKMRTELRAIQKRVGITFIYITHDQGEALTMSDRVAVMNEGELEQVGLCDDVYDFPHTPFVATFVGENNPFYAKVVSVEGDKIRVESHNNTFVAKSGKTGDGKNHSFSTGQEVIMFIRPESIFIKNENTQLDNTFKAKSKYR

SEQ ID NO: 172932 - protein, 276 aa, Unknown
  Bacterial polypetide isolated from the Sargasso Sea
MGAIDIKSAGKIYPNGTRALEDVNITINDGEFVVLVGPSGCGKTTLLRMVAGLEDITEGEISIGDKTVNDVAPKDRDIAMVFQNYALYPHMSVFDNMAFSLKLRKLPKDEIQQKVKEAAKTLEISELLDRKPKALSGGQRQRVAMGRAIVRNPQAFLMDEPLSNLDAKLRVQMRAELGQLHTQLQTTTLYVTHDQVEAMTMGDRVAVIRKGELQQIDTPREIYLKPKNIFVAGFIGSPSMNFVYANVGVNKNSIPLNFGNDQIEYKGEKLGELKAF

SEQ ID NO: 172933 - protein, 179 aa, Unknown
  Bacterial polypetide isolated from the Sargasso Sea
MANIKFTGVHKSFGSNKIITDFNLMGKDDEFLVLVGPSGCGKSTLLRMIAGLEKIDEGEIFINDQKINDLHPSKRQTAMVFQSYALYPHMNVYENMSFGLKIEKKSKEEIETKVMQAAKILKIEELLERKPKQLSGGQRQRVAIGRAITRNPKIFLFDEPLSNLDAAFRAEMRVENSKL

SEQ ID NO: 172934 - protein, 244 aa, Unknown
  Bacterial polypetide isolated from the Sargasso Sea
MSDKIIQIKEMNKWFGDFQVLKNINLDVEKNKKIVVCGPSGSGKSTLIRCINRLEEHQEGSIVVDGTELTEETKNIEQIRAEVGMVFQQFNLFPHLSILDNCTLAPIWVKKMPKKDAEALALKHLEKVQIADQAYKYPGQLSGGQQQRCAIARALCMEPKIMLFDEPTSALDPEMIKEVLDAMVNLAKAGMTMIVVTHEMGFAKEVADEVIFMDEGMIVEQAETKEFFANPKSDRTKLFLSQIL

SEQ ID NO: 172935 - protein, 277 aa, Unknown
  Bacterial polypetide isolated from the Sargasso Sea
YPHLTVRRNLETPLRLRDYNAFERLPLIGNFSPSKKEKTESINQLVNKTSETLKISELLDRKPGQLSGGQRQRVALGRAMVREPVAFLMDEPLSNLDAALRVHMRSELSELHNSLKTTFVYVTHDQAEALTMSSRMAVMIDGNLLQLDTPQEVYDNPSSLSVAQFVGSPKINIFKGTADSSGTVSFLNVNLKRKSSESNSDLHIGIRPEHLEITNESNENTFSGTVAYRENLGSDIFFHVNIEDGLNKIIVRGLPQFTQEISNGSNVNIKRVSDKAL

SEQ ID NO: 172936 - protein, 256 aa, Unknown
  Bacterial polypetide isolated from the Sargasso Sea
MKGIDLEIADGEFLTLVGASGCGKSTLLRIIAGLENQTDGDVKILGESVNSVRASRRDLAMVFQSYALYPHLTVRQNMLTPLLLRDLSFYQRLPLVGRAMPGHGVRMDALNDMVEETAAILKIKPLLDRKPGQLSGGQRQRVALGRAMVRKPTAFLMDEPLSNLDAALRVHMRAELSDLHRSLRTTFIYVTHDQSEALTMSNRMAVMIDGRIVQLGTPDEVYGDPQDIRVAEFVGSPKINIIPGRADAHGRVTAYG

SEQ ID NO: 172937 - protein, 240 aa, Unknown
  Bacterial polypetide isolated from the Sargasso Sea
MIEFQNVSKSFGHVPVLKHIDLKIDAGEVVVVIGPSGSGKSTMLRCINALEKITGGELLVDGQSVRGNAATIRNIRLEAGMVFQQFNLFPQMTALENVMFGPMQVRGASRAEARDQAMALLDKVGLESRANHYPSELSGGQQQRVAIARALAIRPRLMLFDEPTSALDPELRHEVLKVMQDLATEGMTMIVVTHEIGFAKRVGTRLLFMDQGGIAEDGHPVELIDRPPTPRLKEFLKHVS

SEQ ID NO: 172938 - protein, 201 aa, Unknown
  Bacterial polypetide isolated from the Sargasso Sea
EQPSARQITVGDIHIDADKPLKGQQKLIRQLRQQAGFVFQNFNLFPHRTALENVIEGPVQVKKEPRAEALAHARALLAKVGLSGKEDAYPKRLSGGQQQRVAIARALAMRPQVILFDEPTSALDPELVGEVLTTIRDLAEEKRTMVIVTHEMAFARDVADRAIFIDQGHIVEQGPAKALFTAPQHERTRQFLSKFLLDRSL

SEQ ID NO: 172939 - protein, 286 aa, Unknown
  Bacterial polypetide isolated from the Sargasso Sea
TSGQVFIDNTSMEGIEPNLRPTNMVFQNYAIFPHLNVEENVAYGLRNKRENRNKQNKLVDEALELVGLSGLNKRSANALSGGQKQRVALARALILKPKVLLLDEPLSALDKKLREQMQSELRHLQRAVGITFILVTHDQYEALTMSDRVAVMFDGKVAQEASPRDLYELPTSQKVASFIGEMTFIEGEIIGENKNLQVQSEIFGQISIDKSRVFGRSSKKITLGIRPEKIAIVPKTSRSKNLVSGKIIDVSYFGETTNYKVSCGTIETLTISSQNSVGQLSYSVGE

SEQ ID NO: 172940 - protein, 212 aa, Unknown
  Bacterial polypetide isolated from the Sargasso Sea
MKTLKIEELSKNFGSTEVLRKINLDIDEGNFLVLLGPSGCGKSTLLNIIAGLETINEGDVFIDDYNVSKVEPKDRNIAMVFQSYALYPSMNVRENMIFGLKQAKISKEKIEKQLEKVSKFLQVDQLLERKPSQLSGGQRQRVAIGRALVREPRIFLFDEPLSNLDAKLRVEMRREIKKLHQQLKTTVVYVTHDQTEAMSLGTNIAIMNHGVI

SEQ ID NO: 172941 - protein, 228 aa, Unknown
  Bacterial polypetide isolated from the Sargasso Sea
KTTSWLKKIGLENYNNRMPYEISGGQRQRVALARSLIVEPGVLLLDEPLGALDANLRKTMQVELKKIHSEFGITFVYVTHDQEEALSMSSRIVLMKEGEIEQLSNPNELYEKPNTAFAAKFMGFSNIFSIRNIEQINSNNILNYLNEENKHSNKLCFRSKDVGIVSQNNGDFKIISKNYYGDSYKFQAINTNGLIINLSASDINISKLEIGTLVNLKINNEKIITLEK

SEQ ID NO: 172942 - protein, 197 aa, Unknown
  Bacterial polypetide isolated from the Sargasso Sea
MSKIIELKKVNKWFDKFQVLKDIDLEVAPQEKIVICGPSGSGKSTLIRCINRLEEHQEGNIIVDGTELSESTKNIEKIRAEVGMVFQQFNLFPHLSILDNCSLAPIWVKKLPKKQAEEIAMNNLKRVQIDDQALKFPGQLSGGQQQRAAIARALCMEPKIMLFDEPTSALDPEMIKEVLDVMVDLAKGGNDYDSWTH

SEQ ID NO: 172943 - protein, 184 aa, Unknown
  Bacterial polypetide isolated from the Sargasso Sea
MLKIRNLKKTYKTGDEALKSVDIDIPTSQVMALIGPSGAGKSTLIRCINRLVEPTNGQVFLNDLDLTKLSRRKLRFARRRIGMIFQEYALVERLTVMENVLSGRLGFVGFWSSFFRRFPEEDIQEAYRLLDRVGLSEMVDKRADALSGGQRQRVGICRALIQNPELLLVDEPTASLDPKTSRQI

SEQ ID NO: 172944 - protein, 286 aa, Unknown
  Bacterial polypetide isolated from the Sargasso Sea
MVFQSYALYPSMNVKENMVFGLKQAKTSKEKIEDQLEKVSKFLQVDQLLERKPSQLSGGQRQRVAIGRALVREPRIFLFDEPLSNLDAKLRVEMRREIKKLHQQLKTTVVYVTHDQTEAMSLGTRIAIMNHGVIQQNDTPENIYNKPSNTFVADFIGSPSMNLIKGTLKETSGKIFFTVSGSNFEIPIKDYEFKDKSNLNNKEVFFGLRPEHIYFKKSNESDFEVNLRADLSEYIGHEQIMTFDYANQEILAKFPSTIKIELAKETKLYFDLTQTSLFDAQTEERI

SEQ ID NO: 172945 - protein, 248 aa, Unknown
  Bacterial polypetide isolated from the Sargasso Sea
MSNIEFSNLNKSFGNNKIITDFNLKGKEDEFLVLVGPSGCGKSTLLRMIAGLEKIDEGEIKINNQIINDLHPSKRQTAMVFQSYALYPHMNVYENMSFGLKIEKKSKEEIQNKVLNAAKILKIEELLDRRPKELSGGQRQRVAIGRAITRNPKIFLFDEPLSNLDAALRAEMRVEISKLHQQIKTNMIYVTHDQVEAMTLADRIVILNEGNIEQVGTPDEIYKDPDNIFVAQFIGTPKMNILEIEPEN

SEQ ID NO: 172946 - protein, 218 aa, Unknown
  Bacterial polypetide isolated from the Sargasso Sea
KIDAGEVVVVIGPSGSGKSTMLRCINALEKITGGELLVDGQSVRGNAATIRNIRLEAGMVFQQFNLFPQMTALENVMFGPMQVRGASRAEARDQAMALLDKVGLESRANHYPSELSGGQQQRVAIARALAIRPRLMLFDEPTSALDPELRHEVLKVMQDLATEGMTMIVVTHEIGFAKRVGTRLLFMDQGGIAEDGHPVELIDRPPTPRLKEFLKHVS

SEQ ID NO: 172947 - protein, 231 aa, Unknown
  Bacterial polypetide isolated from the Sargasso Sea
MSENIIQINDMNKWFGDFQVLKGINLEVKPKQKIVVCGPSGSGKSTLIRCINRLEEHQEGNIIVDGTELTEDTKNIEQIRAEVGMVFQQFNLFPHLSILDNCTLAPIWVKKMPKKDAEELALKHLERVQILDQAQKYPGQLSGGQQQRAAIARALCMEPKIMLFDEPTSALDPEMIKEVLDVMVNLAKQGMTMIVVTHEMGFAKEVADQMIFMDEGMIVEKADTKEFFANP

SEQ ID NO: 172948 - protein, 240 aa, Unknown
  Bacterial polypetide isolated from the Sargasso Sea
TKVMQAAKILKIEELLERKPKQLSGGQRQRVAIGRAITRNPKIFLFDEPLSNLDAALRAEMRVEISKLHNQIKTNMIYVTHDQVEAMTLADRIVILNQGNIEQVGTPEEIYNDPANIFVAQFIGTPKMNILDVKEENIVSENTIKLLGNDIQFDKLKLNRTKHYVGIRPEHLKANQNTQFTFNPEIELIENLGNEKIVYMKKDEHQISAKIPSNVEIGNSLGFDLNDIFIFDEKGNRIKS

SEQ ID NO: 172949 - protein, 278 aa, Unknown
  Bacterial polypetide isolated from the Sargasso Sea
YLEVNNLSKSFGNFEAIKNIGIDIKEGEFVCFLGPSGCGKTTLLRCIAGLETQTAGSVIQKNIDISNEPPSNRDFGIVFQSYALFPNLSVFSNISYGLINNKWKKDDVKKRVDELLNLVNLTDHASKYPSQLSGGEQQRVALARALATSPGLLLLDEPLSALDAKVRVFLRKQIRDLQRKLGVTTIMVTHDQEEAQTMADRIFVMNEGEIIQSGTPSEIYTKANSPFIASFIGSMNFIPATIDNSKKVKCKSVEINCDIGSFKENDSIQLAVRPEEIY

SEQ ID NO: 172950 - protein, 280 aa, Unknown
  Bacterial polypetide isolated from the Sargasso Sea
KRDRNGFSNYALFPHMTVFENLAFPLKVRKMSQEDIEKKVDKALSMVSLGGFANRMPGQLSGGQQQRVAVARALVFDPAVVLMDEPLGALDKNLRESMQYEIKHIHESIGVTVVYVTHDQGEALTMSNRIAVFNDGKVQQLSSPDKLYEEPVNSFVAEFIGENNTFGGEVSEISNGTCKVKLEKGEIIANPISVKSVGEKTTVSIRPERALINPKDKMDNNQKGKIEEVIYHGDHTRVRLNLLGNSEFILKVPNSSQNLDIKLGNEINIGWNSHDARALD

SEQ ID NO: 172951 - protein, 254 aa, Unknown
  Bacterial polypetide isolated from the Sargasso Sea
ILLDGNIISNIPPHKRGIGMVFQNYALFPHMTVYENLAFPLRVRKVEKNEIDKKVDKALSMVSLNGFETRMPAQLSGGQQQRVAVARALVFDPAVVLMDEPLGALDKNLRESMQYEIKHIHESIGVTVVYVTHDQSEALTMSNRIAVFNDGKVQQLSNPAELYEKPVNSFVAEFIGENNTFNGEVVDIDKEKCKVKLANSEILANPISVKSKGDKTTVSLRPERALINPTDKMDNMFTGKIEEVIYHGDHTRVR

SEQ ID NO: 172952 - protein, 231 aa, Unknown
  Bacterial polypetide isolated from the Sargasso Sea
ELSKNFGTTEVLRKINLEIDEGNFLVLLGPSGCGKSTLLNIIAGLETINEGNVFIDDYNVSKVEPKDRNIAMVFQSYALYPSMNVKENMIFGLKQAKTSKEKIEEQLQKVSTFLQVDKLLERKPSQLSGGQRQRVAIGRALVREPRIFLFDEPLSNLDAKLRVEMRREIKKLHQQLKTTVVYVTHDQTEAMSLGTKIAIMNHGVIQQNDTPEIIYNKPSNTFVADFIGSPS

SEQ ID NO: 172953 - protein, 157 aa, Unknown
  Bacterial polypetide isolated from the Sargasso Sea
MTGTAARGVRISGLGHSYDKEPILKDVSLEVEPGESIALLGPSGCGKTTLLRLLAGLEKPSSGSIHVGETPVAGPEWVPPERRQVGMVFQDWALFPHLNVADNVGYGIAKSSSKKQQIAAALEMMELSDLSGRMPATLSGGQQQRVALARALAPRPV

SEQ ID NO: 172954 - protein, 233 aa, Unknown
  Bacterial polypetide isolated from the Sargasso Sea
STHVIKDVSLDIKSESFTVLVGPSGCGKSTMLRMIAGLEEINSGTISIDGQVVNDLPPKERNIAMVFQSYALYPHMTVFDNMAFGLKIEKKSKDEITERVMEAAKILQIEEYLERKPKQLSGGQRQRVAIGRAITRKPKVFLFDEPLSNLDAALRVQMRVELAKLHDQLNATMIYVTHDQTEAMTLADDIVVLDQGIVSQKGSPLKLYNEPENLFVGGFIGSPKMNFINTKVI

SEQ ID NO: 172955 - protein, 206 aa, Unknown
  Bacterial polypetide isolated from the Sargasso Sea
GSGKSTMIRCINRLEEHQEGTIVVDGIELTGNLKNIDSVRKEVGMVFQQFNLFPHLTAKENITLAPIWVKKMPKAEAEALAMRQLEIVKIPEQANKYPGQLSGGQQQRVAIARSLAMNPNIMLFDEPTSALDPEMIKEVLDVMVDLAEGGMTMIVVTHEMGFAKTVANRMVFMDEGKIVEEAAPDKFFNNPDSDRTKLFLSQILNH

SEQ ID NO: 172956 - protein, 235 aa, Unknown
  Bacterial polypetide isolated from the Sargasso Sea
MSQKDSFVKFEKVDKSYDGEILVVKDLNLDVPKGEFLTMLGPSGSGKTTVLMMLAGFETPTSGEIYLDGNPISSIPPNKRGIGMVFQNYALFPHMTVKENLAFPLEVRKMQKSEIDEKVGNALAMVELQDFGNRMPLQLSGGQQQRVALARSLVFEPRLVLMDEPLGALDKNLREQMQYEIKHIHERIGITVVYVTHDQSEALTMSNRIAVFNDGKIQQISSPDVLYEKPNSSFV

SEQ ID NO: 172957 - protein, 225 aa, Unknown
  Bacterial polypetide isolated from the Sargasso Sea
MSSSKSFVKFDKVDKSYDGKVLVVKDLNLDINEGEFITMLGPSGSGKTTCLMMLAGFETPTNGEIYLDSKPISRIPPHKRGIGMVFQNYALFPHLTVYENLAFPLKVRKLSKDDIDKKVDKALSMVSLSGFEKRMPNQLSGGQQQRVAVARSLVFDPQLVLMDEPLGALDKNLRESMQYEIKHIHENIGVTVVYVTHDQSEALTMSSRIAVFNDGKVQQLSSPDK

SEQ ID NO: 172958 - protein, 244 aa, Unknown
  Bacterial polypetide isolated from the Sargasso Sea
MSESIIKMKEVNKWFGDFQVLKDINLEVKEKQKIVVCGPSGSGKSTLIRCINRLEEHQKGQIIVDGNELSEKTKDIEKIRAEVGMVFQQFNLFPHLSILDNCTLAPIWVKKTPKKKAEELAMKQLEQVQIADQAAKFPGQLSGGQQQRAALARALCMEPKIMLFDEPTSALDPEMIKEVLDAMVNLAKGGMTMIVVTHEMGFAKEVADEVVFMDEGMIVERAKTQEFFANPKNDRTKLFLSQIL

SEQ ID NO: 172959 - protein, 234 aa, Unknown
  Bacterial polypetide isolated from the Sargasso Sea
MANIKFTGVHKSFGSNKIITDFNLLGKEDEFLVLVGPSGCGKSTLLRMIAGLEKIDEGEIFINDQKINELHPSKRQTAMVFQSYALYPHMNVYENMSFGLKIEKRPKEEINTKVMQAAKILKIEELLERKPKQLSGGQRQRVAIGRAITRNPKIFLFDEPLSNLDAALRAEMRVEISKLHNQIRTNMIYVTHDQVEAMTLADRIVILNQGNIEQVGTPEEIYNDPANIFVAQFI

SEQ ID NO: 172960 - protein, 260 aa, Unknown
  Bacterial polypetide isolated from the Sargasso Sea
TENETASSIRGDRDLANAQDIIVCEGVSKWFGDFQALNNVSATIKEQEVVVVLGPSGSGKSTWIRCINRLEQHQEGRIMVDGVELSNDLRNIEKVRSEVGMVFQMFNLFPHLTVRDNISLAPIWVRKKPRAEAEEQASSLLERVGIPEQADKFPGQLSGGQQQRVAIARALAMEPKIMLFDEPTSALDPEMIKEVLDVMKELALSGMTMMVVTHEMGFAKEVADKIMFMEGGQIVEIGTPEHFFTNPTEERTKLFLSQIL

SEQ ID NO: 172961 - protein, 202 aa, Unknown
  Bacterial polypetide isolated from the Sargasso Sea
MSKIIELKNVNKWFDKFQVLKDIDLEVAPQEKIVICGPSGSGKSTLIRCINRLEEHQEGNIIVDGTELSESTKNIEKIRAEVGMVFQQFNLFPHLSILDNCSLAPIWVKKLPKKQAEEIAMNNLKRVQIDDQALKFPGQLSGGQQQRAAIARALCMEPKIMLFDEPTSALDPEMIKEVLDVMVDLAKGGMTMIVVTHVNGFC

SEQ ID NO: 172962 - protein, 164 aa, Unknown
  Bacterial polypetide isolated from the Sargasso Sea
MSDSIIKINNMNKWFGDFQVLKDINLEVEKNKKIVVCGPSGSGKSTLIRCINRLEEHQEGTIIVDGTELSEDTKNIETIRAEVGMVFQQFNLFPHLSILDNCTLAPIWVKKMPKKEAESLAMKQLEQVQIVDQALKFPGQLSGGQQQRCAIARALCMEPKNNAI

SEQ ID NO: 172963 - protein, 259 aa, Unknown
  Bacterial polypetide isolated from the Sargasso Sea
VFENVAFGLRRLKKSSSFINKRTKEVLELVQMQDFILRKTNQLSGGQQQRIALARALAPEPKVLLLDEPLSALDLKLRQAMRVELKTLQKETGITFVFVTHDQEEALTMSDRIAVINEGRIQQIGEPEIIYEKPSNQFVAKFIGEANLISGECIQTGKNGILQLNSGQKIFVDISLDYIKGKTLTIFIRPERVKIKKSNKNSNAKIQEFTYLGNAAHIQIISNDEVINVTLPIDKASNFKKDDKIDLEFPKDFVRVINS

SEQ ID NO: 172964 - protein, 264 aa, Unknown
  Bacterial polypetide isolated from the Sargasso Sea
LSKPPHHRPVNTVFQSYALFPHMTVSENIAFGLQMLKRPKAEISATVAEMLELVQMTAMADRKTAQISGGQQQRVALARALAPRPKVLLLDEPLSALDFKLRKEMQLELKRLQHETGITFVFVTHDQEEALTMSDRIAVMNAGTIRQIGGPRDIYDHPAERFVADFIGDTNFLKAQMLSTEGAGSRVRLSSGAEIMAKPAQGEPPATNGASVTLAVRPEHADLCDPNGALLAGSLKNVVYFGTDTHYHVGLESGEMFILRRQNQ

SEQ ID NO: 172965 - protein, 181 aa, Unknown
  Bacterial polypetide isolated from the Sargasso Sea
MGKIIELKKVNKWFDKFQVLKDIDLEVAPQEKIVICGPSGSGKSTLIRCINRLEEHQEGNIIVDGTELAENTKNIEKIRAEVGMVFQQFNLFPHLSILDNCSLAPIWVKKLPKKEAEEVAMKNLTRVQIDDQALKFPGQLSGGQQQRAAIARALCMEPKIMLFDEPTSALDPEMIKRVLDV

SEQ ID NO: 172966 - protein, 231 aa, Unknown
  Bacterial polypetide isolated from the Sargasso Sea
WFGDFQVLKDINLEVVEKQKIVVCGPSGSGKSTLIRCINRLEEHQKGQIIVDGNELSEKTKDIEKIRAEVGMVFQQFNLFPHLSILDNCTLAPIWVKKTPKKQAEEFAMKQLEQVQIVDQAMKFPGQLSGGQQQRAALARALCMEPKIMLFDEPTSALDPEMIKEVLDAMVNLAKGGMTMIVVTHEMGFAKEVADEVVFMDEGMIVERAKTKDFFANPKNDRTKLFLSQIL

SEQ ID NO: 172967 - protein, 288 aa, Unknown
  Bacterial polypetide isolated from the Sargasso Sea
KLDFAYGRNQILFEFDFSLEESQIGCLLGPSGCGKTTALRAIAGFENPTKGEIILNGNKLNGSKIFVEPEKRQIGMVFQDIALFPHLSIKENIQFGIRSLSQNLRDKRTNELLDLVGMSEFKKKYPHEISGGQQQRIALARAIAPKPSLLLMDEPLSSLDVELREQLAREIRLILKQEKVSAILVTHDQNEAFAVGDHICVMHQGRVQQNDSAYNLYHHPLNRFVAEFIGEGTILPGVVVDEDTIATDLGEIKGSFPESCKHQDKVDVLIRPENVILADDNENKVLIT

SEQ ID NO: 172968 - protein, 155 aa, Unknown
  Bacterial polypetide isolated from the Sargasso Sea
FNLFPHLSILDNCTLAPIWVKKMPKKDAEELALKHLERVQILDQAQKYPGQLSGGQQQRVAIARALCMEPKIMLFDEPTSALDPEMIKEVLDVMVNLAKQGMTMIVVTHEMGFAKEVADQMIFMDEGMIVEKADTKEFFANPKSDRTKLFLSQIL

SEQ ID NO: 172969 - protein, 253 aa, Unknown
  Bacterial polypetide isolated from the Sargasso Sea
MSFLELKKVTKIYPNGTKAVQPTSLKIEKGEFMVFVGPSGCGKSTLLRMVAGLEDITTGDIKLDKKIINKIDPSERDVAMVFQNYALYPHMNVYNNLAYGLKNRGLAKDVIEKKVKAAAKLLQISDYLERRPALLSGGQRQRVAMGRAIVRSPKIFLFDEPLSNLDAKLRIQMRLEIKKLQRKVGVTSIFVTHDQVEAMTLADRLAVINNGIIEQLGTPIEIYNNPTSVFVAGFIGSPQMNFIEGELKNKKLK

SEQ ID NO: 172970 - protein, 227 aa, Unknown
  Bacterial polypetide isolated from the Sargasso Sea
MSQKDSFVKFEKVDKSYDGEILVVKDLNLDVPKGEFLTMLGPSGSGKTTVLMMLAGFETPTSGEIYLDGNPISSIPPNKRGIGMVFQNYALFPHMTVKENLAFPLEVRKMQKSEIDEKVGNALAMVELQDFGNRMPLQLSGGQQQRVALARSLVFEPRLVLMDEPLGALDKNLREQMQYEIKHIHEKIGITVVYVTHDQSEALTMSNRIAVFNDGKIQQISSPDILY

SEQ ID NO: 172971 - protein, 286 aa, Unknown
  Bacterial polypetide isolated from the Sargasso Sea
TTCLMMLAGFETPTNGEIYLDSNPISNIPPHKRGIGMVFQNYALFPHMTVYENLAFPLRVRKVQKDEIDKKVDKALSMVSLSGFESRMPAQLSGGQQQRVAVARALVFDPAVVLMDEPLGALDKNLRESMQYEIKHIHENIGVTVVYVTHDQGEALTMSNRIAVFNDGKVQQLSSPDKLYEEPVNSFVAEFIGENNTFGGEVTDISKDVCKVKLQNGEILANPVSVTSKGDKTTVSIRPERALINPKDKMDNNQTGKIEEVIYHGDHTRVRLDLLGNKEFIFKSSK

SEQ ID NO: 172972 - protein, 192 aa, Unknown
  Bacterial polypetide isolated from the Sargasso Sea
RLEEHQEGDIIVDGNELSEKTKDIEKIRAEVGMVFQQFNLFPHLSILDNCTLAPIWVKKMPKKEAQELALDQLKKVQIDDQANKFPGQLSGGQQQRCAIARALCMQPKIMLFDEPTSALDPEMIKEVLDAMVSLAKGGMTMIVVTHEMGFAKEVADEVIFMDEGMIVEKADTKEFFANPKSDRTKLFLSQIL

SEQ ID NO: 172973 - protein, 264 aa, Unknown
  Bacterial polypetide isolated from the Sargasso Sea
IAKVNPNDIEAKVKEAVNILGLEDLRKRKPSQLSGGQRQRVAMGRAIVRRPDAFLFDEPLSNLDAKLRTQMRTEIKKLHQKLKTTVIYVTHDQVEAMTLADRIIIMKDGFIEQIGSPIEVFNNPVNVFVATFIGSPPMNIIECEIIKSKDEVMIKLDNNIMVNCPQNKVSEVANLKKVVVGIRAEDIVPVQSNSNEKKSLWAFNKEIDLAEPLGTETQLFFKLQNQEIISRMYNPRPVNVGEKINFEIADNKIHFFDYETKKAI

SEQ ID NO: 172974 - protein, 208 aa, Unknown
  Bacterial polypetide isolated from the Sargasso Sea
MSDKIIQITEMNKWFGDFQVLKNINLEVEKNKKIVVCGPSGSGKSTLIRCINRLEEHQQGSIIVDGNELTEDTKDIEKIRAEVGMVFQQFNLFPHLSILDNCTLAPIWVKKMPKKEAENLALQHLEKVQIADQANKYPGQLSGGQQQRCAIARALCMEPKIMLFDEPTSALDPEMIKEVLDAMVNLAKAGMTMIVVTHEMGFAKRGCR

SEQ ID NO: 172975 - protein, 225 aa, Unknown
  Bacterial polypetide isolated from the Sargasso Sea
YSIKDSTILENLSFNVLSEDIVFIIGPSAAGKTTLLRIIAGFDKVDRGYVQVNDAIVDNTKIFVEPHRRKVGIIFQDIALFPHLSCEDNILFGISTQENHKKNERLQYLSDILGINEIKNKFPHEISGGQQQRVAIARALAPQPEILLLDEPFSALDEELKDQLIKDLRKLLKDERITSIIITHNIKESFQISDKVAYLSSKRILQCDTPYDLYHRPNSREIANF

SEQ ID NO: 172976 - protein, 258 aa, Unknown
  Bacterial polypetide isolated from the Sargasso Sea
ITVKDLNIFYPLPNKNFFKKDFFHAVKDVNFSIPQKSTIGLVGESGSGKSTLGKALAGLINYQGSVLYDGVNIDKLNSKESKSIKKDIQIVFQDPYGSLSPRMTVGEIVGEGLDVHFDLTKKQKDERIADCLKAVEINPDDRFKYPHEFSGGQRQRVAIARSLILNPSFMVLDEPTSALDRSIQIQVIELLKNIQTEYELTYLFISHDLKVVRSMSDYIFVMQNGLIVESGPAKQVFSNPEEDYTDKLLNAALRYSTV

SEQ ID NO: 172977 - protein, 226 aa, Unknown
  Bacterial polypetide isolated from the Sargasso Sea
MSTSGNGQVELKSLVKSFGETQAVNDVSLTIPDGAYCCMIGPSGCGKTTILRMIAGHEEPTSGEVLIGGEQTAGLEPVQRGTSMMFQSYALFPHLTVAENVAFSLRVKGVEKDVRRKSAMEVLETVKMTHLADRLPAQLSGGQQQRVALARSLITNPKVLLLDEPLSALDEFLRLQMREELRRLQKEIGITFIHVTHTQPEALALADMIVVMDQGVIDQAGTAQEI

SEQ ID NO: 172978 - protein, 192 aa, Unknown
  Bacterial polypetide isolated from the Sargasso Sea
MSDPIIKIEGMNKWFGDFQVLKDIDLSVEKNKKIVVCGPSGSGKSTLIRCINRLEEHQKGTIIVDGTELTENTKNIEAIRAEVGMVFQQFNLFPHLSILDNCTLAPIWVKKMPKKDAEELAMKQLEQVQIADQAQKFPGQLSGGQQQRCAIARALCMEPKIMLFDEPTSALDPEMIKEVLDAMVNLAKAGMT

SEQ ID NO: 172979 - protein, 195 aa, Unknown
  Bacterial polypetide isolated from the Sargasso Sea
CINRLEEHQEGDIIVDGNELSEKTKDIEKIRAEVGMVFQQFNLFPHLSILDNCTLAPIWVKKMPKKEAEELALDQLKKVQIDDQANKFPGQLSGGQQQRCAIARALCMQPKIMLFDEPTSALDPEMIKEVLDAMVSLAKGGMTMIVVTHEMGFAKEVADEVIFMDEGMIIEKADTKEFFANPKSDRTKLFLSQIL

SEQ ID NO: 172980 - protein, 301 aa, Unknown
  Bacterial polypetide isolated from the Sargasso Sea
MSELKLKKLQKKYGETTAVRKVDLVLNEPTYCCLLGPSGCGKTSLLRMIAGHEVISSGSVLIDGQDISGKPPSLRPTSMMFQNYALFPHLKVIDNVAFALKISGMDKLARYERAMQMLRGVQLHKLADRFPNQLSGGQQQRVALARALITEPRILLLDEPLSALDPFLRIEMRAELKALQRKLGISFIHVTHSQDEAMALADLILVMNDGIVEQHGTPMEIFNKPRNAFVANFIGGHNVLAIGSKLFAIREDRINLIPNGNSKVNAIEFLGANVKINVTYGKSGNLTVSQSDVSFAKSKMK

SEQ ID NO: 172981 - protein, 250 aa, Unknown
  Bacterial polypetide isolated from the Sargasso Sea
KKVSSFLQVDSLLERKPSQLSGGQRQRVAIGRALVREPRIFLFDEPLSNLDAKLRVEMRREIKKLHQQLKTTVVYVTHDQTEAMSLGTKIAIMNHGVIQQNDTPENIYNKPSNTFVADFIGSPSMNLIKGNLKQNTDNFSFIAEGSNLEIPIKHYNFKKTSELGNKEVYFGIRPEHIYFKKLNEDDLEINLSADLSEYIGHEQIVTFNYSNQEILAKFPSTIKVELNKEAKLYFDLTQVSLFDSKSEERI

SEQ ID NO: 172982 - protein, 164 aa, Unknown
  Bacterial polypetide isolated from the Sargasso Sea
MSADVELSDVSVTFGSFYAAKNVNVKVNGGEFFSFLGPSGCGKTTLLRAISGFQEPSEGKVLIDNKDMSGIGPNKRPTALIFQNLALFPLMSVSENIAFSLEVRGVSKEERKKRADELLELIALEGQGDKKVHQLSGGQKQRVAIARALAVEPKVLLLDEPLSA

SEQ ID NO: 172983 - protein, 278 aa, Unknown
  Bacterial polypetide isolated from the Sargasso Sea
PSKRQTAMVFQSYALYPHMNVYENMSFGLKIEKRSKEEIQTKVMQAAKILKIEELLERRPKQLSGGQRQRVAIGRAITRNPKIFLFDEPLSNLDAALRSEMRVEISKLHNQIKTNMIYVTHDQVEAMTLADRIVILNLGNIEQVGTPDEIYNNPANIFVAQFIGTPKMNILPLNNENIISDNKIIFLGNEITFEKTKFDKKKYFLGIRPEHFNLSNESQFKFKPKIDLVENLGNEKIVYMSNDNLELSAKISSQEDFQNQINFDSKDIFIFDENGRRI

SEQ ID NO: 172984 - protein, 261 aa, Unknown
  Bacterial polypetide isolated from the Sargasso Sea
MPEVLKIENLHKSFDKLEVLAGIDLTLNKGETVVLVGASGSGKSTMLRCVNFMEIPTSGKIYLQQKLIGNEINGKMVYPEKELIPLRARVGMVFQHFNLFPHMTAIENVMEGPKTVLKLPKSDCEDRAKTYLEKVGLLWKSDTYPSQLSGGQQQRVAIARALAMEPDLMLFDEATSALDPELVGEVLETIKQLADDGMTMMVVTHELGFAYTVADRVLFLYKGTILEEGEPESVLIHPQHEATKNFLRGHGSFRLPEPQLD

SEQ ID NO: 172985 - protein, 215 aa, Unknown
  Bacterial polypetide isolated from the Sargasso Sea
EDEFLVLVGPSGCGKSTLLRMIAGLEKIDEGEIFINDQKINELHPSKRQTAMVFQSYALYPHMNVYENMSFGLKIEKRPKEEINTKVMQAAKILKIEELLERKPKQLSGGQRQRVAIGRAITRNPKIFLFDEPLSNLDAALRAEMRVEISKLHNQIKTNMIYVTHDQVEAMTLADRIVILNQGNIEQVGTPEEIYNDPANIFVAQFIGTPKMNIL

SEQ ID NO: 172986 - protein, 280 aa, Unknown
  Bacterial polypetide isolated from the Sargasso Sea
IVLLGPSGCGKSTLLRMIAGLEKIDNGKILLENNLLNNLLPSKRQIAMVFQSYALYPHMNVFQNISFGLKSEKISKNDIKDKVNEAAKILKIEELLDRRPKELSGGQRQRVAIGRAITRNPKLFLFDEPLSNLDAALRSEMRVEISKLHKKLKSNIIYVTHDQIEAMTLADKIVIMNKGRIEQFGTPEDIYNNPNNVFVAEFIGNPKMNIFKVKTEDIINKNTFKLFNKEIKFENLDFKDGLYVGIRPEDISLENKSEYTAEITVDLIENLGSEKLYILI

SEQ ID NO: 172987 - protein, 161 aa, Unknown
  Bacterial polypetide isolated from the Sargasso Sea
VFQQFNLFPHLSVKENITLAPIWVKKMPKAEAEELAMKQLEIVKIPEQANKYPGQLSGGQQQRVAIARSLAMNPNIMLFDEPTSALDPEMIKEVLDVMVDLAEGGMTMIVVTHEMGFAKTVADRMVFMDEGKIVEEASPDKFFNNPESDRTKLFLSQILHQ

SEQ ID NO: 172988 - protein, 228 aa, Unknown
  Bacterial polypetide isolated from the Sargasso Sea
MSKNQQFVRFDKVDKSYDGKILVVKDLNLDIAEGEFITMLGPSGSGKTTCLMMLAGFETPTNGEIFLDQNPISNIPPHKRGIGMVFQNYALFPHMTVYENLAFPLKVRKVAKDEIDKKVDKVLSMVSLSGFEKRMPGQLSGGQQQRVAVARALVFDPQVVLMDEPLGALDKNLRESMQYEIKHIHESIGVTVVYVTHDQGEALTMSNRIAVFNDGKVQQLSSPDKLYE

SEQ ID NO: 172989 - protein, 269 aa, Unknown
  Bacterial polypetide isolated from the Sargasso Sea
IVSLLGPSGCGNTTLLRIIAGLETPDPGGKIWFDSDDVTDLPVERRQVGMVFQSYALFPNMSVRANIGYGLKMKKLPKADIEARVSEVLEMCQLNDYAQRAVTALSGGQRQRVALARAIAPRPRLLLLDEPLSALDAALRETLRDELAILLRKFNITAIFVTHDQNEAMAIADRVAVMSQGEIVQSGTPEELYRKPTSTFVASFVGSAMHLAGEINGSKLQLKGGEVSLPADGTGCEAFVRAENIQINKNGSLSGYVDTVTFLGTHYRV

SEQ ID NO: 172990 - protein, 251 aa, Unknown
  Bacterial polypetide isolated from the Sargasso Sea
PHKRGIGMVFQNYALFPHMTVYENLAFPLRVRKVEKDEIDKKVDKALSMVSLNGFETRMPAQLSGGQQQRVAVARALVFDPAVVLMDEPLGALDKNLRESMQYEIKHIHESIGVTVVYVTHDQSEALTMSNRIAVFNDGKVQQLSNPSELYEKPVNSFVAEFIGENNTFNGEIVDIDKDKCKVKLANSEILANPISVKSKGEKTTVSLRPERALINPSEKMDNMFSGKIEEVIYHGDHTRVRLNLLGSSEF

SEQ ID NO: 172991 - protein, 286 aa, Unknown
  Bacterial polypetide isolated from the Sargasso Sea
FETPTNGEIFLDGMPISKIPPYEREIGMVFQNYALFPHMTVQENLAFPLEVRKMSKEETKSKVQKALDMVELGEFGTRFPAQLSGGQQQRVALARALVFEPRLVLMDEPLGALDKNLREQMQYEIKHIHDRIGITVVYVTHDQSEALTMSNRIAVFNDGVVQQLSTPDILYEKPENSFVAQFIGENNRMTGTIKNMDNNYCSVDLDNGAGTVKALKVNVGNIGEKTQLSVRPERVSLGSEGNGENVFTGKVEELIYLGDHIRVRLDVCGNNEFIVKVANEGSLIIT

SEQ ID NO: 172992 - protein, 216 aa, Unknown
  Bacterial polypetide isolated from the Sargasso Sea
MDKPTRHDRAMQMLRGVQLDKLADRFPSQLSGGQQQRVALARALITEPRVLLLDEPLSALDPFLRIEMRSELKALQRKLGISFIHVTHSQDEAMALADLILVMNDGIVEQYGTPMEIFNKPRNAFVANFIGGHNVLAIESKVFAIREDRINLIPNGNSRVNAIEFLGANVKINVTYGKSGNLTVSQSDVLFAKSKIKVGDNVKVSWNKKNQLELKQ

SEQ ID NO: 172993 - protein, 289 aa, Unknown
  Bacterial polypetide isolated from the Sargasso Sea
MALKKDFVKFDKVDKSYDGKVLVVKDLQLDIEEGEFVTMLGPSGSGKTTCLMMLAGFETPTNGEIYLDGNAISSIPPHKRGIGMVFQNYALFPHMTVYENLAFPLRVRKIPKDEADKKIDKALSMVSLQGFAQRMPGQLSGGQQQRVAVARSLVFDPQLVLMDEPLGALDKNLRESMQYEIKHIHENIGVTVVYVTHDQSEALTMSNRIAVFNDGKVQQLSSPDELYEKPVNSFVAEFIGENNTFAGEVSEISGGKCKVKLANAEIMANPISVKGKGDKTTVSIRPERG

SEQ ID NO: 172994 - protein, 235 aa, Unknown
  Bacterial polypetide isolated from the Sargasso Sea
PKQEIIDKVEKAANILQLGDLLERKPKQLSGGQRQRVAIGRAIVRDPEVFLFDEPLSNLDAELRVQMRVELALLHKQLNATMIYVTHDQIEAMTLADKIVVLRDGVIEQIGAPMELYNKPANEFVAGFIGSPRMNMVPVQTAIDAGWKGAKIAEAVKIGIRPEHLVRSKTGLEGVIYYVEHLGGQTLTHIKLLDNTDITLLEPGEHTYNRGDKLKVEPKSKTMHAFDKGAKAIRK

SEQ ID NO: 172995 - protein, 258 aa, Unknown
  Bacterial polypetide isolated from the Sargasso Sea
MQNVSYGLTMSRISKQEVKDKAQTGLELVGLSEFGERLPSELSGGQQQRVAVARALVLEPEVLLFDEPLSNLDAKLRRRVREEIRELQRELGLTTVYVTHDQEEALAVSDRIIVMNEAVIAQEGKPRQLYEEPVNLFVSDFIGDANLVQSTILEIDGSNAKVDIGGLQLQLPHRGLIPGEAMAALRPQSICLHQSGTEKGILGTILKSSYLGDHLEYTIECKLGDLFVIDNEIQTQHLPGAEVYITFRSYGVSLIPES

SEQ ID NO: 172996 - protein, 155 aa, Unknown
  Bacterial polypetide isolated from the Sargasso Sea
FNLFPHLTVRDNISLAPIWVRKKPRAEAEEQATALLERVGIPEQADKFPGQLSGGQQQRVAIARALAMEPKVMLFDEPTSALDPEMIKEVLDVMKELALSGMTMMVVTHEMGFAKEVADKIMFMEGGQIVEIGTPEHFFTNPTEERTKLFLSQIL

SEQ ID NO: 172997 - protein, 188 aa, Unknown
  Bacterial polypetide isolated from the Sargasso Sea
MSFLDLENVTKIYPNGTKAVNETSLSITEGELMVFVGPSGCGKSTLLRMIAGLEDITDGEIKLDNKIINKVDPSERDVAMVFQNYALYPHMNVFKNLSYGLKNKGESKEKIEKKVNEVAELLEIKEFLQRKPAQLSGGQRQRVAMGRAIVRNPKAFLFDEPLSNLDAKLRGQVRIEIKKLQKQMGVTS

SEQ ID NO: 172998 - protein, 297 aa, Unknown
  Bacterial polypetide isolated from the Sargasso Sea
MGSSDSFVKFDKVDKSYDGETLVVKDLNVDIPKGEFLTMLGPSGSGKTTTLMMLAGFETPTGGEIYLEGEAINKIPPNKRGIGMVFQNYALFPHLTVNENLAFPLEVRKLNKSDIEEKVKKTLDMVELGAFGNRMPLQLSGGQQQRVALARSLVFEPRLVLMDEPLGALDKKLREQMQYEIKHIHERIGITVVYVTHDQSEALTMSNRIAVFNDGKIQQISSPDILYEKPENAFVANFIGENNQLKGKVKSINGKNCVVTTEKGDDITSLKINVNSVGDSSTVSLRPERVEINSTRR

SEQ ID NO: 172999 - protein, 184 aa, Unknown
  Bacterial polypetide isolated from the Sargasso Sea
MNNIITFDKVSKSFGDLKVLDQLNLEVKDGEKLALIGPSGSGKTTILRILMTLETIDSGFVSVNNEYLWHEKINNKVVPATDNHLQKMRDQIGMVFQQFNLFPHLTAIENVKQPQILVKKKKEIEAKEKAEDLFNMIGLSDKIDHYPHQLSGGQQQRVAIARALAMDPKIMLFDEVTSALDPEL

SEQ ID NO: 173000 - protein, 242 aa, Unknown
  Bacterial polypetide isolated from the Sargasso Sea
MISIRNLSKTFNKNIHAVKNVDLEIAEGEVVVIVGPSGSGKSTVLRCINRLEIPTEGSIAIDGIELTDPECDIDTIRAEVGMVFQQFNLFPHLTVMENVCLAQRKVRGRSKSEANEMTMKQLTRVGIPDKADSYPRQLSGGQQQRVAIARSLAMEPKIMLFDEPTSALDPEMVKEVLDVMLELASEGMTMAVVTHEMGFAKAAGDRLVFMDEGMVVEIGPPNQVFDSPNEQRTKDFFDKILY

SEQ ID NO: 173001 - protein, 147 aa, Unknown
  Bacterial polypetide isolated from the Sargasso Sea
GFIFQGFNLIKDFSLFDNIELPLRYRGFSSAERKRRVEHALETVGLAARRDYHPSQLSGGQQQRVAIARAIAGEPRILLADEPTGNLDSLMARQVMELLEKINQQGCTILMVTHDPDQARRANRHIQIVDGQLNDATMYEPLVAAGA

SEQ ID NO: 173002 - protein, 168 aa, Unknown
  Bacterial polypetide isolated from the Sargasso Sea
EKIRAEVGMVFQQFNLFPHLSILDNCTLAPIWVKKMPKKQAEELAMKQLEQVQIVDQAKKFPGQLSGGQQQRCAIARALCMEPKIMLFDEPTSALDPEMIKEVLDAMVNLAKGGMTMIVVTHEMGFAKEVADEVIFMDEGMIVERAPTKEFFANPKSDRTKLFLSQIL

SEQ ID NO: 173003 - protein, 293 aa, Unknown
  Bacterial polypetide isolated from the Sargasso Sea
NDLPPGDRDLAMVSQNYALYSHMTVAKNLGFALKARGLEGNEIEKRVQKVAHMLDLQEMLGRKPRQLSGGQRQRVAVGRAIVRNPQAFLMDEPLSNLDALLRLQTRKELIELTGELKSTVIYVTHDQVEAMTMGHRLAVMNKGEVVQLDTPENIFSQPSSRFVAEFIGSPPMNFLNVEIVEKNKKRIFQQGSFEVPVPDSMKALKETSVILGFRPNELELVSRGGISGTVSVVETLGSEKLVYLKLGEKTISLLVPSSKKINSGENVRFKINPESLHLFNIANETRISFDDTV

SEQ ID NO: 173004 - protein, 225 aa, Unknown
  Bacterial polypetide isolated from the Sargasso Sea
MANIKFSNVGKSFGDNKVINNFNFQGKDDEFLVLVGPSGCGKSTLLRMIAGLEQIDEGEIQINNEVINEMHPSKRHTAMVFQSYALYPHMNVYDNMSFGLKIEKKTKEEIHTKVLSAAKTLKIEDLLERRPKELSGGQRQRVAIGRAITRNPKIFLFDEPLSNLDAALRAEMRVEISRLHQKIKTNMIYVTHDQVEAMTLADRIVILNNGNIEQVGTPNEIYTNP

SEQ ID NO: 173005 - protein, 213 aa, Unknown
  Bacterial polypetide isolated from the Sargasso Sea
SKLDHHIPVEQRNIGMVFQDYVLFPHMDVSKNITFGLKDISSLRTKERLDELIELFGLNEHTNKYPHQLSGGQQQRVALARAMAPRPSVLLLDEPFASLDIELRESLACELRSILKQDSVATIMVTHNQLEAFAMGDIIGVIDNGKLKQWDTAFNLYHQPKTLNVANFIGEGTFIQGEIINSTDVKTDIGRIKGQVPHNIDVGKKVRVLIRSR

SEQ ID NO: 173006 - protein, 227 aa, Unknown
  Bacterial polypetide isolated from the Sargasso Sea
MVRFAEVQKSYDGISLVVKNLNLDIADGEFLTMLGPSGSGKTTCLMMLAGFETATHGQIYLDGVPINNVPPHKRDIGMVFQNYALFPHMTVSENLAFPLKVRKMGQVDIAERVQRALDMVQLSDFGGRRPAQLSGGQQQRVAVARALVFDPKLVLMDEPLGALDKQLREQMQYEIKHIHENLGITVVYVTHDQSEALTMSNRIAVFNDGVIQQLAPPAELYESPENS

SEQ ID NO: 173007 - protein, 245 aa, Unknown
  Bacterial polypetide isolated from the Sargasso Sea
MKQENALEAISVSCVFKINQGLFKGSKPLVAVNGVSLQIPKGKVVGLVGESGCGKSTLANILLGLQNPTSGEVLYSGKAASGFSNRHIARRIQPIFQDPYSSLNATKTVKSIISLPLRIHKIGEPNTWDGKVREMLDLVGLPARVAESYPSQLSGGQRQRVAIARALIMRPEVIICDEPTSALDVSVQSQILNLLQDLRLELGLTYLMISHNLAVVEHMADRVAVMYLGRIVEEAESSILFKEPK

SEQ ID NO: 173008 - protein, 235 aa, Unknown
  Bacterial polypetide isolated from the Sargasso Sea
GMRKAGLTRAELDKRIDEALELIKLPGYGSRGADELSGGQRQRVALARALIKQPKVLLLDEPLGALDKKLREQMQIELRQLQQQIGITFLFVTHDQEEALTLSDRIAVMSEGAVMEIASPGQLYESPGSPFVADFIGSMNFFEGEILSSTDSAITVETSALGTVSVTNSDTQMTAGQKAWVAIRPEKMQPVFSDPGEHANTTSGTMGPSAYLGDRSHFYVHLPQREDPVLVALQN

SEQ ID NO: 173009 - protein, 234 aa, Unknown
  Bacterial polypetide isolated from the Sargasso Sea
MNDVIINAQNVVKDYSISQGIFKNKEILRAVDGVNLEISRGEVLALVGESGCGKTTLAKIILGLLPPTSGSVQLSGQPLAQIPRLKLARMIQPVFQDPYSSLNPRKTIGSIITLPLKVQGDENPETWEARTRETMDLVGLHGRMYYQYPNQLSGGQRQRVAIARALINRPEVVVCDEPTSALDVSVQSQILNLLNDLRRELNLTYIIISHNLAVVEHMASRVAVMYFGKMVEEA

SEQ ID NO: 173010 - protein, 158 aa, Unknown
  Bacterial polypetide isolated from the Sargasso Sea
MPESIIQIKNVNKWFGDFQVLKDINLDVKPKEKIVVCGPSGSGKSTLIRCINRLEEHQKGSIVVDGTELSEDTKNIEAIRAEVGMVFQQFNLFPHLSILDNCTLAPIWVKKMPKQKAEELAMKQLNQVQIGDQAQKFPGQLSGGQQQRCAIARALCME

SEQ ID NO: 173011 - protein, 242 aa, Unknown
  Bacterial polypetide isolated from the Sargasso Sea
MSKKEDFVKFDKVDKSYDGKVLVVKDLNLDIEEGEFVTMLGPSGSGKTTCLMMLAGFETPTNGEIYLDKNPISNIPPHKRGIGMVFQNYALFPHMTVFENLAFPLRVRKISKDDIDKKVEKALSMVSLSGFGNRMPGQLSGGQQQRVAVARALVFDPSVVLMDEPLGALDKNLRESMQYEIKHIHESIGVTVVYVTHDQGEALTMSNRIAVFNDGKVQQLSSPDKLYEEPVNSFVAEFMERI

SEQ ID NO: 173012 - protein, 271 aa, Unknown
  Bacterial polypetide isolated from the Sargasso Sea
MECLDTVYIWKKSLKQVLTWEQINMSEDSIISLQNVNKWFGDFHVLKDVDLEVKKKERIVVCGPSGSGKSTMIRCINRLEEHQEGTIIVDGIELTGNLKNIDSVRKEVGMVFQQFNLFPHLSVKENITLAPIWVKKMPKAEAEELAMQQLEIVKIPEQADKYPGQLSGGQQQRVAIARSLAMKPNIMLFDEPTSALDPEMIKEVLDVMIDLAEGGMTMIVVTHEMGFAKTVADRMVFMDEGRIVEQAAPDKFFNNPESDRTKLFLSQILNH

SEQ ID NO: 173013 - protein, 244 aa, Unknown
  Bacterial polypetide isolated from the Sargasso Sea
MSDPIIKIQNMNKWFGDFQVLKNINLEVEANKKIVVCGPSGSGKSTLIRCINRLEEHQEGDIIVDGNELSEKTKDIEKIRAEVGMVFQQFNLFPHLSILDNCTLAPIWVKKMPKKEAQELALDQLKKVQIDDQANKFPGQLSGGQQQRCAIARALCMQPKIMLFDEPTSALDPEMIKEVLDAMVSLAKGGMTMIVVTHEMGFAKEVADEVIFMDEGMIIEKADTKEFFANPKSDRTKLFLSQIL

SEQ ID NO: 173014 - protein, 297 aa, Unknown
  Bacterial polypetide isolated from the Sargasso Sea
MVTETPPYQREIGIVFQNYALFPHMNVAKNVGYGLRMRGVAKAEIAERVEQALALVKLSGYGERKPRELSGGQQQRVALARALVIRPKVLLLDEPFSALDKNLRLSMQIELKDIQRKLGVTTVFVTHDQGEALSMSDRVVVMSAGHIRQIGTPDVIYRNPQDPFVAGFVGDANILPGRYLSRDDSACVELGDATLRLPATHVHGPVGSRLDVYARPENIRLVSLGADALLSGTVVNHVFQGDHVDIHLDVPSLGNTRLFVRQSGLESLTRWPVGAVGGLAFDNEGVCAFATETQATH

SEQ ID NO: 173015 - protein, 182 aa, Unknown
  Bacterial polypetide isolated from the Sargasso Sea
MGAINITSVGKIYPNGTRALEDVNIEVNDGEFVVLVGPSGCGKTTLLRMVAGLEDITEGEISIADKIVNEVAPKDRDIAMVFQNYALYPHMSVYDNMAFSLKLRKFSKDEIDKKVKDAAKTLEIDELLDRKPKALSGGQRQRVAMGRAIVRSPQAFLMDEPLSNLDAKLRVQMRAELGQLHT

SEQ ID NO: 173016 - protein, 274 aa, Unknown
  Bacterial polypetide isolated from the Sargasso Sea
MAEIQINSLSKSFGKSKVIKDISLSIQSRSFTVIVGPSGCGKSTLLRMIAGLEKIDTGEIKIAGKSVNDLPPKDREIAMVFQSYALYPHMTVFNNMAFGLKLEKKSKSEIENRVKEAARILQIENLLDRKPKQLSGGQRQRVAIGRAITRNPKVFLFDEPLSNLDAALRVATRIEIANLHDSMPDATMVYVTHDQVEAMTLANQIVVLSEGQIEQIGSPLELYEEPENLFVAKFIGSPAMNIIPIEILTTGINPVGKINEKIKINLETKFSSSD

SEQ ID NO: 173017 - protein, 257 aa, Unknown
  Bacterial polypetide isolated from the Sargasso Sea
MAEATPALEIRNLHKRYGDLEVLKGISLTAKDGDVISILGSSGSGKSTFLRCINLLENPHQGQIFVAGEELKLKAAKNGDLVAADNKQINRLRSEIGFVFQNFNLWPHMSVLDNIIEAPRRVLGQSKAEAIEIAEALLAKVGIADKRHVYPNQLSGGQQQRAAIARTLAMQPKVILFDEPTSALDPEMVQEVLNVIRALADEGRTMLLVTHEMSFARQVSSEVVFLHQGLVEEQGPPAQVFDNPKSARCKQFMSSNR

SEQ ID NO: 173018 - protein, 299 aa, Unknown
  Bacterial polypetide isolated from the Sargasso Sea
MASIELKNIEKSYGKNKVINKFDIKINDGEFVVLVGPSGCGKSTLLRMISGLESVDIGEIYLDNKLINNLIPSKREIAMVFQSYALYPHMNVFENMAFGLKMEKISKSEINQKVNNAAATLQIEDLLERKPKELSGGQRQRVAIGRAITRSPKVFLFDEPLSNLDAALRSEMRVEISKLHKKMNSNIIYVTHDQVEAMTLADRIVVLNKGNIEQYGTPNEIYSDPNNIFVAEFIGSPKMNIIKINKEHIINSNTLHLFNNKITFDNLEFKDEVYIGIRPEDISLKSNHEIQIDVKVDLV

SEQ ID NO: 173019 - protein, 202 aa, Unknown
  Bacterial polypetide isolated from the Sargasso Sea
MAALTLQGVKKTYDSKQFVLHGIDVDVADGEFVVMVGPSGCGKSTLLRMVAGLESISEGTISIAGKVVNQLEPKDRNIAMVFQNYALYPHMSVAENMGYALKIAGVDRAQIAKRVGAAAQILELEALLTRKPRELSGGQRQRVAMGRAIVREPAVFLFDEPLSNLDARLRVQMRLEIQRLHARLATTSLYVTHDQIEAMTLA

SEQ ID NO: 173020 - protein, 419 aa, Unknown
  Bacterial polypetide isolated from the Sargasso Sea
VDSGRRAVRVRADVGHADRCRNHLRAVGHRLHDDECARIPANRCGGGRHSAVRGARQARRRAGQESRARVAALAPGLSTRSEIMSATTLSASFGGIAGSDLEAELAQPRTADHDADEAAGFDRAEPLHDRQRDQRVSVLPAATGASARNDARRSTDYSVELRGVGKQYGERKVLSDFDLSIERGSFVAIVGRSGCGKSTLLRLVAGLEKATSGVLEKRTEDGRPLDTRIMFQDARLLPWKSVLQNVMLGLGRSAREDARAVLAEVGLLERANDWPAQLSGGQRQRVALARALVHRPQLLLLDEPLGALDALTRIEMHALIERLWREHRFTALLVTHDVHEAVALGDRILLIEEGRIALDQPVPLARPRARASAGFAALEEHVLQRVLKTAPNDDALSQRAYDARDEGRLTRPTDVRWAV

SEQ ID NO: 173021 - protein, 200 aa, Unknown
  Bacterial polypetide isolated from the Sargasso Sea
MGKIIELKKVNKWFDKFQVLKDIDLEVAPQEKIVICGPSGSGKSTLIRCINRLEEHQKGNIIVDGTELAENTKNIEKIRAEVGMVFQQFNLFPHLSILDNCTLAPIWVKKLPKKEAEEVAMKNLTRVQIDDQALKFPGQLSGGQQQRAAIARALCMEPKIMLFDEPTSALDPEMIKEVLDVMVDLAKGGMTMIVVTHEMG

SEQ ID NO: 173022 - protein, 708 aa, Unknown
  Bacterial polypetide isolated from the Sargasso Sea
MELAAGAVPADHLRVDLRAELPAADRAAVAVRLDRARRLRARGIPAQPHAGLRARGARDGPHELADHLAPRAAEQSHAGDHVPAVPDERLDPRAHEPRFPRARRAAADPEPRRAARAGQGQPRRLVDLAVDLRRAGCDAAAADLHGRCAAQCTRHADRRFGARGGRPAMSEPVVSTQREPLLALEHLHVRFGDTVAVDDVTLAIGRGERVALVGESGSGKSVTALSILRLLRDADVSGTIRFAGQDLMAKSEREMRGLRGSDIAMIFQEPMTALNPLYTIGVQIGETIVLHDGVSAVEARKRAIALLARTGIAEPEKRVDSYPHQLSGGQRQRAMIAMALACRPRLLLADEPTTALDVTIRAQIVDLLLELQREEAEKRGMAILLITHDLNLVRHFADRVAVMEHGRLVESGPVERIFAEPEHPYTQRLLNSRPQRAVTPVMPIAPVVLDAQHVSVQFARKRPGIAGWFGSVPVTAVADVSVSVRQGETLGIVGESGSGKSTLAMALLGLQKTAGGTIEFQGRALSTYRGREQTALRSNMQVVFQDPFSSLSPRHTIERIVGEGLELHRPDMTPDARREKSLAVLREVGLDRTVLHRYPHEFSGGQRQRIAIARALVLEPRILILDEPTSALDVSIQQQVLKLLANLQQKYNLGYVFISHDLEVIGAMAHRVAVMQDGAVVESGEVADIFTRPSHPYTQKLLKAVWKA

SEQ ID NO: 173023 - protein, 232 aa, Unknown
  Bacterial polypetide isolated from the Sargasso Sea
MNNSFIQINNISKHFKEVKAVDDVSFDIKEGEFFSLLGPSGCGKTTLLRLLAGFEYPTYGNLLIDGTDITALPPDKRPTNMVFQNYAIFPHLNVEKNIQFGLRKIGLSNNEIANRVKDVLSLVKLEGYEERFSNQLSGGQRQRVALARALVRQPKVLLLDEPLGALDKKLRDEMQLELRTLQKNIGITFVFVTHDQQEAISMSDRVAVMNEGKIQQLSAPNELYKNPKNIFV

SEQ ID NO: 173024 - protein, 297 aa, Unknown
  Bacterial polypetide isolated from the Sargasso Sea
MDGIDITALPPDKRPTNMVFQNYAIFPHLNVEKNIKFGLRKLGLSHDEIGNRVKDVLKLVKLEGYEERFSNQLSGGQRQRVALARALVRQPKVLLLDEPLGALDKKLRDEMQLELRTLQKNIGITFVFVTHDQQEAISMSDRVAVMNDGKIQQLSAPNELYKNPKNIFVSDFIGETNFLKAETKSIDGGFINVSIEELGEFKIKNNLNIAANSSDVVCSVRPESMMISKVKSDWDICLDAKIRQTSYLGEMTRFYVEVKGIDKTITVSSQHFDNQSFENNECFISISLEDISLLNKK

SEQ ID NO: 173025 - protein, 351 aa, Unknown
  Bacterial polypetide isolated from the Sargasso Sea
MSSIKFSNIHKSFGQNKIINNFNLKGKEDEFLVLVGPSGCGKSTLLRMIAGLEKIDQGKIEINDKIINELHPSKRETAMVFQSYALYPHMNVYENMSFGLKIEKQSKEEIQKKVLRAAKILKIEELLDRKPKQLSGGQRQRVAIGRAITRNPKIFLFDEPLSNLDAALRAEMRVEISKLHQQIKTNMIYVTHDQVEAMTLADRIVILNQGNIEQVGTPEEIYNDPANIFVAQFIGTPKMNILEIDEKDIKSEKIIKVLGNELNINDIKLEKRKHFIGIRPEHFKINNETQFKFKPEIDIVENLGNEKIVYMKKDNHQLSAKLPSGNEINNLIGFDLKHVFIFDENGKRIKN

SEQ ID NO: 173026 - protein, 244 aa, Unknown
  Bacterial polypetide isolated from the Sargasso Sea
MSKKIIELKNVSKWFDKFQALKDVNLEVNQQEKIVICGPSGSGKSTLIRCINRLEEHQEGQIIVDGNEISENTKDIERIRAEVGMVFQQFNLFPHLSILDNCTLAPIWVKKLPKKQAEEIAMKNLERVQIADQAKKFPGQLSGGQQQRSALARALCMEPKIMLFDEPTSALDPEMIKEVLDAMVDLAKAGMTMIVVTHEMGFAKEVADNMIFMDEGRIVEKARTKDFFDNPKSDRTKLFLSQIL

SEQ ID NO: 173027 - protein, 244 aa, Unknown
  Bacterial polypetide isolated from the Sargasso Sea
MSDSIIKIESMNKWFGDFQVLKDINLEVEKNKKIVVCGPSGSGKSTLIRCINRLEEHQKGTIIVDGTELTENTKNIEAIRAEVGMVFQQFNLFPHLSILDNCTLAPIWVKKMPKKDAEELAMKQLEQVQIVDQAQKFPGQLSGGQQQRCAIARALCMEPKIMLFDEPTSALDPEMIKEVLDAMVNLAKAGMTMIVVTHEMGFAKEVADEVIFMDEGMIVEKAETKEFFANPKSDRTKLFLSQIL

SEQ ID NO: 173028 - protein, 341 aa, Unknown
  Bacterial polypetide isolated from the Sargasso Sea
MNYIQLKYVSKYWGTTKAVENLNIEIKKGEFVIFLGPSGCGKSTTLRLIAGLEEVSSGQIEIDGTNVNNTDPANRNVSMVFQSYALFPHLNVAENIIFGLKVRKVEKNERNARLVKVAEIVGLEDLLKRKPSELSGGQRQRVALARAIISDNPICLMDEPLSNLDAKLRHQMRVEIRELQKKLGITMIYVTHDQTEAMSMADKIVLMNEGHIVQQGKPKELFENPSHMFTAKFLGNPPMNIIETEHDGETHFINHNGEKIDFRQDNKKDLVFGLRPEDIKVSDKGIKCNVNFLDYQGSETIINTTLGIHEINIKTDSKKTDDLNQEIYIKWNKKDIKVFEK

SEQ ID NO: 173029 - protein, 372 aa, Unknown
  Bacterial polypetide isolated from the Sargasso Sea
MIKKNSISNEKIVDLLSIVKSFDHVKAVNNVSLGINEGEFFSLLGPSGCGKTTLLRIIAGFEKPENGDVFINGTNVNSVAPNNRPTNMVFQNYAIFPHLNVSENVGYGLRNTNLSKDQILKKIDGSLQLVGLKGYNKRASSALSGGQRQRVALARALILKPRVLLLDEPLSALDKNLREQMQFELRQLQKSVGITFILVTHDQTEALTMSDRVGVMFNGKVDQVATPEQIYNKPETKKVAAFIGSMNFFETKCLEKSIKTVTVFHKDLGNFKLLKNNIFGVENTKLTIGIRPENLKIISDNLKIQSKSFTAKIVEKSFMGDTMLYSIKLNQSENNNTYNISVSDIKNSPNPNIGDKISVTFEEDDVVAYYEE

SEQ ID NO: 173030 - protein, 211 aa, Unknown
  Bacterial polypetide isolated from the Sargasso Sea
MNKWFGNFQVLKDVNLEVEKNKKIVVCGPSGSGKSTLIRCINRLEEHQKGTIVVDGTELSEDTKNIETIRAEVGMVFQQFNLFPHLSILDNCTLAPIWVKKMPKKEAEDLAMKQLEQVQIVDQAQKFPGQLSGGQQQRCAIARALCMEPKIMLFDEPTSALDPEMIKEVLDAMVNLAKAGMTMIVVTHEMGFAKEVADEVIFMDEGMIVKK

SEQ ID NO: 173031 - protein, 613 aa, Unknown
  Bacterial polypetide isolated from the Sargasso Sea
MNKNIYSRLLKYTFKHKGLFSLSIVGFFIFAAADISAVEWLKRVISYINNSNQSELLSPISLALFLLVVSVVRGIGFYMGNFFMANVGLKVVHNLREELISSLIYQPMSFFDLASKGEIVNRIIFTTNQITGAATNALKILAKEGLLLIGLFVYLLYLSWKLTVVVLVITPLIAVVVSFAGKRMRRVARKIQEIMGLVTQVSNEIATGAREIKSFNNEDGEKDRFKRANDENLKQNLKMESTLNLSTPLIQVFVAFSLALMSYLALSNLDELNLPSESFVAFFTAAGLMARPIRQLSNLNAVIQRGLAAAEDIFNTIDSYPEDHESGIKLQQTLKGNVEIENVSFSYLEHSDPVLKEISISAKKGETIALVGRSGSGKSTIVNLLNRFYDCFEGKITIDGYDIRKINLKDLREAISYVSQDPVLFNDTIRNNITYGLKEVTEKAIYEAAKDANAYEFITNLPDGFDTIIGDDGVLLSGGEKQRVAIARALLKKSSILIFDEATSALDNESEKAIQTAIEKASKDKTTFIIAHRLSSVEKADKICVIEDGRITQMGKHSDLMKQQGLYNKLQGKGPEKIEKETPKIEKVLPEIYVEKLGFWDRVGILNILLMPN

SEQ ID NO: 173032 - protein, 299 aa, Unknown
  Bacterial polypetide isolated from the Sargasso Sea
MGVVLINIPISNIPPHKRGIGMVFQNYALFPHMTVFENLAFPLRVRKISKDDIDKKVEKALSMVSLSGFGNRMPGQLSGGQQQRVAVARALVFDPSVVLMDEPLGALDKNLRESMQYEIKHIHESIGVTVVYVTHDQGEALTMSNRIAVFNDGKVQQLSSPDKLYEEPVNSFVAEFIGENNTFAGEISDISNGSCKVKLDQGEIIANPISVKSVGEKTTVSIRPERALINPKDKMDNNQKGKIEEVIYHGDHTRVRLNLLGNSEFILKVPNSSQNLDIKLGNEINIGWNSHDARALDPK

SEQ ID NO: 173033 - protein, 222 aa, Unknown
  Bacterial polypetide isolated from the Sargasso Sea
MKTLKIEELSKNFGSTEVLRKINLEIDEGNFLVLLGPSGCGKSTLLNIIAGLETINEGNVFIDDYNVSKVEPKDRNIAMVFQSYALYPSMNVRENMIFGLKQAKTSKEKIEEQLEKVSKFLQVDQLLERKPSQLSGGQRQRVAIGRALVREPRIFLFDEPLSNLDAKLRVEMRREIKKLHQQLKTTVVYVTHDQTEAMSLGTRIAIMNHGVIQQNDTPENIY

SEQ ID NO: 173034 - protein, 358 aa, Unknown
  Bacterial polypetide isolated from the Sargasso Sea
MGKLVQVKNAFKSFGDVNAVNGVSLDIEEGQFYSLLGPSGCGKTTLLRLIAGFEKPTSGQVFIDNTSMEGIEPNLRPTNMVFQNYAIFPHLNVEENVAYGLRNKRENRTKQNKLVDEALELVGLSGLNKRSANALSGGQKQRVALARALILKPKVLLLDEPLSALDKKLREQMQSELRHLQRAVGITFILVTHDQYEALTMSDRVAVMFDGKVAQEASPRDLYELPTSQKVASFIGEMTFIEGEIIGENQKLKVQSEIFGQITVDKSRVFGQSSKRIVLGIRPEKIAIVPKTSRSKNLVSGKIIDVSYFGETTNYKVECGTTETLTISSQNSVGQLSYSVGEEIQLKADLDNIIAFSN

SEQ ID NO: 173035 - protein, 247 aa, Unknown
  Bacterial polypetide isolated from the Sargasso Sea
MAFLEFVDIDKSFGNNKVISKFNLKVEKGKFIVLLGPSGCGKSTLLRMIAGLEKIDKGKIVLESNLLNDLLPSKRQIAMVFQSYALYPHMNVFQNISFGLTAEKIEKNKIKQKVLEASKILKIEELLDRKPKELSGGQRQRVAIGRAITRNPKLFLFDEPLSNLDAALRSEMRVEISKLHKKLRSNIVYVTHDQIEAMTLADKIVIMNKGEIEQFGDPDDIYNNPRNIFVAEFIGNPKMNILKMKEK

SEQ ID NO: 173036 - protein, 275 aa, Unknown
  Bacterial polypetide isolated from the Sargasso Sea
MGSIKLNSIEKWFDELQVIKGIDLEIMDGEFVILVGPSGCGKSTLLRMIGGLEETSRGSIILDGNDVTDQPPSKRGLSMVFQSYALYPHMTVRENMGFSLKVAGTQKDVIDDKVGQAAQILKLEDFLDRRPKDLSGGQRQRVAIGRSIVRAPTAFLFDEPLSNLDASLRVEMRLELARLHQTLKTTMVYVTHDQVEAMTLADRIVVLESGKIAQIGTPKQLYEKPANLFVAQFVGSPKMNIISRRAAESAIKNDKFLEVLIKNKQAANMELGLNT

SEQ ID NO: 173037 - protein, 364 aa, Unknown
  Bacterial polypetide isolated from the Sargasso Sea
MTSSKSFVKFDKVDKSYDGKVLVVKDLNLDIDEGEFITMLGPSGSGKTTCLMMLAGFETPTNGEIYLDSKPISRIPPHKRGIGMVFQNYALFPHLTVYENLAFPLKVRKLSKDDIDKKVDKALSMVSLTGFEKRMPNQLSGGQQQRVAVARSLVFDPQLVLMDEPLGALDKNLRESMQYEIKHIHENIGVTVVYVTHDQSEALTMSSRIAVFNDGKVQQLSSPDKLYEEPVNSFVAEFIGENNTFTGQVTDISGGKCKVKLDTGAEILSNPIRVKTKGEKTKVSLRPERAIIDPEEKMDNKHKGKIEEVIYHGDHARVRLNLLGNKEFILKVPNSSARMDIKPGNEINVGWNSHDARALDPKSI

SEQ ID NO: 173038 - protein, 317 aa, Unknown
  Bacterial polypetide isolated from the Sargasso Sea
GTVSIDGRDVSGVRASDRNLSMVFQSYALYPHLTVRENIAVPLRMRQLSPSQRLPLIGSMITPAATKKEIADQIYTAADMLDIGRLLDRKPGQLSGGQRQRVALGRALVRNPAAFLLDEPLSNLDAKLRVQTRAEIAQLHRQLKATFVYVTHDQIEAMTMADRIAVMMDGEILQYDTPENVYNRPASIHVAEFIGSPKINIFPARLINPDQSAKLQIGVRPECLKQKNGEYRLKAVISHLENLGPEIQVQFTLPGIDTLFHTRVDPKSSNRLIMGSTIELGFDEVDCHLFDERGYSLSPHKTREFLRALKHSTLEDA

SEQ ID NO: 173039 - protein, 283 aa, Unknown
  Bacterial polypetide isolated from the Sargasso Sea
MSKNKEFVKFEKVDKSYDGKILVVKDLNLDISEGEFITMLGPSGSGKTTCLMMLAGFETPTNGEIYLDKNPISNIPPHKRGIGMVFQNYALFPHMTVYENLAFPLRVRKMPKDEADKKIDKALSMVSLLGFENRMPGQLSGGQQQRVAVARALVFDPSVVLMDEPLGALDKNLRESMQYEIKHIHESIGVTVVYVTHDQGEALTMSNRIAVFNDGKVQQLSSPDQLYEKPVNSFVAEFIGENNTFAGEISDISSDKCKVKVNGGEIVANPISVKSKGEKTTVS

SEQ ID NO: 173040 - protein, 364 aa, Unknown
  Bacterial polypetide isolated from the Sargasso Sea
MTSSKSFVKFDKVDKSYDGKVLVVKDLNLDINEGEFITMLGPSGSGKTTCLMMLAGFETPTNGEIYLDSKPISRIPPHKRGIGMVFQNYALFPHLTVYENLAFPFKVRKLLKDDIDKKVDKALSMVSLSGFEKRMPNQLSGGQQQRVAVARSLVFDPQLVLMDEPLGALDKNLRESMQYEIKHIHENIGVTVVYVTHDQSEALTMSSRIAVFNDGRVQQLSSPDKLYEEPVNSFVAEFIGENNTFSGQVTDISGGKCKVKLDTGAEIISNPIRVKTKGEKTKVSLRPERAIIDPEEKMDNKYKGKIEEVIYHGDHARVRLNLLGNKEFILKVPNSSARMDIKPGNDIKVGWNSHDARALDPKSI

SEQ ID NO: 173041 - protein, 311 aa, Unknown
  Bacterial polypetide isolated from the Sargasso Sea
DPSEGSVLIDNKDMFGIGPNKRPTSLIFQNLALFPLMSVSENIAFSLEVRGVSKKDRQKRADELLELIALEGQSEKKVHQLSGGQKQRVAIARALAVEPKVLLLDEPLSALDLKLRQRMRTELREIQKRVNITFIYITHDQGEALTMSDRIAVMNEGEIEQIGPCDEVYNNPLTPFVATFVGENNPLFGKVKEINQNKVKIETPDGDFLSTMNENKKLNIGDEAIAFVRPESLFIPRDGDNFDNQIEVNIESFEFEGNIKNFYATLKSGTRIKFSIPNAIDTSSISSGTKLQLGFESIKSSILPKAQLAID

SEQ ID NO: 173042 - protein, 244 aa, Unknown
  Bacterial polypetide isolated from the Sargasso Sea
MSDPIIKIQNMNKWFGDFQVLKNINLEVEANKKIVVCGPSGSGKSTLIRCINRLEEHQEGDIIVDGNELSEKTKDIEKIRAEVGMVFQQFNLFPHLSILDNCTLAPIWVKKMPKKEAQELALDQLKKVQIDDQANKFPGQLSGGQQQRCAIARALCMQPKIMLFDEPTSALDPEMIKEVLDAMVSLAKGGMTMIVVTHEMGFAKEVADEVIFMDEGMIIEKAETKEFFANPKSDRTKLFLSQIL

SEQ ID NO: 173043 - protein, 249 aa, Unknown
  Bacterial polypetide isolated from the Sargasso Sea
KQTKETIDKRVDELLKLVGLSDHINKFSAQLSGGEQQRVALARALAPSPGLLLLDEPLSALDAKVRQHLRLEIKNLQRQLGVTTIMVTHDQEEALTMADRIILMNNGVIEQEGSPQDLYSKPKTAFSANFIGTTNLFKAKKISDNSLEINGSTLECNENIQDELFTVTIRPEDIKISQSNNEKNILKGTIKELEFLGSIIRGHIEVNFKSEKANVICNFASEYILNNNIQNNSSVSISLQPHALKVVKA

SEQ ID NO: 173044 - protein, 224 aa, Unknown
  Bacterial polypetide isolated from the Sargasso Sea
SKDINLDVEKNKKIVVCGPSGSGKSTLIRCINRLEEHQKGTIIVDGVELSENTKNIEQVRAEVGMVFQQFNLFPHLSILDNCTLAPIWVKKLPKKDAEELALKQLKQVQIEDQANKFPGQLSGGQQQRCAIARALCMEPKIMLFDEPTSALDPEMIKEVLDAMVNLATAGMTMIVVTHEMGFAKEVADEVIFMDEGMIVEKAETKEFFANPKSDRTKLFLSQIL

SEQ ID NO: 173045 - protein, 166 aa, Unknown
  Bacterial polypetide isolated from the Sargasso Sea
MSNKPADRTSNDTAIQLIDVNKWFGEFHVLKDINLTVERGERIVICGPSGSGKSTMIRCINRLEEHQRGRIVVDGTELTNDLKDIEIIRREVGMVFQHFNLFPHLTVLENLVLAPMWVRKISREEAEKTGMMYLERVKIPEQAQKFPGQLSGGQQQRVAIARSLCM

SEQ ID NO: 173046 - protein, 271 aa, Unknown
  Bacterial polypetide isolated from the Sargasso Sea
MNNSFIQINNISKHFADVKAVDDVSFEIKEGEFFSLLGPSGCGKTTLLRLLAGFEYPTSGNLLIDGIDITALPPDKRPTNMVFQNYAIFPHLNVEKNIQFGLRKLGLINDEIDKRVKGVLSLVKLEGYEERFSNQLSGGQRQRVALARALVRQPKVLLLDEPLGALDKKLRDEMQLELRALQKNIGITFVFVTHDQQEAISMSDRVAVMNDGKIQQLSAPNELYKNPKNIFVSDFIGETNFLKAETKLNDGEFINVSIEGLGEFKIKNNLN

SEQ ID NO: 173047 - protein, 365 aa, Unknown
  Bacterial polypetide isolated from the Sargasso Sea
MDNIQSITHTKKLTLNNINKSFGDNHVVKDLSLKVDKGEFVVLLGPSGCGKTTALRMIAGLESVDSGEIEIGDSVVTNKLPKFRNISMVFQSYALYPHKTVSENIAFPLKVRGISGDARDRAILDAAKQVHMEDLLDRYPRQLSGGQRQRVALARAIVRQPDIFLMDEPLSNLDAKLRVHMRTELKRMQHEMGITTVYVTHDQVEAMTLANRVAIMNDGVLQQIAPPKEIYGNPKNVFVAGFMGSPAMNFIDGTIENNEMNILGRKFGLNENLENHNALLGIRPEHASITEKDKGHFNAKVFTTEQAGDHTLVNLNVGEQSMVVKMSSDFEADFDKEVGITFSLEDSYLFQKNNGERIEVRLVDK

SEQ ID NO: 173048 - protein, 227 aa, Unknown
  Bacterial polypetide isolated from the Sargasso Sea
MSEIALRLQDVHVTYGNSQQSVLSGFSMSVHKGEIACLLGASGCGKTTVLRAVAGFERLQNGEIYVSQRRVAGPGIHLPPEKRHVGMVFQEYALFPHLTAQQNVAFGLRRMPREEQQARVTELLKMVELHSHANRYPHELSGGQQQRIALARALAPHPEILLLDEPFSSLDKRTRERLGNEVRDILRAAGQTALLVTHSEHEAQLMADHIGVVKMGQYQIKKATHPT

SEQ ID NO: 173049 - protein, 335 aa, Unknown
  Bacterial polypetide isolated from the Sargasso Sea
MFHLEVNQLHKSYGDTRVFEGIEFGIRKGELVTLLGPSGCGKSTLLRALAGLTPVDGGQVRVAGEDITWQEPQKRGIGMVFQSYALFPNMTVRDNVAFGLKMKPQPGRDLAVSVLEALELVELTGFERRYPAELSGGQRQRVALARALVVQPRILLLDEPLSALDARIRRSLRQQIREIQQRLELTTIFVTHDQEEALTMSDRIFLMNKGSIVQSGTPEEIYTHPASEFVASFIGNYNLLDGEQASSLFGPRFQGKLALRPESLSLLPAGARSDEPHLPGVISGQQLLGNVIRYQVSCAAGLLTVDCLNRCAGDLLPVGSAVTLVVARDQLCEVA

SEQ ID NO: 173050 - protein, 135 aa, Unknown
  Bacterial polypetide isolated from the Sargasso Sea
KGLSRSESNEIAMSLLERVGIPEQSDKFPSQLSGGQQQRVAIARALAMQPKIMLFDEPTSALDPEMIKEVLEVMTELAESGMTMIVVTHEMGFAKNVADRFLFFDEGLIVEEGTPKHFFENPKEERTKLFLSQIL

SEQ ID NO: 173051 - protein, 190 aa, Unknown
  Bacterial polypetide isolated from the Sargasso Sea
MSSVTLINIFKNYGQTKALHDINLEIKSGELFTLLGPSGCGKTTLLRTIAGFHKQDSGSIKIDGKIIDHLPAYRRDTGMVFQDYAIFPHMTVGDNVSFGLKNKNVSAKETKELVTEALATVRLLGLEKRMPNELSGGQQQRVGLARAMVIKPKVLLMDEPLSNLDAKLRIELREDIREIQKKLKITTIYV

SEQ ID NO: 173052 - protein, 361 aa, Unknown
  Bacterial polypetide isolated from the Sargasso Sea
MSKKEDFVKFDKVDKSYDGKVLVVKDLNLDIKEGEFVTMLGPSGSGKTTCLMMLAGFETPTNGEIYLDNNPISNIPPHKRGIGMVFQNYALFPHMTVFENLAFPLRVRKISKEDIEKKVDKALAMVSLSEFGNRMPGQLSGGQQQRVAVARALVFDPSVVLMDEPLGALDKNLRESMQYEIKHIHESIGVTVVYVTHDQGEALTMSNRIAVFNDGKVQQLSSPDKLYEEPVNSFVAEFIGENNTFAGEISNISNGSCKVKLDKGEIIANPISVKSVGEKTTVSIRPERALINPKDKMDNNQKGKIEEVIYHGDHTRVRLNLLGNSEFILKVPNSSQNLDIKLGNEINIGWNSRDARALDPK

SEQ ID NO: 173053 - protein, 245 aa, Unknown
  Bacterial polypetide isolated from the Sargasso Sea
MATLKVCNLTKNFGNTQVLKQINLEVIDGEFVVLLGPSGCGKSTLLNMIAGLESVDEGDILIDEYLVNRVEPKDRNIAMVFQSYALYPAMTVRENVIFGLKQRKISKDQIEKSLNHFSQMLQIDQLLDRKPAQLSGGQRQRVAMGRALVREPHIFLFDEPLSNLDAKLRVEMRHEINKLHERLGTTMIYVTHDQVEAMSLATRIAVMNEGIIQQIGTPQEIYDKPNSVFVADFIGSPAINLIHGR

SEQ ID NO: 173054 - protein, 359 aa, Unknown
  Bacterial polypetide isolated from the Sargasso Sea
MYEAQQPYLRIDDLTKHFGEFVAVRELSLEINGGEFVCFLGPSGCGKTTLLRAIAGLDPQTTGRITQNGQDISSLPPSERDFGIVFQSYALFPNLTVFQNIAYGLENQRVPKPKIRKQVVELLELVGLPEQTSKYPAQLSGGQQQRVALARALATSPGLLLLDEPLSALDARVRASLRQEIRALHQRLGITTILVTHDQEEALSMADRIVVMDHGSIEQVGTPEEIYSTPASPFVADFIGVMNFMEAEVVASGTIRVGETSLSCDTTNVSSGEKVRMTVRPEDLRCHIKTVDLPNGLPVHVDTLEFLGSFCRLKLKGPEGFNTLRADLSLQQVHQLNAAPDVPLTVELPPDSLRLFPDI

SEQ ID NO: 173055 - protein, 258 aa, Unknown
  Bacterial polypetide isolated from the Sargasso Sea
MASIIIDKVNKYFGSTHVIKDVSLDIKSESFTVLVGPSGCGKSTILRMIAGLEEINSGTISIDDKVVNDLPPKERNIAMVFQSYALYPHMTVFDNMAFGLKIEKKSKEEIEQRVMEAAKILQIEEYLERKPKQLSGGQRQRVAIGRAITRKPKVFLFDEPLSNLDAALRVQMRVELAKLHDQLNATMIYVTHDQTEAMTLANDIVVLDQGIVSQKGSPMNLYNNPDNLFVGGFIGSPKMNFIDSIILSKSLKSSEVDI

SEQ ID NO: 173056 - protein, 244 aa, Unknown
  Bacterial polypetide isolated from the Sargasso Sea
MSDPIIKIEGMNKWFGDFQVLKNIDLEVEKNKKIVVCGPSGSGKSTLIRCINRLEEHQKGTIVVDGTELTENTKNIEAIRAEVGMVFQQFNLFPHLSILDNCTLAPIWVKKMPKKQAEELAMKQLEQVQIADQAQKFPGQLSGGQQQRCAIARALCMEPKIMLFDEPTSALDPEMIKEVLDAMVNLAKAGMTMIVVTHEMGFAKEVADEVIFMDEGMIVEKAETKEFFANPKSDRTKLFLSQIL

SEQ ID NO: 173057 - protein, 323 aa, Unknown
  Bacterial polypetide isolated from the Sargasso Sea
GCGKSTLLRMVAGLESISEGTISIAGKVVNQLEPKDRNIAMVFQNYALYPHMSVAENMGYALKIAGVDRAQIAKRVGAAAQILELEALLTRKPRELSGGQRQRVAMGRAIVREPAVFLFDEPLSNLDARLRVQMRLEIQRLHARLATTSLYVTHDQIEAMTLAQRVIVMNKGHAEQIGAPTEVYERPATVFVASFIGSPGMNLLEGRVSDDGSTFEVAGNGPKLPLQGVASIGQEVARGREWTLGIRPEHMTPGQADAAHATLTVDSCELLGADNLAHGRWGKHDVTVRLPHTHRPAAGEALQVALPARHLHFFDPSTGRRAN

SEQ ID NO: 173058 - protein, 316 aa, Unknown
  Bacterial polypetide isolated from the Sargasso Sea
IAGLETINEGDVFIDDYNVSKVEPKDRNIAMVFQSYALYPSMNVRENMIFGLKQAKTSKEKIEEQLEKVSKFLQVDQLLERKPSQLSGGQRQRVAIGRALVREPRIFLFDEPLSNLDAKLRVEMRREIKKLHQQLKTTVVYVTHDQTEAMSLGTNIAIMNHGVIQQNDTPENIYNKPSNTFVADFIGSPSMNLIKGNLKENSGDIFFTANGSNLEVPIKDYEFKDKSNLNNKEVFFGIRPEHIFFKKFNETDFEITLRPDLSEYIGHEQIMTFDYANQEVLAKFPSTIKIDLGKETKLYFDLTQASLFDAKTEERI

SEQ ID NO: 173059 - protein, 244 aa, Unknown
  Bacterial polypetide isolated from the Sargasso Sea
QMTQYARRKPHQLSGGQRQRVALARSLAKRPKLLLLDEPMGALDKKLRSQMQLELVEIIERVGVTCVMVTHDQEEAMTMAERIAIMHLGCIEQIGSPMDIYETPASRLVCEFIGNVNLFDGLLVEDEQDHATIACADLEQPIYVGHGISSRAENKKVTYALRPEKLLMSLQKPVEIEHPDFNWTKGEVYDIAYLGGHSVYHIQLPSGKIVQAFIANAERHGKRPTWDDQVFLYWEDDSGVVLQS

SEQ ID NO: 173060 - protein, 199 aa, Unknown
  Bacterial polypetide isolated from the Sargasso Sea
MSSSKSFVKFDKVDKSYDGKVLVVKDLNLDIDEGEFITMLGPSGSGKTTCLMMLAGFETPTNGEIYLDSKPISRIPPHKRGIGMVFQNYALFPHLTVYENLAFPLKVRKLPKDDIDKKVDKALSMVSLSGFEKRMPNQLSGGQQQRVAVARSLVFDPPLVLMDEPLGALDKNLRESMQYENKHIHENIGVTVVYVTHDQ

SEQ ID NO: 173061 - protein, 353 aa, Unknown
  Bacterial polypetide isolated from the Sargasso Sea
MAEVILKEVKKNFGKSTVINDVSIKIKEGDFCVIVGPSGCGKSTLLRIIAGLEIPTSGSIIINSKDVTAIDPANRGIGMVFQNYALYPHMTVEDNMSFGLRMNNAPKTTIKKKVGEAAKILKLTELMTRKPASLSGGQRQRVAIGRAIVKGSNVFLFDEPLSNLDAELRVEMRIELTRLHKELGATIIYVTHDQTEAMTMADKIVVLRNGCVEQIGDPLELYSNPDNKFVAGFLGSPSMNFLEAKFDGKDLKVPSLENIKIKKFPSLSKENPKVIIGVRPQDVLLKKSTKGKKIEFVENLGNLSIYHTRLDKNHYLLSESNNKENLPPGETIQVTLNENSLYFFDRNSGLRIR

SEQ ID NO: 173062 - protein, 181 aa, Unknown
  Bacterial polypetide isolated from the Sargasso Sea
MSDPIIKIQNMNKWFGDFQVLKNINLEVEANKKIVVCGPSGSGKSTLIRCINRLEEHQEGDIIVDGNELSEKTKDIEKIRAEVGMVFQQFNLFPHLSILDNCTLAPIWVKKMPKKEAQELALDQLKKVQIDDQANKFPGQLSGGQQQRCAIARALCMQPKIMLFDEPTSALDPEMIKEVLD

SEQ ID NO: 173063 - protein, 250 aa, Unknown
  Bacterial polypetide isolated from the Sargasso Sea
MEVRDLHKYFGTHEVLKGIDMTAHKGDVISLIGSSGSGKSTFLRCINLLETPSSGTVSLHGELIRMKTNRAGERLPEDVRQVERIRSRLAMVFQSFNLWSHMTIMQNIIEVPIQVLKVPRAEAMAKAEHLLNRVGLWERRDYYPGHLSGGQQQRAAIARALAVEPEVMLFDEPTSALDPELVGEVLGLMRELAEEGRTMLVVTHEMSFARDVSNKVMFLHQGRVEEEGNPKEIFAHPKSERFKQFISSIY

SEQ ID NO: 173064 - protein, 244 aa, Unknown
  Bacterial polypetide isolated from the Sargasso Sea
MSDPIIKINNMNKWFGDFQVLKDINLDVEKNKKIVVCGPSGSGKSTLIRCINRLEEHQKGTIIVDGTELTEETKNIEQIRAEVGMVFQQFNLFPHLSILDNCTLAPIWVKKMPKKEAEDLALKQLKQVQIDDQAHKYPGQLSGGQQQRCAIARALCMEPKIMLFDEPTSALDPEMIKEVLDAMVSLAKAGMTMIVVTHEMGFAKEVADEVIFMDEGMIVEKANTKEFFANPKSDRTKLFLSQIL

SEQ ID NO: 173065 - protein, 270 aa, Unknown
  Bacterial polypetide isolated from the Sargasso Sea
MASIKIDKVNKFFGNTHVIKDVSLDIKSESFTVLVGPSGCGKSTILRMIAGLEEINSGTISIDNKVVNDLPPKERNIAMVFQSYALYPHMTVFDNMAFGLKIEKKSKEEIEQRVMEAAKILQIEEYLERKPKQLSGGQRQRVAIGRAITRKPKVFLFDEPLSNLDAALRVQMRVELAKLHDQLNATMIYVTHDQTEAMTLANDIVVLDQGIVSQKGSPMNLYNNPDNLFVGGFIGSPKMNFIDSKILSKSSKSSEVDIMGDWKVKCTKNF

SEQ ID NO: 173066 - protein, 250 aa, Unknown
  Bacterial polypetide isolated from the Sargasso Sea
YALFPHLNVEKNIAFGLSTKDINNGRLEEVLEMCNLKKYRNKFPQDISGGQQQRVALARALAPKPDVVLLDEPFTSLDAHMARELRDEVVHLLRETETTAILVTHDQEEALSVCDIVSVLEDGKVMQSATPQEIYLNPVSQNVANSVGDPNIIKGFSKNGRVETALGTFVSAYEGALDVSIRPECIELSLDSKGAYVVKECIFYGHDQVVSFENSAGQIFRSRSLPSTIFESGDKISIEISEVTTFPSNT

SEQ ID NO: 173067 - protein, 242 aa, Unknown
  Bacterial polypetide isolated from the Sargasso Sea
MSIIKTVDVKKWFGDFQALKGISMEVAEGEVLVICGPSGSGKSTFIRCINRLEQHQEGEIVVDGIELTNDLKNIEAIRSEVGMVFQSFNLFPHLTVMQNITLAPIWVRKKSRSESEEKAMELLERVGIPEQAQKFPGQLSGGQQQRVAIARALAMEPKIMLFDEPTSALDPEMIKEVLDAMKELAESGMTMIVVTHEMGFAKEVADRVMLFDEGLMVEENTPNEFFDNPKNDRTKLFLSQIL

SEQ ID NO: 173068 - protein, 254 aa, Unknown
  Bacterial polypetide isolated from the Sargasso Sea
MNNIITFDKVSKSFGELKVLDQLNLEVKDGEKLALIGPSGSGKTTILRILMTLETIDSGFVSVNNEYLWHEKINDKVVPATDKHLQKMRDQIGMVFQQFNLFPHLTAIENVKQPQILVKKKNESEAKEKAEDLFNMIGLSDKIDHYPHQLSGGQQQRVAIARALAMDPKIMLFDEVTSALDPELVDEVLAVLRKLAADSDTTMLTVTHEMNFAQDFADRVLFFDAGQIVESGSPKDLFSNPREERTKSFLRKFI

SEQ ID NO: 173069 - protein, 352 aa, Unknown
  Bacterial polypetide isolated from the Sargasso Sea
MAQVELKNVNKSFGQTKVIKDVHLSIEKGEFVVFVGPSGCGKSTLLRLIAGLENLSNGEIIIADRPVMDLPPSERGIAMVFQSYALYPHMSVFQNMAFSLSLQKFSKAEIRTRVEAAAKILQMEHLLDRRPAALSGGQRQRVAIGRAIVRNPDVFLFDEPLSNLDAALRHETRVEIAKLHKQLDATTIYVTHDQVEAMTLADKIVVLRDGEVMQVGSPMDLFNSPDNEFVAGFLGSPQMNFFDGSLAKVTKNGSSGSFKGQGFEAGDIRLTSQQKKNNDPVRLGIRPQHLQINEKGNLAGQVTLVERLGTETVVELITENGTPFRYAAAETPDIAIGDNLKFEFETRRAHLF

SEQ ID NO: 173070 - protein, 242 aa, Unknown
  Bacterial polypetide isolated from the Sargasso Sea
MVKANKSKNNVKNLKTVSINNLSHFYGKNENKKQVLNAVNLNIDKGELVLLKGPSGCGKTTLLTLIGALRTCQSGDLTVLNNQLNGASRKTRQILRRSIGMIFQGHNLLRCLTAEQNVQMGADLIKGLTYLQRREIARNWLSAVGLEEHHKKLPNDLSGGQKQRVAIARALSANPKLLLADEPTSALDSVTGREIVTLLRKLAKEQNCSVLMVTHDPRISDMADRILNMEDGKIYSAHSELI

SEQ ID NO: 173071 - protein, 357 aa, Unknown
  Bacterial polypetide isolated from the Sargasso Sea
MQNNNTYLEVKDLSKSFGNFEAIKNIDINIQEGEFVCFLGPSGCGKTTLLRCIAGLETQSTGSVIQKNINISNEPPSNRDFGIVFQSYALFPNLSVFSNISYGLINNKWKKADIKKRVDELLSLVNLTEHALKYPSQLSGGEQQRVALARALATSPGLLLLDEPLSALDAKVRVFLRKQIRDLQRKLGVTTIMVTHDQEEAQTMADRIFVMKDGEIIQSGTPSEIYTKANSPFIASFIGSMNFIPAIINSSNKVKCNQIEINCDIGNFKANDSVQLAIRPEDIQFKQGNQDDNMVPGRIKEVEFLGSFQRVYFEVRNFTDELIIVDVPSSTARKIELDLNKELNLYFSKEDARIYST

SEQ ID NO: 173072 - protein, 353 aa, Unknown
  Bacterial polypetide isolated from the Sargasso Sea
MEKYLSVKNVNKYFGDFQALKNVNFDVKEGEFVCILGPSGCGKTTLLRVIAGLESQSEGLINQNNKDISLLPPDQRDFGIVFQSYALFPNLSVKNNISFGLKTRKQNKETIDKRVDELLKLVGLSDHINKFSAQLSGGEQQRVALARALAPSPGLLLLDEPLSALDAKVRQHLRLEIKNLQRQLGVTTIMVTHDQEEALTMADRIILMNNGIIEQEGSPQDLYSKPKTAFSANFIGTTNLFKAKRVADNSLEINGSTLECNENIKDDLLTVTIRPEDIKISQNNNEKNILTGTIKELEFLGSNIRGHIEVNFKSEKVNVICNFASEYILNNNIQNNSTVSISLQPHALKVVKA

SEQ ID NO: 173073 - protein, 167 aa, Unknown
  Bacterial polypetide isolated from the Sargasso Sea
MDVAYGKKQIVFGFNFKLEECQIGCFLGPSGCGKTTVLRSIAGFEQPSKGEIILNGKKLNGFKTYITPEKRNIGMVFQDISLFPHLSVEENIQFGMRSWSREKRKKRSQELLELIGMSRFGKKYPHQLSGGQQQRIALARAMAPKPSLLLMDEPFSSLDAELKEQLA

SEQ ID NO: 173074 - protein, 246 aa, Unknown
  Bacterial polypetide isolated from the Sargasso Sea
MTEQVIQLEKVNKWYDDFHVLKDIDLSVDKGQKIVICGPSGSGKSTMIRCINRLEAHQEGKIVVHGTELTNDLKNIDLIRKNVGMVFQQFNLFPHLSVLDNISLAPIWVKKMPKKEAEEIAMSYLEKVKIPEQAEKFPGQLSGGQQQRVAIARSLAMNPDIMLFDEPTSALDPEMIKEVLDVMIQLAEEGMTMLVVTHEMGFAKTVADQMIFMDEGRIVEQASPDEFFNNPKSDRTKLFLSQILNH

SEQ ID NO: 173075 - protein, 244 aa, Unknown
  Bacterial polypetide isolated from the Sargasso Sea
MSEAIIQIKDVNKWFGDFQVLSGINLEVMPKEKIVVCGPSGSGKSTLIRCINRLEEHQEGNIIVDGTEISEDTKNIEQVRAEVGMVFQQFNLFPHLSILDNCTLAPIWVKKLPKKEAEELALKHLERVQILDQAQKFPGQLSGGQQQRVAIARALCMEPKIMLFDEPTSALDPEMIKEVLDVMVNLANQGMTMIVVTHEMGFAKEVADSMIFMDEGKIVEKADTKEFFANPKSERTKLFLSQIL

SEQ ID NO: 173076 - protein, 320 aa, Unknown
  Bacterial polypetide isolated from the Sargasso Sea
MNSKKSDFVKFEQVDKSYDGKELVVKGLDLDIAEGEFLTLLGPSGSGKTTTLMMLAGFETPTNGEIYFDGRPINNIPPHKRGIGMVFQNYALFPHLSVYENLAFPLKVRKVDKSEIEERINKTLKMVSLTGFENRMPAQLSGGQQQRVAVARALVFDPKLVLMDEPLGALDKNLRESMQYELKHIHESLGVTVVYVTHDQGEALTMSNRIAVFNDGKVQQLSGPNELYETPVNSFVASFIGENNTFTGTVKEIASGSAKIETDSGETIVANPIAVSSSGEKSRISLRPERVSIDPNEQLENKFTSEIREIFIMKIILGCV

SEQ ID NO: 173077 - protein, 271 aa, Unknown
  Bacterial polypetide isolated from the Sargasso Sea
MLCQDTVYIWKKSLKQVLTWEQINMSEDSIISLKNVNKWFGEFHVLKDVDLEVKKKERIVVCGPSGSGKSTMIRCINRLEEHQEGTIIVDGIELTGNLKNIDSVRKEVGMVFQQFNLFPHLSVKENITLAPIWVKKMPKAEAEELAMQQLEIVKIPEQADKYPGQLSGGQQQRVAIARSLAMKPNIMLFDEPTSALDPEMIKEVLDVMIDLAEGGMTMIVVTHEMGFAKTVADRMVFMDEGRIVEQAVPDKFFNNPESDRTKLFLSQILNH

SEQ ID NO: 173078 - protein, 251 aa, Unknown
  Bacterial polypetide isolated from the Sargasso Sea
MSAKNYIKIKNLSKSFGDVKVLKNINLEVEEGEFFSLLGPSGCGKTTLLRILAGFEYPSEGEVFFDDSNVTSLTPNLRPSNMVFQNYAIFPHINVQRNIEFGLRKENLSKDEMRERVENALKMVQLEGYENRYSNQLSGGQRQRIALARALVKQPKVLLLDEPLGALDKKLREEMQIELRNLQKSLGITFIFVTHDQEEAMTMSDRIAVMDEGNILQVSPPREIYHNPKNKFVSQFIGNINILDAALKTVS

SEQ ID NO: 173079 - protein, 338 aa, Unknown
  Bacterial polypetide isolated from the Sargasso Sea
MAEVKLNNVSKRWGSFVGVDNFNITIPDKEFLVLLGPSGCGKTTTMRMIAGLEDPTEGNVVIDGNVVNDVEPKDRDVAMVFQSYALYPNMNVYENIRFPLKVRGTPSESHDAKVKRASSMVELDDFLHRKPSELSGGQRQRVALARAIVREPNVFLMDEPLSNLDAKLRISTRAQIKNLSHELAVTTIYVTHDQVEAMTLADRVVVMNHGVVQQVGTPTEIYNSPLNTFVAGFIGSPAMNLLEGTISNGCFEAQNTKISGLKIEDGPVTLGFRAEDAEISKRKSEIGSTVYAMELLGDATMVTVKIKDKLVSVKADKNFRAEIGDEISFSIPAQICHL

SEQ ID NO: 173080 - protein, 352 aa, Unknown
  Bacterial polypetide isolated from the Sargasso Sea
MSELRIRGLQKSFDGHAVLHGIDLSVERGTLLALLGPSGSGKTTLLRLLCGFERADGGSVEIDGRRVVGDNLHVPSEQRRIGYVPQEGALFPHLSVADNIVFGLPRTQRRARHRVAELLELVGLPANFAERAPQQLSGGQQQRVALARALAPSPTLVMLDEPFSSLDAALRLETRQAVASALAAAGATAVLVTHDQSEALSLGHEVAVLWNGRLIQTATPETLYRRPVTRELASFVGEAVLLPGTVRQDRVNCELGDLPLCEPMGNGAVDVMVRPEQIRLLRAEETMPDGAPSYAAVVREVIFQGQDAGVALQLQSGAQTMVRARVPGYLSPQPGENVRLAVDGAVTAYPRA

SEQ ID NO: 173081 - protein, 289 aa, Unknown
  Bacterial polypetide isolated from the Sargasso Sea
MNAIADMPSSASTAAFDTPPGAPLIEVRGLKKRFGEVEVLRGVDLEIARSEVVCIIGPSGSGKSTLLRCLAALETYDQGDVRIEGELLGYSERNGKRVRASQNEINRVRRNVGMVFQQFNLWPHMTALGNVMEALLRVRHLSHDEARRRANAMLETVGLAHKGDAYPAKLSGGQQQRVAIARALAMEPHIMLFDEPTSALDPELVGEVLQVMKQLARDGMTMAVVTHEMGFAAQVADKVMFIDQGRIAVQGKPREVFHDAGQPRLRQFLQNYFDRNAFWTRGPDDVEPQ

SEQ ID NO: 173082 - protein, 206 aa, Unknown
  Bacterial polypetide isolated from the Sargasso Sea
MSDSIIQIKNVNKWFGDFQVLKDINLEVKPKEKIVVCGPSGSGKSTLIRCINRLEEHQQGDIIVDGNILTEDTKNIEQIRAEVGMVFQQFNLFPHLSIVDNCTLAPIWVKKMPKKEAEELALKHLERVQILDQAHKFPGQLSGGQQQRVAIARALCMEPKIMLFDEPTSALDPEMIKEVLDVMVDLANQGMTMIVVTHEMGFAKEV

SEQ ID NO: 173083 - protein, 349 aa, Unknown
  Bacterial polypetide isolated from the Sargasso Sea
MSYLQLKNLTASYDKEIVLNNLSLDIKKGELLSLLGSSGCGKTTTLRIVSGFLKPISGSVILDDTDISLKPPNERGFGYVFQSYALFPHLTVEDNVGFGLKQRKVRSDQIKVKVDEMLDLVDLSDFRSRRPKELSGGQKQRVALARAMAIDPGLLLLDEPLSNLDAALRIKMRIEIKRIQQEHAMTAIYVTHDQEECFSISDRVAIMNDGLIEQLAKPEEIYSSPKTQFVAKFVGFENFFKGEIKDSSGKYHFISEKGGYETPILDQTIIQRKTAIAAFRPNGFEILSSDQKDQSLIPGLIRVQTYLGKGYRYLIDTELGELVVDHTENKFSINTQVFLKPLPEMMVLL

SEQ ID NO: 173084 - protein, 360 aa, Unknown
  Bacterial polypetide isolated from the Sargasso Sea
MKQSIKNAIEVQNVTKVYGVGENSVTALKDANLTINDNEFFTLLGPSGCGKTTLLRLIAGFEDITKGDLKLFGKEIVNLPPNKRPINTVFQHYALFPHLNVFENVAFGLRRLGKNRSEIEQKTNYVLKLVQMEEFSKRRPNQLSGGQQQRVALARALAPEPKVLLLDEPLSALDLKLRQAMRIELKTLQRETGITFVFVTHDQEEALTMSDRIAVISEGEIQQIGEPNSIYENPANQFVANFIGEANLLKGLCKKIGKNGLCKLNSGHEISLEIPSLIKVNDPITIFIRPERIKINKPSSSKIKSFISQFTYLGNAAHLEVESNNQKINITLPIDKVKNFKKADEVTLEFPKNHARVINQ

SEQ ID NO: 173085 - protein, 359 aa, Unknown
  Bacterial polypetide isolated from the Sargasso Sea
MKLSKTNAIEVQNVTKIYGSGENSVKALDNANLIIYDNEFFTLLGPSGCGKTTLLRLIAGFEDITNGRINLFNEELISLPPNKRPVNTVFQQYALFPHLNVFENVAFGLRRLDKDNDFVIKRSNEVLELVQMQDYALRRPNQLSGGQQQRIALARALAPEPKVLLLDEPLSALDLKLRQAMRVELKTLQKETGITFVFVTHDQEEALTMSDRIAVINQGSIQQIGNPEEIYEKPSNQFVANFIGEANLILGKCEKTGINGICKLQTGHKISINIPDKFNKGDNLTIFIRPERIKINKSKVSSLSQIQEFTYLGNAAHIELLSNGVSVNATLPIDKVKNFKKGDKIEIEFPKSFAQIINT

SEQ ID NO: 173086 - protein, 370 aa, Unknown
  Bacterial polypetide isolated from the Sargasso Sea
MSAEVELQNVSIAFGNFYAAKNVNVKIGAGEFFSFLGPSGCGKTTLLRAVSGFLEPSQGKVLIDGQDMSGIGPNKRPTSLIFQNLALFPLMSVADNIAFSLEVRGHDKTSRRKRADELLDLVALNGQGDKKVHELSGGQKQRVAIARALAVEPKVLLLDEPLSALDLKLRQKMRTELRAIQQRVGITFIYITHDQGEALTMSDRVGVMNDGELEQVGTCYDVYEAPCTPFVATFVGENNAFFGKVEKVEGGNVKVQTGGSSFIGQAGLGLDNKNYKFKAGDEVIMFVRPEAISLKGNSKKAQNSFSAEVKTIEFEGNLKNIFLRSAEDVDIRFSVPSSSDTSGMEPSKNVSLSFSQDNAVVLPTGALALD

SEQ ID NO: 173087 - protein, 243 aa, Unknown
  Bacterial polypetide isolated from the Sargasso Sea
MSEISLKNLKKSFGSTQVIHDLSIDVKDGELIVIVGPSGCGKSTLLRMVAGLEDANQGDITIDGKKVNELEPMERNIAMVFQNYALYPHMSVFDNMAYGLKIAKVSKEEINSRVQKAAEILELHELLKRKPNQLSGGQRQRVAMGRAIVRNPVAFLFDEPLSNLDAKLRVQMRLEIKKLQTQLKTTSLYVTHDQVEAMTLADRMIVMNEGNVEHIGTPLEVYTKPKTLFTAHFIGSPAMNILN

SEQ ID NO: 173088 - protein, 225 aa, Unknown
  Bacterial polypetide isolated from the Sargasso Sea
MSDPIIKIENMNKWFGDFQVLKNIDLSVEKNKKIVVCGPSGSGKSTLIRCINRLEEHQEGTITVDGTELSENTKNIEAIRAEVGMVFQQFNLFPHLSILDNCTLAPIWVKKMPKAKAEELALEHLNRVQISDQAQKFPGQLSGGQQQRAAIARALCMEPKIMLFDEPTSALDPEMIKEVLDAMVNLAKAGMTMIVVTHEMGFAKEVADEVIFMDEGMMLKKLRLK

SEQ ID NO: 173089 - protein, 563 aa, Unknown
  Bacterial polypetide isolated from the Sargasso Sea
MNDTLLDVNNLSVEFKSKKDSFTAVDDISFSIEKGKTLSLVGESGSGKSVTALSILQLLPNGSSSHNINSSIKFEGKEIIGSSKGFITSLRGNRISMIFQEPMTSLNPYQRVGDQIDETLKIHKGFNSDDHSGIKNIPAFFEKIFFSFSHRKLFRYLKVKKDVREKTIELLEKVKIPEPRKKVNSYPHQLSGGQRQRVMIAMALANEPDLLIADEPTTALDVTVEKTLLELLRDLQKEFNMSILFITHDLNIVQKFSDDVCVMKEGEIIEAGSVNEIFANPSHAYTKKLLDSIPGKKELLNQEEKILLDAEQIDINYVVARNLFGKPKEFLNAVKKVDIKIYKGSTTGLVGESGSGKSSLARALLGIEVADGFIEFDGEDIKSLNSMSMRGFKKDFQIVFQDPFGSLSPRMTVGEIVGEGLKVHEPQLSNEDRLAKIIGALNDVELDETSYSRFPHELSGGQRQRVAIARAIILRPKLILLDEPTSALDVSIQMQILYLLKDLQSKLGLAYLCISHDLRVIRFLSDQVYVMKEGAIVERGSSEEVFEDPKHEYTKELLAASIA

SEQ ID NO: 173090 - protein, 242 aa, Unknown
  Bacterial polypetide isolated from the Sargasso Sea
MSIIQAKEVKKWFGDFQALKGISMEVAEGEVLVICGPSGSGKSTFIRCINRLEQHQEGEIIVDGIELTNDLKNIEAIRSEVGMVFQSFNLFPHITVMQNITLAPIWVRKKSRSESEEKAMELLERMGIPEQANKYPGQLSGGQQQRVAIARALAMEPKIMLFDEPTSALDPEMIKEVLDAMKVLAEDGMTMIVVTHEMGFAKEVADRVMLFDDGQMVEENTPELFFDKPKHDRTKLFLSQIL

SEQ ID NO: 173091 - protein, 357 aa, Unknown
  Bacterial polypetide isolated from the Sargasso Sea
MKSSVEVKNISFSYGKIEILNDLSLDIKEGEFMVLLGPSGCGKTTLLNCIAGLLDLTDGQIWIEDDNVTWKEPKDRHIGMVFQSYALYPSMTVEKNLSFGLRMMGTAKDLINEKIKKAANLLQINELLKRKPSQLSGGQRQRVAIGRALVRDAKVFLFDEPLSNLDAKLRAELRYEIKKLHRDLSNTMIYVTHDQIEAMTLADRISVMKDGLIQQLDTPKQIYNKPANLFVAGFIGSPSMNFLKATCDKPNKKIIVGKKQIDISKYENINNLMNEQEVVFGIRPENINIEKNENSIQCKVELVEPMGADTLVWTSVEDNPISIRLEGSSNFNLNDEINISFDINKSSIFDSKSEERI

SEQ ID NO: 173092 - protein, 244 aa, Unknown
  Bacterial polypetide isolated from the Sargasso Sea
MSQPIIKIDNMNKWFGDFQVLKDINLEVEKNKKIVVCGPSGSGKSTLIRCINRLEEHQKGTIVVDGNELSENTKNIEAIRAEVGMVFQQFNLFPHLSILDNCTLAPIWVKKMPKKKAEELALDQLKKVQIDDQAHKFPGQLSGGQQQRCAIARALCMEPKIMLFDEPTSALDPEMIKEVLDAMVTLAKAGMTMIVVTHEMGFAKEVADEVIFMDEGMIVERAETKEFFANPKSDRTKLFLSQIL

SEQ ID NO: 173093 - protein, 349 aa, Unknown
  Bacterial polypetide isolated from the Sargasso Sea
MSAINIDNVVKNYGSLRVLHGLDLDIKEGEFVSLLGPSGCGKSTLLYCVAGLEEINGGRILFDDRDIAGLNSRERNVALVFQDYALYPHMTVRDNIAFPLRRQKLDKETVKGQVTWASETLGLSELLDRMPSDLSGGQRQRVAVGRAIVRNPTALLMDEPLSNLDAALRVHMRTEIKRLSRELGLTVLFVTHDQEEAMVMSDRIAVLSNGHLQQFGEPMEIYRNPANRFVAEFIGSPKMNMITSADQNGVLLGLRPHDLTPATQQDDQDAFELTGELALIEPAGPQFFLDVIVNGEMIKATTDDIGSFTTGSEIKLSVPAYRVYRFDAGTGDALSGTSISASSRKNTKP

SEQ ID NO: 173094 - protein, 347 aa, Unknown
  Bacterial polypetide isolated from the Sargasso Sea
MKKSKLKIDSISYSIKDSTILENLSFNVLSEDIVSIIGPSAAGKTTLLRIIAGFDKVDRGYVQVNDAIVDNTKIFVEPHRRKVGIIFQDIALFPHLSCEDNILFGISTQENHKKNERLQYLSDILGINEIKNKFPHEISGGQQQRVAIARALAPQPEILLLDEPFSALDEELKDQLIKDLRKLLKKERITSIIITHNIKESFQISDKVAYLSSKRILQYDTPYDLYHRPNSREIANFCGIGSFVKGVVIDSNHIETSLGVLFGNTSPFSKNDLVDVMVRPDDIIHDDDSTQSAKVVEKFFHGSDFLYKLELNDGQNVLCFTPSHHDHSINEMIGIKTELDHLILFNR

SEQ ID NO: 173095 - protein, 335 aa, Unknown
  Bacterial polypetide isolated from the Sargasso Sea
NLDIAEGEFITMLGPSGSGKTTCLMMLAGFETPTNGEIYLDSNPISNIPPHKRGIGMVFQNYALFPHMTVYENLAFPLRVRKVSKDDIDKKVDKALSMVSLTGFENRMPGQLSGGQQQRVAVARALVFDPAVVLMDEPLGALDKNLRESMQYEIKHIHESIGVTVVYVTHDQGEALTMSNRIAVFNDGKVQQLSSPDKLYEEPVNSFVAEFIGENNTFGGQVTNFSKEKCKVKLDDGSEIFANPITVKSNGDKTTVSLRPERALINTKEKMDNNFKGKIEEVIYHGDHTRVRLNLLGNKEFILKVPNSSANMDIKLGNQINVSWNSHDARALDPK

SEQ ID NO: 173096 - protein, 364 aa, Unknown
  Bacterial polypetide isolated from the Sargasso Sea
MKTLKIDELSKNFGTTEVLRKINLEIDEGNFLVLLGPSGCGKSTLLNIIAGLETINEGNVYIDDYNVSKVEPKDRNIAMVFQSYALYPSMNVRENMIFGLKQAKVSKEKIEEQLQKVSKFLQVDALLERKPSQLSGGQRQRVAIGRALVREPRIFLFDEPLSNLDAKLRVEMRREIKKLHQQLKTTVVYVTHDQTEAMSLGTNIAIMNHGVIQQNDTPENIYNKPSNTFVADFIGSPSMNLIKGNLKQSSNQISFVANGSNFEIPINGYDFKEKSNLENKEVYFGIRPEHIFSKKSNEGDFEINLRADLSEYIGHEQIMTFDYENQEVLAKFPSTIKIELSKNTKLYFDLTQISLFDAKTEERI

SEQ ID NO: 173097 - protein, 368 aa, Unknown
  Bacterial polypetide isolated from the Sargasso Sea
MTSKGQIELVGLSKSFDSVIAVDSINLTIQSGTYCCLLGPSGCGKSTTLRLIAGHETPTSGDILISNKNVTVRPPAKRGTAMMFQNYALFPHLNCLENVAFSLKMAGDKKAERNERAMAMLSLVEMQDLKNRLPSQLSGGQQQRVALARALVGNPDVLLLDEPLSALDPFLRKQMRAELKQLQRKLKISFVHVTHSQEEAMALADLVVVMRDGHIEQADKPRTVFREPTNEFVAEFLGDQNILTGQIISAEGRTLTVEGPGNLRFPISSANFSLGEKIRFALRNDGLVLGGIKKGSYSSKAKLIQSEYAGSNVQVRLRSDDGQEFNAICGEDHFFSHNWREGDDIDISLDPAKIHPLSAKPTTAHNLQ

SEQ ID NO: 173098 - protein, 170 aa, Unknown
  Bacterial polypetide isolated from the Sargasso Sea
MADPIIQIKDMNKWFGDFQVLKDINLDVEANKKIVVCGPSGSGKSTLIRCINRLEEHQKGSIIVDGTELSEETKNIEQIRAEVGMVFQQFNLFPHLSILDNCTLAPIWVKKMPKKEAEELALKQLKQVQIDDQANKYPGQLSGGQQQRCAIARALCMEPKIMLFDEPTST

SEQ ID NO: 173099 - protein, 361 aa, Unknown
  Bacterial polypetide isolated from the Sargasso Sea
MSKKEDFVKFDKVDKSYDGKVLVVKDLNLDIEEGEFVTMLGPSGSGKTTCLMMLAGFETPTNGEIYLDKHPISNIPPHKRGIGMVFQNYALFPHMTVFENLAFPLRVRKISKEDIDKKVDKALSMVSLSEFGNRMPGQLSGGQQQRVAVARALVFDPSVVLMDEPLGALDKNLRESMQYEIKHIHENIGVTVVYVTHDQGEALTMSNRIAVFNDGKVQQLSSPDKLYEEPVNSFVAEFIGENNTFAGEISDISNGSCKVKLDKGEIIANPISVKSVGEKTTVSIRPERALINPKDKMDNNQKGKIEEVIYHGDHTRVRLNLLGNSEFILKVPNSSQNLDIKLGNEINIGWNSRDARALDPK

SEQ ID NO: 173100 - protein, 255 aa, Unknown
  Bacterial polypetide isolated from the Sargasso Sea
MAEKLKLEVSDEIAIKVESMNKWFGSFHVLRDIDLTVNRRERIVVCGPSGSGKSTLIRCINALEEHQTGQIIVDGTELTSDIKNIDRIRSEVGMVFQHFNLFPHLSILENCTLAPIWVRKIPKKEAEETAMHFLEKVKIPEQADKYPGQLSGGQQQRVAIARSLCMRPRIMLFDEPTSALDPEMIKEVLDTMIELAEDGMTMICVTHEMGFARQVANRVIFMDDGQIVEQNEPEKFFRNPQSDRTKLFLSQILGH

SEQ ID NO: 173101 - protein, 133 aa, Unknown
  Bacterial polypetide isolated from the Sargasso Sea
AKKRGLKMLERVGLIAHKDKFPGQLSGGQQQRVAIARALSMDPIVMLFDEPTSALDPEMVGEVLDVMVGLANEGMTMMCVTHEMGFARKVSNRVIFMDVGGKILEDCSKDEFFNNPDARQPRTKDFLNKILQH

SEQ ID NO: 173102 - protein, 495 aa, Unknown
  Bacterial polypetide isolated from the Sargasso Sea
MDVAARCVRRRAVGDGAADRGFACSRAAARDSARRAARVAEPLRARPGGGLYVVHARHAVARATDDRVLRLRPVPVGAGRVAARQSAAVAAARSVRLRDDRADGEHLRVHRRNPGRRDPRDRIRRNRSGAGVRDVACDRLAPHRVAVGTAPVPARVQQRSHPDAARHVARQRDHADRPDGRGARFLRELLRAVRGVHFGRHRLFRVDRARRAADPRNRAPAARSLAAAAAFPARPIAEPRHMNALSVENLHKRYGDNEVLKGVSLAANPGDVISVIGSSGSGKSTLLRCINFLESPSSGRVSLGGGEVRTSVDRSGQIRISDPVQLRRMRTRLAMVFQHFNLWAHMTVLQNVVEAPLRVLKLGRAEARERAARYLEQVGMTRFADAYPAHLSGGQQQRVAIARALAMEPDALLFDEPTSALDPELVGDVLKVMRDLAREGRTMIVVTHEMGFAREVSNHVMFLHEGIVEEEGHPRDILKTPKSGRLQKFLSGGLK

SEQ ID NO: 173103 - protein, 299 aa, Unknown
  Bacterial polypetide isolated from the Sargasso Sea
MSKNNEFVKFDKVDKSYDGKVLVVKDLNLDIAEGEFITMLGPSGSGKTTCLMMLAGFETPTNGEIYLDGNPISNIPPHKRGIGMVFQNYALFPHMTVYENLAFPLKVRKFSKDEIDKKVEKALSMVSLSDFGSRMPAQLSGGQQQRVAVARALVFDPAVVLMDEPLGALDKNLRESMQYEIKHIHESIGVTVVYVTHDQSEALTMSNRIAVFNDGKVQQLSSPDKLYEEPVNSFVAEFIGENNTFQGEVTDISKDRCKIKLDSGKEILANPIRVKSKGEKSIVSLRPERAIIDPEEKMD

SEQ ID NO: 173104 - protein, 714 aa, Unknown
  Bacterial polypetide isolated from the Sargasso Sea
MERAAGPVPADHFRVDLHAVAVAAVHPAVDVRLARAVRLRARRIPAQPRARLRESGAHDGADQRADHVAPRAAEQPHAGDYVPAVPDERGDPVADEPRFPRPRRAAADPEPRRAAAGRQEQPGCVVDLDLGVRGAGGDAAAAHLHGRCAAQRARHAHARFGIRRRAVMTIPLLQIDGFSAHFGANAAVQDLSLSIGRGERVALVGESGSGKSVTALSILRLAQQATLSGRMLFDGEDLLAKTEQQMRGIRGADIAMVFQEPMTALNPLYTIGKQIAESLRLHEGLRPGDARERGIALLRRTGIPEPERRIDSFPHQLSGGQRQRAMIAMALACRPRLLLADEPTTALDVTVRQQIVDLLIELQEQEAAARGMAVLLITHDLNLVQRFAQRVAVMEKGVLVETNTTAALFAAPQHPYTRRLLDSAPQRAVEPVADDAQTILDVQHLAVDYRIAAKGWRSVLGKTTFRAVHDVQLSLKRGETLGIVGESGSGKSTLASAVLGLQRPASGGIEIDGMPLASLRTTQGRRTLYGRMQVVFQDPFGSLSPRMTVEQIVGEGLGVHRPQVAGDARRARIAALLQEVGLPPEAMLRYPHEFSGGQRQRIAIARALAVEPELLVLDEPTSALDVSIQKQVLNLLTNLQKKYKLSYLFITHDLAVMRAMAHRVIVMKAGRVVEEGETLDVLHAPSHPYTRALLASSMPAPVHGPQERQERTDD

SEQ ID NO: 173105 - protein, 314 aa, Unknown
  Bacterial polypetide isolated from the Sargasso Sea
MKRLEVKKLDFAYGSNQILSEFDFSLEESQIGCLLGPSGCGKTTLLRAIAGFENPTKGEIILNGNKLNSSKIFVEPEKRQIGMVFQDIALFPHLSVKENIQFGIRSLSQNLRDKRSNELLDLVGMSEFKKKYPHEISGGQQQRVALARAIAPKPSLLLMDEPLSSLDEELREQLAREIRLILKQEKVSAILVTHDQNEAFAVGDYICVMHQGRVQQNDSAYNLYHHPLNRFVAEFIGEGILLPGVVADEGTIATDLGEIKGNLPESCKHQDKVDVLIRPENVILANDNENKVVITARYFRGSSYLYTFKTNSGA

SEQ ID NO: 173106 - protein, 386 aa, Unknown
  Bacterial polypetide isolated from the Sargasso Sea
MNSQSGAPVAGAPSSVSSSGADARAESFVQIVDVVKKFGDTEAVRSVNLTVRQGELFALLGSSGCGKSTLLRMLAGLETVTSGKILIDGEDLAQMPPYKRPVNMMFQSYALFPHMSVESNVAFGLKQEGTPKAELKARVASALELVQMSKYAKRKPHQLSGGQQQRVALARSLVKRPKLLLLDEPMSALDKQIRQRTQIELVNILQKVGVTCIMVTHDQEEAMTMANRLAVMSEGQIVQIGSPNEVYEYPNSRFSAEFIGSTNLFDGVTVEDEPDHVYIESPELPSRLYVSHGISGPLGMPVTVSVRPERIALTRKPPEGAFNWARGRISNVAYMGGYSLYHVKLDGGKTVIANVSSLAISELDTPALGDEIYVRWSATAGVVLTS

SEQ ID NO: 173107 - protein, 349 aa, Unknown
  Bacterial polypetide isolated from the Sargasso Sea
MSELRIHGLSKSFGSHTVLHDIDLTVRRGSRLALLGPSGSGKTTLLRVLCGFERAERGTVEIDGRRVAAPDVHLPPEQRRIGYVPQEGALFPHLSVADNIAFGLPRAARRRHHRVDELLEMVGLPASYASRAPQQLSGGQQQRVALARALAPEPSLVILDEPFSALDTSLRHETRSAVADALAAAGATSVLVTHDQPEAMTLGDEVAVMWHGRLVQTAAPQTLYRQPITRDVASFVGQAVLLAGRVRGTHIACALGDLPLVAPLPDGPADAMLRPEQIGIVPLTHADAARGHTARVEAAQFAGQDADVLLRLDADGDVRVRARVPGHRCPAVGERVALVVDGAVMAYAC

SEQ ID NO: 173108 - protein, 245 aa, Unknown
  Bacterial polypetide isolated from the Sargasso Sea
MEKKISVETKDVTKFFGSFQALKGITADIYEGEVVVVLGPSGSGKSTYIRTINGLEEHDSGLIKVNGTELNNNIKNIETIRSQVGMVFQQFNLFPHLSVLRNITLAPQKVKKLPKSEAEDLGMSLLERVGIPEQALKYPSQLSGGQQQRVAIARALAMQPKIMLFDEPTSALDPEMIKEVLDVMTELAQSGMTMICVTHEMGFAKEVADRFLFFDEGLIVESGTPQHFFENPQEDRTKLFLSQIL

SEQ ID NO: 173109 - protein, 203 aa, Unknown
  Bacterial polypetide isolated from the Sargasso Sea
MVTDEVVIEISNMNKWFGHFHVLRDIDLIVNKGERIVICGPSGSGKSTLIRCINRLEEHQKGIIKVDGVELNDDVKKIDKIRSEVGMVFQSFNLFPHLTALENCTLAPVWVRKLPKKDADEIAMKYLEIVKIPEQALKYPGQLSGGQQQRVAIARALCMEPKIMLFDEPTSALDPEMIKEVLDTMIELAEDGMTMIVVTHEMG

SEQ ID NO: 173110 - protein, 362 aa, Unknown
  Bacterial polypetide isolated from the Sargasso Sea
MNDSNQSFVKFEKIDKSYDGEVLVVKNLNLDIAKGEFVTMLGPSGSGKTTTLMMLAGFETPTNGEIFLDTKPISKIPPYEREIGMVFQNYALFPHMTVSENLSFPLEVRKISKADIKDKVQKALDMVELGMFGSRFPAQLSGGQQQRVALARALVFEPRLVLMDEPLGALDKNLREQMQYEIKHIHDRIGITVVYVTHDQSEALTMSNRIAVFNDGVVQQLSTPDILYEKPENSFVAKFIGENNTLNGVVKEVNGSSCIVDLDNGHGTVKALKVNINGVGDKTQLSIRPERVTIDSSNPDANNFSGKIEELIYLGDHIRARLDVCGNNEFIVKVPNEGSFSHKEGDILKLSWNPDDVRALDI

SEQ ID NO: 173111 - protein, 245 aa, Unknown
  Bacterial polypetide isolated from the Sargasso Sea
MAKAIEIKRLNKWFGSYQALKDIDLNVSHGERIVICGPSGSGKSTLIRCINSLEHHDSGEITVDDKELNQNKASIAAIGAEVGMVFQQFNLFPHLSVLQNLTLGPTKVRGLSRSEAEERAMRILERVQIPEQAHKQPSELSGGQQQRVAIARSLCMEPKIMLFDEPTSALDPEMIAEVLDVIVDLAEDGMTMIVVTHEMGFARRAADRMVFMDKGEIIEMGAPKDFFEAPKTKRCKTFLNQILQH

SEQ ID NO: 173112 - protein, 263 aa, Unknown
  Bacterial polypetide isolated from the Sargasso Sea
MNTAAPVALSVRNIHKSFGDHHVLKGISLDAHEGDVISILGASGSGKSTFLRCLNLLETPDDGSVALAGEELKMKRARDGKLHPGDRRQVDRIRSQLGMVFQNFNLWSHMTVLDNLVEGPLRVQKRSRAEAVEEAEALLARVGLADKRGYYPAHLSGGQQQRVAIARALAMHPKVMLFDEPTSALDPELVGEVLRVMRSLAEEGRTMLVVTHEMGFARHVSNRVMFLHQGEVDADGTPGELFGGQCSERFRQFVSSHHDRAAN

SEQ ID NO: 173113 - protein, 369 aa, Unknown
  Bacterial polypetide isolated from the Sargasso Sea
MASVLLRNIAKRYDDTEVLRNVNLDIADGEFVVFVGPSGCGKSTLMRMIAGLEDISSGDLMIDGAKVNDVPSAKRGIAMVFQSYALYPHMTLYDNMAFGLKLAGAKKPEIDQAVKQAAKILHIDHLLDRKPKQLSGGQRQRVAIGRAITRKPKVFLFDEPLSNLDAALRVKMRLEFARLHDELKTTMIYVTHDQVEAMTLADKIVVLSGGAVQQVGTPNELYHAPANQFVAGFIGSPKMNFLKGTVESVDAGGVLVRFDSGETQRAAVEAAGLQRGAAVTVGVRPEHLKVEAAAAGVAAKTMAVESLGDAAYLYAESAVAPDGLIARIPPLDTYRTGEALHVHAQAEHCHLFDEHGQAFRRLSAHAKAA

SEQ ID NO: 173114 - protein, 249 aa, Unknown
  Bacterial polypetide isolated from the Sargasso Sea
MPLVETRGLEKNFGTHHVLKGIDLSVERGQVVSIIGRSGSGKSTLLRTLNGLESIDAGTISVDGERVDARHADLRALRLKVGMVFQQYNLFPHLSAGQNVMLAQSVVKKSHRQQARAIAELMLERVGLGDKFDAFPEHLSGGQQQRVAIARALAMKPSVLLCDEITSALDPELVGEVLGVIEQLAREDMTLIMVTHEMNFARAVSDRIVFMHQGRVWETGTADEIFERPQTVELTRFLGSVRNPETATR

SEQ ID NO: 173115 - protein, 361 aa, Unknown
  Bacterial polypetide isolated from the Sargasso Sea
MASKKDFVKFDKVDKSYDGKILVVKDLQLDIEEGEFVTMLGPSGSGKTTCLMMLAGFETPTNGEIYLDGNAISSIPPHKRGIGMVFQNYALFPHMTVYENLAFPLRVRKIPKDEADKKIDKALSMVSLQGFAQRMPGQLSGGQQQRVAVARSLVFDPQLVLMDEPLGALDKNLRESMQYEIKHIHESIGVTVVYVTHDQSEALTMSNRIAVFNDGKVQQLSSPDELYEKPVNSFVAEFIGENNTFAGEVSDISGGKCKVKLANAEILANPISVKGKGDKTTVSLRPERALINPNDKMDNVHNGKIEEVIYHGDHTRVRINLLGNSEFILKVPNSSSNLDIKLGNEIKIGWNSEDARALDPK

SEQ ID NO: 173116 - protein, 385 aa, Unknown
  Bacterial polypetide isolated from the Sargasso Sea
MASISLRGVQKAYGDGAPVIRDVDLEIGENEFCVFLGPSGCGKSTLLRMIAGLEDVTDGDLSIAGRLVNDVPAAQRGVAMVFQSYALFPHMTVFENMAFGLKLAKTPKEEIDRKVREAARILQLEALLERRPKALSGGQRQRVAIGRAIVREPGVFLFDEPLSNLDATLRGQTRIEIARLHKQFAKASVVYVTHDQIEAMTLADKIVLLHAGKDTERYGSIAQIGAPLELYHRPRSRFVAGFIGSPRMNFLPGKVGSVDPQGVIVTLDHTDENVRVPVNGDGLHASQAVTLGVRPEHLEFLGAEGSENTQDAVLARTVSLVEQLGEHSYVHLDQPGGAALIAKAPGDTRLAPGDRAALRVPSRACHLFTEDGFAAASLESVEHYA

SEQ ID NO: 173117 - protein, 259 aa, Unknown
  Bacterial polypetide isolated from the Sargasso Sea
MNSQTQKLFVDDLHKRYGDNEVLKGVSLKANSGDVISVIGSSGSGKSTMLRCINFLEQPNAGRIFVDGEEVRTALDKTGALRAADSKQLQRVRTKLSMVFQHFNLWSHMNVIENVMEAPVNVLGIPKKEAEERAREYLEKVGLAPRVEKQYPSHLSGGQQQRVAIARALAMHPDVMLFDEPTSALDPELVGEVLKVMQKLAEEGRTMIVVTHEMGFARNVSNHVMFLHQGRVEEEGVPSEVFANPKSERLRGFLSGSLK

SEQ ID NO: 173118 - protein, 360 aa, Unknown
  Bacterial polypetide isolated from the Sargasso Sea
MSIKNYIKIKNLSKSFGDVEVLKNINLEVEEGEFFSLLGPSGCGKTTLLRILAGFEYPSEGEVFFDDANVTSLPPNLRPSNMVFQNYAIFPHINVQRNIEFGLRKENLSKDEMQQRVENALKMVQLEGYENRYSNQLSGGQRQRIALARALVKQPKVLLLDEPLGALDKKLREEMQIELRNLQKSLGITFIFVTHDQEEAMTMSDRIAVMDEGNILQVSPPKEIYHNPKNKFVSQFIGNINILGAEIKSVSNENLLIEVDCFGSMQLKNYQQIIENDRINIAIRPEEITISKISDPNYDYNFQGNVKNISFYGESTFFYVQLNNSDKILMVSKNETKEPFSENDNCFVNFSSNNLKIIKD

SEQ ID NO: 173119 - protein, 244 aa, Unknown
  Bacterial polypetide isolated from the Sargasso Sea
MSDKIIQITEMNKWFGDFQVLKNINLEVEKNKKIVVCGPSGSGKSTLIRCINRLEEHQQGSIIVDGNELTEDTKDIEKIRAEVGMVFQQFNLFPHLSILDNCTLAPIWVKKMPKKDAEDLALQHLEKVQIADQASKYPGQLSGGQQQRCAIARALCMEPKIMLFDEPTSALDPEMIKEVLDAMVNLAKAGMTMIVVTHEMGFAKEVADEVIFMDEGMIVERAETKEFFANPKSDRTKLFLSQIL

SEQ ID NO: 173120 - protein, 603 aa, Unknown
  Bacterial polypetide isolated from the Sargasso Sea
MNDLSRLAGRAPFVPDTAAPAGPDYANYRVVPARYPARTAGTVAAIVLIAAVLYSVLGNPRWGWNVFAHWFFSEAVLAGLGQTLLLTALGAVLGFALAIPLALARLSRSPLLSSCSWAYIWLFRSIPAIVLLLLLNNLGYLYDTVRLGIPFTDIVFLHGPTTDLITPFMAAVLGLTLTQAAFAAEAIRGGILSVDHGQREAAAALGLPRARQTWRIVLPQAMRAILPAAFNDVIGLAKGTAVVYILAMPDLFYTVQIIYHRNLEVIPMLMVATVWYLVILTVLSAIQVHIERHYARGATRDAVAVPGLFAVLRKSRLAVEALPFRSSVAHTRPDAAAAPSAETAGWAKQRIGAAVGIHRVSKSFGLLKVLDNVSLAIPSGSVTVVLGQSGSGKSTLLRTINHLERVDEGFIDIDGELVGYRRDGRTLYELKEKDILRRRAEVGMVFQGFNLFPHLTVLENIVEAPVAAGLPRVQAEAEARALLTRVGLAGKADAWPRQLSGGQQQRVAIARALALKPKVLLFDEPTSALDPELVNEVLDVIRQLARSGTTLIIVTHEIGFAREVADTIVFMDGGRVVESGPPSAVLTAPAHPRTREFLSKVLS

SEQ ID NO: 173121 - protein, 617 aa, Unknown
  Bacterial polypetide isolated from the Sargasso Sea
MFSWFERRLPTFPLEDPVTPPRGFFSFVWACTKGARSWILLIALTSAALAAYEAALFAMMGRVVDWLASATPADFGGRHFGTLAGFAAILAGSALLIALHTMVKHQVLAINFPMRLRWLFHRLMLDQSLSFYANEFAGRVTTKIMQTALAVRDALFMSVDVVIGVAAYLIGILALAASFDWRLMIPLALWALGYGLACAYFVPRLGAVGSRQADARALMTGRITDAYSNITTVKLFSHTRREADHARRAMEAFKATGDAQMRLVSAFEVVNHLLSTLLLVGSTGLALYLWMHGEASAGVVAAVIAMALRLSSYSHWIMWEMTELFENVGTIQDGINTLTKVHSVVDAPDAKPLAVQRGGIVFDNVQFAHEDNDRAVFDGLNLTIRPGERIGLIGRSGAGKSTLVNLLLRFYDVGGGAIRIDGQDIAHVTQDSLRGAIGMVTQDTSLLHRTMRENLLYGRPDATEREMHDAAVRAEASEFIDRLRDRHGRSGYDVEVGERGVKLSGGQRQRVAIARVMLKDAPILVLDEATSALDSEVEVAIQRSLDDLMRGKTVIAIAHRLSTIAAMDRLIVLDEGRIVEEGTHQQLLQAGGIYAALWAHQSGGFLGETADAEKAEQ

SEQ ID NO: 173122 - protein, 511 aa, Unknown
  Bacterial polypetide isolated from the Sargasso Sea
MVGRRRYRAAAHAGRKAFVRDPLREPEGRRPAVVRRDGDPEGCAASGSRAEVDQLHRGSEDQRRDHERDLLSERQQGRAPVRDTGDRAGPGHLPVRRDDREGVARDAAQRRHRADAEPSVAAAEVGWLRETTMIHTLPAAAVAGTARGNADAFVRLENVVKTFGDSTAVDNVNLTIAKNELFALLGSSGCGKSTLLRMLAGLETATSGKIFVDGEDLASLPPYRRPVNMMFQSYALFPHMTVESNVAFGLKQEGTPKQEIKERVADALALVQMSKYAQRKPHQLSGGQQQRVALARSLVKRPKLLLLDEPMSALDKKIRQKTQLELVNIIEKVDVTCVMVTHDQEEAMTMASRLAVMSEGKIVQIGAPGEVYEFPNSRFSAEFIGSTNLFEGRVVEDEPDHIFVESDDLEARMYVSHGVTGPLGMPVGISVRPERIHVSREKPGSKHNWARGVVTDIAYMGSYSLYHVRLPSGKTVVSNLSSSHLMNDNAPAWNDDVFVSWSPASGVVLTQ

SEQ ID NO: 173123 - protein, 208 aa, Unknown
  Bacterial polypetide isolated from the Sargasso Sea
MTLETIDDGFVYVNDEYLWHEKNADKIVNASDKHLQKMRDQIGMVFQQFNLFPHLTAIENVQEPQILIKKKNKSEANEKAEELFNMIGLSDKVDHYPHQLSGGQQQRVAIARALAMDPKIMLFDEVTSALDPELVDEVLQVLHKLASNSDTTMLTVTHEMNFARDFADRVLFFDNGQIVESGKPSDIFSNPKEERTRSFLKKFITSIN

SEQ ID NO: 173124 - protein, 311 aa, Unknown
  Bacterial polypetide isolated from the Sargasso Sea
MMLAGFETPTNGQIYLDNKVISDIPPHKRGIGMVFQNYALFPHMTVYENLAFPLRVRKIPKDEADKKVDKALSMVSLQGYESRMPMQLSGGQQQRVAVARSLVFDPKLVLMDEPLGALDKNLRESMQYEIKHIHESIGVTVVYVTHDQTEALTMSNRIAVFNDGKVQQLSSPDELYERPVNSFVAEFIGENNTFAGEVTDVSDNKCKVKLNSGAEILANPIVAKSKGEKTTVSLRPERALIDPETEMDNNHKGKIEEVIYHGDHTRLRLDLLGNKEFILKVPNSSNRMDIKEGKEINIGWNSTDCRALDPK

SEQ ID NO: 173125 - protein, 348 aa, Unknown
  Bacterial polypetide isolated from the Sargasso Sea
MNNAIEIRDLSLSIEGRSILNNISFGLGEIDIACLLGPSGCGKTSLLRCIAGFEKLANGEVWIKGVIASNPNHHVPVEQRNIGMVFQDYVLFPHMSVSENIIFGLKNLKATRIKDRLDELIELLDLGEHINKFPHQISGGQQQRVALARAMAPRPGVLLLDEPFASLDVELREQLAHELRSILKQDGITTIMVTHNQLEAFAMADVIGVMNNGELRQWDTAFNLYHMPKTSDVADFIGEGVFIPGEVINNNEVKTDIGNIRGHIPQNLAKGSKVRVLIRPDDIQHDDDSMTTANVISKAFRGAEFLYTLEMKNGLCVQSLVPSHHDHPINEPIGIKLEIDHLVIFMDE

SEQ ID NO: 173126 - protein, 185 aa, Unknown
  Bacterial polypetide isolated from the Sargasso Sea
MANIKFTGVHKSFGSNKIITDFNLMGKDDEFLVLVGPSGCGKSTLLRMIAGLEKIDEGEIFINDQKINDLHPSKRQTAMVFQSYALYPHMNVYENMSFGLKIEKKSKEEIETKVMQAAKILKIEELLERKPKQLSGGQRQRVAIGRAITRNPKIFLFDEPLSNLDAALRAEMRVEISKLHNQIKT

SEQ ID NO: 173127 - protein, 359 aa, Unknown
  Bacterial polypetide isolated from the Sargasso Sea
SSIYKSFGNTEVIHGVDLEVEDHEFVVFVGPSGCGKSTLLRLIAGLEDVSQGEIEIDSQRVDHLPPAKRGIAMVFQSYALYPHMNVYQNMSFGLRLAKTDKKITDQKVRDAAEILQITELLERKPKELSGGQRQRVAIGRAIVRDPKVFLFDEPLSNLDAKLRVQMRIELTKLHRELNATMIYVTHDQVEAMTMADKIVVLREGYVEQVGAPLDLYHKPANKFVAGFIGSPAMNFMDGTISGISDKSVELELNSDLKIQIPCQPGKDAATGSPVSAGVRPEHIELTSEKEAKLRGEVFAVERLGGETYLYVNTESNKELTVHASGDKVVSVGDSVSIGFSPNTCHVFDRQGQVFEKLAA

SEQ ID NO: 173128 - protein, 1034 aa, Unknown
  Bacterial polypetide isolated from the Sargasso Sea
MHFELRLWQFTKGVRHRIVFAVFIGMLSTILGVARLALLGWVIGLIFQGQNLSGLVTPIALTGGSIILRGLFEHWRIMVAHHTAAMVQMTLRQNLYDKIVELGPGYAGRQRSGELVLSMVDGIEQLETYFGEYLPQLLISAITPLLIFAFVAFLDLPVALTLFISAMIALLAPSLWHKFDLKKSQERQKAYAAFASEFLDAVQGLGTLKSFGQSGARAAFLTKKARDLFRSTMWVLATNSLSRGITDTSIALGAAVSLGLGAHRVATDQMELSALLIILMMGVEIFRPMRDLRAILHQGMVGQSAAQGIYKILEATPPIDEDPSAEKRDTLIPSITFDSVSFGYLEHHKSVHENLHFSIQPGEKVGVVGESGSGKTTIAKLLLRFYDPEKGSISIGGHNLKGLRLEQIRKEISVVSQDTFLFHGTVQENIRFGNPEASDEEIVEAAKSANIHDFIKSLPDTYETLVGEKGIKLSGGQRQRVAIARAILRDSKILILDEALSAVDAENEAIIQEALNELMKGKTTLILAHRLSSIISCDNILVLDQGKVVENGTHSALMEKGGLYSQLMSQQAKESTHQPLKEISPANSQTERPLNDPLDQQINAETEGIVKAEGLNWVQVCKALMSHIMPWKRRLIMTFLFGVLRVIAFIGVGVLSALIVMALKNQTPFDDYLIFLIIIASVSGILHWLESWVAHDMAFRLLAEMRIQVFRKLDQIAPAYLVRRRTGDLMGIVTQDVELVEYFFAHTVAPAFVSVLVPLVVVIFLTMTHPWVALAFIPFLIFVGLSPFLMRRSVDDLGSKSREAAGELAAHAIDTIQGLAEVVAFQQEKNRRSDFSKLGEYHIQIRLPFFSKLTLQKSLLEVFTGLGGLAVVTTGAILAGNHSLDQAILPLLTILAMAAFLPVSEIAQVGRQLADTLGSTRRIYALEHEPVTIKDGPRKISSETASELSISNVGFHYPGRSQKVLENVSITIQGGQTVALVGPSGAGKTTLAQLLMRFWDPSEGTILLSGNDIREYGLEALRSKIALVAQDTYL

SEQ ID NO: 173129 - protein, 253 aa, Unknown
  Bacterial polypetide isolated from the Sargasso Sea
MHCRQLSLSRGGRPILDRLDLSLQAGSLTALLGPNGAGKSSLLKCLTGELEHQGEIRLFGRERQEWAGTELAHRVGVLPQSSSLNFPFLCEEVVAMGRLPHSEPASRRDQIVGAAMTHAGVDHLAGRLYPGLSGGERQRVQFARVLAQIWQAPDEPQQARLLLLDEPTSALDLKYQHQLLTMARALAARHTAVLVVLHDLNLAARYADRLVMLEQGRVMADGTPREVLTPDLIDRLYDYPAQVILHPESGLPM

SEQ ID NO: 173130 - protein, 244 aa, Unknown
  Bacterial polypetide isolated from the Sargasso Sea
MSESIIEIKNVNKWFGDFQVLKDINLEVQAKQKIVVCGPSGSGKSTLIRCINRLEEHQQGNIIVDGNELDENTKNIEAIRAEVGMVFQQFNLFPHLSILDNCTLAPIWVKKMPKKDAEELAMQQLEKVQIADQAAKFPGQLSGGQQQRCAIARALCMQPKIMLFDEPTSALDPEMIKEVLDAMVNLANAGMTMIVVTHEMGFAKEVADEVIFMDEGMIVEKAKTKEFFDNPKSDRTKLFLSQIL

SEQ ID NO: 173131 - protein, 247 aa, Unknown
  Bacterial polypetide isolated from the Sargasso Sea
MSDSSIISLQNVNKWFGDFHVLQDVNLEVKKKERIVVCGPSGSGKSTMIRCINRLEEHQEGKIVVDGIELTGNLKNIDSVRKEVGMVFQQFNLFPHLSVKENITLAPIWVKKMPKAEAEELAMKQLEIVKIPEQANKFPGQLSGGQQQRVAIARSLAMNPNIMLFDEPTSALDPEMIKEVLDVMVDLAEGGMTMIVVTHEMGFAKTVANRMVFMDEGRIVEEAPPDKFFNNPESDRTKLFLSQILNH

SEQ ID NO: 173132 - protein, 227 aa, Unknown; identical to SEQ ID NO: 172518
  Bacterial polypetide isolated from the Sargasso Sea

SEQ ID NO: 173133 - protein, 459 aa, Unknown
  Bacterial polypetide isolated from the Sargasso Sea
MVKKYLTSNHKSLRKIRGNKISMIFQEPMTSLNPFHKVGDQIVESIILHKKQSKSNAILEAKKLMELVEIPEVDRRFASYPHELSGGQRQRIMIAMALSNKPKLLIADEPTTALDVTVQAQILDLMTKLKDEVGMSILFITHDLGLIQKFSDNITVMQEGEVVEQGDTKSVFSNPQHAYTKKLINSEPSVKQETTREENSFVAVKNLNIYYPLPNKNFFKKECFHAVKDVNFAIPKQSTIGLVGESGSGKSTLGKALAGLIDYQGSVIFDGQDVNQLSSKEIKLIKKDIQIVFQDPYGSLSPRMTIGEIVGEGLDVHFKLNKSQKDERIAESLKAVEINPDDRFKYPHEFSGGQRQRVAIARSLILNPSFMILDEPTSALDRSIQIQVIDLLKNIQKEFALTYLFISHDLKVVQSMSDYIFVMQNGYIVESGPAKEVFSNPQEVYTDKLLNAALRYSTV

SEQ ID NO: 173134 - protein, 338 aa, Unknown
  Bacterial polypetide isolated from the Sargasso Sea
LTALKLYQPTSLKIDKGEFMVFVGPSGCGKSTLLRMVAGLEDITTGDIKLDKKIINKIDPSERDVAMVFQNYALYPHMNVYNNLAYGLKNRGLAKDLIEKKVKAAAKLLQISDYLERRPALLSGGQRQRVAMGRAIVRSPKIFLFDEPLSNLDAKLRIQMRLEIKKLQRKVGVTSIFVTHDQVEAMTLADRLAVINNGIIEQLGTPIEIYNNPTSVFVAGFIGSPQMNFIEGELKNKKLKTQAFEIAGIKSDFNGKVILGIRPEHLVQAYNGLIKLNVDLVEKLGSDNLIYGEIKGKKDLLCYRTPGNEKINSGSKLALNIQGNKLYIFNKKTGKRII

SEQ ID NO: 173135 - protein, 363 aa, Unknown
  Bacterial polypetide isolated from the Sargasso Sea
MGSSDSFVKFDKVDKSYDGETLVVKDLNVDIPKGEFLTMLGPSGSGKTTTLMMLAGFETPTGGEIYLEGEAINKIPPNKRGIGMVFQNYALFPHLTVNENLAFPLEVRKLNKSDIKEKVKKTLDMVELGEFGNRMPLQLSGGQQQRVALARSLVFEPRLVLMDEPLGALDKKLREQMQYEIKHIHERIGITVVYVTHDQSEALTMSNRIAVFNDGKIQQISSPDVLYEKPENAFVANFIGENNQIKGKVKSINGKNCVVTTDKGDEITSLKINVKSVGDSSTVSLRPERVEINATEGNFENSFNAKVKELIYLGDHIRTRVEVCGNDQFIVKVPNSYKGANLKEGSTVKLSWKASDSRALDLG

SEQ ID NO: 173136 - protein, 417 aa, Unknown
  Bacterial polypetide isolated from the Sargasso Sea
MFHPARAVVRESRHASRAETLTPAIREERMVNPMQSIPSSAAARQTQPAPAARTQNDAFVRIENVVKKFGDSTAVDNVNLTIAKNELFALLGSSGCGKSTLLRMLAGLETATSGKIFVDGEDLASLPPYRRPVNMMFQSYALFPHMTVESNVAFGLKQEGTPKNEIKERVADALALVQMSKYAQRKPHQLSGGQQQRVALARSLVKRPKLLLLDEPMSALDKKIRQKTQLELVNIIEKVDVTCVMVTHDQEEAMTMASRLAVMSEGKIVQIGAPGEVYEFPNSRFSAEFIGSTNLFEGRVVEDEPDHIFVESDDLEARMYVSHGVTGPLGMPVGISVRPERIHVSREKPGSKHNWARGVVTDIAYMGSYSLYHVRLPSGKTVVSNLSSSHLMNDNAPAWNDDVFVSWSPASGVVLTQ

SEQ ID NO: 173137 - protein, 358 aa, Unknown
  Bacterial polypetide isolated from the Sargasso Sea
RTGCRVLKGVNIDIEDGQFLILVGGSGCGKSTLLNMIAGLETVTKGEIQIDGKTVNNLSPKDRDIAMVFQSYALYPSMTVRENISFGLNIRKVPKQEQAQIVDRVSNTLQITHLLDRKPGQLSGGQRQRVAMGRALARDPVMFLFDEPLSNLDAKLRIEMRSEIKLLHQRLGTTIVYVTHDQIEAMTLGDRIAVMKDGIVQQFGAPQDIYDSPANLFVAGFIGAPPMNFIQGKLVEQGSGVGIELDTGSARNVLNLPFDSAKVKSHVGREVILGLRPERITDARGAHGDHANLQAIDVKVDVIEPTGPDTLVFAQVNGKRIVSRVHPASNPQPLSTTTLLFDASKAVLFDPTNEERIA

SEQ ID NO: 173138 - protein, 351 aa, Unknown
  Bacterial polypetide isolated from the Sargasso Sea
MANIKFTGVHKSFGSNKIITDFNLLGKEDEFLVLVGPSGCGKSTLLRMIAGLEKIDEGEIFINDQKINELHPSKRQTAMVFQSYALYPHMNVYENMSFGLKIEKRPKEEINTKVMQAAKILKIEELLERKPKQLSGGQRQRVAIGRAITRNPKIFLFDEPLSNLDAALRAEMRVEISKLHNQIKTNMIYVTHDQVEAMTLADRIVILNQGNIEQVGTPEEIYNDPANIFVAQFIGTPKMNILEVNEENVVSENTIKLLGNDIQFDKLKLNKSKHFVGIRPEHLKANQNTKFTFNPEIELIENLGNEKIVYMKKDEHQLSAKIPSNVEIGSSIGFDLNDIFIFDENGKRVKS

SEQ ID NO: 173139 - protein, 321 aa, Unknown
  Bacterial polypetide isolated from the Sargasso Sea
MLLEAIEKNYDSVKALKGVSLKIYPGEFCTLLGASGSGKSTILRVIAGFETLDSGRLEINDKDMSKMSIAERNIGMVFQNYALFPHMDVFQNIAFGLEMRKLDKSQIKEKVNEVLELVGLTNQKNRLPSALSGGQQQRVALARAIVIEPKILLMDEPLGALDKNLRNDMQKQIKNLHKDLNITVVYVTHDQDEAMFLSDKIVLMDEGKIIQTGTCEELYTKPKNRFVANFLGECNFFTLDSGKKIGIRPECLRISTDNKNDRNSFQVDVEDVVFQGRMIKLIGNYNDQEIIASISPLEYELESTHKDKIFLTYDSESLMNI

SEQ ID NO: 173140 - protein, 351 aa, Unknown
  Bacterial polypetide isolated from the Sargasso Sea
MSKLNIKNLIKSFPSMGRPAVNNVNLDIESGELVAFLGPSGCGKTTILKMITGLFQPDSGDIILDEQSLLKIPTEKRGVVMVFQNYLLFPYMNVNENVGFALKMKGVDKNIIDQKVKEMLELVKLPDIGLRKPKQLSGGQQQRVALARALISNPRILLLDEPLSNLDAHLRDEMRDLIVTIQQKLKVTTIFVTHDQEEAVLLADKIALIFDGELQNFTSPKKYYEKPKNIKAAKFFGGVNFINAKKHNDNLSTNIGTVHYKGENYTDLNEHNIITIRPENIKLSKNNDFNDNSFKGLIKSVIFSGTHTRYKIIVNDLELECSLQSVGLQDIKTDDTIYVHLPSDKIWAMNE

SEQ ID NO: 173141 - protein, 359 aa, Unknown
  Bacterial polypetide isolated from the Sargasso Sea
MNNINESINIQNVLKIYKSETDVYALNDVSLVIQQNEFFTLLGPSGCGKTTLLRLIAGFEHPTSGTILLNKKDISLLPPNKRPVNTVFQSYALFPHMTVGGNIAFGLEMLGWSKENVSKAVDEMLALVKMEELKNRRPSEISGGQQQRVALARALAPKPEVLLLDEPLSALDLKLRKQMQIELKRLQSETGITFVFVTHDQEEALTMSDRIAVMDKGKILQFGTPREIYHHPENRFVANFIGDSNFLSATIEEEHAVLSDGTKLALSSKNSSANIGKRSILIRPEHVQMKKSNGNNGSFQGKISNIVYFGTDTHFHLELKNGDEFTIRKQNAPDGGKEFEIGSTVELKIDKGAIQILRD

SEQ ID NO: 173142 - protein, 284 aa, Unknown
  Bacterial polypetide isolated from the Sargasso Sea
MSADVELQNVSVTFGSFYAAKNVSVKIKEGEFFSFLGPSGCGKTTLLRAISGFLDPSEGKVLIGGHDMAGIGPNKRPTSLIFQNLALFPLMSVADNIAFSLEVRGISKIKRRERADELLELIALTGQGEKKVHELSGGQRQRVAIARALAIEPEVLLLDEPLSALDLKLRQKMRTELRAIQKRVGITFIYITHDQGEALTMSDRVAVMNEGELEQVGLCDDVYDFPHTPFVATFVGENNPFYAKVISSDGDMVKVESEGNSFLAKAGKINDQNKHSFNTGDEVI

SEQ ID NO: 173143 - protein, 316 aa, Unknown
  Bacterial polypetide isolated from the Sargasso Sea
MRRARPARRFPSLYARAARSEPAAREPAGRTARAAARSGVARTRVACRHAGRSTGGSKMIDVDHASIRFPTRTGHVDAVRDASFAVRDGEVFGLVGESGSGKSTLLRALTGLVPLASGSLSIDGRPVGGTPDRAFRRHVQMVFQDPYASLHPRFTVDQTLREPLSIHGIDDADARIARALSEVGLGPAFRFRYPHQLSGGQRQRVAIARALIVEPRVLLLDEPTSALDVSVQAEILNLLRRLHRERNLTMILVSHNLAVIGFLCQRVAVMQHGEIVEQLRIENVRAGQVARDYTRTLLRATEGYRRLDPVAGAPAT

SEQ ID NO: 173144 - protein, 351 aa, Unknown
  Bacterial polypetide isolated from the Sargasso Sea
MSFIEISNVSKFWGDVKAVENININVDEGEFVVLLGPSGCGKSTTLRLIAGLESVSSGEISIAGKNINNLDPSLRNISMVFQSYALFPHLNVEENIVFGLKVRNVKSTDREIRLKKVAEKVGLTNYLKRKPAELSGGQRQRVALARAIISDNKICLMDEPLSNLDAKLRNQMRLEIRSLQKDLNITLLYVTHDQTEAMSMADKIVLLNEGEIVQQGNPKMLYEKPDNIFTAKFLGNPPMNLINIFVEKDENFLSSMDEKHFIPKNFKNKTYLGIRPEDIEISKEGIKCLINDIDYQGADIVLNLKLGNQEIFARLDSKKVDELDKEVFINWNEENLHFFDFESGERIFENS

SEQ ID NO: 173145 - protein, 244 aa, Unknown
  Bacterial polypetide isolated from the Sargasso Sea
MSEPIIKIQNMNKWFGDFQVLKDVNLEVEKNKKIVVCGPSGSGKSTLIRCINRLEEHQKGNIIVDGTELNENTKNIEQIRAEVGMVFQQFNLFPHLSILDNCTLAPIWVKKMPKKDAEELAMKQLEQVQISDQAKKFPGQLSGGQQQRCAIARALCMEPKIMLFDEPTSALDPEMIKEVLDAMVNLAKAGMTMIVVTHEMGFAKEVADEVIFMDEGMIVEKANTKEFFANPKSDRTKLFLSQIL

SEQ ID NO: 173146 - protein, 245 aa, Unknown
  Bacterial polypetide isolated from the Sargasso Sea
MTTAIEIKNVSKWFGDFKALDDVSLTTSQGEKVVICGPSGSGKSTLVRCINRLEIHQKGTIKVRGIELTDHDSSISEIRSEVGMVFQQFNLFPHLTVLQNLTLGPTKALGLSQKEANERAFKLLERVRIPEQANKKPGHLSGGQQQRVAIARSLCMEPKIMLFDEPTSALDPEMISEVLDVIVDLANEGMTMVVVTHEMGFARKVADRMVFMDEGKIIEMGKPKDFFDSPKTERCKLFLNQILQH

SEQ ID NO: 173147 - protein, 349 aa, Unknown
  Bacterial polypetide isolated from the Sargasso Sea
MSNIKFNGVNKSFGSNKIITDFSLLGKEDEFLVLVGPSGCGKSTLLRMIAGLEKIDEGEIFINDQKINDLHPSKRQTAMVFQSYALYPHMNVYENMSFGLKIEKRSKEEIQTKVMEAAKILKIEELLERRPKQLSGGQRQRVAIGRAITRNPKIFLFDEPLSNLDAALRSEMRVEISKLHNQIKTNMIYVTHDQVEAMTLADRIVILNLGKIEQVGTPDEIYNNPANIFVAQFIGTPKMNILPLNNENIVSDNKINFLGNEIIFEKIKFDKKKYFLGIRPEHFNLSSSSQFKIKPRIDLVENLGNEKIVYMSNDNLELSAKISSQEDFQNEINFDLKDIFIFDEDGNRV

SEQ ID NO: 173148 - protein, 270 aa, Unknown
  Bacterial polypetide isolated from the Sargasso Sea
MSLSAAPVAKQHFERTQLTVDRLSYAIGDKAVLKDISVQFQPSSVTALLGPNGAGKSTLLKALCQEIPAARGSIRLGHCPLVDWPRAELAKSLAVLPQHASLTFPFKVHEVVAMGLYPLTLSQQAGQNLVTKWLTEVEIVHLAQRSYPTLSGGEKQRVQLARVLTQLSQSPFPPILLLDEPTSALDLAQQHKVLALAKNLAHKHAYTVIVVLHDLNQAARYSDRVIVLKQGEIVSEGSASKALSAEIIRQVWDYEPEFIPAPQGGYPLIF

SEQ ID NO: 173149 - protein, 230 aa, Unknown
  Bacterial polypetide isolated from the Sargasso Sea
FGDFQVLKDVNLEVEKNKKIVVCGPSGSGKSTLIRCINRLEEHQKGSIVVDGTELTEETKNIEQIRAEVGMVFQQFNLFPHLSILDNCTLAPIWVKKMPKKEAEDLALRQLKQVQIDDQAYKYPGQLSGGQQQRCAIARALCMEPKIMLFDEPTSALDPEMIKEVLDAMVNLAKAGMTMIVVTHEMGFAKEVADEVIFMDEGMIVEKANTKEFFANPKSDRTKLFLSQIL

SEQ ID NO: 173150 - protein, 359 aa, Unknown
  Bacterial polypetide isolated from the Sargasso Sea
MKHSFERLRLDGVCRSFTNAQGAQVAALDGLDLEIRRGEFIALLGPSGCGKSTALNCIAGLQPLTRGGIWLDDTRIDVLPPERRGFGMVFQNYALFPHMSVLDNVGFGLKMRGVPKQETRRRAQQALELVQLVGHEGKLPGQLSGGQQQRVAIARAIVIEPPLVLMDEPLSNLDTKLRIEMRAEIRRIHTQLERATIYVTHDQDEALSMADRIVVMKEGVVQQVATPKDVYTRPHNLHVARFMGYRNVLPFTLEGMAGDYVNVAAGGVRVTGVPMAGFDAKEVMVALRPDDIERADEGGDNTFDATVETVEYGGRDSLIRAVTPFGPIWARVAGEFTEGEPLRLRVAPSRTLVYPGAPT

SEQ ID NO: 173151 - protein, 247 aa, Unknown
  Bacterial polypetide isolated from the Sargasso Sea
MSKKEDFVKFDKVDKSYDGKVLVVKDLNLDIEEGEFVTMLGPSGSGKTTCLMMLAGFETPTNGEIYLDKNPISNIPPHKRGIGMVFQNYALFPHMTVFENLAFPLRVRKISKDDIDKKVEKALSMVSLSGFGNRMPGQLSGGQQQRVAVARALVFDPSVVLMDEPLGALDKNLRESMQYEIKHIHESIGVTVVYVTHDQGEALTMSNRIAVFNDGKVQQLSSPDKLYEEPVNSFVAEFIGENNTFAG

SEQ ID NO: 173152 - protein, 365 aa, Unknown
  Bacterial polypetide isolated from the Sargasso Sea
MSADVELSDVSVTFGSFYAAKNVNVKVNGGEFFSFLGPSGCGKTTLLRAISGFQEPSEGKVLIDNKDMSGIGPNKRPTALIFQNLALFPLMSVSENIAFSLEVRGVSKEERKKRADELLELIALEGQGDKKVHQLSGGQKQRVAIARALAVEPKVLLLDEPLSALDLKLRQRMRTELREIQKRVNITFIYITHDQGEALTMSDRIAVMNEGELEQIGKCDEVYNNPLTPFVATFVGENNPLYGKVTGIEGDKAKIETADGQYLATMNESKKLNIGDESIAFVRPESLFIPRDGDNFDNKIDVNIESFEFEGNLKNFYASLKSGAKIKFSVPNAIDTSSITSGSSIVLGFESSKSVILPKASLAID

SEQ ID NO: 173153 - protein, 321 aa, Unknown
  Bacterial polypetide isolated from the Sargasso Sea
MNSEKEKTFVKFEKIDKSYDGEVLVVKNLNLDIAKGEFVTMLGPSGSGKTTTLMMLAGFETPTNGEIYLDGMPISKIPPYEREIGMVFQNYALFPHMTVQENLAFPLEVRKMSKAETKEKVQKALDMVELGEFGTRFPAQLSGGQQQRVALARALVFEPRLVLMDEPLGALDKNLREQMQYEIKHIHDRIGITVVYVTHDQSEALTMSNRIAVFNDGVVQQLSTPDILYEKPENSFVAQFIGENNRMTGTIKSMENNYCSVELENGAGTVNALKVNVGNVGEKTQLSVRPERVSLGSEGNGENVFTGKVEELIYLGDHIRV

SEQ ID NO: 173154 - protein, 267 aa, Unknown
  Bacterial polypetide isolated from the Sargasso Sea
MNLSDSTPPVALKASGIVKWFGANRILDGVDLTVARGETVCVLGPSGSGKSTLLRCLNWLSPPDEGAIWIGDQRIGLRENPNGATSPRPEREIRAQRSRIGMVFQSFNLWPHMTVLENVMEGLLSVKRMNRLAAADLAVEALSQVGLGGKHTSMPANLSGGQQQRVGIARTLAMAPEVILFDEPTSALDPELVGEVLTVMRGLAANDTTMIVVTHEIGFARDVADRVVFMDGGRIVEQGPPAQVLDTPSSPRLQQFLYRFTPEKSRS

SEQ ID NO: 173155 - protein, 621 aa, Unknown
  Bacterial polypetide isolated from the Sargasso Sea
MDKNIYSRLLKYTFRHKGLFSLSIIGFFIFAAADISAVEWLKRVISYINNSNQSELLSPISLALFLLVVSVLRGIGFYMGNFFMANVGLKVVHNLREELISSLIYQPMSFFDLAPKGEIVNRIIFTTNQITGAATNALKILAKEGLLLIGLFVYLLYLSWKLTVVVLVITPLIAVVVSFAGKRMRRVARKIQEIMGLVTQVSNEIATGAREIKSFNNEDGEKDRFKRANDENLKQNLKMESTLNLSTPLIQVFVAFSLALMSYLALSNLDELNLPSESFVAFFTAAGLMARPIRQLSNLNAVIQRGLAAAEDIFNTIDSYPEDHESGIKLQQTLEGNVEIENVSFSYLEHSDPVLKEISISAKKGETIALVGRSGSGKSTIVNLLNRFYDSFEGKITIDGYDIRKINLKDLREVISYVSQDPVLFNDTIRNNITYGLKEVTEKAIYEAAKDANAYEFITNLPDGFDTIIGDDGVLLSGGEKQRVAIARALLKKSSILIFDEATSALDNESEKAIQTAIEKASKDKTTFIIAHRLSSVEKADKICVIEDGRITQMGKHDELMEQQGLYNKLQGKGQEKIEKETPKIEKVLPEIYVEKLGFWDRFGILNILLMPISLVYWLSI

SEQ ID NO: 173156 - protein, 244 aa, Unknown
  Bacterial polypetide isolated from the Sargasso Sea
METCVSLGDLNKWFGSFQVLDSINLSISTGEKVVICGPSGSGKSTLIRCVNALEPFQSGSVNVCGISVEKNGRNATDIQRRVGMVFQQFNLFPHLSVLKNCTLAPCRVLGLSDDEAESKAMHYLERVRIPEQASKYPADLSGGQQQRVAIARALTMEPELMLFDEPTSALDPEVVTEVLDTMVDLAETGMTMICVTHEMGFAKQVADRVVFMDEGKIIEIATPEKFFSEPTHERTKFFLSRVLG

SEQ ID NO: 173157 - protein, 320 aa, Unknown
  Bacterial polypetide isolated from the Sargasso Sea
MCKSTMLRMIAGLEDITQGTISIDGQVVNDLPPKQRNIAMVFQSYALYPHMTVFDNMAFGLKLEKRSKDEINERVNEAARILQIEDYLQRKPKQLSGGQRQRVAIGRAITRKPKVFLFDEPLSNLDAALRVQMRVELAKLHNELEATMIYVTHDQTEAMTLADDIVVLDTGIVSQKGSPLELYDKPNNMFVGGFIGSPKMNFISSKILSKSSDSTEVDIMGMSKISISKMSASSSEGDSVTLGIRPEHLVVNGNADGTWESKVFVVEKLGDVSYLYLEKDGEPLVAETEGHSEIKVGDTVKVGFPSGRCQLFDSSGQAFK

SEQ ID NO: 173158 - protein, 352 aa, Unknown
  Bacterial polypetide isolated from the Sargasso Sea
MSTVELKGIEKSFGTNKVINKFDIKIEHGEFIVLVGPSGCGKSTLLRMISGLESVDVGKIFLDEKLINNLIPSKREIAMVFQSYALYPHMNVYENMSFGLKTEKLDKKEIDKKVLAAAKTLQIEDLLDRKPRQLSGGQRQRVAIGRAITRNPKLFLFDEPLSNLDAALRSEMRVEISKLHKKLNTNMIYVTHDQVEAMTLADKIVILNKGIMEQYGTPDEIYNNPNNIFVAEFIGSPKMNILKIPKEKIKNGNTINIFKNDTQFNGYKFLDDIYLGIRPEHIIADNSEEIKVKIKADLIENLGFEKIIYTSIDGSEFRIKTSKNIENNISQISFSKDNVYFFDKEKIRIKKS

SEQ ID NO: 173159 - protein, 352 aa, Unknown
  Bacterial polypetide isolated from the Sargasso Sea
MATIELKNIEKSFGSNKVINKFNIKINHGEFIVLVGPSGCGKSTLLRMISGLESVDEGEIHLDKKIINNLIPSKRGIAMVFQSYALYPHMNVYENMSFGLKNEKIDKNEIDKKVKDAAKTLQIENLLERKPRQLSGGQRQRVAIGRAITRNPKLFLFDEPLSNLDAALRSEMRVEISKLHKKLSMNMIYVTHDQVEAMTLADKIVILNQGVTEQYGTPDEIYNNPNNIFVAEFIGSPKMNIFKIDKEKIKNQNSVNIFNNNIKFDNYKFLNDVYMGIRPEHIRVDDSGDIKFNIKIDLIENLGFEKIIYASLDGNEFRIKTSKNISKNHSQISFLKENIYFFDINKKRIYGN

SEQ ID NO: 173160 - protein, 366 aa, Unknown
  Bacterial polypetide isolated from the Sargasso Sea
MAKDSQAEAFVQFNRVQKSYDGETLVVKDLNLEIPKGEFLTMLGPSGSGKTTCLMMLAGFETATHGDIKLNGVSINNIPPHKRGIGMVFQNYALFPHMTVAENLSFPLEVRKLEKSVREEKVARALDMVEMGGFKGRRPAQLSGGQQQRIALARALVFEPELVLMDEPLGALDKQLREKMQFEITALAHRLGITVVYVTHDQTEALTMSDRVAVFNDGRIQQLATPDQLYEEPENSFVAQFIGENNTLNGVVKELKSDIATVKLDSGDIIDCKPVNVSEVGERTQVSIRPERVELDKSKLPKKAHTLTAEVLEFIYMGDTFRTRLKVAGNEDFIVKTRNSSNQVRLKPGEKVEIGWSPECCRALDA

SEQ ID NO: 173161 - protein, 203 aa, Unknown
  Bacterial polypetide isolated from the Sargasso Sea
KSTMIRCINRLEEHQEGTIVVDGIELTGNLKNIDSVRREVGMVFQQFNLFPHLSVKENITLAPIWVKKMPKAEAEELAMKQLEIVKIPEQANKYPGQLSGGQQQRVAIARSLAMNPNIMLFDEPTSALDPEMIKEVLDVMVDLAEGGMTMIVVTHEMGFAKTVANRMVFMDEGRIVEEAPPDKFFNNPESDRTKLFLSQILNH

SEQ ID NO: 173162 - protein, 244 aa, Unknown
  Bacterial polypetide isolated from the Sargasso Sea
MSESIIQMKDVNKWFGDFQVLKDINLEVKEKQKIVVCGPSGSGKSTLIRCINRLEEHQKGKIVVDGNELSEKTKDIEKIRAEVGMVFQQFNLFPHLSILDNCTLAPIWVKKTPKKQAEEFAMKQLEQVQIADQAQKFPGQLSGGQQQRAALARALCMEPKIMLFDEPTSALDPEMIKEVLDAMVNLAKAGMTMIVVTHEMGFAKEVADEVVFMDEGMIVERANTKDFFANPKNERTKLFLSQIL

SEQ ID NO: 173163 - protein, 322 aa, Unknown
  Bacterial polypetide isolated from the Sargasso Sea
LEESQIGCLLGPSGCGKTTVLRAIAGFENPTKGEIVLNGNKLNGSKIFVEPEKRQIGMVFQDIALFPHLSVESNIQFGIRTLPQTQRDKRSNELLDLVGMSQFKKTYPHELSGGQQQRIALARAIAPKPSLLLMDEPLSSLDEELREQLAREIRLILQQEKISAILVTHDQNEAFAVGDHICVMHQGRVQQNDSAYNLYHRPLNRFVAEFIGEGALLPGVVADEDTITTDLGEIKVNLPESCKHQDNVDVLIRPENVILGDDKENKAVITERYFRGSGYLYSLKTRGGEELLCLIPGTEALQIDQSISVRLQIERPVVFSRP

SEQ ID NO: 173164 - protein, 219 aa, Unknown
  Bacterial polypetide isolated from the Sargasso Sea
MNNKLIHCQGLSKSYYQADENLVVLNNLSFSVEKGESIGLIGASGCGKSTLLHILAGLDLPDSGEVSFNGNNIVLLNANERAAFRNKNIGFVYQFHHLLPEFSALENTAFPLWLSGKSKEKSLIQAKDILDKVGLKSKENNKPSQLSGGERQRVAIARSIINKPASLLMDEPTGNLDNRNIDNFMSLILDLSCELDISLIIATHDNNVSSRLDRILNLE

SEQ ID NO: 173165 - protein, 238 aa, Unknown
  Bacterial polypetide isolated from the Sargasso Sea
VELGDFGTRFPAQLSGGQQQRVALARALVFEPRLVLMDEPLGALDKNLREQMQYEIKHIHDRIGITVVYVTHDQSEALTMSNRIAVFNDGVVQQLSTPDILYEKPENSFVAQFIGENNRMSGTIKGMENNYCSVELENGAGIVKALKVNVGGVGEKTQLSVRPERVSLGSDGNGENVFTGKVEELIYLGDHIRVRLDVCGNNEFIVKVPNEGSFNYNEGDSIKLNWNPDDIRALDPVN

SEQ ID NO: 173166 - protein, 360 aa, Unknown
  Bacterial polypetide isolated from the Sargasso Sea
MNENFIQINGISKHFGNVKAVDDVSFSIKEGEFFSLLGPSGCGKTTLLRLLAGFEYPTNGNLLIDGSDITALPPDKRPTNMVFQNYAIFPHINVEQNIKFGLRKLGLTDDEIKKRVDDVLALVKLEGYEERFSGQLSGGQRQRVALARALVRQPKVLLLDEPLGALDKKLRDEMQLELRTLQKEIGITFVFVTHDQQEAISMSDRVAVMSEGKIQQLSAPNELYKNPENIFVSDFIGETNFLKASTKSKDGDHINVAIEDLGDFKVKNNLNIPENSSDVVCSVRPESMMISRDKSDWDICLEAKINQTSYLGEMTRFYVEVSGINKVITVSSQHFDNQSFENNTCFISISLEDISLLQKK

SEQ ID NO: 173167 - protein, 365 aa, Unknown
  Bacterial polypetide isolated from the Sargasso Sea
MSSSEAFVQFKNVQKSYDGETLVVKNLNLDIQEGEFLTMLGPSGSGKTTCLLMLAGFETATHGEIILNGKPINNVPPHKRNIGMVFQNYALFPHMTVKENLAFPLKVRKLPNSEIESKIKRALDMVQLDGFQNRRPMQLSGGQQQRVAVARALVFEPSLVLMDEPLGALDKQLREQMQYEIKHIHENLGVTIVYVTHDQSEALTMSNRIAVFNDGIIQQLASPEQLYEAPENAFVAQFIGENNTLRGKVSDMNGTTCKVTLENGQSVDALVVNVDSVGAETSISLRPERVFVNPKKNSCKNLVEAQVLELIYLGDHIRSRVNVCGHDDFIIKVPNSADHTQLKPGDSVQVGWHVEDARALDMHAA

SEQ ID NO: 173168 - protein, 325 aa, Unknown
  Bacterial polypetide isolated from the Sargasso Sea
MGAIDIKSAGKIYPNGTRALEDVSITINDGEFVVLVGPSGCGKTTLLRMVAGLEDITEGEIAIGEKTVNEVAPKDRDIAMVFQNYALYPHMSVFDNMAFSLKLRKLPKNEVEKKVKDAAKTLEISELLDRKPKALSGGQRQRVAMGRAIVRNPQAFLMDEPLSNLDAKLRVQMRAELGQLHTQLQTTTLYVTHDQVEAMTMGDRVAVIRKGELQQIDTPREIYSNPKNIFVAGFIGSPSMNFVYAKIKSKDDVIELTFGDNQITYKDEKKEKLKSFENKEIVLGIRPEAFEDGHFANQSDYSESIKVKVSLLEQLGSDSYIHFYK

SEQ ID NO: 173169 - protein, 181 aa, Unknown
  Bacterial polypetide isolated from the Sargasso Sea
LMALNLDGNTKNIDKIRSEVGMVFQQFNLFPHLSIIDNCTLAPMWVKKKSKKECETLAKEYLEKVQILDQGNKFPGQLSGGQQQRAAIARALCMEPKIMLFDEPTSALDPEMIKEVLDVMVDLAKGGMTMCVVTHEMGFAKEVADRVIFMDEGNIVEEKNTKEFFENPENDRTKLFLSQIL

SEQ ID NO: 173170 - protein, 361 aa, Unknown
  Bacterial polypetide isolated from the Sargasso Sea
MSNEQFVRFENVDKSYDGKLLVVKGLNLDIAEGEFVTMLGPSGSGKTTCLMMLAGFETPTNGQIYLDNNVISDIPPHKRGIGMVFQNYALFPHMTVYENLAFPLRVRKIPKDEADKKVDKALSMVSLQGFEARMPMQLSGGQQQRVAVARSLVFDPKLVLMDEPLGALDKNLRESMQYEIKHIHESIGVTVVYVTHDQTEALTMSNRIAVFNDGKVQQLSSPDELYERPVNSFVAEFIGENNTFGGEVIEASGDKCKVKLNSGAEILANPIVVKAKGEKTNVSLRPERAIIDPTTTMDNNHKGKIEEVIYHGDHTRLRVDLLGNKDFILKVPNSSNRMDIKEGREIKIGWNSVDCRALDPK

SEQ ID NO: 173171 - protein, 347 aa, Unknown
  Bacterial polypetide isolated from the Sargasso Sea
MGSIKLNSIEKWFDQLQVIKGIDLEIMDGEFVILVGPSGCGKSTLLRMIGGLEETSRGSIILDGNDVTDQPPSKRGLSMVFQSYALYPHMTVRENMGFSLKVAGTQKEVIDDKVDRAAQILKLEDFLDRRPKDLSGGQRQRVAIGRSIVRAPTAFLFDEPLSNLDASLRVEMRLELARLHQTLKTTMVYVTHDQVEAMTLADRIVVLESGKIAQIGTPKQLYEQPANLFVAQFVGSPKMNIISRQVAGSVSKNGEFLEALIKNKQAENIGVRPEHFTLQRGQKKGFLGSVSVVEYLGADCFVFVNCGDLGTINVRIEGSEQYMIDEKVSVTPMLEHVHFFDQQGNRL

SEQ ID NO: 173172 - protein, 344 aa, Unknown
  Bacterial polypetide isolated from the Sargasso Sea
MLVLQQVSIAYGQATVVKDVSLTLQQGQIGCLLGPSGCGKTSLLRAIAGFEPVQTGSVVLAGSSLSEPGNMVNPEQRRIGMVFQDFALFPHLTVAQNIAFGLKKKPKAQQQQIVDELLAVVGLPTLGDRYVHQLSGGQQQRVALARALAPEPDVLLLDEPFSGLDADLREALAQDIRAILKQRGISALMVTHDQFEAFAMADQIGVMQHGKLQQWGSAYELYHQPANRFVADFVGHGALLKGEVLADEKVYTALGVFAQTQSNFTAGVAVDLLVRPDDIVHDDQSGFTAKVVSKSFRGSHILYSLELEGAEQVYCLAPSHHNHQLHSRIGIKLELDHLVLFQRL

SEQ ID NO: 173173 - protein, 299 aa, Unknown
  Bacterial polypetide isolated from the Sargasso Sea
MLSVSQLSIDYGSNRVVSDLNLTLGENEILMLVGPTGCGKSTILQALAGLIPISEGEINADKWRATRNKSVPPEKRSVGMVFQDFALFPHLTVEQNICFKLKDHSVADHWINLLGLEEFRTKKPATLSGGQKQRVALARTLAHQPDFVLLDEPLSNLDAALKDMLRWDIRNALKNAGVPAIWVTHDQEEALSVGDRVGVLKGGQIQQIDTPEKCFSTPENRFVARFLGEASFIKGTLNNGQALTDIGNVPAHGVDCAQGNVDVLLRPDDVLLVQSSIGNNGEVIWVRFEGGSRLCAIKL

SEQ ID NO: 173174 - protein, 350 aa, Unknown
  Bacterial polypetide isolated from the Sargasso Sea
MATIELKNIEKSFGTNKVINKFDIKISDGEFIVLVGPSGCGKSTLLRMISGLESIDLGEIYLDNKLINNLIPSKREIAMVFQSYALYPHMNVFENMAFGLKMEKIPKSEISQKVNDAAATLQIEDLLERKPKQLSGGQRQRVAIGRAITRSPKVFLFDEPLSNLDAALRSEMRVEISKLHKKMNSNIIYVTHDQVEAMTLADRIVVLNKGNIEQYGTPNEIYSDPNNIFVAEFIGSPKMNIIKINKENISNSNTLHLFNNKITFDNLEFKDEIYIGIRPEHISLKNNHEIKVDVKIDLVENLGFEKIIYSKVSENQIIIKSSENINNHSLKISFSKDKVLFFDKDKNRIR

SEQ ID NO: 173175 - protein, 362 aa, Unknown
  Bacterial polypetide isolated from the Sargasso Sea
MSEKDSFVKFEKVDKSYDGEILVVKDLNLDVPKGEFLTMLGPSGSGKTTVLMMLAGFETPTSGEIYLDGNPISSIPPNKRGIGMVFQNYALFPHMTVKENLAFPLEVRKMQKSEIDEKVGNALAMVELQDFGNRMPLQLSGGQQQRVALARSLVFEPRLVLMDEPLGALDKNLREQMQYEIKHIHEKIGITVVYVTHDQSEALTMSNRIAVFNDGKIQQISSPDVLYEKPNSSFVAQFIGENNQLKGKVKSINGENCIVTTESGDDIHALKINVNNNGDGSLVSLRPERVAINSSENFENNFDAKVKELIYLGDHIRSRVEVCGNDQFIVKIPNSYKEENLKEGSTVKLSWKASDSRALDLN

SEQ ID NO: 173176 - protein, 365 aa, Unknown
  Bacterial polypetide isolated from the Sargasso Sea
MSADVELQDVSIAFGDFYAAKNVNVKIEAGEFFSFLGPSGCGKTTLLRVVSGFLEPSEGKVLIGGQNMSGIGPNKRPTSLIFQNLALFPLMSVADNIAFSLEVRGVSKQARRKRADELLDLVALNGQGDKKVHELSGGQKQRVAIARALAVEPEVLLLDEPLSALDLKLRQKMRTELRAIQQRVGITFIYITHDQGEALTMSDRVGVMNDGQLEQVGSCYEVYQAPSTPFVATFVGENNAFSGKVEKVSKGIAQVDVEGTSFSGSIGKTTVGDLHPVGVGDEVIIFVRPESLSLAKGTKAPKNKFSADIETIEFEGNLKNIYLKSSKSKSIRFSVPSVFDTSELTLGSTIELSFSAESAIFAKRP

SEQ ID NO: 173177 - protein, 368 aa, Unknown
  Bacterial polypetide isolated from the Sargasso Sea
MKDRSKEDEVADININTVNKYFGDVHVIKDVSLDIKSQSFTVLVGPSGCGKSTMLRMIAGLEDINSGTISIDGQVVNDLPPKQRNIAMVFQSYALYPHMTVFDNMAFGLKLEKRSKDEINERVNEAARILQIEDYLLRKPKQLSGGQRQRVAIGRAITRKPKVFLFDEPLSNLDAALRVQMRVELAKLHNELEATMIYVTHDQTEAMTLADDIVVLDTGIVSQKGSPLELYDKPNNMFVGGFIGSPKMNFISSKILSKSSDTTEVDIMGTSKISVSRMSASSSEGDSVTLGIRPEHLVVNGDADGSWESKVFVVEKLGDVTYLYLEKEGEPLVAETEGHSEIKVGDTVKVGFPAGRCQLFDSSGEAFK

SEQ ID NO: 173178 - protein, 186 aa, Unknown
  Bacterial polypetide isolated from the Sargasso Sea
MNNLSTTYLSVIDLCKYFGAFQALKNISIEINEGEFACFLGPSGCGKTTLLRCIAGLETQSSGSISQKEIEISSLPPSARDFGIVFQSYALFPNLTVFSNISYGLINNKWGKDEIKSRVEHLLDLVGLKSHAGKYPSQLSGGEQQRVALARALATSPGLLLLDEPLSALDAKVRLYLRKQIKNLHR

SEQ ID NO: 173179 - protein, 239 aa, Unknown
  Bacterial polypetide isolated from the Sargasso Sea
MNNSFIQINNISKHFADVKAVDDVSFEIKEGEFFSLLGPSGCGKTTLLRLLAGFEYPTSGNLLIDGTDITALPPDKRPTNMVFQNYAIFPHLNVEKNIQFGLRKLGLSNDEIDKRVKEVLSLVKLEGYEERFSNQLSGGQRQRVALARALVRQPKVLLLDEPLGALDKKLRDEMQLELRTLQKNIGITFVFVTHDQQEAISMSDRVAVMNDGKIQQLSAPNELYKNPKNIFVSDFIGET

SEQ ID NO: 173180 - protein, 349 aa, Unknown
  Bacterial polypetide isolated from the Sargasso Sea
MANIKFTGVHKSFGSNKIITDFNLSGKDDEFLVLVGPSGCGKSTLLRMIAGLEQIDEGEIFINDQKINDLHPSKRQTAMVFQSYALYPHMNVYENMSFGLKIEKRSKEEIQTKVMQAAKILKIEELLERRPKQLSGGQRQRVAIGRAITRNPKIFLFDEPLSNLDAALRSEMRVEISKLHNQIKTNMIYVTHDQVEAMTLADRIVILNLGNIEQVGTPDEIYNNPANIFVAQFIGTPKMNILPLNNENIISDNKIIFLGNEITFEKTKFDKKKYFLGIRPEHFNLSNESQFKFKPKIDLVENLGNEKIVYMSNDNLELSAKISSQEDFQNQINFDSKDIFIFDENGRRI

SEQ ID NO: 173181 - protein, 339 aa, Unknown
  Bacterial polypetide isolated from the Sargasso Sea
MKTLKIEDLSKNFGSTEVLKKINLEIDEGNFLVLLGPSGCGKSTLLNIIAGLESINEGNVFIDDYNVSKVEPKDRNIAMVFQSYALYPSMNVRENMIFGLKQAKTSKEKIEQQLEKVSKFLQVDQLLERKPSQLSGGQRQRVAIGRALVREPRIFLFDEPLSNLDAKLRVEMRREIKKLHQQLKTTVVYVTHDQTEAMSLGTRIAIMNHGVIQQNDTPENIYNKPSNTFVADFIGSPSMNLIKGTLKESSGEISFTASGSNFEIPVKGYEFKDKSNLNNKEVFFGVRPEHIYFKKSNETDFEVTLRADLSEYIGHEQIMTFDYANQEILAKFPSQLKLN

SEQ ID NO: 173182 - protein, 229 aa, Unknown
  Bacterial polypetide isolated from the Sargasso Sea
MSKIIIKNLEKSFGNNKIINNFNIDIEDGEFIVLVGPSGCGKSTLLRMISGLENIDRGEIFLDQKLINNLLPSKREIAMVFQSYALYPHMNVFENMSFGLKMERIKKSEINQKVNNAAATLQIEDLLKRKPKQLSGGQRQRVAIGRAITRNPKVFLFDEPLSNLDAALRSEMRVEISKLHKKLKSNIIYVTHDQIEAMTLADRIVVLNKGNIEQYGTPNEIYSDPNNIF

SEQ ID NO: 173183 - protein, 223 aa, Unknown
  Bacterial polypetide isolated from the Sargasso Sea
MSSDQSGALAGTAAPFPGLSAQAGDAAENFIQIVDVVKKFGETVAVKGVNLSVKKGELFALLGSSGCGKSTLLRMLAGLESITSGKILIDGEDLAQLPPYRRPVNMMFQSYALFPHMTVEANVAFGLKQEGVPKAELKDRVQNALDLVQMGRFAKRKPHQLSGGQQQRVALARSLVKRPKLLLLDEPMSALDKQIRQRTQIELVNILDKVGVTCMMVTHDQEE

SEQ ID NO: 173184 - protein, 148 aa, Unknown
  Bacterial polypetide isolated from the Sargasso Sea
TALENVMFGPIQVRAATRAEARDQAMALLDKVGLESRANHYPSELSGGQQQRVAIARALAIKPKLMLFDEPTSALDPELRHEVLKVMQDLATEGMTMIVVTHEIGFAKRVGTRLLFMDNGGIAEDGEPAALIDNPPTQRLQDFLKHVA

SEQ ID NO: 173185 - protein, 244 aa, Unknown; identical to SEQ ID NO: 173042
  Bacterial polypetide isolated from the Sargasso Sea

SEQ ID NO: 173186 - protein, 280 aa, Unknown
  Bacterial polypetide isolated from the Sargasso Sea
GFSNYAIFPHLNVEQNVAYGLHKKSISKIEKEEMINQVLELVGLSGLNQRSANALSGGQKQRVALARALILKPKVLLLDEPLSALDKKLREQMQLELRHLQRAVGITFILVTHDQEEALTMSDKVAVMFDGKVEQVASPRELYERPTSQRVASFIGAMNFINGTVMEAKNEIGINSDILGPLTISRSQVFGDLTENKIIIGIRPERISIVSDGSSVAGSISGRITDASYFGETTYYKVACGKGSETLTVSAQNSFGQMDYQIGEEVKLNVDIKSLVGFLD

SEQ ID NO: 173187 - protein, 297 aa, Unknown
  Bacterial polypetide isolated from the Sargasso Sea
IYLDSNPISNIPPHKRGIGMVFQNYALFPHMTVYENLAFPLRVRKVQKDEIDKKVDKALSMVSLSGFESRMPAQLSGGQQQRVAVARALVFDPAVVLMDEPLGALDKNLRESMQYEIKHIHENIGVTVVYVTHDQGEALTMSNRIAVFNDGKVQQLSSPDKLYEEPVNSFVAEFIGENNTFGGEVTDISKDVCKVKLQNGEILANPVSVTSKGDKTTVSIRPERALINPKDKMDNNQTGKIEEVIYHGDHTRVRLDLLGNKEFILKVPNSSNELDLKLGNEIKVGWNSQDARALDPK

SEQ ID NO: 173188 - protein, 364 aa, Unknown
  Bacterial polypetide isolated from the Sargasso Sea
MKTLKIEELSKNFGSTEVLRKINLEIDEGNFLVLLGPSGCGKSTLLNIIAGLETINEGNVHIDDYNVSKVEPKDRNIAMVFQSYALYPSMNVRENMIFGLKQAKVSKEKIEEQLEKVSKFLQVDALLERKPSQLSGGQRQRVAIGRALVREPRIFLFDEPLSNLDAKLRVEMRREIKKLHQQLKTTVVYVTHDQTEAMSLGTNIAIMNHGVIQQNDTPENIYNKPSNTFVADFIGSPSMNLIKGNLKESSNKVSFITNGSNIEIPINGYDFKEKSNLDNKEVFFGIRPEHIFFKKSNEEDFEINLRADLSEYIGHEQIMTFNFENQEVLAKFPSTVKIDLSKNTKLFFDLTQISLFDAKTEERI

SEQ ID NO: 173189 - protein, 231 aa, Unknown
  Bacterial polypetide isolated from the Sargasso Sea
MSDPIIQIKDMNKWFGDFQVLKDINLEVEKNKKIVVCGPSGSGKSTLIRCINRLEEHQKGTIVVDGTELSEDTKNIETIRAEVGMVFQQFNLFPHLSILDNCTLAPIWVKKTPKKQAEELAMKQLEQVQIVDQAHKFPGQLSGGQQQRCAIARALCMEPKIMLFDEPTSALDPEMIKEVLDAMVNLAKAGMTMIVVTHEMGFAKEVADEVIFMDEGMIIEKAMTKEFFANP

SEQ ID NO: 173190 - protein, 365 aa, Unknown
  Bacterial polypetide isolated from the Sargasso Sea
MAKLSLRNVQKHYANLQVVHGIDMEIGDGEFIVIVGPSGCGKSTLLRMVAGLEPITGGEVWIGDRVVNELEPAERDIAMVFQNYALYPHMSVFDNMAYGLKIRGLPKSDIQARVEQAAGILELGKLLDRKPRQLSGGQRQRVAMGRAIVREPAVFLFDEPLSNLDAKLRVQMRLELKDLHRRLRTTSLYVTHDQVEAMTLADRMMVLNGGRVEQIGTPLEVYSRPASTFVAGFIGSPPMNLVPVSRNAGGDTQIRVDGAKESDAAATLGHLPMGLHLPERALMGLRPEHIEPCSADEAIAFIDVRVVEALGADAFAYGALAGHPVVVRLEPHASVKAGDKLPITASAEHLHWFDPQTTRRIEALA

SEQ ID NO: 173191 - protein, 351 aa, Unknown
  Bacterial polypetide isolated from the Sargasso Sea
MSFLELKKVTKVYPNGTKAVQPTSLKIEKGEFMVFVGPSGCGKSTLLRMVAGLEDITTGDIKLDKKIINKIDPSERDVAMVFQNYALYPHMNVYNNLAYGLKNRGLAKDVIEKKVKAAAKLLQISDYLERRPALLSGGQRQRVAMGRAIVRSPKIFLFDEPLSNLDAKLRIQMRLEIKKLQRKVGVTSIFVTHDQVEAMTLADRLAVINNGIIEQLGTPIEIYNNPTSVFVAGFIGSPQMNFIEGELKNKKLKTQSFEIAGIKSDFNGKVILGIRPEHMVQAYNGLIKLNVDLVEKLGSDNLVYGEIKGKKDLLCYRTPGNEKINSGSKLALNIQDNKLYIFNKKTGKRII

SEQ ID NO: 173192 - protein, 244 aa, Unknown
  Bacterial polypetide isolated from the Sargasso Sea
MSENIINIKNVNKWFGDFQVLKDINLEVKPKEKIVVCGPSGSGKSTLIRCINRLEEHQQGDIIVDGNTLTDDTKNIEQIRSEVGMVFQQFNLFPHLSVLDNCTLAPIWVKKLPKKEAEELALEHLERVQILDQAQKYPGQLSGGQQQRVAIARALCMKPKIMLFDEPTSALDPEMIKEVLDVMVNLAKQGMTMIVVTHEMGFAKEVADKMIFMDEGMIVEKADTSEFFANPKSDRTKLFLSQIL

SEQ ID NO: 173193 - protein, 254 aa, Unknown
  Bacterial polypetide isolated from the Sargasso Sea
MNDTSQSFVKFEKIDKSYDGEVLVVKNLNLDIAKGEFVTMLGPSGSGKTTTLMMLAGFETPTNGEIFLDTKPISKIPPYEREIGMVFQNYALFPHMTVAENLSFPLEVRKISKPDIKEKVQKALDMVELGNFGTRFPAQLSGGQQQRVALARALVFEPRLVLMDEPLGALDKNLREQMQYEIKHIHDRIGITVVYVTHDQSEALTMSNRIAVFNDGVVQQLSTPDILYEKPENSFVAKFIGENNTLNGVVREVN

SEQ ID NO: 173194 - protein, 365 aa, Unknown
  Bacterial polypetide isolated from the Sargasso Sea
MAKVELKNLTKKYGEVVAVQNMDLTIPHNEFLVLVGPSGCGKSTTLRMIAGLEEISGGEIFIGDQKVNEKDPKDRNVSMVFQNYALYPHMTVEENLGFSLKIAKVNPDEIEAKVKDAVNILGLEDLRKRKPSQLSGGQRQRVAMGRAIVRRPDAFLFDEPLSNLDAKLRTQMRTEIKKLHQKLKTTVIYVTHDQVEAMTLADRIIIMKDGFIEQIGSPIDVFNNPVNVFVATFIGSPPMNIIECEITKSNNQIMIKLDNDILVHCPKDKIGKLADLKKVIVGIRAEDIVPVKSFSNEKNSLWVFSKAIDLAEPLGTETQLFFKLQNKEIISRMYNPRPVDVGESINFQIETNKIHFFNYETKKAI

SEQ ID NO: 173195 - protein, 391 aa, Unknown
  Bacterial polypetide isolated from the Sargasso Sea
MTHPAAGAAEVAGAAGLGDVADAAGLANPANVSVRNLKIQLGANTVIENLDLDVRAGEFVVLLGPSGCGKSTLLHSIAGLIDVTGGSIEIAGEDMTWADPKDRRIALVFQSYALYPTMSVERNLSFALRINGTPKAEIERRVTRASEMLQLGPLLKRKPAQLSGGQRQRVAIGRAIVREADVFLFDEPLSNLDAKLRTELRRELKQLHQRLGATMIYVTHDQVEAMTLATRMAVMRGGVIQQFGTPGEVYARPDNLFVATFLGSPAMNLLKGTLEVRDGSLHFCSANLRFDVSAYPFKNLPADRLPCVLGVRAEDVRVSERVDSGTAMSERANISLIEPMGNHRVVWLDYHGVQIASIDQTKTPLAIGDAAAFSFDGAHISLFDEEGGARL

SEQ ID NO: 173196 - protein, 244 aa, Unknown
  Bacterial polypetide isolated from the Sargasso Sea
MSDKIIQITDMNKWFGDFQVLKNINLQVDKNKKIVVCGPSGSGKSTLIRCINRLEEHQEGSIIVDGNELTADTKDIEKIRAEVGMVFQQFNLFPHLSILDNCTLAPIWVKKMPKKDAEDLAIQHLEKVQIADQANKYPGQLSGGQQQRCAIARALCMEPKIMLFDEPTSALDPEMIKEVLDAMVNLAKAGMTMIVVTHEMGFAKEVADEVIFMDEGMIVEKADTKEFFANPKSDRTKLFLSQIL

SEQ ID NO: 173197 - protein, 244 aa, Unknown
  Bacterial polypetide isolated from the Sargasso Sea
MSDTIIQIKNVNKWFGDFQVLKDINLEVQQKQKIVVCGPSGSGKSTLIRCINRLEEHQEGNITVDGNELTEDTKDIEKIRAEVGMVFQQFNLFPHLSILDNCTLAPIWVKKMPKKDAEELAMKQLKQVQIDDQANKFPGQLSGGQQQRCAIARALCMQPKIMLFDEPTSALDPEMIKEVLDAMVNLANAGMTMIVVTHEMGFAKEVADEVIFMDEGMIVEKNNTKEFFANPKSDRTKLFLSQIL

SEQ ID NO: 173198 - protein, 183 aa, Unknown
  Bacterial polypetide isolated from the Sargasso Sea
MSKIIELKNVNKWFDKFQALKEVNLEVNTQEKIVICGPSGSGKSTLIRCINRLEEHQEGQIIVDGKEISENTKDIEKIRAEVGMVFQQFNLFPHLSILDNCTLAPIWVKKMPKKKAEEIAMKNLERVQIADQAKKFPGQLSGGQQQRSALARALCMEPKIMLFDEPTSALDPEMIKEVLDSMV

SEQ ID NO: 173199 - protein, 165 aa, Unknown
  Bacterial polypetide isolated from the Sargasso Sea
MNSQDEQAFVKFEKIDKSYDGEVLVVKNLNLDIAKGEFVTMLGPSGSGKTTTLMMLAGFETPTNGEIFLDGMPISKIPPYEREIGMVFQNYALFPHMTVQENLAFPLEVRKMSKEETKNKVKKALDMVELGDFGTRFPAQLSGGQQQRVALARALVFEPKISFNG

SEQ ID NO: 173200 - protein, 194 aa, Unknown
  Bacterial polypetide isolated from the Sargasso Sea
MENNTAVINLKNITKHYEMGSQLVRALDGINIEVKRNDYLAFVGSSGSGKSTMLNILGCLDRPTSGQYHLNGKNVAELYQNDLSEIRNLEIGFIFQSFNLLPRADALNNVMQPLVYRNIGFHNRRKMAMEALTRVGLKERVDHLPNQLSGGQRQRVAIARALVTQPSILLADEPTGNLDSKTTLEIMGVFDELH

SEQ ID NO: 173201 - protein, 362 aa, Unknown
  Bacterial polypetide isolated from the Sargasso Sea
MSKNQQFVRFDKVDKSYDGKVLVVKDLNLDIAEGEFVTMLGPSGSGKTTCLMMLAGFETPTNGEIYLDKNPISNIPPHKRGIGMVFQNYALFPHMTVYENLAFPLRVRKISKEEIDKKVDKALSMVSLSGFENRMPGQLSGGQQQRVAVARALVFDPQVVLMDEPLGALDKNLRESMQYEIKHIHESIGVTVVYVTHDQGEALTMSNRIAVFNDGKVQQLSSPDELYEKPVNSFVAEFIGENNRFSGEVTDISKGKCKVKLESGTEILANPIRVKSKGEKTIVSLRPERAIINPEDKMENKHKGKIEEVIYHGDHTRVRLNLLGNKDFILKVPNSSARMDIKVGNEISIGWNSEDSRALDPK

SEQ ID NO: 173202 - protein, 341 aa, Unknown
  Bacterial polypetide isolated from the Sargasso Sea
MVFDNLIIRARSLTKSYGPEQVLTDFNLDVWKGSIFGILGVSGSGKTTALRLLAGFENPDSGSIEMHDRIVFDQETTIPPEDRNIGMVFQDYALFPHLNVEKNIAFGLSTKDINNGRLEEVLEMCNLKKYRNKFPQDISGGQQQRVALARALAPKPDVVLLDEPFTSLDAHMARELRDEVVHLLRETETTAILVTHDQEEALSVCDIVSVLEDGKVMQSATPQEIYLNPVSQNVANSVGDPNIIKGFSKNGRVETALGTFVSAYEGALDVSIRPECIELSLDSKGAYVVKECIFYGHDQVVSFENSAGQIFRSRSLPSTIFETGDKISIEISEVTTFPSNT

SEQ ID NO: 173203 - protein, 339 aa, Unknown
  Bacterial polypetide isolated from the Sargasso Sea
WLWQSTLLRIIAGLEQQTTGDVLIDNKNVNKIRASERDLAMVFQSYALYPHLTVRRNLETPLRLRDYNSFERLPLIGNFSPNKKDKTDSINQLVNKTSETLKISELLDRKPGQLSGGQRQRVALGRAMVREPVAFLMDEPLSNLDAALRVHMRSELSELHNSLKTTFVYVTHDQAEALTMSSRMAVMIDGNLLQLDTPQEVYDNPSSLSVAQFVGSPKINIFRGSSDSSGTVSFLNVNLKRKSLETNAELNIGIRPEHLEITNQSDENTFSATVAYRENLGSDIFFHVNTEEGMNRIIVRGIPQLTHNISNGSKVNIKRVSDKTLLFNQEGTRVKFNNA

SEQ ID NO: 173204 - protein, 360 aa, Unknown
  Bacterial polypetide isolated from the Sargasso Sea
MNENFIQINGISKHFGNVKAVDDVSFSIREGEFFSLLGPSGCGKTTLLRLLAGFEYPTNGNLLIDGSDITALPPDKRPTNMVFQNYAIFPHINVEQNIKFGLRKLGLTDNEIKKRVDDVLALVKLEGYEERFSGQLSGGQRQRVALARALVRQPKVLLLDEPLGALDKKLRDEMQLELRNLQKEIGITFVFVTHDQQEAISMSDRVAVMSEGKIQQLSAPNELYKNPENIFVSDFIGETNFLRASTNSKDGEHINVTIEDLGDFKVKNNLNIPENSSDVVCSVRPESMMISRNKSDWDICLEAKINQTSYLGEMTRFYVEVSGINKVITVSSQHFDNQSFENNTCFISISLEDISLLQKK

SEQ ID NO: 173205 - protein, 287 aa, Unknown
  Bacterial polypetide isolated from the Sargasso Sea
EFLQTQVHQYTKKLIDSIPKEKQELTITNTPLLKAKEVNVNYLLKKSFFKQDTYLNAVKDVNINVYPGSTTGLVGESGSGKSSLARALLGLEESKGKIYFEGRDLVNFSSSEFRNMKKDFQIVFQDPFGSLSPRQTIGDIIGEGLKVHFSDLNKQQREQKILDALTDVELDQSFINRFPHELSGGQRQRVAIARAIILEPKLILLDEPTSALDVSIQMQILELLTKLQNRLGLSYLCISHDLRVIRALSDEVYVMKDGKVVEKGMADQVFNFPQNEYTKELISAAIH

SEQ ID NO: 173206 - protein, 378 aa, Unknown
  Bacterial polypetide isolated from the Sargasso Sea
MASTSGVTNKPTTKTQEKVLLKIERVSKLFDDVRAVDDVSLTINKGEIFALLGGSGSGKSTLLRMLAGFERPTSGRIFLDGEDITDLPPYERPINMMFQSYALFPHMTVAQNIAFGLKQDKLPKAEIEQRVQEMLKLVHMEQYGKRKPHQLSGGQRQRVALARSLAKRPKLLLLDEPMGALDKKLRTQMQLEVVEILERVGVTCVMVTHDQEEAMTMAGRISIMSDGWIAQTGSPMDIYESPNSRMIAEFIGSVNLFGGEIEVDEVDHLIIKPNDLVQPFYVGYGVTTSVEEKHVWLAVRPEKTIISREQPEGEYNWAKGIVHDIAYLGGISVYYIRLENGQIVQCSMTNRERRADHATWDDEVFISWEDTSGVVLRS

SEQ ID NO: 173207 - protein, 233 aa, Unknown
  Bacterial polypetide isolated from the Sargasso Sea
MSLVVDIRKTYANAERRFTLDVSFTATTQRVVLFGPSGAGKSMTLQAIAGLLSPDEGTITLNDEPLFDAARRIDVPTRERRVAYLFQDYALFPHLNVRQNIAFGLTSGLRNPRAKAVPPEVAYWLQAFDLEALAGQYPSQLSGGQKQRVALARALVAQPRILLLDEPFAALDGAMRQRMRHELAELQARLDIPMVLISHDPDDVAAFGDQVVQLSEGRVQATPPHAEWPTRVM

SEQ ID NO: 173208 - protein, 358 aa, Unknown
  Bacterial polypetide isolated from the Sargasso Sea
MDLHSAFVVFDGVQKSYDGETLVVKDLNLTIDKGEFVTMLGPSGSGKTTCLMMLAGFETATHGVIKLGGKPINNIPPHKRGIGMVFQNYALFPHMTVNENLSFPLEVRGLNKTDREKKVANILDMVQMGEFSGRRPAQLSGGQQQRIALARSLVFEPDLVLMDEPLGALDKQLREHMQYEIKHIHDRLGVTVVYVTHDQAEALTMSDRVAVFEDGRIQQLATPEDLYERPDNAFVAQFIGENNKLVGTIEEVLGEVVICRTKLGTTFKAEKVNCGGIGSQTTLSVRPERVKIGKSGENSTKAYVEELIYLGDHIRCRMKVEDDDNFIVKVPNAEGHKQLKAGEDTTVSWSLKDCRALD

SEQ ID NO: 173209 - protein, 255 aa, Unknown
  Bacterial polypetide isolated from the Sargasso Sea
MPENNLSTANAETIISITGMHKWFGDFHVLKDIDLEVKQGERIVICGPSGSGKSTLIRCINRLEEHQQGTIVVDGTELTQDLKNIEIIRSEVGMVFQQFNLFPHLTVLENLTLAPIWVRKTPKAEAEEMAMQYLERVKIPEQSKKYPGQLSGGQQQRVAIARSLCMNPRIMLFDEPTSALDPEMIKEVLDVMIELAESGMTMLVVTHEMGFATAVAHRVIFMDEGEIIEANDPDNFFNNPQNDRTKLFLSQILQH

SEQ ID NO: 173210 - protein, 364 aa, Unknown
  Bacterial polypetide isolated from the Sargasso Sea
MADVDMRSVSKSFGDNEVIHSVDLQVEDNEFMVFVGPSGCGKSTLLRLIAGLEDVNQGEISIGGERVEHLPPAKRGIAMVFQSYALYPHMTVFENMSFGLRLAKAKKDFIQQRVQEAADVLQITELLQRKPKELSGGQRQRVAIGRAIVREPKVFLFDEPLSNLDAKLRVQMRIELTKLHQKLNATMIYVTHDQVEAMTMADKIVVLRDGHVEQVGRPLDLYHNPANLFVAGFIGSPAMNMMEGKISGISDKSLEVELEGQHKVKVLCNPNENAQTGASVHFGVRPEHLDPEGNGDAKIPAKVFAVERLGGETYLYVNTREGREFTVHAPGDKVVSEGEEISVGVSSESCHVFNQQGTAFERLA

SEQ ID NO: 173211 - protein, 355 aa, Unknown
  Bacterial polypetide isolated from the Sargasso Sea
MDKLSVDNLFLSYGDNPILKGVSFDLNPGEVVCLLGASGSGKTTLLRAVAGLEQPSSGRIELDGKVFFHGTAKVNLPVEQRSLGLVFQSYALWPHRTVADNVGYGLKLRRVSAAEQKKRVQSALDQLGLGHLAARYPYQLSGGQQQRVAIARALVYNPPVILLDEPLSNLDAKLREEARAWLRELIVSLGLSALCVTHDQTEAMAMSDRILLLRNGRIEQEGTPAELYGAPRSLYTAEFMGSNNRIDARVAAVDGERVTLAGDGWQLQAQAREALSTGQNAQAVIRLERVQVADGPGANRLEADLITSMYLGDRWEYLFHCGDLRLRAFGHVPRAAGRHWIEFPANDCWAFAQAS

SEQ ID NO: 173212 - protein, 359 aa, Unknown
  Bacterial polypetide isolated from the Sargasso Sea
MENSSLNISIKNVTKKYDEFYALKDISLDITSGEFMTLLGPSGSGKTTLLMVLAGFTNPDYGSVKFGDEEVILKPPHLRGIGMVFQNYALFPHMTVEQNVGYPQKLRGVSKAETSRTVDEALETVKLGGLGHRRVDELSGGQRQRVALARAIVFKPKILLMDEPLSALDKKLREEMQIELRQLHDTLNMTTVYVTHDQKEALTMSDRITVINGGELMQLGTPNEIYEHPENGFIADFIGESTLLPVQVKNSKATIGETEINVAQPLDKDGNFSLVVRPEKVFLAPSKKKKDENHFNGTLLDSIFQGESQLLVIELETAGAEAQELRVRIPNQSVTDKALPAIGEKVTIALKVADSYVVS

SEQ ID NO: 173213 - protein, 214 aa, Unknown
  Bacterial polypetide isolated from the Sargasso Sea
MATKASEISELIKQQIKNFEHEAKSSDVGTVVSVTDGITRIHGLNDVQYGEMIEFPGDTFGLALNLEQDSVGAVVLGDYTHISEGAQVKTTNRILEVPVGEGLLGRVVDSLGTPLDGKGAVSSDQTAPIEKVAPGVISRQSVDQPVQTGLKSIDAMVPIGRGQRELIIGDRQTGKTAVAVDTIINQKGTGIKCIYVAVGQKNSSVANVVKKLEE

SEQ ID NO: 173214 - protein, 274 aa, Unknown
  Bacterial polypetide isolated from the Sargasso Sea
MAKVSLQGVSKFYGKVQAVKKIDLEIIDKEFLVLVGPSGCGKSSSLRMIAGLEEIDEGIIKIGDKEMNNLEPRERNVSMVFQNYALYPHMTVEENLGFSLKIAGLGKKEIEERVHEAAGILDITEFLQRKPSQLSGGQRQRVAMGRAIVRRPDVFLFDEPLSNLDAKLRNQMRTEIKRLHQKVSTTIVYVTHDQVEAMTLADRIVIMKDGIIEQTGTPLDLFERPATKFVATFIGSPSMNMIKASIIKHNDQLSMKTNDGIIVPVPKDKQNSIS

SEQ ID NO: 173215 - protein, 264 aa, Unknown
  Bacterial polypetide isolated from the Sargasso Sea
MEIDTSEFVSLLGPSGCGKTTALKIISGFIKPDFGSVSIENFDVSEVPPEKRNTAMCFQSYALFPHLTVKENIKFGLHEKKIPQEQANILFEEAISQLSLEKELSKYPNELSGGQQQRVALGRALVTRPKIILFDEPLSNLDAILRGSVRDEIKRVQSEFNLTAIYVTHDQSEALSISDRVVLMKDGKIEQVDTPENIYDSPSSYFSASFVGISNIHQINNINKIDENQYYVDTNIGQLKIYCDNFFDTNNYISWRPENAIIER

SEQ ID NO: 173216 - protein, 358 aa, Unknown
  Bacterial polypetide isolated from the Sargasso Sea
MSSINIKSLNKYYGKTHVIKDFSLDIKDQSFTTLVGPSGCGKSTLLRMIAGLEEINSGTISIDDREVNDLSPKDRNIAMVFQSYALYPHMTVFDNMAFGLKLEKRSKEEINERVLEAAKTLQIQDYLERKPKQLSGGQRQRVAIGRAITRKPQVFLFDEPLSNLDAALRVQMRIELAKLHEQLNTTMVYVTHDQTEAMTLSNEIVVLDQGEISQQGDPIELYNKPNNLFVAGFIGSPKMNFIPAKYKSSSSESTEVEALGTNLVLPKKTISQSDEKITFGIRPEDIHITANSNHDWESKAFVVEKLGSNTFIYLEHDNEPVVVEAPGDSPVKVGDTIKVKFDLDRSNLFNSQNTNIIG

SEQ ID NO: 173217 - protein, 368 aa, Unknown
  Bacterial polypetide isolated from the Sargasso Sea
MIKKEGSFKYLEIKNISKNFGETFVLKNIHLDVFKGEFLCLLGPSGCGKTTLLRIISGLERQTNGDIVQDGLLISNSPTEKRDFGIVFQSYALFPNLNAKQNIAYGLENKKINKKEIEKRTNNLLRLVGLEKYSDQFPSQLSGGQQQRVALARAMALSPGLLLLDEPLSALDAQVRSKLRNEIKLIQKKLNLTTIMVTHDQTEALSMADRVVVMERGHIAQIGTPFELYENPITPFVADFIGKMNLLKGKYDKKNCVFYYLNNRFLISQNTEYSFLENCLLGIRPEDIEIIKFRKNIEKEENILRVKIKEITYLGTIFRLTVVLESKLEENIFVDVISNQVISNNLKIGDFIDIKLKKEKIKLFESNL

SEQ ID NO: 173218 - protein, 206 aa, Unknown
  Bacterial polypetide isolated from the Sargasso Sea
MSDPIIKIQNMNKWFGDFQVLKNINLEVEANKKIVVCGPSGSGKSTLIRCINRLEEHQEGDIIVDGNELSEKTKDIEKIRAEVGMVFQQFNLFPHLSILDNCTLAPIWVKKMPKKEAQELALDQLKKVQIDDQANKFPGQLSGGQQQRCAIARALCMQPKIMLFDEPTSALDPEMIKEVLDAMVNLAKGGMTMIVVTHEMGFAKEV

SEQ ID NO: 173219 - protein, 358 aa, Unknown
  Bacterial polypetide isolated from the Sargasso Sea
MAEINISNINKSFGSTHVIKDVSLDIKSESFTVLVGPSGCGKSTMLRMIAGLEEINSGTISIDGQVVNDLPPKERNIAMVFQSYALYPHMTVFDNMAFGLKIEKKSKEEITERVMEAAKILQIEEYLERKPKQLSGGQRQRVAIGRAITRKPKVFLFDEPLSNLDAALRVQMRVELAKLHDQLNATMIYVTHDQTEAMTLADDIVVLDQGIVSQKGSPLKLYNEPENLFVGGFIGSPKMNFINSKVISSNSSSTEVEISGQGKIIVPKTSDKVSPGDTVKIGIRPEHILINTAEKCWESKVFVIEKLGSSTFLYLEKEGEPLVVQTDGASKVNVGDNLSLSVDLNKCHLFDSNNLAFK

SEQ ID NO: 173220 - protein, 365 aa, Unknown
  Bacterial polypetide isolated from the Sargasso Sea
MSADVELNNVSVTFGSFYAAKSVNVKINGGEFFSFLGPSGCGKTTLFRAISGFQDPSEGSVLIDNKDMSGIGPNKRPTSLIFQNLALFPLMSVSENIAFSLEVRGVSKGDRQKRADELLELIALEGQGEKKVHQLSGGQKQRVAIARALAVEPKVLLLDEPLSALDLKLRQRMRTELREIQKRVNITFIYITHDQGEALTMSDRIAVMNEGEIEQIGPCDEVYNNPLTPFVATFVGENNPLFGKVKEINQNKIKIETPDGDFVSTMNENKKLNIGDEAIAFVRPESLFIPRDGDSFDNLIDVNIESFEFEGNIKNFYATLKSGTKIKFSIPNAIDTSSISSGTKLQLGFESTKSSILPKAQLAID

SEQ ID NO: 173221 - protein, 364 aa, Unknown
  Bacterial polypetide isolated from the Sargasso Sea
MKTLRIEELSKNFGSTEVLRKINLEIDEGNFLVLLGPSGCGKSTLLNIIAGLETINEGNVHIDDYNVSKVEPKDRNIAMVFQSYALYPSMNVRENMIFGLKQAKVSKEKIEEQLEKVSKFLQVDALLERKPSQLSGGQRQRVAIGRALVREPRIFLFDEPLSNLDAKLRVEMRREIKKLHQQLKTTVVYVTHDQTEAMSLGTNIAIMNHGVIQQNDTPENIYNKPSNTFVADFIGSPSMNLIKGNLKESSNKISFIANGSNVEIPINGYNFNEKSNLNNKEVFFGIRPEHIFFKKFNESDFEISLKADLSEYIGHEQIMTFDYENQEVLAKFPSTIKIELSKNTNLFFDLTQISLFDAKTEERI

SEQ ID NO: 173222 - protein, 365 aa, Unknown
  Bacterial polypetide isolated from the Sargasso Sea
MKTLKIEDLSKNFGTTEVLKKINLDIDEGNFLVLLGPSGCGKSTLLNIIAGLETINEGNVYIDDYNVSKVEPKDRNIAMVFQSYALYPSMNVKENMIFGLKQAKASKEKIEEQLKKVSSFLKVDELLKRKPSQLSGGQRQRVAIGRALVREPRIFLFDEPLSNLDAKLRVEMRREIKKLHQTLKTTVVYVTHDQTEAMSLGTKIAIMNHGVIQQNDTPEIIYNKPSNTFVADFIGSPSMNLIQGKIIKKSDQFLFIGDNSNAAHIPIKNYNFDKNTELNNKEIYFGIRPEHIYYKKSNDDDFEIKLKAELSEYIGNEQIITFNYSEQEILAKFPSTAKIEINKEINLYFDLSQISLFDKNSKERI

SEQ ID NO: 173223 - protein, 293 aa, Unknown
  Bacterial polypetide isolated from the Sargasso Sea
MKDVEPNLRPTNMVFQNYAIFPHLNVEENVAYGLRKMKLSKNEKLEMINKSLNLVGLSGLNNRSSNALSGGQKQRVALARALILKPKVLLLDEPLSALDKKLREQMQSELRHLQRAVGITFILVTHDQEEALTMSDKVAVMFDGKVEQIASPRELYEKPISQRVASFIGAMNFINGKVIKDDKKIIFETKIFGELSLSKKQISGKNQNGKLTLGIRPELVSIKSLKETSKELMMGTIKDISYFGETTYYKISCDKSNELLTVSSQNSFGQISFKVGEQVKFKIDIESVVGFFD

SEQ ID NO: 173224 - protein, 378 aa, Unknown
  Bacterial polypetide isolated from the Sargasso Sea
MASTSGVTNKPTTKTQEKVLLKIERVSKLFDDVRAVDDVSLTINKGEIFALLGGSGSGKSTLLRMLAGFERPTSGRIFLDGEDITDLPPYERPINMMFQSYALFPHMTVAQNIAFGLKQDKLPKAEIEQRVQEMLKLVHMEQYGKRKPHQLSGGQRQRVALARSLAKRPKLLLLDEPMGALDKKLRTQMQLEVVEILERVGVTCVMVTHDQEEAMTMAGRISIMSDGWIAQTGSPMDIYESPNSRMIAEFIGSVNLFGGEIEVDEVDHLIIKPNNLAQPFYVGYGVTTSAEEKHVWLAVRPEKTIISREQPEGEYNWAKGIVHDIAYLGGISVYYIRLENGQIVQCSMTNRERRADHATWDDEVFISWEDTSGVVLRS

SEQ ID NO: 173225 - protein, 245 aa, Unknown
  Bacterial polypetide isolated from the Sargasso Sea
MLPMEPTVALNGVWHSYGGASDGWTLKGVDLQVAPGELLGLLGPSGCGKTTLLRLIAGFERPRRGTVQLDQRMVAGDWIWMEPERRGVGMVFQDYALFPHLNAWQNASFGLPRRNPNRERVAWLFALLGLKGLEQRYPHQLSGGQRQRLALARALAPAPRVVLLDEPFSSLDVEVRLRLRSELSSVLDACGASGVIVTHDPGEALAICDRVAVMRDGVLHQCASPPEIVRSPATPFVGSFVLQRN

SEQ ID NO: 173226 - protein, 367 aa, Unknown
  Bacterial polypetide isolated from the Sargasso Sea
MAQIEFQQVGKQYANGHVALDNLNLQIKDKEFLVLLGPSGCGKSTTLNMIAGLEEVTQGSLRFDDVEVNALPAHRRDVAMVFQSYALYPHKNVYDNIAFGLRMRKYPQQEIDARVRRAAQSLEIEHLLDRRPGQLSGGQRQRVALGRAMVRQPAVFLMDEPLSNLDAALRVSMRASIKALHQSMQTTFVYVTHDQAEALTLADRIVVMRQGVVQQIGSPDDIYERPANKFVANFLGSPPINFIDGVLMQGERGLHFCSGDLSLALDDETQRLLAGCSGRAVSAGIRAEDIDEHGESADCSLTGDIASLLPVGSDQFIGLQCLGQSMFFRVGKERSCKVGERVSLSINRRRLHLFDQASGVNLKAQNA

SEQ ID NO: 173227 - protein, 339 aa, Unknown
  Bacterial polypetide isolated from the Sargasso Sea
IDKSFGENHVISKFNLEVEKGKFIVLLGPSGCGKSTLLRMIAGLEKIDKGKIFLENNLLNDLLPSKRQIAMVFQSYALYPHMNVFQNISFGLKSEKISKNEIKDKVIEAAKILKIEELLDRRPKELSGGQRQRVAIGRAITRNPKLFLFDEPLSNLDAALRSEMRVEISKLHKKLKSNIVYVTHDQIEAMTLADKIVIMNKGKIEQFGTPDEIYNNPNNIFVAEFIGNPKMNIFKVKTRDVININTFKLFNKEIKFENSKFENDFYVGIRPEHLSLENISEIAVEIKVDLIENLGSEKIIYTHINGTEIRIKTTRNIKDKNITIYLPKNKIYLFDNNKK

SEQ ID NO: 173228 - protein, 340 aa, Unknown
  Bacterial polypetide isolated from the Sargasso Sea
MTEKKTTIELKKLNKKFGDIIAVNNVSLKISENDFFTILGPSGCGKSTILRLIAGLEVQDSGAVIINNKDSSFVQANERPVNMVFQSYALFPHLSVRDNIEFGLKLKKISNTDIKIRVEEILELVKMNGYDFKLPSELSGGQRQRVALARAIVNKPKIVLLDEPLSALDANLRMEMQQELVNIQRNLKMTFMLVTHDQDEALSISSKIAIMENGKIIETNTATNMYEYPSKKFSAEFLGRINIIEGASSFIDNRILFNSDTFGKINLERDIKLPKDGVLGIRPEKIIIETGLNKQKNRVSMNGTITNWTYYGDVSYITIELKNKSKVYINVQNIHRNSLQ

SEQ ID NO: 173229 - protein, 341 aa, Unknown
  Bacterial polypetide isolated from the Sargasso Sea
MVFDNLIIRARSLSKSYGSEDVLTDFNIDIWYGSIFGILGVSGSGKTTALRLLAGFENPDQGTIEMHNKVIFDEKTNVPPEKRKIGMVFQDYALFPHLTVEKNIAFGLSKEEIKNGRLDEVISMTNLSSYRKKFPQDISGGQQQRVALARALAPNPEVVLLDEPFTSLDAQMARDLREEVVSLLRATKTTGIIVTHDQEEALSVCDIVSVLENGKVIQSATPQEIYLNPISQTVANSVGDPNIIKGVSTNGRVKTSLGTFNSAYDGELDVSIRPECIEVNLDSNGDYVVKECIFYGHDQVISFENKNGEIFRARSLPSMIFEPGDKVCIDVTEVTTFPSKN

SEQ ID NO: 173230 - protein, 244 aa, Unknown
  Bacterial polypetide isolated from the Sargasso Sea
MSEPIIKIEGMNKWFGDFQVLKDINLAVEKNKKIVVCGPSGSGKSTLIRCINRLEEHQKGTIVVDGTELTENTKNIEAIRAEVGMVFQQFNLFPHLSILDNCTLAPIWVKKMPKKDAEDLAMKQLEQVQIVDQAQKFPGQLSGGQQQRCAIARALCMEPKIMLFDEPTSALDPEMIKEVLDAMVNLAKAGMTMIVVTHEMGFAKEVADEVIFMDEGMIVEKAETKEFFANPKSHRTKLFLSQIL

SEQ ID NO: 173231 - protein, 232 aa, Unknown
  Bacterial polypetide isolated from the Sargasso Sea
MSQLLMPSTDAMITLENVNKWYGQFHVLKNINLKVKQGERIVLCGPSGSGKSTTIRCINHLEEHQQGRIVVDGIELNEDIRNIERVRQEVGMVFQHFNLFPHLTVLQNCTLAPIWVQKMPKKEAEVLAMHYLERVRIAEHAHKYPGQISGGQQQRVAIARSLCMKPKIMLFDEPTSALDPEMVKEVLDTMIGLAQSGMTMLCVTHEMGFARTVADRVIFMDLGEIVEQAPTG

SEQ ID NO: 173232 - protein, 549 aa, Unknown
  Bacterial polypetide isolated from the Sargasso Sea
MNLFLHYLGLPYLLSGIGFTIEVTVLGLAGGLIVGLVLASMQLSKVGPLAAIARGYTVIFRGTPLILQLVFAYDALPHIGLKLSAIGAAGLALAANEGPFIAEILRAGVLGVDRGQLLAGQALGMTPTVLLRRVIAPQAIRTMIPALGNESVSALKNSSLASVIAVDELTLRSTQLASSTFDFFSIFFASGLMYLVLTGAIAAIQLFAETALDLDRSPSGRFARLLPWRRARVTTNPPGAGVSLPADALPEPTPSHGHLPEGGNGRNGRNGRDAHAERAQRYAALQKQSPTVQVKGLSKRYGEQTVLDGFDLTVRFGEVIALLGPSGSGKSTLLRCINHLEQWDAGEIRVGGKRLGFRVDGQPMTQADIANERASAGVGMVFQHFNLFSHLTACENIAGPLRWVHGVAPADAERRARELLERVGLSHRADALPRHLSGGQQQRVAIARALAPNPRVLLLDEPTSALDPELVGEVLDVIQRLVDEGGLTMIISTHQLRFADQVADRVVFMSGGAVVEQGPAHDVLTRPCHPLTARFLSVMGADDRLEVAS

SEQ ID NO: 173233 - protein, 290 aa, Unknown
  Bacterial polypetide isolated from the Sargasso Sea
MIIKGSLRRARFTLDLDLNVDLTKPLGIMGATGAGKTTLLRVIAGLEPDFSGQVEFCGEIWHDGDHPDQVPTHQRGLGVVFQDGRLLPGRTVERNLAFAQQRARNADAAVSYEALTEALDLNHLLSEPAEVLSGGERQRVALARALLVGPRLLLLDEPLAANDADHRQQLIAHLSEWLPAAGIPLVCVSHAAHELAQLTRQLIVLERGAVSAQGETHLLLAAQREAINNSAQAVTAVVMSTDSEHNTATLQLDQDTVGAVVSGERVLLQPDPEDLGLGAALQPQPEQNQH

SEQ ID NO: 173234 - protein, 178 aa, Unknown
  Bacterial polypetide isolated from the Sargasso Sea
MSDPIIKIQKMNKWFGDFQVLKDINLSVEKNKKIVVCGPSGSGKSTLIRCINRLEEHQEGTIVVDGTELSEDTKNIEHVRAEVGMVFQQFNLFPHLSILDNCTLAPIWVKKYPKKKAEELAMNQLEKVQISDQALKFPGQLSGGQQQRCAIARALCMEPKIMLFDEPTSALDPEMIKE

SEQ ID NO: 173235 - protein, 350 aa, Unknown
  Bacterial polypetide isolated from the Sargasso Sea
MFDLKLNNLSKKFDQLFAVNDVSFDINSGEFFSILGPSGCGKSTTLRMIAGFVMPTNGEILLGDNNITYVAPEKRNIGFVFQNYAIFPHMNVFDNIAFGLRMRDVDKSTISEKVKSSLEQVNLLGFENRFQRELSGGEQQRVALARVLVTEPQILLLDEPLSALDKKLREEMKIWIKELQKKLKITTVYVTHDQSEALTMSDRIAIMDKGKISQIGSPKDIYEKPQNKFVADFIGISNFLPLEKKSVQGDYIEVSFNDKIFKVLNNNNGENLSGVLRPEHIIFEPDNNENIISFDGNVEIISYQGALIRYIINVNGFKFTSEFSNLPKSKQYKEGEKVRFGFDKNNLVLV

SEQ ID NO: 173236 - protein, 159 aa, Unknown
  Bacterial polypetide isolated from the Sargasso Sea
MIRLEKLSREFQVGNQVVHALDEVDLEIKENEYVSIMGVSGSGKSTLLNILGLLDTPTSGDYILSGINTSKMDDDEMAGIRSTKIGFVFQSFHLIPRLTAFENIEMPMILSGMNPKERSEKVSSALEKVGLTDRSDHKPEQLSGGQRQRVAIARSIVME

SEQ ID NO: 173237 - protein, 350 aa, Unknown
  Bacterial polypetide isolated from the Sargasso Sea
MSEIIIKNLNKSFGNNKVINDFNIKITDGEFIVLVGPSGCGKSTLLRMISGLEKVDEGEIFLDNKVINNLIPSKRGIAMVFQSYALYPHMNVYENMSFGLKMEKLSKNDIEKKVNEAAKTLQIQDLLNRKPKELSGGQRQRVAIGRAITRNPKLFLFDEPLSNLDAALRSEMRVEISKLHKNINSNIIYVTHDQVEAMTLADRIVILNNGNIEQFGTPNEIYADPNNVFVAEFIGSPKMNIIKLNKENIVNNNTINFFNNEIVFENINFKDEIYLGIRPEHISVTDSHPIKIDVKIDLVENLGFEKIIYSTASNKEINVKTSDNVSGKTLKISFTKDKIYLFDKNRNRIR

SEQ ID NO: 173238 - protein, 118 aa, Unknown
  Bacterial polypetide isolated from the Sargasso Sea
MESASFSRFPHELSGGQRQRVAIARAIILEPKLILLDEPTSALDVSIQMQILNLLKELQSRLGLAYLCISHDLKVIRFLSDYVYVMKDGNIVEDGISDDLFESPNHIYTQELLAASIA

SEQ ID NO: 173239 - protein, 370 aa, Unknown
  Bacterial polypetide isolated from the Sargasso Sea
MSADVELQNVSVTFGSFYAAKNVSVKINEGEFFSFLGPSGCGKTTLLRAISGFLDPSEGKVLIGGQDMSGIGPNKRPTSLIFQNLALFPLMSVADNIAFSLEVRGVSKIKRRERADELLELIALSGQGDKKVHELSGGQRQRVAIARALAIEPEVLLLDEPLSALDLKLRQKMRTELRAIQKRVGITFIYITHDQGEALTMSDRVAVMNEGELEQVGLCDDVYDFPNTPFVATFVGENNAFYSKVISSDGETVKVESEGNVFIAKAGKIDDQNKHTFNKGDDVLMFIRPESIFINNQNNKLDNNFVAKLNTIEFEGNLKNIYLSINPNMNVRFSVPNAVDTSDLSQNKNVELTFSSEKAVVLPKGSLAVD

SEQ ID NO: 173240 - protein, 192 aa, Unknown
  Bacterial polypetide isolated from the Sargasso Sea
MIKAYKLKNNVKNLKTVSINNLSHFYGKNENKKQVLNDVNLNIDKGELVLLKGPSGCGKTTLLTLIGALRTCQSGDLTVLNNQLNGASRKTRQILRRSIGMIFQGHNLLRCLTAEQNVQMGADLIKGLTYLQRREIARNWLSAVGLEEHHKKLPNDLSGGQKQRVAIARALSAKPKLLLADEPTSALDSVTG

SEQ ID NO: 173241 - protein, 244 aa, Unknown
  Bacterial polypetide isolated from the Sargasso Sea
MSDSIIQINNMNKWFGDFQVLKKINLEVKPKEKIVVCGPSGSGKSTLIRCINRLEEHQEGNIIVDGTELTEDTKNIEQIRAEVGMVFQQFNLFPHLSILDNCTLAPIWVKKMPKKEAEELALKHLERVQILDQSQKYPGQLSGGQQQRAAIARALCMEPKIMLFDEPTSALDPEMIKEVLDVMVNLAKQGMTMIVVTHEMGFAKEVADQMIFMDEGMIVEKADTKEFFDNPKSDRTKLFLSQIL

SEQ ID NO: 173242 - protein, 247 aa, Unknown
  Bacterial polypetide isolated from the Sargasso Sea
MSENSIISLQNVNKWFGDFQVLKDVNLEVKKKERIVVCGPSGSGKSTMIRCINRLEEHQEGKIVVDGIELTGNLKNIDSVRKEVGMVFQQFNLFPHLSVKENITLAPIWVKKMPKAEAEELAMKQLEIVKIPEQANKYPGQLSGGQQQRVAIARSLAMNPNIMLFDEPTSALDPEMIKEVLDVMVDLAEGGMTMIVVTHEMGFAKTVADRMVFMDEGKIVEEASPDKFFNNPESDRTKLFLSQILHQ

SEQ ID NO: 173243 - protein, 351 aa, Unknown
  Bacterial polypetide isolated from the Sargasso Sea
MYSVDLKNVTKKWGDVTAVDQVNLHINEGEFVVLLGPSGCGKTTTMRLVAGLEDITDGEIKIGDEVVNDVDPRKRDVSMVFQNYSLFPHMTVRNNIAYPLKMKKIPSSEHDKLIKEVSTLVELQDLLHRKPAELSGGQRQRVALARAIVRQPRVFLMDEPLSNLDAILRVTTRAELKNLHHRLGVTTIYVTHDQVEAMTLANRIAVMNHGKLLQFDKPQVIFDDPSSKFVAGFIGSPAMNLIDGRVENKKFISDSLTTSFDIDYEGDITLGVRPDKIQIVSDTDTNNGSAKVYSVELTGEANLVTFKSNNQNLIVKTDKNTHYDIDSILKLNFNKEDCYFFDINSEERLRI

SEQ ID NO: 173244 - protein, 173 aa, Unknown
  Bacterial polypetide isolated from the Sargasso Sea
MSIIQAKEVKKWFGDFQALKGISMEVSEGEVLVICGPSGSGKSTFIRCINRLEQHQEGEIIVDGIELTNDLKNIEAIRSEVGMVFQSFNLFPHITVMQNITLAPIWVRKKSRSESEEKAMELLERMGIPEQANKYPGQLSGGQQQRVAIARALAMEPKIMLFDEPTSALDPEM

SEQ ID NO: 173245 - protein, 392 aa, Unknown
  Bacterial polypetide isolated from the Sargasso Sea
MGAIQINSVGKIYPNGTRALEDVNIEINDGEFVVLVGPSGCGKTTLLRMVAGLEDITEGEISIGEKIVNEVAPKDRDIAMVFQNYALYPHMSVYDNMAFSLKLRKLSKSEIDEKVKEAAKILEIGELLERKPKALSGGQRQRVAMGRAIVRNPEAFLMDEPLSNLDAKLRVQMRAELGQLHTQLETTTLYVTHDQVEAMTMGDRVAVIRKGELQQIDTPREIYLYPKNIFVAGFIGSPSMNFVYATVKVSSKNITLTFGEDSIKCNTDENKKLKEFDGQEIVLGIRPEAFEDSNYANSKEFSEKLNIGVSLIEQLGSDSYIHFYKDIKPVQTEAIEEILADEGEDISVLGDETKFIARVNPNSVVKEGDKITLAIDPSKLHYFDPVSGNAIV

SEQ ID NO: 173246 - protein, 206 aa, Unknown
  Bacterial polypetide isolated from the Sargasso Sea
MTPAIEINNVSKWFGEFRALNDVSLKTSQGEKVVICGPSGSGKSTLVRCINRLEIHQEGSIKVQGIELTDKNSSISEIRSEVGMVFQQFNLFPHLTVLQNLTLGPTKALGLSQKEANERAFKLLERVRIPEQADKRPGHLSGGQQQRVAIARSLCMEPKIMLFDEPTSALDPEMISEVLDVIVDLANEGMTMVVVTHEMGFARKVA

SEQ ID NO: 173247 - protein, 366 aa, Unknown
  Bacterial polypetide isolated from the Sargasso Sea
MSASVELKNASVTFGNFYAAKNINVKINGGEFFSFLGPSGCGKTTLLRAISGFQDLSEGEVLIDGVDMSRIGPNKRPTSLIFQNLALFPLMSVADNISFSLEVRGVDKKKRRSRANELIELMALDGQGEKMVHQLSGGQKQRVAIARALAIEPKVLLLDEPLSALDLKLRQRMRTELRAIQKRVNITFIYITHDQSEALTMSDRIAVMNEGEIEQIGLCADVYNKPLTPFVATFVGENNSIDGKLTEVSSNEATISTENGSFKSYLNNSDGQYSIGDEVFLFIRPEALELAKNGNFDNVIDINIDTFEFEGNIKNYFAKLGSNKKIKFSIPNSVDTSDIHSGSNIQIGFNKLNTVILKKGQLAVDT

SEQ ID NO: 173248 - protein, 329 aa, Unknown
  Bacterial polypetide isolated from the Sargasso Sea
MGEINIKSAGKIYSNGTRALEDVSITINDGEFVVLVGPSGCGKTTLLRMVAGLEDITEGEIAIGDKTVNEVAPKDRDIAMVFQNYALYPHMSVYDNMAFSLKLRKLPKDEIEQKVKDAAKTLEISELLERKPKALSGGQRQRVAMGRAIVRSPQAFLMDEPLSNLDAKLRVQMRAELGQLHTQLQTTTLYVTHDQVEAMTMGDRVAVIRKGELQQIDTPREIYSNPKNIFVAGFIGSPSMNFVYAKIKTENDVIELTFGDNQIRYKDQKKEKLKSFENKEIILGIRPEAFEDGYFANEADYSESMKVKVSLLEQLGSDSYVHFYKDIKP

SEQ ID NO: 173249 - protein, 255 aa, Unknown
  Bacterial polypetide isolated from the Sargasso Sea
MMGTAKDLINEKIKNAATLLQINELLKRKPSQLSGGQRQRVAIGRALVRDAKVFLFDEPLSNLDAKLRAELRYEIKKLHRDLSNTMIYVTHDQIEAMTLADRISVMKDGLIQQLDTPKQIYNKPANLFVAGFIGSPSMNFLNAKFKKSNQNIIVGNKQIDISKYENINKLINDQEVVFGIRPENINIEKNENSIQCKVELVEPMGADTLVWTSVEGNPISIRLEGSSNFNLNDEINISFDINKSSIFDSKTEERI

SEQ ID NO: 173250 - protein, 332 aa, Unknown
  Bacterial polypetide isolated from the Sargasso Sea
VLLGPSGCGKSTLLNIIAGLETINEGDVFIDDYNVSKVEPKDRNIAMVFQSYALYPSMNVKENMIFGLKQAKTSKEKIEEQLEKVSKFLQVDQLLERKPSQLSGGQRQRVAIGRALVREPRIFLFDEPLSNLDAKLRVEMRREIKKLHQQLKTTVVYVTHDQTEAMSLGTNIAIMNHGVIQQNDTPEKIYNKPSNTFVADFIGSPSMNLIKGNLKENSENLFFTVSGSNLEIPIKDYDFKDKSNLKNKEVFFGIRPEHIFFKKFNESDFEINLRADLSEYIGHEQIMTFDYANQEVLAKFPSTIKIDLGKETKLYFDLIQASLFDAQTEERI

SEQ ID NO: 173251 - protein, 358 aa, Unknown
  Bacterial polypetide isolated from the Sargasso Sea
VVDHLIKWFGSDRAVDDVSFSIEKGKFLTLLGPSGCGKTTTLMSIAGLHTIDSGEIRVGDVIYTSREKKIFLAPEKRDIGMVFQSYAIWPHMTVAQNVAYPLEIRKIERVEIDERVDKVLALVGLTEMSDKLATQLSGGQQQRASLARAIVSNPLLLLFDEPLSNLDLKLREQMRVELKRIQNEVGITSIYVTHDQSEALVMSDEIIVMSKGQIEQRDIPLSVYSKPANGYVSQFIGVANLIKGTLVKKNKSGTGVADLNKTIKGLTCDCVLSSELESGDDVLVSIRPENISVSKNNTGGKGIKGKVDLAIFLGNCVDCRISSDGFEWKVLSHPRENLQQGDSVFLHLDPKHTLAVTP

SEQ ID NO: 173252 - protein, 408 aa, Unknown
  Bacterial polypetide isolated from the Sargasso Sea
MAIRDGGDAAGNDPAARRRAGDAALVRARPRRFREMNDGRQPGERPRMAALSLKGVRKSYDGKQHVLHGIDVEIADGEFIVLVGPSGCGKSTLLRMIAGLETVTDGEIAIGERVVNALEPKDRDIAMVFQNYALYPHMTVAQNMGYGLKIRGIERATIDSRVAAAAKILELEPLLARRPRELSGGQRQRVAMGRAIVREPSVFLFDEPLSNLDAKLRVQMRLEIQRLHARLATTSVYVTHDQIEAMTLAQRVIVMNRGYAEQIGAPVDVYEKPATVFVAGFIGSPAMNLMHGRLSEDGATFTVAGGGPALPVSGAPGIGREIAVGRDWVLGVRPEHMTPQPGVAQATLPVDSCELLGADNLAHGRWGNHDVAVRLPHADRPARGTALAAALPAHRLHFFDPETGKRAG

SEQ ID NO: 173253 - protein, 263 aa, Unknown
  Bacterial polypetide isolated from the Sargasso Sea
MTAAIEIKNVSKWFGDFKALDDVSLATSQGEKVVICGPSGSGKSTLVRCINRLEIHQEGTIKVRGIELTDNDSSISEIRSEVGMVFQQFNLFPHLTVLQNLTLGPTKALGLSQKEANERAFKLLERVRIPEQANKKPGHLSGGQQQRVAIARSLCMEPKIMLFDEPTSALDPEMISEVLDVIVDLANEGMTMVVVTHEMGFARKVADRMVFMDEGKIVEMGKPKDFFDSPKTERCKLFLNQNFTTLKVSTMKKHFLILVFLLI

SEQ ID NO: 173254 - protein, 358 aa, Unknown
  Bacterial polypetide isolated from the Sargasso Sea
MAEINISKINKSFGSTHVIKDVSLEIKSESFTVFVGPSGCGKSTMLRMIAGLEEVNSGTISIDGQVINDLPPSERNIAMVFQSYALYPHMTVFDNMAFGLEIEKKSKEEITERVMEAAKILQIEEYLERKPKQLSGGQRQRVAIGRAITRKPKVFLFDEPLSNLDAALRVQMRVELAKLHDQLNATMIYVTHDQTEAMTLADDIVVLDHGIVSQKGSPLKLYNEPENLFVGGFIGSPKMNFINSKVISSNSSGTEVEISGQGKIIVPKTSDKVSPGDSVKIGIRPEHILINTGEKCWNSKVFVIEKLGSSTFLYLEKDGEPLVVQTDGENSANIGDNLSLSFDLNKCHLFDENNLAFK

SEQ ID NO: 173255 - protein, 244 aa, Unknown
  Bacterial polypetide isolated from the Sargasso Sea
MSSMIQFSKVNKWYGEYQALVDVTAEVKRGEVVVVCGPSGSGKSTLIRTVNRLEEIHGGGITVDGTSVHQASLNLNRFRTRVGFVFQQFNLFPHLSALDNVCLAPMKAAGRSRADAKRQALALLDRVGLASKANSYPQQLSGGQQQRVAIARALAMEPPVMLFDEPTSALDPEMVGEVLSVMKSLARDGMTMMCVTHEMGFAREVSDSVWFMDRGAILEVADPQTFFRSPQHPRAQAFLSDLRH

SEQ ID NO: 173256 - protein, 338 aa, Unknown
  Bacterial polypetide isolated from the Sargasso Sea
MAKLKIKNLKKSYENEQIIHGVNLEIKDGEFVVFVGPSGCGKSTLLRLIAGLEEITEGEISIGDKVVNEIAPSKRGVAMVFQNYALYPHMNVYKNMSFALRQARMKKDEINRRVKNAAEILQISDFLLKTPRSLSGGQRQRVAIGRAIVREPDVFLFDEPLSNLDAALRVNTRLEIARLHKRLGTTMIYVTHDQVEAMTLADKIVVLNNGKIEQIGSPIELYENPLNMFVAGFIGSPKMNFLNSKTLTKNISTIVKGAKREDIIGIRPEHLLKTTYTNSIISARLDLIENLGENVLVHMILNNDDQIIAKMNNAPKEPIGTKLHFTADIKNLHLFNKK

SEQ ID NO: 173257 - protein, 267 aa, Unknown
  Bacterial polypetide isolated from the Sargasso Sea
MNKEFVKFDKVDKSYDGKVLVVKDLQLDIAEGEFVTMLGPSGSGKTTCLMMLAGFETPTHGEIYLDGKAISSIPPHKRGIGMVFQNYALFPHMTVYENLAFPLRVRKIPKDDADKKIDKALSMVSLQGFADRMPGQLSGGQQQRVAVARSLVFDPQLVLMDEPLGALDKNLRESMQYEIKHIHESIGVTVVYVTHDQSEALTMSNRIAVFNDGKVQQLSSPDELYEKPVNSFVAEFIGENNTFSGEVSDISGGKCKVKLSNSEILAN

SEQ ID NO: 173258 - protein, 351 aa, Unknown
  Bacterial polypetide isolated from the Sargasso Sea
MSQISLQNLKKSFGKTQVIHDLSIDVKDGELIVIVGPSGCGKSTLLRMVAGLEDANEGNILIDNKKVNELEPMERNIAMVFQNYALYPHMTVFGNMAYGLKIAKVPKEEIESRVQKAAEILELGELLERKPNQLSGGQRQRVAMGRAIVRNPVAFLFDEPLSNLDAKLRVQMRLEIKKLQTQLKTTSLYVTHDQVEAMTLADRMIVMNEGNVEHIGTPLEVYTKPKTLFTAQFIGSPAMNILKGNCGGNKLILANKASLSVNSKFNGPVNIGLRPEDFELDQNGPIKLKVELVELIGANTLIHGKLENSNEILVASISGVVKEDTIGKNINLSIQNDKLHLFDTNTDLRIN

SEQ ID NO: 173259 - protein, 305 aa, Unknown
  Bacterial polypetide isolated from the Sargasso Sea
MIAGLEEINSGSILINNKSVNDLPPRDRGIAMVFQSYALYPHMTVFENMAFGLKIEKKSKDEINSRVKEAAKILQIEELLGRKPKQLSGGQRQRVAIGRAITRKPKVFLFDEPLSNLDAALRVQMRVELAKLHEQLDATMIYVTHDQTEAMTLSDEIVVLDEGKISQLGKPLELYNKPNNLFVAGFIGSPKMNFIPAKFISKNKNDIEIEFLNSKFIFNYENDINFKKEELIVGIRPENIHVCFDNNHHWCSKAFVVEKLGSSTFIYLDSQIEPVVVECDGDISVKTGDIINVKFNFEKIILFNE

SEQ ID NO: 173260 - protein, 360 aa, Unknown
  Bacterial polypetide isolated from the Sargasso Sea
KNNEFVKFDKVDKSYDGKVLVVKDLNLDIAEGEFITMLGPSGSGKTTCLMMLAGFETPTNGEIYLDGNPISNIPPHKRGIGMVFQNYALFPHMTVYENLAFPLKVRKFSKDETDKKVEKALSMVSLSGFGSRMPGQLSGGQQQRVAVARALVFDPAVVLMDEPLGALDKNLRESMQYEIKHIHESIGVTVVYVTHDQSEALTMSNRIAVFNDGKVQQLSSPDKLYEEPVNSFVAEFIGENNTFQGEVADISEKKCKIKLNSGDEILANPIRVKSKGEKSIVSLRPERAIIDPDDKMDNKFTGKIEEVIYHGDHTRVRLNLLDNHEFILKVPNSSARMDIKLGNQIKIGWNSFDARALDPK

SEQ ID NO: 173261 - protein, 330 aa, Unknown
  Bacterial polypetide isolated from the Sargasso Sea
KGEFLTMLGPSGSGKTTVLMMLAGFETPTSGEIYLDGNPISSIPPNKRGIGMVFQNYALFPHMTVKENLAFPLEVRKMQQSEIDEKVGNALAMVELQDFGNRMPLQLSGGQQQRVALARSLVFEPRLVLMDEPLGALDKNLREQMQYEIKHIHEKIGITVVYVTHDQSEALTMSNRIAVFNDGKIQQISSPDVLYEKPNSSFVAQFIGENNQLRGKVKSINGENCIVTTESGDDIHALKINVNNNGDGSLVSLRPERVAINSSEKFENNFDAKVKELIYLGDHIRSRVEVCGNDQFIVKIPNSYKEANLKEGSTVKLSWKASDSRALDLN

SEQ ID NO: 173262 - protein, 360 aa, Unknown
  Bacterial polypetide isolated from the Sargasso Sea
MNNSFIQINNISKHFADVKAVDDVSFEIKEGEFFSLLGPSGCGKTTLLRLLAGFEYPTSGNLLIDGTDITALPPDKRPTNMVFQNYAIFPHLNVEKNIQFGLRKLGLSNDEIGKRVKEVLSLVKLEGYEERFSNQLSGGQRQRVALARALVRQPKVLLLDEPLGALDKKLRDEMQLELRTLQKNIGITFVFVTHDQQEAISMSDRVAVMNDGKIQQLSAPNELYKNPKNIFVSDFIGETNFLKAETKSSDGEFINVSIEKLGEFKIKNNLNIATNSSDVVCSVRPESMMISKVKSDWDICLDAKISQTSYLGEMTRFYVEAKGIDKIITVSSQHFDNQSFENNECFISISLEDISLLNKK

SEQ ID NO: 173263 - protein, 230 aa, Unknown
  Bacterial polypetide isolated from the Sargasso Sea
MKNSVEVKNISFSYGKTEILNDLSLDIKEGEFMVLLGPSGCGKTTLLNCIAGLLDLSDGQIWIEDDNVTWKEPKDRHIGMVFQSYALYPSMTVEKNLSFGLRMMGTAKKIIDDKIEKASNLLQINELLKRKPSQLSGGQRQRVAIGRALVRDAKVFLFDEPLSNLDAKLRAELRYEIKKLHRDLSNTMIYVTHDQIEAMTLADRISVMKDGLIQQLDTPKQSIINQLIYL

SEQ ID NO: 173264 - protein, 337 aa, Unknown
  Bacterial polypetide isolated from the Sargasso Sea
MATIELKNIEKSFGNNKVINNFNIKINDGEFIVLVGPSGCGKSTLLRMISGLESVDKGEIHLNNKIINNLIPSKRGIAMVFQSYALYPHMNVYENMSFGLKTEKLEKNEIDKKVKDAAKTLQIEDLLERKPRQLSGGQRQRVAIGRAITRNPKLFLFDEPLSNLDAALRSEMRVEISKLHKQLNTNMIYVTHDQIEAMTLADKIVILNNGNVEQVGTPDEIYNNPSNIFVAEFIGVPKMNILKNGIESLLKNLNLKSDTYLGIRPEHIHTNGNGEIKIDIKVDLIENLGFEKIIYATFKGQELRIKTSDNITQNIKQISFSKNKIFLFDKNKKRYRI

SEQ ID NO: 173265 - protein, 318 aa, Unknown
  Bacterial polypetide isolated from the Sargasso Sea
FITHDLNIVRKFANRVNVMQKGEIVEKGKVEEVFANPTHPYTKKLIDSIPREKQELIKTESALLEAQKVNVNYLLKKNLFKENSYLNAVKDVDINVYPGCTTGLVGESGSGKSSLARALLGLEESDGKIYFQGKEFLDLSSSEFRQIKKDFQIVFQDPFGSLSPRQTIGDIIGEGLKVHFPELNKAQRAEKILQSLRDVELDKNFVNRFPHELSGGQRQRVAIARAIILEPKLILLDEPTSALDVSIQMQILELLLKLQNRLGLSYLCISHDLRVIRALSDEVYVMKDGEVVEKGMADQVFNSPQNEYTKELISAAIH

SEQ ID NO: 173266 - protein, 236 aa, Unknown
  Bacterial polypetide isolated from the Sargasso Sea
TEKLEKNEIDKKVKDAAKTLQIEDLLERKPRQLSGGQRQRVAIGRAITRNPKLFLFDEPLSNLDAALRSEMRVEISKLHKQLNTNMIYVTHDQIEAMTLADKIVILNNGNVEQVGTPDEIYNNPSNIFVAEFIGVPKMNILRNGIESLLKNLNLKPETYLGIRPEHIHTNGNGEVKLDVKVDLIENLGFEKIIYATYKGQELRIKTSDNISQNLKQISFSKNKIFLFDNNKKRYRI

SEQ ID NO: 173267 - protein, 305 aa, Unknown
  Bacterial polypetide isolated from the Sargasso Sea
FETPTNGEIYLDKNPISNIPPHKRGIGMVFQNYALFPHMTVFENLAFPLKVRKMSQVEIEKKVDKALSMVSLGGFANRMPGQLSGGQQQRVAVARALVFDPSVVLMDEPLGALDKNLRESMQYEIKHIHESIGVTVVYVTHDQGEALTMSNRIAVFNDGKVQQLSSPDKLYEEPVNSFVAEFIGENNTFGGEVSEISNGTCRVKLEKGEIIANPISVKSVGEKTTVSIRPERALINPKDKMDNNQKGKIEEVIYHGDHTRVRLNLLGNSEFILKVPNSSQNLDIKLGNEINIGWNSHDARALDPK

SEQ ID NO: 173268 - protein, 352 aa, Unknown
  Bacterial polypetide isolated from the Sargasso Sea
MAQVELKNVNKSFGQTKVIKDVHLSIEKGEFVVFVGPSGCGKSTLLRLIAGLENLSNGEIIIADRPVMDLPPSERGIAMVFQSYALYPHMSVFQNMAFSLSLRKFSKAEIRTRVEAAAKILQMEHLLDRRPAALSGGQRQRVAIGRAIVRDPDVFLFDEPLSNLDAALRHDTRVEIAKLHKQLDATTIYVTHDQVEAMTLADKIVVLRDGEVMQVGSPIDLFNLPDNEFVAGFLGSPQMNFFDGNLSKVTKNGSSGSFKGQGLEAIGIRLTSKNKKINDTVRLGIRPQHLQINEKGNLAGQVTLVEKLGTETVVELITENGTPFRYVAAETAEIALGDSLKFKFESSKAHLF

SEQ ID NO: 173269 - protein, 244 aa, Unknown
  Bacterial polypetide isolated from the Sargasso Sea
MSEAIIKIQNMNKWFGDFQVLKDINLEVEKNKKIVVCGPSGSGKSTLIRCINRLEEHQKGSIVVDGTELSENTKNIEQIRAEVGMVFQQFNLFPHLSILDNCTLAPIWVRKMPKKQAQELAMQQLEKVQISDQAQKFPGQLSGGQQQRCAIARALCMEPKIMLFDEPTSALDPEMIKEVLDAMVNLAKGGMTMIVVTHEMGFAKEVADEVIFMDEGMIVEKAETKEFFANPKSERTKLFLSQIL

SEQ ID NO: 173270 - protein, 477 aa, Unknown
  Bacterial polypetide isolated from the Sargasso Sea
MKPIFTVKDLNISFLQDGARFEAVNNLSFQVNKGETVALVGESGSGKSVTALSTAALLGNAASVDGEINIDGNSLDPKDERALQKLRGSQVSFIFQEPMTSLNPLHTIERQLSETISLHQSLNKEKLRENCINLLEKVGIRDIEFRLNAYPHQLSGGQRQRVMIAMAIANRPKILIADEPTTALDVTIQAQILDLLANLKKEFGMSMLFITHDLNIVRQIADRVCVMNAGKIVEKGGTDSVFEKPKNEYTKKLLKAISSSGPKSVAANSKIILSAQDTKVWFPVYKGFLKRTVGHIKALNSATFDVRMGETLGIVGESGSGKSTIALALMRLIDFEGEINFDGKDIGSLKTRELRRIRSDMQIVFQDPFGSLSPRMTCAQIISEGLEVHQSENSDDTKLLVEDVMNEVGLDPVFKHRYPHEFSGGQRQRIAIARAMVLKPKLVILDEPTSALDRTVQFQIVQLLKQLQEKYGLAYVL

SEQ ID NO: 173271 - protein, 350 aa, Unknown
  Bacterial polypetide isolated from the Sargasso Sea
MASVTLNEITKRWGDFTAVDQVSLEVRDQEFMVLLGPSGCGKTTTMRMVAGLEEPSEGEIFIGEKMVNDELPKDRDVAMVFQNYGLYPHMSVYENIRYPLKVRKVDKSLHAEQVRIAAEKVQLGHLLKRRPRELSGGQRQRVALARAIVRTPTVFLMDEPLSNLDAKLRVNMRAELKHLQHELKITTIYVTHDQIEAMTLADRVAVMNEGVISQLDTPERIYNDPANLFVAGFIGSPSMNLIPGKMREGTFEHGEFSIKLTRGDYEQCVLGIRPEDMEITRPGDGIFSAKVYSFELTGESTLITVILGDERIIVRGPKDYRVEIDEQVGILLNPENCFLFDSETRQRIRF

SEQ ID NO: 173272 - protein, 395 aa, Unknown
  Bacterial polypetide isolated from the Sargasso Sea
LMGAGETKLLAVRGSEVSMIFQEPMTSLNPLHKIGRQVTELLVLNNVLDKGSASEKVRELFDLVGLDDSIRVDAYPHELSGGQRQRVMIAMALAQEPKLLIADEPTTALDVTIQKQILELLQSLQERLGMALLLITHDLTVVRSLAQRICVMNSGRIVEEGNAKRIFTAPEHDYTKHLLAAEFLSEPPRADAASETIASIDNLEVNYVIGRQWFGKPKTLAAVKGVSLEIKAGHTLGVVGESGSGKTTLGMAILRMLPSEGQIVFMGNELSALKAKEMKRFRKDLQIVFQDPYGSLSPRMTVSQIIGEGLRIHSPELDELERDSIVRNALIDVGLEEEMLKRYPHEFSGGQRQRISIARAIVLRPKLIVMDEPTSALDVSVQAQIVYLLREVQPV

SEQ ID NO: 173273 - protein, 351 aa, Unknown
  Bacterial polypetide isolated from the Sargasso Sea
MANIKFTGVHKSFGSNKIIKNFNLLGKEDEFLVLVGPSGCGKSTLLRMIAGLEKIDEGEIFINDQKINELHPSKRQTAMVFQSYALYPHMNVYENMSFGLKIEKRPKEEIDMKVMQAAKILKIEELLERKPKQLSGGQRQRVAIGRAITRNPKIFLFDEPLSNLDAALRAEMRVEISKLHNQIKTNMIYVTHDQVEAMTLADRIVILNQGNIEQVGTPEEIYNDPSNIFVAQFIGTPKMNILDVKEENVVTENTIKLLGNNIHFDKLKLNKSKHFVGIRPEHLKANQETQYTFNPEIELIENLGNEKIVYMKKDEHQLSAKIPSNIEIGNSVGFDLNDIFIFDENGNRMKS

SEQ ID NO: 173274 - protein, 226 aa, Unknown
  Bacterial polypetide isolated from the Sargasso Sea
FSFKNINLDVEKNKKIVVCGPSGSGKSTLIRCINRLEEHQEGHITVDGSELNENTKNIEQIRAEVGMVFQQFNLFPHLSILDNCTLAPIWVKKLPKKDAEELAMKQLEKVQIADQALKFPGQLSGGQQQRCAIARALCMEPKIMLFDEPTSALDPEMIKEVLDAMVNLAKAGMTMIVVTHEMGFAKEVADEVIFMDEGMIVERAETKEFFANPKSDRTKLFLSQIL

SEQ ID NO: 173275 - protein, 321 aa, Unknown
  Bacterial polypetide isolated from the Sargasso Sea
MKDRSKEDEVADININTVNKYFGDVHVIKDVSLDIKSQSFTVLVGPSGCGKSTMLRMIAGLEDINSGTISIDGQVVNDLPPKQRNIAMVFQSYALYPHMTVFDNMAFGLKLEKRSKDEINERVNEAARILQIEDYLQRKPKQLSGGQRQRVAIGRAITRKPKVFLFDEPLSNLDAALRVQMRVELAKLHNELEATMIYVTHDQTEAMTLADDIVVLDTGIVSQKGSPLELYDKPNNMFVGGFIGSPKMNFISSKILSKSSDATEVDIMGMSKISVSKMSASSSEGDSVTLGIRPEHLVVNGDSDGSWESKVFVVEKLGDVT

SEQ ID NO: 173276 - protein, 228 aa, Unknown
  Bacterial polypetide isolated from the Sargasso Sea
GQKQRVAIARALAVEPKVLLLDEPLSALDLKLRQRMRTELREIQKRVNITFIYITHDQGEALTMSDRIAVMNEGELEQIGPCDDVYNNPLTPFVATFVGENNPLFGKINDLSGDEAKIETPDGVFISSIDKSTNLNIGDEAISFVRPESLFIVKDGNDYKNKLSVKIENIEFEGNVKNFYASLNSGSKIKFSVANAIDTNEIEASSQIELGFDTSKSIILPKGALATE

SEQ ID NO: 173277 - protein, 244 aa, Unknown
  Bacterial polypetide isolated from the Sargasso Sea
MPDPIIQIKDMNKWFGDFQVLKDINLDVEANKKIVVCGPSGSGKSTLIRCINRLEEHQKGSIIVDGTELSEETKNIEQIRAEVGMVFQQFNLFPHLSILDNCTLAPIWVKKMPKKEAEELAIKQLKQVQIDDQASKYPGQLSGGQQQRCAIARALCMEPKIMLFDEPTSALDPEMIKEVLDAMVNLAKAGMTMIVVTHEMGFAKEVADEVIFMDEGMIIEKANTNEFFANPKSDRTKLFLSQIL

SEQ ID NO: 173278 - protein, 227 aa, Unknown
  Bacterial polypetide isolated from the Sargasso Sea
MNTRKQKLFVDELHKQYGDNEVLKGVSLKANAGDVISVIGSSGSGKSTMLRCINFLEQPNSGRIFVDGEEVRTQIGKAGALRVSDPKQLQRVRTKLSMVFQHFNLWTHMNVLENIIEAPVNVLGLKRKEAEERAREYLEKVGLAPRLETQYPSHLSGGQQQRVAIARALAMHPDVMLFDEPTSALDPELVGEVLKVMQTLAEEGRTMIVVTHEMAFARNVSNHVMFP

SEQ ID NO: 173279 - protein, 243 aa, Unknown
  Bacterial polypetide isolated from the Sargasso Sea
MSSIIKMKDVNKWFGDFQVLKDINLQVAEKQKIVVCGPSGSGKSTLIRCINRLEEHQKGQIIVDGNELSEKTKDIEKIRAEVGMVFQQFNLFPHLSILDNCTLAPIWVKKTPKKKAEELAMKQLEQVQISDQAMKFPGQLSGGQQQRAALARALCMEPKIMLFDEPTSALDPEMIKEVLDAMVNLAKGGMTMIVVTHEMGFAKEVADEVVFMDEGMIVERAKTKEFFANPKNERTKLFLSQIL

SEQ ID NO: 173280 - protein, 245 aa, Unknown
  Bacterial polypetide isolated from the Sargasso Sea
MSSELMIEMKNVHKWFGELHVLNDINLEINKGEKIVICGPSGSGKSTLIRCINRLEEHQRGNIIVEGTELTNDSRSIERIRGEVGMVFQQFNLFPHLSILDNCSLAPIWVRKLPKAEAKDKAMEYLKRVQIDDQAHKYPAQLSGGQQQRAAIARALCMEPRIMLFDEPTSALDPEMIKEVLDVMVGLAQGGMTMIVVTHEMGFAKEVADSIIFMDEGQIVEAKNPKDFFDNPESERTKTFLSQIL

SEQ ID NO: 173281 - protein, 380 aa, Unknown
  Bacterial polypetide isolated from the Sargasso Sea
MVFCFRSTLYTSCIFCLYIVGNKRNPYLYIKYKEFNSLNMVFDNLIIRARSLSKSYGSEDVLTDFNIDIWYGSIFGILGVSGSGKTTALRLLAGFENPDQGTIEMHNKVIFDEKTNVPPEKRKIGMVFQDYALFPHLTVEKNIAFGLSKEEIKNGRLDEVISMTNLSSYRKKFPQDISGGQQQRVALARALAPKPEVVLLDEPFTSLDAQMARDLREEVVSLLRATKTTGIIVTHDQEEALSVCDIVSVLEKGKVIQSATPQEIYLNPISQTVANSVGDPNIIKGISTNGRVKTSLGTFNSAYDGELDVSIRPECIEVNLDSNGDYVVKECIFYGHDQVISFENKNGEIFRARSLPSMIFEPGDQVCIDVTEVTTFPSKL

SEQ ID NO: 173282 - protein, 215 aa, Unknown
  Bacterial polypetide isolated from the Sargasso Sea
ERIVVCGPSGSGKSTMIRCINRLEEHQEGSIVVDGIELTGNLKNIDNVRKEVGMVFQQFNLFPHLSVKENITLAPIWVKKMPKADAEELAMRQLEIVKIPEQANKYPGQLSGGQQQRVAIARSLAMNPNIMLFDEPTSALDPEMIKEVLDVMVDLANGGMTMIVVTHEMGFAKTVADRMVFMDEGKIVEEASPDKFFNNPESDRTKLFLSQILHQ

SEQ ID NO: 173283 - protein, 190 aa, Unknown
  Bacterial polypetide isolated from the Sargasso Sea
MKNVNKWFGDFQVLKDVNLDVNQKQKIVVCGPSGSGKSTLIRCINRLEEHQKGTIIVDGNELTEDTKDIEKIRAEVGMVFQQFNLFPHLSILDNCTLAPIWVRKMPKKQAEEMAMNELKKVQIADQAKKFPGQLSGGQQQRSAIARALCMEPKIMLFDEPTSALDPEMIKEVLDAMVNLAKGGMTMIVVT

SEQ ID NO: 173284 - protein, 242 aa, Unknown
  Bacterial polypetide isolated from the Sargasso Sea
MSIIKTNDVKKWFGDFQALKGISMEVQEGEVLVICGPSGSGKSTFIRCINRLEQHQEGEIIVDGIELTNDLKNIEAIRSEVGMVFQSFNLFPHLTVMQNITLAPIWVRKKSRSESEEKAMELLTRVGIPEQASKFPGQLSGGQQQRVAIARALAMEPKIMLFDEPTSALDPEMIKEVLDAMKELALSGMTMIVVTHEMGFAKEVADRVMLFDEGLMVEENTPTEFFDNPQNDRTKLFLSQIL

SEQ ID NO: 173285 - protein, 312 aa, Unknown
  Bacterial polypetide isolated from the Sargasso Sea
CGKSTLLRMIAGLEKIDAGEIFINDQKINELHPSKRQTAMVFQSYALYPHMNVYENMSFGLKIEKRPKEEINTKVIEAAKILKIEELLERKPKQLSGGQRQRVAIGRAITRNPKIFLFDEPLSNLDAALRAEMRVEISKLHNQIKTNMIYVTHDQVEAMTLADRIVILNQGNIEQVGTPEEIYNDPANIFVAQFIGTPKMNILEIDEKNVISDNKIKLLGNDIMFDNLKLNKSKHFVGIRPEHLKANQENQFTFNPEIELIENLGNEKIAYMKKDEHQLSAKIPSNIEIGNKIGFDLNDIFIFDENGKRLKS

SEQ ID NO: 173286 - protein, 314 aa, Unknown
  Bacterial polypetide isolated from the Sargasso Sea
LLRLLAGFEYPTSGNLLLDGSDITALPPDKRPTNMVFQNYAIFPHINVEKNVQFGLRKLGLTNDEIIKRVKDVLSLVKLEGYEERYSSQLSGGQRQRVALARALVRQPKVLLLDEPLGALDKKLRDEMQLELRTLQKEIGITFVFVTHDQQEAISMSDRVAVMSEGKIQQMSSPNELYKNPQNIFVSDFIGETNFLKAKTESKDGEYINVNIEDLGSFKIKNNLNISENASDVICSVRPETMMIDKEKSDWDICLEGKIKQTSYLGEMTKFYVETKEIEKIITVSSQYFDNQSFQDGKCFISINLNDISLLNKK

SEQ ID NO: 173287 - protein, 272 aa, Unknown
  Bacterial polypetide isolated from the Sargasso Sea
MVCAWNSSWGNKGVNVRNSVEVKNISFSYGKTEILNDLSLDIKEGEFMVLLGPSGCGKTTLLNCIAGLLDLSDGQIWIEDDNVTWKEPKDRHIGMVFQSYALYPSMTVEKNLSFGLRMMGTAKKIIDDKIEKASNLLQINELLKRKPSQLSGGQRQRVAIGRALVRDAKVFLFDEPLSNLDAKLRAELRYEIKKLHRDLSNTMIYVTHDQIEAMTLADRISVMKDGLIQQLDTPKQIYNKPANLFVAGFIGSPSMNFLRAKFDKSNQYLLIG

SEQ ID NO: 173288 - protein, 425 aa, Unknown
  Bacterial polypetide isolated from the Sargasso Sea
MRRPRAVPCFPIAAHLASRFPRLVWRHLRSRSARNGYIMNSTTSHSVAGATQMARPAPTTKSKSDEFVRIENVVKKFGDSTAVDNVNLSIAKNELFALLGSSGCGKSTLLRMLAGLETVTSGRIFVDGEDLAAMPPYKRPVNMMFQSYALFPHMTVEANIAFGLKQEGTPKNEIKERVADALNLVQMGKYAQRKPHQLSGGQQQRVALARSLVKRPKLLLLDEPMSALDKQIRQKTQLELVNIIDKVDVTCVMVTHDQEEAMTMAGRLAVMSEGRIVQIGSPSQVYEFPNSRFSAEFIGSTNLFEGTVVADEPDHIFVESEDLETRIYVSHGITGPLGMPVGISVRPERVKVSREKPATPHNWTRGVVSDVAYMGSYSLYHVRLPSGKTVVSNLSSSHLMSEGAPSYNDDVFVYWSPASGVVLTQ

SEQ ID NO: 173289 - protein, 250 aa, Unknown
  Bacterial polypetide isolated from the Sargasso Sea
TGDEALKSVDIDIPTSQVMALIGPSGAGKSTLIRCINRLVEPTNGQVFLNDLDLTKLSRRKLRFARRRIGMIFQEYALVERLTVMENVLSGRLGFVGFWSSFFRRFPTEDIQEAYRLLDRVGLSEMADKRADALSGGQRQRVGICRALIQNPELLLVDEPTASLDPKTSRQIMRLINELCDERGLAAIINIHDVLLAQMFSKRIVGLEKGVIVYDGPPEDLTPEVLTKIYGEENWEATIGKVDEDEIDEQ

SEQ ID NO: 173290 - protein, 376 aa, Unknown
  Bacterial polypetide isolated from the Sargasso Sea
MAEIELKSISKSFGSTEVIKSLDLSISNGEFITIVGPSGCGKSTLLRIIAGLENQSTGDVIIDGNVVNNTRASERDLAMVFQSYALYPHLTVQQNLMVPLKLRRLSILERFPIIGWFMPNRRSKLEEVVSKVQAASETLQITHLLDRKPGQLSGGQQQRVAVGRAMVREPVAFLMDEPLSNLDAGLRVHMRAEISELHRDLKTTFIYVTHDQAEALTMSDRMAVMMDGEILQLNTPHEIYNNPSTIRVAEFVGSPKINILKGEYDEKGNLNCFGTKITDSIKLAQKGNVSVGIRPEHMELVSSNDKKIFKGDIVYRENLGSDIFLHLTVNEGEQKIIVRSEPSKVINAAVGDQVMIGWDEQKVMVFDVDGKNVTMQ

SEQ ID NO: 173291 - protein, 362 aa, Unknown
  Bacterial polypetide isolated from the Sargasso Sea
MSKNSEFVKFDKVDKSYDGKVLVVKDLNLDIAEGEFITMLGPSGSGKTTCLMMLAGFETPTNGEIYLDSNPISNIPPHKRGIGMVFQNYALFPHMTVYENLAFPLKVRKILKDEIDKKVDKALSMVSLSGFENRMPGQLSGGQQQRVAVARALVFDPSVVLMDEPLGALDKNLRESMQYEIKHIHESIGVTVVYVTHDQGEALTMSNRIAVFNDGKVQQLSSPDKLYEEPVNSFVAEFIGENNRFSGKVTDISKDKCKVKLDEGSEILANPIAVKSNGENTIVSLRPERALINTKEKMENNFKGKIEEVIYHGDHTRVRLNLLGNKDFILKVPNSSANMDIKLGNQINVSWNSFDARALDPK

SEQ ID NO: 173292 - protein, 149 aa, Unknown
  Bacterial polypetide isolated from the Sargasso Sea
MSADVELQNVSVTFGSFFAAKNVSVKIQEGEFFSFLGPSGCGKTTLLRAISGFLDPSEGKVLIGGQDMAGIGPNRRPTSLIFQNLALFPLMSVADNIAFSLEVRGISKLKRRKRADELLELIALTGQGDKKVHELSGGQRQRVAIARAL

SEQ ID NO: 173293 - protein, 359 aa, Unknown
  Bacterial polypetide isolated from the Sargasso Sea
MTQKKVNAIEVKNVTKVYRSLNTETKALRNANLTIYDNEFFTLLGPSGCGKTTLLRLIAGFEDITEGSINLFDQEIVNLPPNKRPVNTVFQQYSLFPHLDVYENVAFGLRRLKKDEILTKKRTMEVLELVQMKDYATRKPNQLSGGQQQRVALARALAPEPKVLLLDEPLSALDLKLRQAMRYELKTLQRETGITFVFVTHDQEEALTMSDRIAVINEGEIQQIGEPEQIYESPSNKFVANFISEANLLSGVCKTPGENGVCELDTGHELNLFVPHHIKQNDKVTIFIRPERIKIEKSSKDKSQLSISEFTYLGNAATIQLKSNNQLINVNLPIEDLKVFKKDDYVEIQFPKESAHVID

SEQ ID NO: 173294 - protein, 237 aa, Unknown
  Bacterial polypetide isolated from the Sargasso Sea
NVNKWFGDFQVLQDVNLEVKKKERIVVCGPSGSGKSTMIRCINRLEEHQEGTIIVDGIELTGNLKNIDSVRREVGMVFQQFNLFPHLSVKENITLAPIWVKKMPKAEAEELAMQQLEIVKIPEQANKYPGQLSGGQQQRVAIARSLAMKPNIMLFDEPTSALDPEMIKEVLDVMVDLAEGGMTMIVVTHEMGFAKTVANRMVFMDEGRIVEEASPDKFFNNPESDRTKLFLSQILNH

SEQ ID NO: 173295 - protein, 207 aa, Unknown
  Bacterial polypetide isolated from the Sargasso Sea
MSKNNEFVKFDKVDKSYDGKLLVVKDLNLDIAEGEFITMLGPSGSGKTTCLMMLAGFETPTNGEIYLDGNPISNIPPHKRGIGMVFQNYALFPHMTVYENLAFPLKVRKMLKDEIDKKVDKALSMVSLTGFENRMPGQLSGGQQQRVAVARALVFDPAVVLMDEPLGALDKNLRESMQYEIKHIHESIGVTVVYVTHDQSEALTMSN

SEQ ID NO: 173296 - protein, 350 aa, Unknown
  Bacterial polypetide isolated from the Sargasso Sea
MSEIIIKNLNKSYGNNKVINSFDIEIQDGEFIVLVGPSGCGKSTLLRMISGLETVDEGEIFLDKKLINNLIPSKRGIAMVFQSYALYPHMNVYENMSFGLKMEKLSKNEIDQKVNEAANTLQIKDLLERKPKELSGGQRQRVAIGRAITRNPKLFLFDEPLSNLDAALRSEMRVEISKLHEKMKSNIIYVTHDQVEAMTLADRIVILNNGNIEQFGTPNEIYSDPNNIFVAEFIGSPKMNIIRIDKENIINGNTLKVLNNEIKFKQLNLKDEIYLGIRPEDISVKDEHSIKFEVKVDLIENLGFERIIYSSSQNNEIKIKTSENIQSGTLKISFPENKLYLFDKDKNRIR

SEQ ID NO: 173297 - protein, 347 aa, Unknown
  Bacterial polypetide isolated from the Sargasso Sea
SYDGKVLVVKDLNLDIAEGEFITMLGPSGSGKTTCLMMLAGFETPTNGEIYLDSNPISNIPPHKRGIGMVFQNYALFPHMTVYENLAFPLRVRKVTKDDIDKKVDKALSMVSLTGFENRMPGQLSGGQQQRVAVARALVFDPAVVLMDEPLGALDKNLRESMQYEIKHIHESIGVTVVYVTHDQGEALTMSNRIAVFNDGKVQQLSSPDKLYEEPVNSFVAEFIGENNRFAGQVTEISNNKCKVKLDSGSEILANPIAVKSNGEKTMVSLRPERALINSKEKMENNFKGKIEEVIYHGDHTRVRLDLLGNKEFILKVPNSSANMEIKLGNQINVSWNSFDARALDPK

SEQ ID NO: 173298 - protein, 248 aa, Unknown
  Bacterial polypetide isolated from the Sargasso Sea
MSVNKEFVKFDKVDKSYDGKVLVVKDLQLDIAEGEFITMLGPSGSGKTTCLMMLAGFETPTNGEIYLDGNAISSIPPHKRGIGMVFQNYALFPHMTVYENLAFPLRVRKIPKDEADKKIDKALSMVSLQGFAQRMPGQLSGGQQQRVAVARSLVFDPQLVLMDEPLGALDKNLRESMQYEIKHIHESIGVTVVYVTHDQSEALTMSNRIAVFNDGKVQQLSSPDELYEKPVNSFVAEFIGENNTFAGE

SEQ ID NO: 173299 - protein, 351 aa, Unknown
  Bacterial polypetide isolated from the Sargasso Sea
MATIELKNIEKSFGENKVIDKFNIKINHGEFIVLVGPSGCGKSTLLRMISGLESVDEGEIHLDKKIINNLIPSKRGIAMVFQSYALYPHMNVYENMSFGLKNEKLDKNEIDKKVKDAAKTLQIEDLLSRKPRQLSGGQRQRVAIGRAITRNPKLFLFDEPLSNLDAALRSEMRVEISKLHKKLSTNMIYVTHDQVEAMTLADKIVILNQGVMEQYGSPDEIYNNPNNIFVAEFIGSPRMNILKIDKGKIKNGNTINIFNSDIQFNGYKFNDDIYLGIRPEHIKADNSQDIKAKIKIDLIENLGFDKIIYSSVDGEEFRIKTSSNIDKDHSQISFSKENVYFFDSNKNRIKN

SEQ ID NO: 173300 - protein, 244 aa, Unknown; identical to SEQ ID NO: 173013
  Bacterial polypetide isolated from the Sargasso Sea

SEQ ID NO: 173301 - protein, 189 aa, Unknown
  Bacterial polypetide isolated from the Sargasso Sea
EHQEGNIVVDGTELTEDTKNIEQIRAEVGMVFQQFNLFPHLSILDNCTLAPIWVKKMPKKEAEELALKHLERVQILDQAQKYPGQLSGGQQQRAAIARALCMEPKIMLFDEPTSALDPEMIKEVLDVMVNLAKQGMTMIVVTHEMGFAKEVADQMIFMDEGMIVEKADTKEFFANPKSDRTKLFLSQIL

SEQ ID NO: 173302 - protein, 382 aa, Unknown
  Bacterial polypetide isolated from the Sargasso Sea
MASISMRRVQKAYGDHAPVIRDVDLEIGAHEFCVFLGPSGCGKSTLLRMIAGLEDLSAGELSIDGRRVDDVPAAERGVAMVFQSYALFPHMTVYENMAFGLKLARVPKAEIDRKVRDAARILQLDMLLDRKPKALSGGQRQRVAIGRAIVREPGVFLFDEPLSNLDAALRGQTRIEIAKLHRQFERASVVYVTHDQTEAMTLADKIVLLHAGADTAQHGSIAQVGAPLDLYHHPASRFVAGFIGSPRMNFLPAVVTACDAHRTTVTLTPSGETFVLPRDGSALGAGATVALGIRPEHLTLGAAHDATSLARDVVLVERLGEQTYVHLEQPGGHSLIAKVPGDAQVRSGERVLVHAPAAACHLFTEDGRAVPACADVHVHHYA

SEQ ID NO: 173303 - protein, 349 aa, Unknown
  Bacterial polypetide isolated from the Sargasso Sea
MTSTLNLHQVHSDYQGQQVLKGLDLTLAQGEILALLGPSGCGKTTLLRTVAGLQAISQGEIQINGKTVSGAGQFVPSEQRGIGMIFQDYALFPHLTVAENILFGVAKLTAAQRKARLDDMLALVKLEGLAKRYPHELSGGQQQRVSIARALAYEPQLLLLDEPFSNIDAQVRHSMMAEIRSILKQRNVSAVFVTHSKDEAFVFADTLAIFNQGVIVQHGRAEDLYAAPNSRYVADFLGSGNYLPAEVIDGHSVATPIGELRSLTPLSQSHAFNGQVFLRPQQLALSADDAGVGTITERRFLGAFCHYWVKVEAASHAHYVEVRSQIMQLNVGQRVGLSTEPHSLVLFES

SEQ ID NO: 173304 - protein, 264 aa, Unknown
  Bacterial polypetide isolated from the Sargasso Sea
MANNKEFVKFDKVDKSYDGKVLVVKDLNLDISEGEFITMLGPSGSGKTTCLMMLAGFETPTNGEIYLDSNPISNIPPHKRGIGMVFQNYALFPHMTVYENLAFPLRVRKVSKEDTDKKVDKALSMVSLSGFESRMPGQLSGGQQQRVAVARALVFDPAVVLMDEPLGALDKNLRESMQYEIKHIHESIGVTVVYVTHDQGEALTMSNRIAVFNDGKVQQLSSPDKLYEEPVNSFVAEFIGENNRFSGEVTNISKDKCKVKLDDG

SEQ ID NO: 173305 - protein, 255 aa, Unknown
  Bacterial polypetide isolated from the Sargasso Sea
MYKLTVDNLHKKFGDNEVLKGVSMKAKAGDVISIIGSSGSGKSTFLRCINFLEQPCSGQITIGSEPIQTTRDRNGSLRVADQKQLQRMRTKLSMVFQHFNLWAHMTVLENIIEAPMAVLGVGKDEAIARARKYLEKVGLAPRVEGMYPSHLSGGQQQRVAIARALAMEPEVMLFDEPTSALDPELVGEVLKVMQKLAEEGRTMVVVTHEMGFARNVSNHVIFLHQGKIEEEGNPQEILVNPKSERLGQFLSGRLK

SEQ ID NO: 173306 - protein, 365 aa, Unknown
  Bacterial polypetide isolated from the Sargasso Sea
MNQSPNIFVRFEKIDKSYDGRELVVKNLNLDIAEGEFLTLLGPSGSGKTTTLMMLAGFENPTSGEIYLDKKPISSITPHKRGIGMVFQNYALFPHMTVYENLAFPLRVRKISNDEIENKINKAISMVSLTGFENRMPSQLSGGQQQRVAVARALVFEPKLVLMDEPLGALDKNLRESMQYELKHIHETLGVTVVYVTHDQGEALTMSNRIAVFNDGYIQQLSSPNELYERPNNSFVARFIGENNIINGTIVGGDDKNCTVKTSNGEIIHANPIISNKVGETTSMSLRPERVKINPSDDTSNKFSAKIEEVIYHGDHTRLRVSLLEQNDFILKVPNASNVFSFETGSELKLGWNSYDCRALDFIGN

SEQ ID NO: 173307 - protein, 233 aa, Unknown
  Bacterial polypetide isolated from the Sargasso Sea
AATLQIEDLLERKPKQLSGGQRQRVAIGRAITRSPKVFLFDEPLSNLDAALRSEMRVEISKLHKKMNSNIIYVTHDQVEAMTLADRIVVLNKGNIEQYGTPNEIYSDPNNIFVAEFIGSPKMNIIKINKEHIANSNTLHLFNNKITFDNLEFKDEIYIGIRPEDISLKSNHEIQVDVKVDLIENLGFEKIIYSKVSENQIIIKSSENINNHSLKISFSKDKVLFFDKDKNRIR

SEQ ID NO: 173308 - protein, 244 aa, Unknown
  Bacterial polypetide isolated from the Sargasso Sea
MSDKIIQITEMNKWFGDFQVLKNINLEVEKNKKIVVCGPSGSGKSTLIRCINRLEEHQQGSIIVDGNELTEDTKDIEKIRAEVGMVFQQFNLFPHLSILDNCTLAPIWVKKMPKKEAEDLAHQHLEKVQIADQANKYPGQLSGGQQQRCAIARALCMEPKIMLFDEPTSALDPEMIKEVLDAMVNLAKAGMTMIVVTHEMGFAKEVADEVIFMDEGMIVERAETKEFFANPKSDRTKLFLSQIL

SEQ ID NO: 173309 - protein, 217 aa, Unknown
  Bacterial polypetide isolated from the Sargasso Sea
TGLVGESGSGKSSLARALLGIEAAEGSIIFDGIDIKYLNIKSIRSFKKDFQIVFQDPFGSLSPRMTIGEIIGEGLKVHEPGLPKEDRLTKILSALNDVELDESSYSRFPHELSGGQRQRVAIARAIILRPKLILLDEPTSALDVSIQMQILNLLKDLQSKLGLAYLCISHDLRVIRFLADQVYVMKDGVIVEHGSSEEVFEDPKHEYTKELLAASLA

SEQ ID NO: 173310 - protein, 361 aa, Unknown
  Bacterial polypetide isolated from the Sargasso Sea
MASKKDFVKFDKVDKSYDGKVLVVKDLQLDIAEGEFITMLGPSGSGKTTCLMMLAGFETPTNGEIYLDGKAISSIPPHKRGIGMVFQNYALFPHMTVYENLAFPLRVRKIPKDEADKKIDKALSMVSLQGFAARMPGQLSGGQQQRVAVARSLVFDPQLVLMDEPLGALDKNLRESMQYEIKHIHESIGVTVVYVTHDQSEALTMSNRIAVFNDGKVQQLSSPDELYEKPVNSFVAEFIGENNTFGGEVSDISGGKCKVKLANAEILANPISVKGKGERTTVSLRPERALINPSTKMDNLHKGKIEEVIYHGDHTRVRINLLGNPEFILKVPNSSSNLDIKLGNEINIGWNSDDARALDPK

SEQ ID NO: 173311 - protein, 228 aa, Unknown
  Bacterial polypetide isolated from the Sargasso Sea
MAADAVNINSLIHAYGRGSMRREVLRNISLTIAAGEVVTLTGPSGCGKTTLLTLIGALRQVEEGSVTVLGEQLNGAGRSRRQQLRRHIGMIFQGHNLLKCLTAEENVQMGADLLPNTSFRARRDRARYWLRAVGLEGHESKRIDQLSGGQRQRVAIARALAPEPKLLLADEPTASLDSVSGRAVVELLHQLAREQSSAVLMVTHDPRILDVADRLLRMEDGLLQPAVE

SEQ ID NO: 173312 - protein, 288 aa, Unknown
  Bacterial polypetide isolated from the Sargasso Sea
MSADVELQNISVTFGNFYAAKNVNVKINEGEFFSFLGPSGCGKTTILRAISGFLDPSEGKVLIGGKDMGGIGPNKRPTSLIFQNLALFPLMSVAENIAFSLEVKGVDKIERRKRADELLELIALSGQGDKKVHELSGGQKQRVAIARALAIEPKVLLLDEPLSALDLKLRQKMRTELRAIQKSVGITFIYITHDQGEALTMSDRVAVMNEGELEQVGQSNDVYNFPQTPFVATFVGENNAFHCKVISTEKDFVKVDFDGVHFFAKAGGDNKKNHNFKKGQEVILFIRQ

SEQ ID NO: 173313 - protein, 368 aa, Unknown
  Bacterial polypetide isolated from the Sargasso Sea
MKDRSKEDEVADININTINKYYGDVHVIKDISLDIKSQSFTVLVGPSGCGKSTMLRMIAGLEDINSGTISIDGEVVNDLPPKQRNIAMVFQSYALYPHMTVFDNMAFGLKLEKRSKDEINERVQEAARILQIEEYLHRKPKQLSGGQRQRVAIGRAITRKPKVFLFDEPLSNLDAALRVQMRVELAKLHDQLNATMIYVTHDQTEAMTLADDIVVLDEGIVSQKGSPMELYSNPSNLFVGGFIGSPKMNFVDSKILSATNDSTEIDIFGTSKITIPKTSSNSSNGDSVTLGIRPEHLLVNQDGDASWESKVFVVEKLGSGTFLYLEKDGEPLVVETEGDSNIKVGDTVKVGFTASRCQLFDSSNQAFK

SEQ ID NO: 173314 - protein, 377 aa, Unknown
  Bacterial polypetide isolated from the Sargasso Sea
MGTISLKNISKSFGSTQVLKDLNVDITEGEFLTLVGPSGCGKSTLLRIIAGLEQQTSGDVLIDNKNVNRIRASERDLAMVFQSYALYPHLTVRRNLETPLRLRDYSSFERLPLIGNLSPNKKQKTESINQLVSKTSETLKISELLDRKPGQLSGGQRQRVALGRAMVREPVAFLMDEPLSNLDAALRVHMRSELSELHNSLKTTFVYVTHDQAEALTMSSRMAVMIDGNLLQLDTPQEVYDNPSSLSVAQFVGSPKINIFKGSSDSSGTVSLLNLTLKRKSSESDLELNIGIRPEHLEITNQSDENTFSATVSYRENLGSDIFFHVNTEDGMNKIIVRGIPQLTHEISSGSKVNIRRVSNKALLFNKEGKRVQFNNA

SEQ ID NO: 173315 - protein, 271 aa, Unknown
  Bacterial polypetide isolated from the Sargasso Sea
MQVENVSCRYNGRNVLELLSLTVADNEIVCLLGASGCGKTTLLKAIAGLLPLAEGTIRLGDTLLDGPGASVPPEARNIGMIFQDYALFPHLTVADNVGFGLTKLDRRARQQQVDEALALVNLQGLGDRYPHQLSGGQQQRVAIARALVCKPRLMLLDEPFSNIDTQVRMKLILEIRALLKQQGIGAIFVSHSKEEAFAFADRLALFRAGHIEQVGQPEQLYRRPQNRFVAEFLGGVNYLAAEVVDSHCVRTALGVICGSEPHGRAVGELLQ

SEQ ID NO: 173316 - protein, 242 aa, Unknown
  Bacterial polypetide isolated from the Sargasso Sea
MVKANKSKNNVKNLKTVSINNLSHFYGKNENKKQVLNDVNLNIDKGELVLLKGPSGCGKTTLLTLIGALRTCQSGDLTVLSNQLNGASRKTRQILRRSIGMIFQGHNLLRCLTAEQNVQMGADLIKGLTYLQRREIARNWLSAVGLEEHHKKLPNDLSGGQKQRVAIARALSANPKLLLADEPTSALDSVTGREIVTLLRKLAKEQNCSVLMVTHDPRISDMADRILNMEDGKIYSAHSELI

SEQ ID NO: 173317 - protein, 244 aa, Unknown
  Bacterial polypetide isolated from the Sargasso Sea
MISIKNINKWYGDFQVLTDCSTEVKKGEVIVVCGPSGSGKSTLIKCVNALEPFQKGDIVVDGTSIADPKTNLPKLRSRVGMVFQHFELFPHLTITENLTIAQIKVLGRSKEEATKKGLQLLERVGLSAHAHKHPGQLSGGQQQRVAIARALAMDPIVMLFDEPTSALDPEMVNEVLDVMVQLAHEGMTMMCVTHEMGFARKVADRVIFMDAGKIIEDCPKEEFFGDISARSERAQHFLEKILQH

SEQ ID NO: 173318 - protein, 236 aa, Unknown
  Bacterial polypetide isolated from the Sargasso Sea
VNKWYDDFHVLKDINLIVNKGQKIVICGPSGSGKSTMIRCINRLEAHQKGTIVVHGTELTNDLKNIDLIRKNVGMVFQQFNLFPHLSVLDNISLAPIWVKKLPKKESENIAMTYLEKVKIPEQAHKFPGQLSGGQQQRVAIARSLAMNPDIMLFDEPTSALDPEMIKEVLDVMIQLAEEGMTMLVVTHEMGFAKTVADQMIFMDEGRIVEQATPDEFFNNPKSDRTKLFLSQILNH

SEQ ID NO: 173319 - protein, 287 aa, Unknown
  Bacterial polypetide isolated from the Sargasso Sea
MEQVMKVGRQTMDERGAAPSRDGFNPADAPAYSGVQPLVRMRGLCKQYSPTLQVLKGLDFDMRHDDRLVVIGPSGGGKSTLLRVLMGLETIDGGSVEFDGQRYLSFDPKSRQTRMDLAIRKRIGMVFQHYTLFPHLNVLRNLTLAPCKTQGESRNSAEQRALHLLERLGLAAKARAYPAQLSGGQKQRVAIARALMLDPKLMLFDEVTSALDPELVAEVELVIQELAANAMPMIMVTHDMWFAKKVASRILFCADGVVVESGTPEQLFRNPQHERTREFLNNVLHID

SEQ ID NO: 173320 - protein, 270 aa, Unknown
  Bacterial polypetide isolated from the Sargasso Sea
MSLSAAPVAKQHFERTQLTVDRLSYAIGDKAVLNNIRVQFQPGSVTALLGPNGAGKSTLLKALCRELPTAQGSIKLGYCQLVDWPRAELAKSLAVLPQHASLTFPFTVDEVVAMGLYPLTLSQKEGQQLVTKWLAEVGVLHLARRSYPTLSGGEKQRVQLARVLTQLSQSPFPPILLLDEPTSALDLAQQHKVLALAKNLAHKHAYTVIVVLHDLNQAARYSDRVIVLKQGEIVSEGTPNDALSIDIIRQVWDYEPEFISAPQRGYPLIF

SEQ ID NO: 173321 - protein, 631 aa, Unknown
  Bacterial polypetide isolated from the Sargasso Sea
MARRTKRRPKRTPDTRRRAARARRARPTDSRISTDMSDTTHLGGALPPLSPPGARDAGTRFRIVPARHRSRTAGTVLAVALIAIVLHSILGNPQWGWPVFAEWFLSPPVLSGLARTLVLTLLGAVFGFVLGAFVALARLSRSRLLSASAWTFVWLFRSIPLIVLLLILNNLGYLYEHVRLGVPFTDIVWFDTPTTDLISPFLAAVLGLTLNHAAFSAEVIRGGILAVDQGQLEAAAALGLPRGRQTTRIVLPQAMRAILPTAFNDLISLAKGTSMVYVLAMPELFYTVQVIYRRNLEVIPLLMVATVWYLIILTVLSAIQVQVERHYARGALRNPPPSVITFALARIGALWRRVASRHAASVAQTHDDGDAASAVAPRAGGEVAVHGVSKQFGMQRVLDNVSFVAPRGSVTAIVGPSGSGKSTLLRTINHLERVDDGFIDIDGELIGYRRDGDVLYELKERDVLTRRTAVGMVFQNFNLFPHLTVLENLVEAPVAVGGITRDAAERIARTLLARVGLADKADAYPRQLSGGQQQRVAIARALALRPKVLLFDEPTSALDPELVNEVLDVIKELARSGTTLVIVTHEIGFAREVADNVLFMERGRIVEAGPPAVVLDAPSHPRTRAFLSRVL

SEQ ID NO: 173322 - protein, 355 aa, Unknown
  Bacterial polypetide isolated from the Sargasso Sea
MDKLIVDDLHLSYGANPILKGVSFELKAGEVVCLLGASGSGKTTLLRAVAGLEQPSDGRIQLDDRVFFDGANRVDLPVEQRSLGLVFQSYALWPHRTVADNVGYGLKLRRVAPAEQKRRVQSALDQLGLGHLAERFPHQLSGGQQQRVAIARALVYNPPVILLDEPLSNLDAKLREEARAWLRELIVSLGLSALCVTHDQTEAMAMSDRILLLRNGRIEQEGTPAELYGAPRSLYTAEFMGSNNRIDARVAAVHGERVTLAGDGWELQALARDTFAPGQDAQAVIRLERVQVADGPGANRLQADLVTSMYLGDRWEYLFHCGEMRLRAFGHVPRTAGKHWIEFPANDCWAFAKAG

SEQ ID NO: 173323 - protein, 240 aa, Unknown; identical to SEQ ID NO: 172937
  Bacterial polypetide isolated from the Sargasso Sea

SEQ ID NO: 173324 - protein, 360 aa, Unknown
  Bacterial polypetide isolated from the Sargasso Sea
MSFLTLTDLTKTFGDLTAVADVNLSVEQGEFVSLLGPSGCGKTTTLQMIAGFVDVTRGRIALDGQDITHLKPNRRGLGIVFQSYALFPHMSVAENVGFGLDMRGVDKAERAERIRAALALVRLDALAHRFPRELSGGQRQRVAIARAVVIEPPVLLLDEPMSNLDAKLREDMQFELRAIQRKIGTTTIMVTHDQSEALSISDRVVVMEAGRITQTDTPYRAYERPENHFVSQFIGKANLLPGTIVAHDGDAIRIDLGHDLTETGHTAHLPPRERDVRIGDAVSVCIRPEKLRLCTPDAGRFAATVTSRFFLGSQWLYRVDSALGEVLVCCQNEGAEPLAEGAPVGIDWHSDAVRVMRREA

SEQ ID NO: 173325 - protein, 270 aa, Unknown
  Bacterial polypetide isolated from the Sargasso Sea
MSLSAAPVAKQHFERTQLTVDRLSYAIGDKAVLKDISVQFQPGSITALLGPNGAGKSTLLKALCQEIPAARGSIRLGHCPLVDWPRAELAKSLAVLPQHASLTFPFKVNEVVAMGLYPLTLSQKEGQQLVTKWLTEVEIVHLAQRSYPTLSGGEKQRVQLARVLTQLSQSPFPPILLLDEPTSALDLAQQHKILALAKNLAHKHAYTVIVVLHDLNQAVRYSDRVIVLKQGEIVSEGSASKALSAEIIRQVWDYEPEFIPAPQGGYPLIF

SEQ ID NO: 173326 - protein, 349 aa, Unknown
  Bacterial polypetide isolated from the Sargasso Sea
MTSTLNLHQVHSDYQGQQVLKGLDLTLAQGEILALLGPSGCGKTTLLRAVAGLQAISQGEIQINGKTVSGAGQFVPSEQRGIGMIFQDYALFPHLTVAENILFGVAKLTPAQRKARLDDMLALVKLEGLAKRYPHELSGGQQQRVSIARALAYEPQLLLLDEPFSNIDAQVRHSMMAEIRSILKQRNVSAVFVTHSKDEAFVFADTLAIFNQGVIVQHGRAEDLYAAPNSRYVADFLGSGNYLPAEVVDGHRVVTPIGELRSLTPLSKSNAFNGQVFLRPQQLALSADDAGVGTITERRFLGAFCHYWVKVEAASHAHYVEVRSQIMQFNVGQRVGLNTEPHSLVLFES

SEQ ID NO: 173327 - protein, 398 aa, Unknown
  Bacterial polypetide isolated from the Sargasso Sea
MTQLFDTLGFIDTSAVRAGTAAATHDAAVASAESAESAGGAAVSLEQVGKVFATPRGHAAALRDVTLDVRRGEVFGIIGRSGAGKSTLLRLVNGLERPSSGRVRVQGVDVGALDEDGLVALRRRTGMVFQHFNLLSAKTVFENVALPLKIAGVPKAERVRKVEALLELVGLAAKRDAYPASLSGGQKQRVGIARALVHDPEVLLCDEATSALDPETTQSILALLADINRRLGLTIVLITHEMEVIRAVCDTVAVIEQGEVVETGPVWRVFGDPRHGATRALLSTLVHDLPAELAARVQPLPEQAALPDGAQVVLDVRYTGESGGEPDVGALAAALGGSVRFLHGGIERIQGHAQGRLVIAAAPHADDAGQPASRGGAVAALLERARRHANHAEVLGYV

SEQ ID NO: 173328 - protein, 367 aa, Unknown
  Bacterial polypetide isolated from the Sargasso Sea
MNPVETTLTHPGAFGAAEPQATLRSGAPGGVQIEHLSVRYGARTVLEDLSLSIGAGEFLTVLGKSGCGKTTLLRFIAGFVKADGLTGTLTVAGRDLTYAPPHKRNLGLLFQNYALFPHLTVFENVAFGLRARGMASSEVTRRVADALKLVQLGDAGHHLPAQLSGGMQQRVALARALVIEPDVLLLDEPLSALDANLRASVRSELKALHERLPNLTVVCVTHDRDDALVLSDRALLMRDGHIAQLGTPQQLYDAPQDGYVARYLGPANLLPPHVIFPLGDPRHEVRGKVACVRPERLTLMPLAAGGLHGTVSSVEWQGADLSIAVTIDAAPDEPVRVTMQRGRGAAPERGARVSLHCEADDVVLIEP

SEQ ID NO: 173329 - protein, 251 aa, Unknown
  Bacterial polypetide isolated from the Sargasso Sea
MIRIDAIHKRFQQHAVLKGVSLDVQQGEVVCLIGPSGSGKSTVLRCINGFETYDEGAITIDGVKVDAHSKRIHELRMRVGMVFQRFNLFSHRTALENVMEGPVHVRRTPAAQAREQARALLDKVGLAHRMNAYPSELSGGQQQRVAIARALAMEPQAILFDEPTSALDPELVGEVLGVMRGLARDGMTMVVVTHEMAFAREVADRVCFLHDGTICESGSARDVLTQPKHPRTQEFLRRLLASDDAATPDRT

SEQ ID NO: 173330 - protein, 355 aa, Unknown
  Bacterial polypetide isolated from the Sargasso Sea
LSKRYGDFVALAPTSLDVAEGEFLTLLGPSGSGKTTLLSLIAGLALPDEGQIRINGVDVTYGAPYERDIGMVFQNYALFPHMTVAQNIAFPLQMRKTDAKATQDKVMQALEMVHLPHVAQRYPRELSGGQQQRIALARCMVYRPSIILMDEPLGALDKKLRDHMQLEIKRIHRELGTTIVYVTHDQEEAMTMSDRICLMNAGSIAQLGTPADLYFRPNSVFVADFLGESNLLDAVVTSRAGDQVQISVQGVAKGEAMAYDPVIGNGKTVKLMLRPQNLRVHDGANTDPGNGGSLSAKLTDIMVTGSMTKLYLEPHTANAAPLVAAFPTNRFGSHYEVGQTLGLSWLAADAVAIAG

SEQ ID NO: 173331 - protein, 126 aa, Unknown
  Bacterial polypetide isolated from the Sargasso Sea
KIATSLLERVGIPEQAEKFPNQLSGGQQQRVAIARALAMKPKIMLFDEPTSALDPEMIKEVLEVMTELAESGMTMIVVTHEMGFARNVADRFLFFDEGKIIEEGTPDHFFKKPKEERTKLFLSQIL

SEQ ID NO: 173332 - protein, 188 aa, Unknown
  Bacterial polypetide isolated from the Sargasso Sea
HQEGTIIVDGNELNENTKNIEEIRAEVGMVFQQFNLFPHLSILDNCTLAPIWVKKMPKKKAEELALKQLEQVQIADQAYKFPGQLSGGQQQRSAIARALCMEPKIMLFDEPTSALDPEMIKEVLDAMVNLAKGGMTMIVVTHEMGFAKEVADEVIFMDEGMIVEKNTTKEFFANPKSDRTKLFLSQIL

SEQ ID NO: 173333 - protein, 255 aa, Unknown
  Bacterial polypetide isolated from the Sargasso Sea
IEEQLKKVSKFLQVDALLDRKPSQLSGGQRQRVAIGRALVREPRIFLFDEPLSNLDAKLRVEMRREIKKLHQQLKTTVVYVTHDQTEAMSLGTKIAIMNHGVIQQNNSPELIYNKPSNTFVADFIGSPSMNLIKGKLNQKSNKILFTADEANFAIPIISYDFIKASQLEDKEVFFGIRPEHIYFKKSNEDDFEVNLTADLSEYIGHEQIMTFNFANQELLAKFPSTFKIELNKETKLYFDLTQISLFDANSKERI

SEQ ID NO: 173334 - protein, 310 aa, Unknown
  Bacterial polypetide isolated from the Sargasso Sea
WKSTLLRMISGLESVDIGEIYLDNKLINNLIPSKREIAMVFQSYALYPHMNVFENMAFGLKMEKIPKSEINQKVNNAATTLQIEDLLERKPKQLSGGQRQRVAIGRAITRSPKVFLFDEPLSNLDAALRSEMRVEISKLHKKMNSNIIYVTHDQVEAMTLADRIVVLNKGNIEQYGTPSEIYSDPNNIFVAEFIGSPKMNIVRIEKEQIINSNTLRLFKNEITFENFKFEDQIYLGIRPEDISLENNHEIQVEVKIDLVENLGFEKIIYSKVSENQIIIKSSENIKNHSLKISFSKDKVLFFDKDKNRIR

SEQ ID NO: 173335 - protein, 315 aa, Unknown
  Bacterial polypetide isolated from the Sargasso Sea
SGKTTCLLMLAGFETATHGEILLDDKPINNIPPHKRGIGMVFQNYALFPHMTVGENLSFPLEVRKINKNDREEKVIQALEMVQMTDFINRKPAQLSGGQQQRIALARSLVFNPDLVLMDEPLGALDKQLREHMQYEIKNLHKQLGVTVVYVTHDQSEALTMSDRVAVFNDGQIQQLSTPDGLYERPENAFVAQFIGENNKLTGKVKSINDSEVTVKTSQNMEVKALKVNCGEVGTNTTLSIRPERIHLNSKYKNKADATIKQLIYHGDHIRCLIKIDKDNDFIVKIPNSNIKNTLKIGEKIPISWDAMDCHALDA

SEQ ID NO: 173336 - protein, 227 aa, Unknown
  Bacterial polypetide isolated from the Sargasso Sea
FQVLKDINLSVEKNKKIVVCGPSGSGKSTLIRCINRLEEHQKGSIVVDGTELSEDTKNIEQVRAEVGMVFQQFNLFPHLSILDNCTLAPIWVKKMPKKDAEELAMNQLKQVQIQDQASKFPGQLSGGQQQRCAIARALCMQPKIMLFDEPTSALDPEMIKEVLDAMVNLAKQGMTMIVVTHEMGFAKEVADEVIFMDEGMIVEKANTKDFFANPKSDRTKLFLSQIL

SEQ ID NO: 173337 - protein, 324 aa, Unknown
  Bacterial polypetide isolated from the Sargasso Sea
ACFLGPSGCGKTTLFRCIAGLETQSSGSISQKEIEISSLPPSARDFGIVFQSYALFPNLTVFSNISYGLINNKWGKDEIKSRVEHLLDLVGLKSHAGKYPSQLSGGEQQRVALARALATSPGLLLLDEPLSALDAKVRLYLRKQIKDLHRKLGITTIMVTHDQEEAQSMADRIFVMKDGEIIQSGTPREIYEKANSPFIADFIGITNFIDAIVVNQDKVFCKDIQLECNTTGIAEERSVKIAIRPESIIITQKKSNEQNCIKGTIKENEFLGSFQRLYVESPSLSEELLMIDIANTSQTNFDLNQGSMIYFIFPPDQIKVYLNS

SEQ ID NO: 173338 - protein, 317 aa, Unknown
  Bacterial polypetide isolated from the Sargasso Sea
STILRMIAGLEDINSGTIAIDGTVVNDLAPKQRNIAMVFQSYALYPHMTVFNNMAFGLKLEKRSKDEIEERVHEAAKILQIEDYLQRKPKQLSGGQRQRVAIGRAITRKPKVFLFDEPLSNLDAALRVQMRVELAKLHDQLDATMIYVTHDQTEAMTMADEIVVLDQGIISQSGGPMELYNNPSNLFVGGFIGSPKMNFINTKILSSNTKSTKVDLFGSSDIVIPKTSKTSSSGDQVTLGVRPEHLLVNKKSSSSWESKVFVVEKLGSGTFLYLEKEGEPLVVETDGDSKIKVGDTVKVGFDADKCHLFDSSNNSFT

SEQ ID NO: 173339 - protein, 237 aa, Unknown
  Bacterial polypetide isolated from the Sargasso Sea
TKDVTKFFGSFQALKGITADIYEGEVVVVLGPSGSGKSTYIRTLNGLEEHDSGLIKVNGTELNNNVKNIEKIRSEVGMVFQQFNLFPHLSVLRNITLAPQKVKKLPKSEVDDLAMSLLERVGIPEQAQKFPAQLSGGQQQRVAIARALAMQPKIMLFDEPTSALDPEMIKEVLDVMIELAQSGMTMICVTHEMGFAKEVADRFLFFDEGLIVESGTPEHFFENPQEDRTKLFLSQIL

SEQ ID NO: 173340 - protein, 349 aa, Unknown
  Bacterial polypetide isolated from the Sargasso Sea
KAEVKFENITKKFNETTSVDNVSCKFEAGTLTTLLGPSGCGKTTSLRIIAGLERATSGKILVDDEDVTLLPATDRDVSMVFQSYALFPHMSVLENVSYGLKMINVNKEEYVQKSLETLKLVNLEGYENRMPSELSGGQQQRVAVARAIVLEPKVLLFDEPLSNLDAKLRRQVREDIREIQQKLGVTTIYVTHDQEEALAISDKVIVMNNAVIAQEGSPKDLYNFPRNKFVANFIGDANVVKAEVINKNSNSYDIKIAEMNIKIQSDNELNGDISVALRPEKISIDRNKGENCIQATVNNASFVGSSYQYILNSNVGKLYVVSGDTNDIFKVGEEVFLSINEQEVKILND

SEQ ID NO: 173341 - protein, 316 aa, Unknown
  Bacterial polypetide isolated from the Sargasso Sea
VGPSGCGKSTLLRMISGLESIDKGEIYLDNKLINNLIPSKRKIAMVFQSYALYPHMNVFENMAFGLKMEKIPKSEINQKVNNAAATLQIEDLLERKPKQLSGGQRQRVAIGRAITRSPKVFLFDEPLSNLDAALRSEMRVEIYKLHKKMNSNIIYVTHDQVEAMTLADRIVVLNKGNIEQYGTPNEIYSDPNNIFVAEFIGSPKMNIIKITKEHITNSNTLHLFNNKITFKNFEFNDEIYLGIRPEDISIKKDREIQVDVKIDHVENLGFEKIIYSKVLENQIIIKSSENINNNALKVSFSKDKVLFFDKDKNRIR

SEQ ID NO: 173342 - protein, 370 aa, Unknown
  Bacterial polypetide isolated from the Sargasso Sea
ALELLKEVQIPQPEERLNQYPHQLSGGQRQRVMIAMAIANRPDLLIADEPTTALDVTIQSQILKLLKDLQKKYGMAIMLITHDLTVVRKTSDRICVMRYGKIVERGITEDVFNNPQHEYTKHLINSEPSGEPDPYDSSNKDYIIQGQQCTVKFTLKKGNFFNQKKTELIAVNNVDIKARYGETIGIVGESGSGKSTLGMSLIKLQDINSGKIFFKDEEIQDYNTKQLKDLREHMQIVFQDPFSSLNPRHTIKQIIGEGLEINRKDLSKEEKDDLIKKTLNEVNLDEAVLHRFPHEFSGGQRQRIAIARAIILNPEFILLDEPTSALDLSIQAQIIDLLRSLRRNHNLSYIFISHNLKVIRSLCHYTLVMK

SEQ ID NO: 173343 - protein, 286 aa, Unknown
  Bacterial polypetide isolated from the Sargasso Sea
MVRPAIVDSFKKLTPRTQFRNPVMFCVYVGSILTTILWIAALGGQAEAPAGFILAVTLWLWFTVLFANFAEALAEGRSKAQAASLRSAKKDVMAKKLNEPHPKSPIRILTASDLRKGDVVLVETGDVIPADGEVIDGVASVDESAITGESAPVIRESGGDFSSVTGGTRVLSDWIVVRVTANPGEAFLDRMIAMVEGAKRQKTPNEIALTILLVALTIVMLLATATLLPFSMFSVEAAKAGHVVTITALVALLVCLIPTTIGGLLSAIGVAGMSRMMQANVIATSG

SEQ ID NO: 173344 - protein, 153 aa, Unknown
  Bacterial polypetide isolated from the Sargasso Sea
QADVGLAMNSGTQAAKEAGNMVDLDSDPTKLLSVVEVGKQMLITRGALTTFSLANDIAKYFVIVPAVFASAMPGIAALNIMQLPDPKIAVLSALVFNALIIPALIPLALKGVKIKAISAEKLLRNNMLIYGMGGVVLPFIAIKLIDVLLNGVF

SEQ ID NO: 173345 - protein, 233 aa, Unknown
  Bacterial polypetide isolated from the Sargasso Sea
PLGFGLARLINNTSLPGLAGVEHMLWRSLGISQQEMNWRQYLLAILALNVLGLLVLFSMLMAQNLLPLNPQQLPGLSWDLALNTAVSFVTNTNWQSYAGETTLSYFSQMVGLTVQNFLSAATGIAVIFALTRAFTRQSMNTLGNAWVDLIRITLWILLPIALLIALFFIQQGVLQNVLPYQPITTLEGVKQLLPMGPVASQEAIKMLGTNGGGFFNANSSHPFENPTALTNLV

SEQ ID NO: 173346 - protein, 256 aa, Unknown
  Bacterial polypetide isolated from the Sargasso Sea
RAELPAPLAREVEKIAQSGGTPLLVAGAGRLLGAIHLKDVVKLGIRERFAELRAMGIRTVMVTGDNPLTAAAIAAEAGVDDVIAEATPEKKLSRIRAEQAEGKLVAMCGDGANDAPALAQADVGLAMNDGTQAAREAANLVDLDSDPTKLIDVVQVGKELLVTRGALTTFSVANDVAKYFAILPALFAGIYPQLGALNLMQLHSSQSAILSAIVFNALIIVALIPLALRGVRIPALDAGQLLRRNLLIYGLGGLIA

SEQ ID NO: 173347 - protein, 270 aa, Unknown
  Bacterial polypetide isolated from the Sargasso Sea
MSGVDLPGPRLLRKGAADAIRKHVEALGGRFPTAVQTAVDDVSRRGSTPLVVADGAQVLGVVELKDVVKGGIKERFAELRRMGIKTVMVTGDNRLTAAAIAAEAGVDDFLAEATPEAKLQLIRSYQANGQLVAMTGDGTNDAPALAQADVAVAMNTGTQAAKEAGNMVDLDSNPTKLIEIVETGKQMLMTRGSLTTFSIANDIAKYFAIIPAAFVTTYPQLSALNFMHLASPSSAILSAVVFNALIIIFLIPLALRGVAYRAVGAAALLR

SEQ ID NO: 173348 - protein, 298 aa, Unknown
  Bacterial polypetide isolated from the Sargasso Sea
PRFSCHVIAKSGKAVEVAGDIDTLLLDKTGTITFGDRQATAFFALPGVAQSELVRGAVLCSVQDPTPEGKSVVRLAQEQGVAAETLPDNAQFIPFSAQTRLSGVQLDNGEHWVKGAADAVKKWAQSRGLAVPNNLDPIVTKVAQQGATPLVVANQQRILGVIQLSDVIKPGVAERFAELRALGVRTIMVTGDNPITAGAIAAAAGVDDFVAEARPEDKLALIRREQALGRLVAMVGDGTNDAPALAQADVGLAMNSGTQAAKEAGNMVDLDSDPTKLLAVVEVGKQLLITRGALPPSL

SEQ ID NO: 173349 - protein, 283 aa, Unknown
  Bacterial polypetide isolated from the Sargasso Sea
VHTLLLDKTGTITFGNRRCSAMVKAPGVSTPELAEAALLASQGDDTPEGKSIVEYLAALHPMEVPERSGMTLIAFSAETRLSGADVGGVAYRKGAVDAVLAYLGLGRSDLPAPLAREVEKIAQSGGTPLLVAWDGRLLGAIHLKDVVKPDIRERFAELRAMGIRTVMVTGDNPLTAAAIAAEAGVDDVIAEATPEKKLSRIRAEQAEGKLVAMCGDGANDAPALAQADVGLAMNDGTQAAREAANLVDLDSDPTKLIDVVQVGKELLVTRGALTTFSVANDVA

SEQ ID NO: 173350 - protein, 654 aa, Unknown
  Bacterial polypetide isolated from the Sargasso Sea
MSHVIAQASRAAFVKLQPQLAIKSPVMLVVWVGTVLALGLTAQLVLTHQPYGFALCCSLILFFTLWFANFAEAIAEARGRGQAASLKATRRDLTAWLLNSAGQLHQVAASSLKAGDKVKVEAGQFVPADGEIVLGVATINESALTGESAPVLREAGTDHSGVIAGTKVLSGTITVLVTAEAGFSFLDKMISLVEGTNRQKTPNELALTVLLAALTLVFLIAVATLPAMAAFVGIELDLLMLIALLVCLIPTTIAGLLPAIGIAGMNRALSANVIAKSGKAVEVAGDIDTLLLDKTGTITFGDRQATAFIALPAVTQTELVRGAVLCSIEDPTPEGKSVVRLAQQLGAAEESLPDNSEFMPFSAQTRLSGVQLANGEYWVKGAADAVKAWAKSRGLAVPNSLDPMVSKVAQQGATPLVVANQQRILGVIQLSDVIKPGVAERFAELRALGVRTVMVTGDNPITAGAIAAAAGVDDFVAEARPEDKLALIRREQAQGRLVAMVGDGTNDAPALAQADVGLAMNSGTQAAKEAGNMVDLDSDPTKLLAVVEVGKQLLITRGALTTFSLANDVAKYFVIVPAVFAAAMPGIAALNFMQLPDPKMAVLSALIFNALIIPALIPLALKGVKIRAVSAEKLLRNNMLIFGLGGVLLPFAAH

SEQ ID NO: 173351 - protein, 351 aa, Unknown
  Bacterial polypetide isolated from the Sargasso Sea
MSNIKFSNVHKSFGQNKIINNFNLEGKEDEFLVLVGPSGCGKSTLLRMIAGLEKVDEGKIQINDKIINELHPSKRETAMVFQSYALYPHMNVYENMSFGLKIEKQSKEEIQTKVLRAAKILKIEELLERRPKQLSGGQRQRVAIGRAITRNPKIFLFDEPLSNLDAALRAEMRVEISKLHQQIKTNMIYVTHDQVEAMTLADRIVILNEGNIEQVGTPEEIYSDPANIFVAQFIGTPKMNILEIDEKDIKSEKIIKVLGNELTIKNVKLEKRKHFIGIRPEHLKINNETKFKFSPEIDIIENLGNEKIVYMKKDNHQLSAKISSGTEIGNSFGFDLQNIFIFNENGKRIKS

SEQ ID NO: 173352 - protein, 286 aa, Unknown
  Bacterial polypetide isolated from the Sargasso Sea
MTNGLQPPVHQPGNIGQARNAARSMFDPAIARPALVDSFRKLAPRHQLRNPVMFCVYVGSILTTILWIAALGGQAEAPAGFILAIALWLWFTVLFANFAEALAEGRSKAQAASLRGAKHNVMAKKLQEAHPKSPIRITTATELRKGDVVLVETGDVIPADGEVLEGVASVDESAITGESAPVIRESGGDFSSVTGGTRVLSDWIVMRVTVNPGEAFLDRMIAMVEGAKRQKTPNEIALTILLVALTLVLLFATATLLPFSMFSVEAAKAGHVVTITALVALLVCLI

SEQ ID NO: 173353 - protein, 601 aa, Unknown
  Bacterial polypetide isolated from the Sargasso Sea
MNANNLLQTLIFIVVLLAAAVPVARYLSAVMDGSSRVVRVFGPLERAMYRIAGVDAGSEMNWKQYAVATIAFNALGALFLYGLLRLQGFLPGNPQQFGAMTVDGAFNTAVSFVTNTNWQDYTPEQTVSYLTQMLGLTVQNFLSAATGIVVVIALIRGFARHTAQTIGNFWVDLTRVTMYVLVPMSVIIAALLMSQGVIQNMKAYEDVPVLQTSTYAAPKLDAQGNPVKDDKGNPVTVPTPLTKQTLAMGPVASQEAIKMLGTNGGGFFNANSAHPYENPTPFANFIQIFAILIIPASLCLVFGRMIGDRRQGIAVLAAMTVAFVIAIGFEVSAEQGGNPTLAALHVDQTASALQPGGNMEGKETRFGIAQTGIFTVATTAASCGAVDTMHDSLTPLGGLVPMLLIQLGEVVYGGVGSGLYGMLVFALLAVFVAGLMIGRTPEYVGKKIEAYEMKMVSIVVLLTPLLVLVGTSIAVLADAGKAGIANPGPHGFSEILYAFSSAANNNGSAFAGLTVGTPFYNWTTAIAMWFGRFGTIVPVLAIAGSLAAKKRIAVTSGTLPTHGPLFVVLLLGTVLLVGALTYVPALALGPGVEHLMMWLGA

SEQ ID NO: 173354 - protein, 694 aa, Unknown
  Bacterial polypetide isolated from the Sargasso Sea
MTQHSATRSMFDPALLRPAIVDSFKKLTPRTQFRNPVMFCVYVGSILTTILWIAALAGQAEAPAGFILAIALWLWFTVLFANFAEALAEGRSKAQAASLRSAKKDVMAKKLNEPHPKSPIRITTATELRKGDVVLVEAGDVIPADGEVVDGVASVDESAITGESAPVIRESGGDFSSVTGGTRVLSDWIVVKVTANPGEAFLDRMIAMVEGAKRKKTPNEIALTILLVALTIVMLLATATLLPFSMFSVEAMKAGHVVTITALVALLVCLIPTTIGGLLSAIGVAGMSRMMQANVIATSGRAVEAAGDVDVLLLDKTGTITLGNRQASTFVPAPGVTEEALADAAQLSSLADETPEGRSIVVLAKERFNIRQRDMGQLHATFIGFSAQTRMSGVDLPGREIRKGAADAIRNYVETHGSRFPEEVRRAVDEVARRGSTPLVVADLQDGAARVLGVIELKDIVKGGIKERFAELRKMGIKTVMVTGDNRLTAAAIAAEAGVDDFLAEATPETKLATIREHQAAGRLVAMTGDGTNDAPALAQADVAVAMNTGTQAAKEAGNMVDLDSNPTKLIEIVEIGKQMLMTRGSLTTFSIANDIAKYFAIIPAAFVTTYPQLRVLDIMHLTSPASAILSAVIFNALIIVALIPLALKGVTYRPLGAASLLRRNLLVYGLGGVLLPFPFIKLIDMTLAALGWA

SEQ ID NO: 173355 - protein, 262 aa, Unknown
  Bacterial polypetide isolated from the Sargasso Sea
PLLTSLGVDQAASTLHAGGNMEGKETRFGIATSALFAVITTAASCGAMIAMHDSFTPLGGMVPMVLMQMGEVVFGGVGSGLYGMLVFAIMAVFIAGLMIGRTPEYLGKKIETHEMKLVSIAILVTPLLVLLGTAVAVMSEAGRAGLSNPGAHGFSQVLYALSSAANNNGSAFAGLSANTPFYNVLLAVTMWLGRFGVIVPVLAMAGSLAAKKRATATDGTLPTHGPLFVALLAGVVLLVGLLNYVPALALGPVVEHLVLTTR

SEQ ID NO: 173356 - protein, 350 aa, Unknown
  Bacterial polypetide isolated from the Sargasso Sea
MTRKTLTLFDPALVRPALLDAFKKLDPRVQWRNPVMFVVYVGSAFTTALAASKPDGFTAAVALWLWVTVLFANFAEAMAEGRSKAQAASLRGLKKQTWAKKLDGQFDRTTPRTELTWLPLEAAHLRKGDVVLVEAGDTIPADGEVIDGVASVDESAITGESAPVIRESGGDFSAVTGGTRVLSDWIVVRVAVDPGETFVDRMIAMVENAKRQKTPNEIALTILLVALTIVFLGVVATLLPFSIFGVAATGQGQPVGLVVLVALLVCLIPTTIAGLLSAIGVAGMSRMMQANVIATSGRAVEAAGDVDVLLLDKTGTITLGNRQASQFVSAPGVTDAALADAAQLASLADE

SEQ ID NO: 173357 - protein, 708 aa, Unknown
  Bacterial polypetide isolated from the Sargasso Sea
MSLAPVTGPRPAQPGHARTAARSMFDPALVRPAIADSFRKLTPRTQFRNPVMFCVYVGSILTTILWIAALFGQAEAPAGFIVAIALWLWFTVLFANFAEALAEGRSKAQAASLRSAKHNVVAKKLVAPHAKAAVEVMASTDLRKGDVVLVETGDTIPADGDVIEGVASVDESAITGESAPVIRESGGDFSSVTGGTRVLSDWIVVRVAVNPGEAFLDRMIAMVEGAKRKKTPNEIALTILLVALTIVMLLATATLLPFSTFAVEAMKAGHVVTITALVALLVCLIPTTIGGLLSAIGVAGMSRMMQANVIATSGRAVEAAGDVDVLLLDKTGTITLGNRQASTFVPAPFVTEEALADAAQLSSLADETPEGRSIVVLAKQRFNLRERDMQALHPVFLSFSAQTRMSGVDLPGREIRKGAADAIKHYVESHGGCVTREVEAVVTDIARRGSTPLAVAERVDGVARVLGVIELKDIVKGGIKERFAELRKMGIKTVMVTGDNRLTAAAIAAEAGVDDFLAEATPETKLATIREHQAVGRLVAMTGDGTNDAPALAQADVAVAMNTGTQAAKEAGNMVDLDSNPTKLIEIVEIGKQMLMTRGSLTTFSIANDVAKYFAIIPAAFATTYPQLRVLDVMHLASPASAILSAVIFNALIIVALIPLALKGVRYRPLGAAPLLRRNLLLYGLGGVLLPFPFIKLIDMVLVACGWA

SEQ ID NO: 173358 - protein, 614 aa, Unknown
  Bacterial polypetide isolated from the Sargasso Sea
MAWQLTAWLWLTLWFANFAETLAEGRGKARADSLKAGMSQLKARRVTSPQDDKGEWVPATSLLKGDLVLVRSGEMIPADGEVVAGIASVNEAAITGESAPVIRESGTDRSGVTGNTTVVSDQIWVHISNNPGESTLDRMIALVEGAKRQKTPNEMALDALLVGLTLIFLLVVATLPWFLDYNGTQVPRLYLLALFITLIPTTIGGLLSAIGIAGMDRLVKLNVIAKSGRAVEAAGDVRTLLLDKTGTITFGNRMADELIPAPGVDPSLLAQAAMLASLGDNTPEGKSILTLAGKSHTRPSQLESDILIPFSAETRLSGLDRNGHHYRKGAVDAVLRYLSLDRKAVPELILKSVDNIARQGGTPLLVCTHEKLLGVVFLKDIIKPGIKARFQILRHMGIRTVMITGDNPLTAAAIAAEAGVDDFIAEATPEKKLAYIRQEQADGRLVAMCGDGANDAPALAQADVGLAMNEGTQAAKEAGNLVDLDSNPTKLLDVVLVGKQLLVTRGALTTFSIANDVAKYFAILPALFIAAYPQLGVLNLMQLGSPESAILSAIIFNALIIVALVPLALRGVSLQGSAASLLRRNLLIYGVGGLIVPFIGIKLIDLVITGLGLV

SEQ ID NO: 173359 - protein, 301 aa, Unknown
  Bacterial polypetide isolated from the Sargasso Sea
MAAAMVCTLGRYVKDLAHSRAILIAMTIMLVLGLCLAISQELKPDPALAHLTSEAGNWEGKESRFGPVLSSIWEVATTAASNGSVNAMHDSFAPLAGMVAMINMLLGEVVFGGVGAGIYGMMLFVLLTVFLCGLMVGRTPTYLGKRLGITEMKWVVASMLVMPIGVLVIGGITLLMPDSATVIGHDGPHGLSRLIYAYASAAGNNGSAFAGFAAADSWQCIAIGLAMLLGRFGYIIPVLAIAGQLARAPRQERSEGDFPVSGPLFITLLIVTVLLMGGLSFLPVLALGPVAEHLSLLGGAF

SEQ ID NO: 173360 - protein, 674 aa, Unknown
  Bacterial polypetide isolated from the Sargasso Sea
MRWTAVLREAFRKLAPRVQLKNPVMFVVYLGSIVTTVLWLQALTGTGDAPAGFIFAVACWLWFTVLFANAAEALAEGRGKAQADALRAARKRVYAKVLDEPKQFGSTSHRVPSDELAAGSIVLVEAGDTIPADGEVIDGVASVDESAITGESAPVIRESGGDFSSVTGGTRVLSDWIIVKITAQPGEAFLDRMIAMVEGAKRGKTPNEVALTILLVALTIIFLLVCVTLLPFSQFSVLLNASGTAVSLTVLIALLVCLIPTTIGALLSAIGIAGMSRMMRANVLATSGRAIEAAGDVDVLLLDKTGTITLGNREAVQFRPAPGVDERALAEAAQLSSLADETPEGRSIVALAKQRFSLDVAAVAGSITVPFSARTRMSGLDIGERQVRKGAASAIRAHVDALGGVFPQAVETAVNDIARRGGTPLVVADGFRVLGAIELKDIVKHGIAARFAELRKVGVKTVMITGDNRLTAAAIAAEAGVDDYLAEATPEDKLRLIREHQAKGHLVAMTGDGTNDAPALAQADVAVAMHSGTQAAKEAANMVDLDSNPTKLMQVVEVGKQMIMTRGALTTFSVANDLAKYFAIIPAAFVATYPALGALNVMGLHSPTSAILSAVIFNALIIVALIPLALKGVKYRAEPAEKLLGRNLLIYGVGGIVAPFIGIKLIDMLLTPFI

SEQ ID NO: 173361 - protein, 188 aa, Unknown
  Bacterial polypetide isolated from the Sargasso Sea
MWQEIIYPVAFVLLVLLPAPLLGNYLYRVFEGKSRWLAPLERATLACCGTDGREQDWKSYALSLLAFNGAGFGLLFLILLAQGLLPLNPQQLPGLNWQLAFNTAVSFMTNTNWQAYSGEASLSYFSQMVGLTTQNFVSAATGAAVAIALFRGIARQQTTHLGNFWQDLVRFCLYVLLPMALILALLLV

SEQ ID NO: 173362 - protein, 560 aa, Unknown
  Bacterial polypetide isolated from the Sargasso Sea
MNSNNVLQAGLFIVVLLAAAVPMSRYLSNVMDGSSRVVRLGGPLERLLYRIAGVDPSAEMGWKHYAIATIAFNALGALFLYVLLRVQGWLPGNPQQFGPMTVDGAFNTAVSFVTNTNWQDYTPEQTVGYLTQMLGFTVQNFFSAATGIVVVIALIRGFARHTAQTIGNFWVDLTRVTLYVLLPMSAIIAAVLMSQGVIQNFKAYQDVPTLQTTTYAAPKLDAQGNPVKDAKGNPVTVDTPVKTQTIAMGPVASQEAIKMLGTNGGGFFNGNSAHPYENPTPFSNFLQIFSILIIPAALALVFGRMIADRKQGVAVLAAMTIAFAVCVVGEISAEQSGNPAFTALNVDQSANALQSGGNTEGKETRFGIAQSGIFTVATTAASCGAVANTHDSLTPIGGLYPMLLMQLGEVIFGGVGSGMYGMLVFALLAVFVAGLMIGRTPEYVGKKIEAYEMKMVSIVVLLTPLLVLVGTSIAVLSEAGKAGIANPGAHGFSEILYAFSSAANNNGSAFAGLTVSTPFYNWLTAIAMWFGRFGTIIPVLAIAGSLAAKKRIGVTGGTLP

SEQ ID NO: 173363 - protein, 370 aa, Unknown
  Bacterial polypetide isolated from the Sargasso Sea
RQASQFVPAPGLTEEALADAAQLSSLADETPEGRSIVVLAKQRFNIRQRDMASLKAEFLAFTAQTRMSGVDLLGREIRKGAADAVKNYVEANGGRFPNEVSTAVAEVARRGSTPLVVAEKGEQGARVLGVIELKDVVKGGIKERFAELRKMGIKTIMVTGDNRLTAAAIAAEAGVDDFLAEATPEAKLATIRSHQAEGRLVAMTGDGTNDAPALAQADVAVAMNTGTQAAKEAGNMVDLDSNPTKLIEIVEIGKQMLMTRGSLTTFSIANDVAKYFAIIPAAFATTYPALNALNVMHLATPASAIMSAVIFNALIIVLLIPLALKGVKYRALGAAILLRRNLLVYGLGGIIVPFIGIKLIDMVLAAFGWV

SEQ ID NO: 173364 - protein, 225 aa, Unknown
  Bacterial polypetide isolated from the Sargasso Sea
MNLNNLVQPGVFIVVLIALAIPLGRYMTGVVDGSSVVVRRFGRPIETAFYKLAGVDPSAEMSWKRYALAVLAFNTLGVGAVYGFLRLQQWLPANPQGFGPMTPDAAFNTAVSFVTNTNWQDYTPESTVSYLTQMAALTVQNFLSAATGIAVVVALIRGFARHTTATIGNFWVDLTRITLYILAPLATVIALVLISQGVIQNFKSYEDVPTLQVTTYQTPKTDAQG

SEQ ID NO: 173365 - protein, 206 aa, Unknown
  Bacterial polypetide isolated from the Sargasso Sea
MGGFVPLLLIELGEVIFGGVGSGLYGMLVFALLAVFVAGLMIGRTPEYIGKKIESYEMKMVSIAVLLTPLLVLVGASIAVLTAAGVAGIANPGPHGFSEILYAYSSAANNNGSAFAGLSVNTPFYNSTLAFVMWFGRFGSIVPVLAIAGSLAAKKRISATAGTLPTHGPLFVVLLLGTVVLVGALTYVPALALGPVVEHLIMVAGH

SEQ ID NO: 173366 - protein, 144 aa, Unknown
  Bacterial polypetide isolated from the Sargasso Sea
SRQIAEIGIYPAVDPLDSTSRILDPRIVGDEHYRVAREVQKVLQTYKSLQDIIAILGMDELSEEDKLVVARARKIQRFLSQPFFVAEVFTGSPGKLVDLESTIKGFDAICKGEYDHLPEAAFYMVGTIEEAIQKAESLANEAAA

SEQ ID NO: 173367 - protein, 276 aa, Unknown
  Bacterial polypetide isolated from the Sargasso Sea
MSGKEYRTITDVKGPLVFLNKTEPVSYNEIVQLRLSDGSIKNGQVLDTSDDQVIVQVFEGTASVDRQTGVKFLGDVFKLPVSKGLIGRILDGAGRPRDGGPEIVADDMADIIGAAINPYSRQSPEAFIQTGISAIDACTSLVRGQKLPIFSASGLPHNDIALQIARQAKLVDSDDDFVVVFCAMGITAEEYNFFVHDLERTGALENAALFVNLADDPAVERLITPRLALTAAEYLAFEHDYHVLVIYTDMTNYCESLRQIGAAREEVPGRRGYPGY

SEQ ID NO: 173368 - protein, 203 aa, Unknown
  Bacterial polypetide isolated from the Sargasso Sea
RAAKLSDEHGGGSLTALPIIETQGGDVSAFIPTNVISITDGQIFLETELFNQGIRPAINVGLSVSRVGSSAQTKAMKKVSGSMKLELAQYREMAAFAQFGSDLDASTQQLLNRGSKLTELLKQKQYSPMTVAEQVISVFCGVKGYLDDIDLKDVAEFEGKIIEKCKSDKPEIIESILSSGKLEEDKEKLLVEVITQLKGNFKS

SEQ ID NO: 173369 - protein, 123 aa, Unknown
  Bacterial polypetide isolated from the Sargasso Sea
MASLDDLKKRIASVKSTQKITKAMKMVAAAKLRRAQESAEKGRPYSEKMNNIILNLSNGISDKENAPKLLSGTGQEKTHLCVVMTSDRGLCGGFNSNIIKKAKSYFAKILNEGKELKIITVGS

SEQ ID NO: 173370 - protein, 272 aa, Unknown
  Bacterial polypetide isolated from the Sargasso Sea
MSKGTITQVIGAVVDVKFEGELPEILTALECKNGDNRLVLEVAQHLGETTVRTIAMDATEGLKRGDEVINTNSPIQVPVGPETLGRIINVIGEPIDERGEVKTKENWPIHRAAPEFNDQSTETEILVTGIKVIDLLAPYAKGGKIGLFGGAGVGKTVLIMELINNVAKAHGGFSVFAGVGERTREGNDLYHEMIESGVIKQDGPGSKAALVYGQMNEPPGARARVALTGLTVAEYFRDQEGQDVLFFVDNIFRFTQAGSEVSALLGRIPSAV

SEQ ID NO: 173371 - protein, 301 aa, Unknown
  Bacterial polypetide isolated from the Sargasso Sea
TAVAVDTIINQKGTGIKCIYVAVGQKNSSVANVVKKLEEEGALEHTIIVNAAASDSAAMQYIAPYSGCAMGEYFRDKGEDALIIFDDLTKQAWAYRQVSLLLKRPPGREAYPGDVFYLHSRLLERAARVNAEYVEKETGGKVKGQTGSLTALPIIETQAGDVSAFVPTNVISITDGQIYLESDLFNAGIRPAINAGLSVSRVGGAAQTKIIKKLGGGVRLALAQYRELAAFAQFASDLDEATRKQLERGQRVTELMKQKQYAPLTVAEMAVSLYAANEGYLDDVPADKIVDFEYSTACKLC

SEQ ID NO: 173372 - protein, 291 aa, Unknown
  Bacterial polypetide isolated from the Sargasso Sea
EVVAPGVIDRQSVDQPVQTGLKSIDVMVPIGRGQRELIIGDRQTGKTAIAVDTIINQKDSDITCVYVAIGQKQSTVATVVRQLEEAGALENTIIVSASAAESASLQFIAPYSGCTMGEYFRDRGEDALIIYDDLSKHAVAYRQISLLLKRPPGREAFPGDIFYLHSRLLERAARVNPDYVERLTNGKVKGKTGSLTALPIIETQASDVSAFIPTNVISITDGQIFLETDLFNSGIRPAINVGISVSRVGGAAQTKIIKKLGGGVKLALAQFRELESFSQFASDLDDATKEQ

SEQ ID NO: 173373 - protein, 273 aa, Unknown
  Bacterial polypetide isolated from the Sargasso Sea
MVEFPGGIKGMALNLEMDNVGVSIFGDDTGIKEGDTVKRTGEIVDVPVGKELLGRVVDGLGNPIDGKGPIQSSEKRRIELKAPGIIPRQSVSEPMQTGIKALDALVPVGRGQRELIIGDRQTGKTAVAIDTILNQKSVNQSDNEKEKLYCIYVAIGQKRSTVAQIVKTLEDNGAMEYTIVVSATASEPAPLQFLSAYTGCTMGEYFRDNGMHALIVYDDLSKQAVAYRQMSLLLRRPPGREAYPGDVFYIHSRLLERAAKMSDEHGGGSLTAL

SEQ ID NO: 173374 - protein, 86 aa, Unknown
  Bacterial polypetide isolated from the Sargasso Sea
MDELSEEDKLTVARARKIQRFLSQPFHVAEVFTGSPGVLVSLDDTIAGFAGIISGEYDHLPEAAFYMVGTIEEAIEKGKKLMQDAA

SEQ ID NO: 173375 - protein, 282 aa, Unknown
  Bacterial polypetide isolated from the Sargasso Sea
GILRRVVDTLGNPIDGKGPIEGYLFDMPIERKAPGVIYRQPVNEPLQTGIKSIDAMIPIGRGQRELVIGDRQTGKTTVCIDTILNQKEFYDAGEPVFCIYVAIGQKASTVAAIAKTLEDKGALAYTVIVAANASDPAPMQVFAPFSGACIGEYFRDTGRPALIIYDDLSKQAVAYREVSLLLRRPPGREAYPGDVFYLHSRLLERSAKVVNDDKVASGMNDLPESLKSKVKGGGSLTALPIIETQAGDVSAYIPTNVISITDGQIFLECETYLTQVWRPAIN

SEQ ID NO: 173376 - protein, 268 aa, Unknown
  Bacterial polypetide isolated from the Sargasso Sea
APYTGATIAEYFMYKGKATLVIYDDLSKQAAAYRQMSLLLRRPPGREAYPGDVFYCHSRLLERAAKLSDAMGKGSMTALPIIETQAGDVSAYIPTNVISITDGQIFLSSDLFNSGLRPAINVGISVSRVGGAAQTKAIKKIAGTLKLELAQFDELAAFSQFASDLDASTQQQLERGKRLRELLKQPQFSPLILAEQVAIVYAGVKGLIDDVPVDKVVDFSRELREYLKSNKAEFITEIQEKKVMSPEAEAILKDAITEVVSTMVASAA

SEQ ID NO: 173377 - protein, 301 aa, Unknown
  Bacterial polypetide isolated from the Sargasso Sea
GDLAGLVLEVQQQLGGGTVRTIALGTTDGLRRGAAVANTGKAIQVPVGKATLGRIMNVLGEPIDEAGPIGEEERWSIHRAAPSYEEQAASNALLETGIKVIDLVCPFAKGGKVGLFGGAGVGKTVNMMELIRNIAIEHSGYSVFAGVGERTREGNDFYHEMKDSNVLDKVSLVYGQMNEPPGNRLRVALTGLTMAEKFRDEGRDVLFFVDNIYRYTLAGTEVSALLGRMPSAVGYQPTLAEEMGALQERITSTKTGSITSIQAVYVPADDLTDPSPATTFSHLDATVVLSRNIASLGIYPA

SEQ ID NO: 173378 - protein, 97 aa, Unknown
  Bacterial polypetide isolated from the Sargasso Sea
SLQDIIAILGMDELSEEDKLVVARARKIQRFLSQPFFVAEVFTGSPGKLVDLESTIKGFDAICKGEYDHLPEAAFYMVGTIEEAIEKAEKMEKEAAA

SEQ ID NO: 173379 - protein, 331 aa, Unknown
  Bacterial polypetide isolated from the Sargasso Sea
MALNLETDNVGIVIFGDDREIKEGDTVKRTGSIVDVPVGKELLGRVVDPLGNPIDGKGPIEAKQRGRVEVKAPGIMPRKGVHEPMQTGLKAIDSLIPVGRGQRELIIGDRQTGKTAIAIDAFINQKSVNDAAGDDDSKKLFCIYVAVGQKRSTVAQIVKTLEDYGAMEYSIVIASTASEPAPMQFLAPYAGCTMGEYFRDNGMHALIVYDDLSKQAVAYRQMSLLLRRPPGREAYPGDVFYIHSRLLERAAKMNDENGAGSLTALPVIETQAGDVSAYIPTNVISITDGQIFLETELFYRGIRPAVNVGLSVSRVGSAAQIKAMKQVAGRI

SEQ ID NO: 173380 - protein, 106 aa, Unknown
  Bacterial polypetide isolated from the Sargasso Sea
VQAVLQTYKSLQDIIAILGMDELSEEDKLTVARARKIQRFMSQPFFVAEVFTGTPGKYVELEDTIKGFDAICKGEYDHLPEAAFYMVGTIEEAIQKAEKMAEEAAA

SEQ ID NO: 173381 - protein, 143 aa, Unknown
  Bacterial polypetide isolated from the Sargasso Sea
SVSRVGSAAQTKAMKKVAGSIKLELAQYREMAAFAQFGSDLDASTQKLLNRGSKLTELLKQDQYSPMTVAEQVVTVYCGVKGYLDTIENNQIRSFEKGLLDLIKNEKPEILESIQNTGKIEENTEKLLTEVITNYKKSNFEKK

SEQ ID NO: 173382 - protein, 135 aa, Unknown
  Bacterial polypetide isolated from the Sargasso Sea
MPSLDDLRKRISSVKSTQKITKAMKMVAAAKLRKAQEMAEKGRPYSDKMDLIIQNLSKAINDPSNAPKLLVGTGEDKTHLCVVMTADRGLCGGFNTNICKLAKKYFEEAIKSSKNLKIKTVGTKGLDQLKRDYSQ

SEQ ID NO: 173383 - protein, 210 aa, Unknown
  Bacterial polypetide isolated from the Sargasso Sea
MAKEGIITQLIGAVVDVKFEGDLPEIYTALEATNSGNKLILEVAQHLGENNVRTIAMDSTEGLKRGDKVINTESPISVPVGPETLGRIINVIGQPIDEKGEVKTSEKWPIHRASPKFTDQSTETEILVTGIKVIDLLAPYAKGGKIGLFGGAGVGKTVTIMELINNIAKAHGGFSVFAGVGERTREGNDLYHEMIESGVIKKDGKGSKAA

SEQ ID NO: 173384 - protein, 201 aa, Unknown
  Bacterial polypetide isolated from the Sargasso Sea
MFFNSLLTNFAALEVGQHLYWQIGNIRLHGQVFLTSWILLGALLVFISLGTKKMENDPKGLQNLLEFLWDYIRDLARTQIGEKVYRDWMPFIGTLFLFVFVSNWGGALIPWRLIKLPSGELGAPTADINTTIALALLVSLSYFYAGLSNKGWRYFEYYVHPTPIMLPFKILEDFTKPLSLSFRLFGNILADELVVGVLVFL

SEQ ID NO: 173385 - protein, 299 aa, Unknown
  Bacterial polypetide isolated from the Sargasso Sea
ANIVEVLRERGALDYTVVVSAGASEPAALQYLAPYTGAAIAEHFMYQGKATLVIYDDLTKQAQAYRQMSLLLKRPPGREAYPGDVFYLHSRLLERAAKLSDAMGGGSMTALPIIETQAGDVSAYIPTNVISITDGQIFLSADLFNSGLRPAINVGISVSRVGGAAQTKAIKKIAGTLKLELAQFDELAAFSQFASDLDEATQQQLERGKRLRELLKQPQFSPLNLAEQVAVVYAGVKGLIDEVPVEDVTKFATELREYLKLNKAEFIEEILKEKKLNDGLEATLKEVINEVKSSMLATV

SEQ ID NO: 173386 - protein, 125 aa, Unknown
  Bacterial polypetide isolated from the Sargasso Sea
SRILDPRIVGDEHYRVARDVQRILQSYKSLQDIIAILGMDELSEEDKLVVARARKIQRFLSQPFFVAEVFTGSPGKLVDLDSTIKGFDAICKGEYDHLPEAAFYMVGTIEEAIEKAKKMEQEAAA

SEQ ID NO: 173387 - protein, 267 aa, Unknown
  Bacterial polypetide isolated from the Sargasso Sea
RVLPRQGEDALIIFDDLTKQAWAYRQVSLLLKRPPGREAYPGDVFYLHSRLLERAARVNAEYVEKETGGKVKGQTGSLTALPIIETQAGDVSAFVPTNVISITDGQIYLESDLFNAGIRPAINAGLSVSRVGGAAQTKIIKKLGGGVRLALAQYRELAAFAQFASDLDEATRKQLERGQRVTELMKQKQYAPLTVAEMAVSLYAANEGYLDDVPADKIVDFEAALHANFVESASDLAQKINDTGDYNDEIEAELKKFVEDFKATGTY

SEQ ID NO: 173388 - protein, 308 aa, Unknown
  Bacterial polypetide isolated from the Sargasso Sea
DDSGTTLEVQQQLGDGVVRTIAMGATEGLKRGLLATRTNAPISVPVGPETLGRIVDVLGNPIDEKGPIGEKQKMPIHRKPPTYTDQSVSNDILETGIKVIDLMCPFAKGGKIGLFGGAGVGKTVNMMELINNIALQHSGLSVFAGVGERTREGNDFYYEMQESGVVNIDNLGESKVAMVYGQMNEPPGNRLRVALTGLTMAESFRDEGKDVLLFIDNIYRYTLAGVEVSALLGRMPSAVGYQPTLAEEMGALQERITSTKTGSITSIQAVYVPADDLTDPSPATTFAHFGCTVVLSQTISELGIYPAV

SEQ ID NO: 173389 - protein, 290 aa, Unknown
  Bacterial polypetide isolated from the Sargasso Sea
DAGAMEYTTIVSATASDSAPLQFLAPYTGCAMGEYFRDNGMHALIIYDDLSKQAVAYRQMSLLLRRPPGREAYPGDVFYLHSRLLERAAKLSDANGGGSLTALPVIETQAGDVSAYIPTNVISITDGQIFLETELFNQGIRPAVNVGLSVSRVGSAAQTKAMKKVAGSIKLELAQYREMAAFAQFGSDLDASTQKLLNRGSKLTELLKQKQYSPMTVAEQVLTIFAGVRGYLDDVDLKNIEDFENQLLEKCKSEKPEIIESISSTGKLDENIEKKLATLINELKEKFKNA

SEQ ID NO: 173390 - protein, 276 aa, Unknown
  Bacterial polypetide isolated from the Sargasso Sea
MSNKAGKISQIMGAVVDVSFEDNYLPEIMNALNVDRGDEDLLVLEVAQHLGEGLVRTIAMDTTDGLTRGVEVLDTGSPISVPVGQETLGRLFDVLGNTIDGKETLETKKRNPIHRSAPRHEDLTTTTEVLVTGIKVVDLMEPYTKGGKTGLFGGAGVGKTVLIQELIRNIATEHGGYSVFAGVGERTREGNDLYNEMTESGVIDKTTMVFGQMNEPPGARLRVALSGLAMAEFFRDDEGRDVLLFVDNIFRFTQAGSEVSALLGRMPSAVGYQPTL

SEQ ID NO: 173391 - protein, 87 aa, Unknown
  Bacterial polypetide isolated from the Sargasso Sea
GMDELSEEDKLTVARARKIQRFLSQPFFVAEVFTGSPGKLVDLESTIKGFDAICKGEYDHLPEAAFYMVGTIEEAIEKAEKMKKDAA

SEQ ID NO: 173392 - protein, 347 aa, Unknown
  Bacterial polypetide isolated from the Sargasso Sea
ENPIDGKGALDKSVKKTRVEVKAPGIIPRQSVSEPMQTGLKSIDSLVPIGRGQRELIIGDRQTGKTAVAVDAIINQKKINESGDEKQKLYCIYVAVGQKRSTVRQIQKTLEEAGAMEYTTIVAATASDSAPLQFLAPYTGCAMGEYFRDNGMHALIIYDDLSKQAVAYRQMSLLLRRPPGREAYPGDVFYLHSRLLERAAKLSDEHGGGSLTALPIIETQGGDVSAFIPTNVISITDGQIFLETELFNQGIRPAINVGLSVSRVGSSAQTKAMKKVSGSMKLELAQYREMAAFAQFGSDLDASTQQLLNRGSKLTELLKQKQYSPMTVAEQVISVFCGVKVIWMILI

SEQ ID NO: 173393 - protein, 164 aa, Unknown
  Bacterial polypetide isolated from the Sargasso Sea
DGQIFLETELFNQGIRPAINVGLSVSRVGSSAQTKAMKKVSGSMKLELAQYREMAAFAQFGSDLDASTQKLLNRGSKLTELLKQNQYSPMTVAEQVISIFCGVKGHLDDVEQKDISSFENKIIDKCRTEKPEIIEAITASGKLDDENEKTLNEIILQLKKDFSS

SEQ ID NO: 173394 - protein, 142 aa, Unknown
  Bacterial polypetide isolated from the Sargasso Sea
MASLDDLKKRISSVKSTQKITKAMKMVAAAKLRRAQESAEKGRPYSDKMNNVILNLSSAISDIENAPKLLSGTGEDKIHLCVVMTSDRGLCGGFNTNIIKKAKLYFQKILEEGKILKIITVGTKGYDQLKRAYSDHIIDRIS

SEQ ID NO: 173395 - protein, 125 aa, Unknown
  Bacterial polypetide isolated from the Sargasso Sea
MRKGQITQIIGAVVDVKFEGDLPEILTALECDNGGVRLVLEVAQHLGESSVRTIAMDATEGLKRGDQVTDTGAPIKVPVGPETLGRIINVIGEPIDEKGEVKTKENWPIHRSAPEFNEQSTETEI

SEQ ID NO: 173396 - protein, 166 aa, Unknown
  Bacterial polypetide isolated from the Sargasso Sea
MSKNIGKVSKVIGAVVDVEFSSKESTLPGIYDSLEIKKEDGTILILEVQSHIGENIVRTISMDSTDGLSRGTDVVATGNPIQMPIGKEVYGRLFNVVGDPIDGLEVLPKINDDGMSIHRQAPDFDQLSTSTEVLYTGIKVIDLIEPYAKGGKIGLFGGAGVGKTVL

SEQ ID NO: 173397 - protein, 221 aa, Unknown
  Bacterial polypetide isolated from the Sargasso Sea
SGSGEDKVHLCIVMTSDRGLCGGFNTNIIKKAKSYFQKISNEGKTLKIITVGSKGYDQLKRMYKDNIIEKISFKESKYANYFDADKVGKIIIDKFEKKEFDVCTIFYNQFKNVITQIPQEQQIIPLKATESAGNSSEDNYEFEPEEDEILSNLLPKNISTQIFRAMLENSASEQGSRMSAMDNATRNAGEMVDKLTIQYNRSRQAAITKELIEIISGAESL

SEQ ID NO: 173398 - protein, 310 aa, Unknown
  Bacterial polypetide isolated from the Sargasso Sea
RLLGRVVDALGNPIDGKGPIKAKENGRVDIKAPGIMPRKSVHEPMQTGLKAIDALIPIGRGQRELIIGDRQTGKTAIALDTILNQKSVNATDDESAKLYCVYVAIGQKRSSVAQLVKILEDNGALEYSVVVAATASDPAPLQYLAPFSGCTIGEYFRDNGMHSLIVYDDLSKQAVAYRQMSLLLRRPPGREAYPGDVFYLHSRLLERAAKLNEENGSGSLTALPVIETQANDVSAFIPTNVISITDGQIFLETDLFYQGIRPAVNVGLSVSRVGSSAQIKAMKQVAGKIKGELAQYREMAAFAQFGSDLD

SEQ ID NO: 173399 - protein, 161 aa, Unknown
  Bacterial polypetide isolated from the Sargasso Sea
TDPAPATSFAHLDATTTLNRSIAEKGIYPAVDPLDSNSRILDPRIVGEEHYAVARQVQETLQRYKSLQDIIAILGMDELSEDDKLIVARARKIERFLSQPFHVAEVFTGSPGVFVSLEDTIKGFKEVCDGKHDDLPEAAFYMCGTIEQVIEKANKLSTDAA

SEQ ID NO: 173400 - protein, 251 aa, Unknown
  Bacterial polypetide isolated from the Sargasso Sea
KATLVIYDDLTKQAQAYRQMSLLLKRPPGREAYPGDVFYLHSRLLERAAKLSDAMGGGSMTALPIIETQAGDVSAYIPTNVISITDGQIFLSADLFNSGLRPAINVGISVSRVGGAAQTKAIKKIAGTLKLELAQFDELAAFSQFASDLDEATQQQLERGKRLRELLKQPQFSPLNLAEQVAVVYAGVKGLIDEVPVDDVTKFATELREYLKLNKAEFIEEILKEKKLNDGLEATLKEVINEVKSAMLATV

SEQ ID NO: 173401 - protein, 125 aa, Unknown
  Bacterial polypetide isolated from the Sargasso Sea
MRKGKITQIIGAVVDVKFDGELPEILTALECDNSGNRLVLEVAQHLGESSVRTIAMDATEGLKRGDEVTDTGAPIKVPVGPETLGRIINVIGEPIDEKGEVKTKENWPIHRSAPEFSEQSTETEI

SEQ ID NO: 173402 - protein, 246 aa, Unknown
  Bacterial polypetide isolated from the Sargasso Sea
MSKGIITQVIGAVVDVKFDGELPEILTALECKNGDNRLVLEVAQHLGETTVRTIAMDATEGLKRGDEVINTNAPIQVPVGPETLGRIINVIGEPIDERGEVKTKESWPIHRAAPEFNDQSTETEILVTGIKVIDLLAPYAKGGKIGLFGGAGVGKTVLIMELINNVAKAHGGFSVFAGVGERTREGNDLYHEMIESGVIKKEGAGSKAALVYGQMNEPPGARARVALTGLTVAEYFRDQEGQDVLF

SEQ ID NO: 173403 - protein, 253 aa, Unknown
  Bacterial polypetide isolated from the Sargasso Sea
MANNLTGKISQVLGAVVDVEFDGELPAIMNALEVDNNGNRLMLEVAQHLGENAVRTIAMDVTDGLIRGQTATDTGAPISMPVGPETLGRIMNVVGEPVDERGEIGTKKTYPIHRSAPEFVDQSTETEVLVTGIKVVDLLAPYARGGKIGLFGGAGVGKTVLIMELINNIAKAHGGYSVFAGVGERTREGNDLYHEMIESGIIDLKGKDSKVALVYGQMNEPPGARARVALSGLTQAEYFRDEEGQDVLFFVDN

SEQ ID NO: 173404 - protein, 177 aa, Unknown
  Bacterial polypetide isolated from the Sargasso Sea
MPSLDDLRKRITSVKSTQKITKAMKMVAAAKLRKAQENAEKGRPYSEKMNNIILNLSAGVSDPQSAPKLLVGTGKEDVHLSVVLTSDRGLCGGFNSNIIKKAKNYFEKIQKEGKSLKIITVGSKGYDQLKRQYGNSIIENISFKESKNINYFDAAKVGNLIIEKFQNEEFDFCTIFF

SEQ ID NO: 173405 - protein, 138 aa, Unknown
  Bacterial polypetide isolated from the Sargasso Sea
VGSAAQTKAMKKVAGSIKLELAQYREMAAFAQFGSDLDASTQKLLNRGSKLTELLKQKQYSPMTVAEQVLTIFAGVRGYLDDIDLKNIEDFENQLLEKCKSEKPEIIESISSSGKLDEDIEKKLASLINDLKEKFKNA

SEQ ID NO: 173406 - protein, 281 aa, Unknown
  Bacterial polypetide isolated from the Sargasso Sea
MSDTGVIKQIIGAVIDVEFDKAQIPNIYDALVVSENNLVLETQQQLGDGVVRTVAMGTTEGLKRGLDVENTKAPISVPVGEATLGRIMNVLGDPIDMKGEVKTKERMPIHRKPPEYVDLSDSNEILETGIKVIDLVCPFAKGGKVGLFGGAGVGKTVNMMELIRNIAIEHSGYSVFAGVGERTREGNDFYHEMTDSNVLDKVSLVYGQMNEPPGNRLRVALTGLTMAEKFRDEGRDVLLFVDNIYRYTLAGVEVSALLGRMPSAVGYQPTLAEEMGVLQER

SEQ ID NO: 173407 - protein, 95 aa, Unknown
  Bacterial polypetide isolated from the Sargasso Sea
QRYNELKDIIAILGMDELSEEDKGLVARARKAQRFLSQPFFVAEIFTGTPGKYVSLEDTIKAFKGILNGDYDHLPEQAFYMVGTIEEAVEKAKTL

SEQ ID NO: 173408 - protein, 194 aa, Unknown
  Bacterial polypetide isolated from the Sargasso Sea
MTTKINPSEISSIIKKKIDDYKGAATEANVGEVLSTADGIVQIYGLEDAMYGELLDFGEGTYGLALNLETDSVGAVVLGDSGHIKEGQKVKTTGRILEVPVGEGLKGRVIDALGRPLDGKGEIKSKHNAPIEVVAPGVIDRQSVDQPVQTGIKSIDVMVPIGRGQRELIIGDRQTGKTAIAVDTIVHQKNSGIT

SEQ ID NO: 173409 - protein, 268 aa, Unknown
  Bacterial polypetide isolated from the Sargasso Sea
SDVGTVVSVTDGITRIHGLNDVQYGEMIEFPGDTFGLALNLEQDSVGAVVLGDYTHVSEGAQVKTTNRILEVPVGEGLLGRVVDSLGTPLDGKGAVSSDQTAPIEKVAPGVISRQSVDQPVQTGLKSIDAMVPIGRGQRELIIGDRQTGKTAVAVDTIINQKGTGIKCIYVAVGQKNSSVANVVKKLEEEGALEHTIIVNAAASDSAAMQYIAPYSGCAMGEYFRDKGEDALIIFDDLTKQAWAYRQVSLLLKRPPGREAYPGDVFYL

SEQ ID NO: 173410 - protein, 110 aa, Unknown
  Bacterial polypetide isolated from the Sargasso Sea
MANNLTGKISQVLGAVVDVEFDGELPAIMNALEVDNNGNRLMLEVAQHLGENAVRTIAMDVTDGLVRGQTATDTGAPISMPVGPETLGRIMNVVGEPVDERGEIGTKKTY

SEQ ID NO: 173411 - protein, 216 aa, Unknown
  Bacterial polypetide isolated from the Sargasso Sea
STDTRLAGTEVSALLGRMPSAVGYQPNLAEEMGVLQERITSTKTGSITSIQAVYVPADDLTDPSPATTFAHLDATVVLARSIAELGIYPAVDPLDSNSRQLDPGIVGQEHYDTARSVQQVLQRYKELQDIIAILGMDELSEEDKLTVQRARKIQRFLSQPFFVAEVFTGSPGQYVSLRDSIKAFQGIVAGEYDDLPEQAFYMVGTIEEAVEKAKSM

SEQ ID NO: 173412 - protein, 200 aa, Unknown
  Bacterial polypetide isolated from the Sargasso Sea
MAEKGKISQVMGAVVDVVFEQGHLPDIYNALTVDRQDEAQLVLEVAQHLGDSAVRTVAMDSTDGLVRGTEVVDSGIPISVPVGPETLGRLFDVLGNTIDNKGDVKTDKVNPIHRPAPRHEDLATSTEILVTGIKVVDLMEPYTKGGKTGLFGGAGVGKTVLIQELIRNIATEHGGYSVFAGVGERTREGNDLYNEMTESG

SEQ ID NO: 173413 - protein, 104 aa, Unknown
  Bacterial polypetide isolated from the Sargasso Sea
KYYKLINLYRIFIAILGMDELSEEDKLTVARARKIQRFLSQPFFVAEVFTGSPGKLVDLESTIKGFDAICKGEYDHLPEAAFYMVGTIEEAVEKAEKMAKEAAA

SEQ ID NO: 173414 - protein, 236 aa, Unknown
  Bacterial polypetide isolated from the Sargasso Sea
MPSLDDLRKRISSVKSTQKITKAMKMVAAAKLRKAQEMAEKGRPYSDKMDSIIQNLSKAINDPSNAPRLLVGTGEDKSHLCVVMTADRGLCGGFNTNIVKLAKNYFNKILKDSKSLKIITVGTKGLDQLKRDYGKYIIKKINFKDKKKLSFQDAESIGNEIVTLFKNNEFDKCVIFFNKFKNVMTQIPQIQQVIPAKKDEKLKEEEHSSYEFEPEEDEILEDLLPKNISTQIYKGF

SEQ ID NO: 173415 - protein, 110 aa, Unknown
  Bacterial polypetide isolated from the Sargasso Sea
YAVARRVQEILQRYKEFQDIIAILGLDELSEEDRVTVDRARKVERFLSQPMFVAEIFTGQPGVFTGIEDTISSFEALVQGDLDHVPEQAFYMVGGAEEVERKAAELEASS

SEQ ID NO: 173416 - protein, 140 aa, Unknown
  Bacterial polypetide isolated from the Sargasso Sea
AEIGIYPAVDPLDSTSRILDPRIVGDEHYRVARDVQRILQSYKSLQDIIAILGMDELSEEDKLVVARARKIQRFLSQPFFVAEVFTGSPGKLVDLDSTIKGFDAICKGEYDHLPEAAFYMVGTIEEAIEKAKKMEQEAAA

SEQ ID NO: 173417 - protein, 321 aa, Unknown
  Bacterial polypetide isolated from the Sargasso Sea
PVGKELLGRVVDGLGNPIDGKGALDKGIKRSRVEVKAPGIIPRKSVNEPMQSGLKSVDSLVPIGRGQRELIIGDRQTGKTAVAIDTIINQKKINESNDEKQKLYCIYVAIGQKRSTVRQIEKSLEEAGAMEYTTIVAATASDAAPLQFLAPYTGCAMGEYFRDNGMHALIIYDDLSKQAVAYRQMSLLLRRPPGREAYPGDVFYLHSRLLERAAKLSDEHGGGSLTALPIIETQGGDVSAFIPTNVISITDGQIFLETNLFNQGIRPAINVGLSVSRVGSSAQTKAMKKVSGSMKLELAQYREMAAFAQFGSDLDASTQNC

SEQ ID NO: 173418 - protein, 285 aa, Unknown
  Bacterial polypetide isolated from the Sargasso Sea
MRKGKITQIIGAVVDVKFDGELPEILTALECKNGDNRLVLEVAQHLGETSVRTIAMDATEGLKRGDEVTDTGAPIKVPVGPETLGRIVNVIGEPIDEKGEIKTKENWPIHRAAPEFNDQSTETEILVTGIKVVDLLAPYAKGGKIGLFGGAGVGKTVLIMELINNVAKAHGGFSVFAGVGERTREGNDLYHEMIESGVIKPDGAGSKAALVYGQMNEPPGARARVALSGLTVAEYFRDQEGQDVLFFVDNIFRFTQAGSEVSALLGRIPSAVGYQPTLATDMGNL

SEQ ID NO: 173419 - protein, 295 aa, Unknown
  Bacterial polypetide isolated from the Sargasso Sea
MKKTLEEAGAMEYTTIVAATASDAAPLQFLAPYTGCAMGEYFRDNGMHALIIYDDLSKQAVAYRQMSLLLRRPPGREAYPGDVFYLHSRLLERAAKLSDEHGGGSLTALPIIETQGGDVSAFIPTNVISITDGQIFLETELFNQGIRPAINVGLSVSRVGSSAQTKAMKKVSGSMKLELAQYREMAAFAQFGSDLDASTQKLLNRGSKLTELLKQNQYSPMTVAEQVVSIFCGVKGHLDNIEQKNIADFEKKIIEKCKSEKPEIIESIISKDNIEEDTEKSLIDIINELKNNLKS

SEQ ID NO: 173420 - protein, 283 aa, Unknown
  Bacterial polypetide isolated from the Sargasso Sea
MFLGDYTHISEGAEVKTTNRILEVPVGEGLLGRVVDSLGTPLDGKGSIETGQTAPIEKVAPGVISRQSVDQPVQTGLKSIDAMVPIGRGQRELIIGDRQTGKTAVAVDTIINQKGTGIKCIYVAVGQKNSSVANVVKKLEEEGALEHTIIVNAAASDSAAMQYIAPYSGCAMGEYFRDKGEDALIIFDDLTKQAWAYRQVSLLLKRPPGREAYPGDVFYLHSRLLERAARVNAEYVEKETNGKVKGQTGSLTALPIIETQAGDVSAFVPTNVISITDGQIYLE

SEQ ID NO: 173421 - protein, 135 aa, Unknown
  Bacterial polypetide isolated from the Sargasso Sea
IAELGIYPAVDPLDSNSRQLDPGVVGQEHYDTARSVQQVLQRYKELQDIIAILGMDELSEEDKLTVQRARKIQRFLSQPFFVAEVFTGSPGQYVSLRDSIKAFQGIVAGDYDDLPEQAFYMVGTIEEAVEKAKSM

SEQ ID NO: 173422 - protein, 283 aa, Unknown
  Bacterial polypetide isolated from the Sargasso Sea
KKRIASVKSTQKITKAMKMVAAAKLRRAQESAEKGRPYSEKMNDVILNLSNGISDKENAPKLLSGTGQEKTHLCVVMTSDRGLCGGFNSNIIKKAKSYFAKILDEGKELKIITVGSKGNDQLKRVYGDKIIENISFKESKNANYFDADKVGKMVIEKFEAGEFDVCTIFYNQFKNVITQIPQAQQIIPLNNEGEESSSEESYEFEPDEDEILSNLLPKNISTQIFKAMLENSASEQGSRMSAMDNATRNAGEMVDKLTIEYNRSRQAAITKELIEIISGAESL

SEQ ID NO: 173423 - protein, 280 aa, Unknown
  Bacterial polypetide isolated from the Sargasso Sea
MAEKGKISQVMGAVVDVVFEQGHLPDIYNALTVDRGEEGQLVLEVAQHLGDSAVRTVAMDSTDGLVRGIDVVDSGIPISVPVGPETLGRLFDVLGNTIDNKGDVKTEKVNPIHRPAPRHEDLATSTEILVTGIKVVDLMEPYTKGGKTGLFGGAGVGKTVLIQELIRNIATEHGGYSVFAGVGERTREGNDLYNEMTESGVIEKTTMVFGQMNEPPGARLRVALSGLAMAEYFRDDEGRDVLLFIDNIFRFTQAGSEVSALLGRMPSAVGYQPTLSTEMG

SEQ ID NO: 173424 - protein, 280 aa, Unknown
  Bacterial polypetide isolated from the Sargasso Sea
MSPNSQDIASIIKRQIEEFGGDFSMVDIGTVVEAGDGVVTIHGLSSVKVNELLQFPNDIIGLALNLEEDSVGAVILGDYLSIKEGDEVRSTGRIVEVPVGDNLLGRVVDPLGRPMDGKGDVSTSESLPVEKIAAGVVERKSVDEPVQFGLKIVDAMVPVGRGQRELVIGDRTTGKTSLCVDALINQKDSDIIGIYVAVGQKASKVAAVVTRLEEQGALDNTVVVTANASDSAALQYLAPYAGVTMAEYFMSQGKDVLIVYDDLSKHAWAYRQMSLLLRRP

SEQ ID NO: 173425 - protein, 307 aa, Unknown
  Bacterial polypetide isolated from the Sargasso Sea
MNKKGKITQIIGAVVDVNFEGDLPEIYTALEVNNAGNKLVLEVAQHLGENDVRTIAMDATEGLKRGDEVVNTGSPISVPVGPETLGRIINVVGDSIDEKGEVKTKEKWPIHRPAPKFTDQATETEQLVTGIKVIDLLAPYSKGGKIGLFGGAGVGKTVTIMELINNIAKAHGGFSVFAGVGERTREGNDLYHEMIESGVIKTDGKGSKAALVYGQMNEPPGARARVALTGLTVAEYFRDKEGQDVLFFVDNIFRFTQAGSEVSALLGRIPSAVGYQPTLATDMGNLQERITSTDKGSITSVQAIYVS

SEQ ID NO: 173426 - protein, 215 aa, Unknown
  Bacterial polypetide isolated from the Sargasso Sea
KTHLCVVMTADRGLCGGFNTNIVKKAKNYFNRILKESKNLKIITVGTKGLDQLKRDYGKYVIKKINFKDKKKLSFDDAEVIGKEIVDLFKNEKFDKCVIFFNKFKNVMTQEPQTQQVIPAKQDKDDKKNEYSSYEFEPDEDEILEDLLPKNISTQIYKGFLENAASEQGSRMTAMDNATRNAGDLVEKLTINYNRSRQAAITKELIEIISGAESL

SEQ ID NO: 173427 - protein, 88 aa, Unknown
  Bacterial polypetide isolated from the Sargasso Sea
MNKSGKITQVIGAVVDVQFEGDLPEILTALEVDNSGNKLILEVAQHLGENSVRTIAMDSTEGLKRGDVVQNTGSPISVPVGPETLGRI

SEQ ID NO: 173428 - protein, 303 aa, Unknown
  Bacterial polypetide isolated from the Sargasso Sea
MEINPSEVTKILKEQIKNFGDKAEVTEVGQVLSVGDGIARIYGLDNVQAGEMVEFADGSKGMALNLESENVGVVIFGDDRNVKEGDVVKRTGNIVDTPVGKELLGRVVDGLGNPIDGKGPLDKGIKKSRVEVKAPGIIPRQSVSEPMQTGLKSIDSLVPIGRGQRELIIGDRQTGKTAVAVDAIINQKKINESGDEKQKLYCIYVAVGQKRSTVRQIQKTLEEAGAMEYTTIVAATASDSAPLQFLAPYTGCTMGEYFRDNGMHALIIYDDLSKQAVAYRQMSLLLRRPPGREAYPGDVFYLL

SEQ ID NO: 173429 - protein, 121 aa, Unknown
  Bacterial polypetide isolated from the Sargasso Sea
VVIFGDDRAVKEGDTVKRTGAIVDTPVGKELLGRVVDGLGNPIDGKGALDKGIKRSRVEVKAPGIIPRKSVNEPMQSGLKSVDSLVPIGRGQRELIIGDRQTGKTAVAIDTIINQKKINES

SEQ ID NO: 173430 - protein, 98 aa, Unknown
  Bacterial polypetide isolated from the Sargasso Sea
KILQRYNELKDIIAILGMDELSEEDKGLVARARKAQRFLSQPFFVAEIFTGTPGKYVSLEDTIKAFKGILNGDYDHLPEQAFYMVGTIEEAVEKAKTL

SEQ ID NO: 173431 - protein, 267 aa, Unknown
  Bacterial polypetide isolated from the Sargasso Sea
RVEVKAPGIIPRKSVSEPMQTGLKSIDSLVPIGRGQRELIIGDRQTGKTAVAIDAIINQKKINESGDEKKKLYCIYVAVGQKRSTVRQIEKTLEEAGAMEYTTIVAATASDAAPLQFLAPYTGCTMGEYFRDNGMHALIIYDDLSKQAVAYRQMSLLLRRPPGREAYPGDVFYLHSRLLERAAKLSDEHGGGSLTALPIIETQGGDVSAFIPTNVISITDGQIFLETELFNQGIRPAINVGLSVSRVGSSAQTKAMKKVSGSMKLEL

SEQ ID NO: 173432 - protein, 102 aa, Unknown
  Bacterial polypetide isolated from the Sargasso Sea
LQTYKSLQDIIAILGMDELSEEDKLTVARARKIQRFLSQPFFVAEVFTGSPGKLVDLESTIKGFDAICKGEYDHLPEAAFYMVGTIEEAVEKAEKIAKDAAA

SEQ ID NO: 173433 - protein, 207 aa, Unknown
  Bacterial polypetide isolated from the Sargasso Sea
MEIKAAEISSVIKDQIANFETKADVAEVGTVLSVGDGIARVYGLDQVQAGEMVEFPGGIKGMALNLEMDNVGVSIFGDDTGIKEGDTVKRTGEIVDVPVGKELLGRVVDGLGNPIDGKGPIQSSEKRRIELKAPGIIPRQSVSEPMQTGIKALDALVPVGRGQRELIIGDRQTGKTAVAIDTILNQKSVNQSDNEKEKLYCIYVAIG

SEQ ID NO: 173434 - protein, 194 aa, Unknown
  Bacterial polypetide isolated from the Sargasso Sea
MSDTGVIKQIIGAVIDVEFDKAQIPNIYDALVVSENNLVLETQQQLGDGVVRTVAMGTTEGLKRGLGVENTKAPISVPVGEATLGRIMNVLGDPIDMKGEVKTKERMPIHRKPPEYVDLSDSNEILETGIKVIDLVCPFAKGGKVGLFGGAGVGKTVNMMELIRNIAIEHSGYSVFAGVGERTREGNDFYHEMT

SEQ ID NO: 173435 - protein, 141 aa, Unknown
  Bacterial polypetide isolated from the Sargasso Sea
MDINPSEITKILKEQIKNLGDKTQVSEIGKVLSVGDGIARVYGLDNVQAGEMVEFADGSKGMALNLESDNVGIVIFGDDKAIKEGDTVKRTGAIVDVPVGKELLGRVVDALGNPIDGKEALKKGVTRKRVEVKAPGIIQEN

SEQ ID NO: 173436 - protein, 286 aa, Unknown
  Bacterial polypetide isolated from the Sargasso Sea
MASGKEIKGKIGSIKNTQKITSAMEMVAASKMKKAQERMASGRPYAQNMLKVIGHIANGNLEYRHPYLEEREVKRVGYIVISTDRGLCGGLNTNEFKLVTQDVKKWREQGVEVDFAALGSKACSFFNRFGGKLLAAESGLGDKPSVSDVVGVVRVMLKAYDEGQIDRVFLVFNDFVNTMTQKPVINQLLPLPKSEDEEYQHRWDYIYEPDPKEILEALMVRYIESQVYQGVVENAASEQAARMVAMKAATDNAGNLIDELQLVYNKARQAAITQEISEIVSGAAAV

SEQ ID NO: 173437 - protein, 184 aa, Unknown
  Bacterial polypetide isolated from the Sargasso Sea
RITTTNKGSITSVQAIYVPADDLTDPAPATSFAHLDATTVLSRQIAELGIYPAVDPLDSTSRILDPRIVGDEHYRVAREVQKILQTYKSLQDIIAILGMDELSEEDKLIVARARKIQRFLSQPFFVAEVFTGSSGKLVDLESTIKGFDAICKGEYDHLPEAAFYMVGTIEEAVEKAEKMAKDVA

SEQ ID NO: 173438 - protein, 366 aa, Unknown
  Bacterial polypetide isolated from the Sargasso Sea
VVDGLGNPIDGKGQIKVKNRKRVEVKAPGIIPRQSVNEPMQTGLKSIDSLIPIGRGQRELIIGDRQTGKTAVAIDTIINQKKINESSDEKKKLYCVYVAIGQKRSTVAQITKTLEEAGALKYTTIVAATASDSAPLQFLAPYTGCTIGEYFRDNGMHALIVYDDLSKQAVAYRQMSLLLRRPPGREAYPGDVFYLHSRLLERAAKLNEKSGGGSLTALPIIETQAGDVSAYIPTNVISITDGQIFLETELFNQGIRPAVNVGLSVSRVGSAAQTKAMKKVAGSIKLELAQYREMAAFAQFGSDLDTSTQKLLNRGAKLTELLKQDQYSPMTVAEQVISVFTGVKGYLDDVELSKIKKFEKDIVEKI

SEQ ID NO: 173439 - protein, 103 aa, Unknown
  Bacterial polypetide isolated from the Sargasso Sea
IDAIINQKKINESSDERKKLYCVYVAIGQKRSTVAQITKTLEEAGALKYTTIVAATASDSAPLQFLAPYTGCTIGEYFRDNGMHALIVYDDLSKQAVAYRQMS

SEQ ID NO: 173440 - protein, 116 aa, Unknown
  Bacterial polypetide isolated from the Sargasso Sea
MASLDDLKKRIASVKSTQKITKAMKMVAAAKLRRAQESAERGRPYSEKMNNIILNLSNGISDKENAPKLLSGTGENKVHLCVVMTSDRGLCGGFNSNIIKKAKSYFSKILNEGKQL

SEQ ID NO: 173441 - protein, 148 aa, Unknown
  Bacterial polypetide isolated from the Sargasso Sea
QQLTFGLSVSRVGSSAQTKAMKKVSGSMKLELAQYREMAAFAQFGSDLDASTQQLLNRGSKLTELLKQKQYSPLTVAEQVISVFCGVKGYLDDIDLKDVSEFENKIINKCKSDKPEIIEAIQSTGKLDEDKEKLLVEVITQLKGTLKS

SEQ ID NO: 173442 - protein, 291 aa, Unknown
  Bacterial polypetide isolated from the Sargasso Sea
VVVAAAADPAPMQYIAPFAACSMGEYFRDRGEDALIIYDDLSKQAVAYRQMSLLLRRPPGREAYPGDVFYLHSRLLERAARVNEEYVESHTNGEVKGKTGSLTALPIIETQAGDVSAFVPTNVISITDGQIFLESSLFSSGLKPAMDPGISVSRVGGAAQVPIIKKLGGGIKTALAQYRELEAFAQFASDLDEASKEQLEHGVRVTELTKQDQFSPMSVAEMGLMLYTANEGYLRQVEVEKIKDFEKSLIAYMNSEHKDLMDKVSETGEYGDDIQNAFKEALDKFMETQTW

SEQ ID NO: 173443 - protein, 257 aa, Unknown
  Bacterial polypetide isolated from the Sargasso Sea
QMTEPPGARLRVGLTGLTLAEYFRDVEGQDVLFFVDNIFRFTQAGSEVSALLGRMPSAVGYQPNLASEMGELQERITSTKKGSITSVQAIYVPADDLTDPAPATAFAHLDATTVLSRQIAELGIYPSVDPLDSTSRILDPRILGEEHYGVARNVQQILQKYKELQDIIAILGMDELSEDDKLIVSRARKIQRFLSQPFFVAQQFTGTPGVYVPLEKTIKGFKELAEGNVDHLPEQAFYMVGDLESAKEKAESLGAKV

SEQ ID NO: 173444 - protein, 219 aa, Unknown
  Bacterial polypetide isolated from the Sargasso Sea
MGQDKIHLCVVLTSDRGLCGGFNSNIIKKAKTYFGKIVGEGKTLKIITVGSKGYDQLKRLYSDKIVEKISFKDSKNVNYFDAEKVGKIIIESFLKKEFDVCTIFYNKFKNVITQIPQEQQIIPLKSSESEDSSSDDNYEFEPEEDEILSNLLPKNISTQIFKAMLENSASEQGSRMSAMDNATRNAGEMVEKLTIQYNRSRQAAITKELIEIISGAESL

SEQ ID NO: 173445 - protein, 126 aa, Unknown
  Bacterial polypetide isolated from the Sargasso Sea
MKKGKITQIIGAVVDVKFDGELPEILTALECKNGENRLVLEVAQHLGETSVRTIAMDATEGLKRGDEVTDTGAPIKVPVGPETLGRIVNVIGEPIDEKGEVKTKESWPIHRAAPEFNDQSTETENF

SEQ ID NO: 173446 - protein, 165 aa, Unknown
  Bacterial polypetide isolated from the Sargasso Sea
MEINPSEVTKILKEQIKKIGDKAEVSEVGQVLSVGDGIARIYGLDNVQAGEMVEFADGSKGMALNLESDNVGVVIFGDDRSVKEGDTVKRTGAIVDSPVGKELLGRVVDGLGNPIDGKGALDKSIKRNRVEVKAPGIIPRKSVNEPMQTGLKSVDSLVPIGRGQR

SEQ ID NO: 173447 - protein, 188 aa, Unknown
  Bacterial polypetide isolated from the Sargasso Sea
MEIKAAEISSVIKEQIANFETKADVAEVGTVLSVGDGIARVYGLDQVQAGEMVEFPGGIKGMALNLEMDNVGVSIFGDDTGIKEGDTVKRTGEIVDVPVGKELLGRVVDGLGNPIDGKGPIQSSDRRRIELKAPGIIPRQSVSEPMQTGIKALDALVPIGRGQRELIIGDRQTGKTAVAIDTILNQKT

SEQ ID NO: 173448 - protein, 212 aa, Unknown
  Bacterial polypetide isolated from the Sargasso Sea
SEVSALLGRMPSAVGYQPTLGTDVGELQERITSTLEGSITSIQAVYVPADDLTDPAPATTFAHLDATTVLARALAAKGIYPAVDPLDSTSTMLQPSVVGDEHYKTARAVQSTLQRYKELQDIIAILGLDELSEEDRLTVDRARKIEKFLSQPFFVAEIFTGMSGKYVKLEDTIAGFNMILSGELDDLPEQAFYLVGNIDEVKAKAEKIKAEK

SEQ ID NO: 173449 - protein, 63 aa, Unknown
  Bacterial polypetide isolated from the Sargasso Sea
MTISLKVLAPNKNVYQGEAEEVILPSTTGQLGILPGHISLVTAIDIGVLRLRMNSQWKSIALM

SEQ ID NO: 173450 - protein, 128 aa, Unknown
  Bacterial polypetide isolated from the Sargasso Sea
MKKLGGNIRLALAQYRELAAFAQFASDLDEATRKQLEHGQRVTELMKQNQYSPMTVAEMGTVLFAANEGFLDDVDVNKVVKFEAQLLDWMRSEQKELLDKIGPEGNFNDDITAGLKAALEKFKTTQSW

SEQ ID NO: 173451 - protein, 325 aa, Unknown
  Bacterial polypetide isolated from the Sargasso Sea
TNQCNLGLKAIDSLVPIGRGQRELIIGDRQTGKTAVAVDTIINQKKINESGDEKQKLYCIYVAIGQKRSTVRQIQKTLEEAGAMDYTTIVAATASDAAPLQFLAPYTGCAMGEFFRDNGMHALIIYDDLSKQAVAYRQMSLLLRRPPGREAYPGDVFYLHSRLLERAAKLSNEHGGGSLTALPIIETQAGDVSAYIPTNVISITDGQIFLETNLFNQGIRPAINVGLSVSRVGSAAQTKAMKKVSGSMKLELAQYREMAAFAQFGSDLDASTQKLLNRGSKLTELLKQKQYSPMTVAEQVISVFCGVRGYLDDVELKDIADLKKK

SEQ ID NO: 173452 - protein, 300 aa, Unknown
  Bacterial polypetide isolated from the Sargasso Sea
IGEPIDEKGEVKTKENWPIHRPAPEFNDQSTETEILVTGIKVVDLLAPYAKGGKIGLFGGAGVGKTVLIMELINNVAKAHGGFSVFAGVGERTREGNDLYHEMIESGVIKPEGQGSKAALVYGQMNEPPGARARVALSGLTVAEYFRDQEGQDVLFFVDNIFRFTQAGSEVSALLGRIPSAVGYQPTLATDMGNLQERITTTNKGSITSVQAIYVPADDLTDPAPATSFSHLDATTVLSRQIAEIGIYPAVDPLDSTSRILDPRIVGDEHYRVAREVQKILQTYKSLQDIIAILGMDELS

SEQ ID NO: 173453 - protein, 328 aa, Unknown
  Bacterial polypetide isolated from the Sargasso Sea
MGAVVDVVFEQGHLPDIYNALTVDRGEEGQLVLEVAQHLGDSAVRTVAMDSTDGLVRGIDVVDSGIPISVPVGPETLGRLFDVLGNTIDNKGDVKTEKVNPIHRPAPRHEDLATSTEILVTGIKVVDLMEPYTKGGKTGLFGGAGVGKTVLIQELIRNIATEHGGYSVFAGVGERTREGNDLYNEMTESGVIEKTTMVFGQMNEPPGARLRVALSGLAMAEYFRDDEGRDVLLFIDNIFRFTQAGSEVSALLGRMPSAVGYQPTLSTEMGDLQERITSTKNGSITSVQAVYVPADDLTDPAPCTAFAHLDATSVLERKIAELGIYPAV

SEQ ID NO: 173454 - protein, 278 aa, Unknown
  Bacterial polypetide isolated from the Sargasso Sea
DESKKLYCIYVAVGQKRSTVAQIVKTLEDAGAMEYTTIVSATASDSAPLQFLAPYTGCTMGEYFRDNGMHALIIYDDLSKQAVAYRQMSLLLRRPPGREAYPGDVFYLHSRLLERAAKLNDESGGGSLTALPIIETQAGDVSAYIPTNVISITDGQIFLGTEIFNQGIRPAINVGLSVSRVGSAAQTKAMKKVAGSIKLELAQYREMAAFAQFGSDLDASTQQLLNRGSKLTELLKQKQYSPMTVEEQVISIFCGVRGFLDDIELKNISEFEQKVIEK

SEQ ID NO: 173455 - protein, 230 aa, Unknown
  Bacterial polypetide isolated from the Sargasso Sea
MTINPTEISDIIKDKIKNLDIKTQSHNEGTVVSLTDGIARIYGITDALQGEMLEFPNNIYGLALNLERDSVGAVILGDYKSISEGDTVKCTGNILEVPVGDELLGRVVNSLGDPIDNGGPITTKLKSPIEKIAPGVIERKSVDQPVQTGLKSIDSMVPIGRGQRELIIGDRQTGKTAVAIDAIINQKDTGVKCIYVAIGQKASSIAAVVRKLEEHDALKHTIIVAASASD

SEQ ID NO: 173456 - protein, 136 aa, Unknown
  Bacterial polypetide isolated from the Sargasso Sea
MEIKTDQLTQLLREQIEKYDGSVDISEVGEVLEVGDGVARVSGLENVMSSELVELPNGVFGMALNLEEDNVGIVLFGESRLVKEGDLAKRTGRVVEVPVGDAMLGRVVNPLGQPIDGKGPINTDHSLPIERKALGV

SEQ ID NO: 173457 - protein, 332 aa, Unknown
  Bacterial polypetide isolated from the Sargasso Sea
QSTETEILVTGIKVIDLLSPYAKGGKIGLFGGAGVGKTVTIMELINNIAKAHGGFSVFAGVGERTREGNDLYHEMIESGVIKTEGNGSKAALVYGQMNEPPGARARVALTGLTVAEYFRDKEGQDVLFFVDNIFRFTQAGSEVSALLGRIPSAVGYQPTLATDMGNLQERITSTGKGSITSVQAIYVPADDLTDPAPATSFSHLDATTVLSRQIAELGIYPAVDPLDSTSRILDPRVVGEEHYRVAREVQRVLQAYKSLQDIIAILGMDELSEEDKLTVARARKIQRFLSQPFFVAEVFTGSPGKLVDLDSTIKGFDAICKGEYDHLPEAAF

SEQ ID NO: 173458 - protein, 129 aa, Unknown
  Bacterial polypetide isolated from the Sargasso Sea
MVATPSTSSQTKGVVRQVIGPVLDVEFPAGKLPKILNALRIEAKNPAGQDIALTAEVQQLLGDHRVRAVAMSGTDGLVRGMEAIDTGAPISVPVGEATLGRIFNVLGEPVDEQGPVNTKDTAPIHRAAP

SEQ ID NO: 173459 - protein, 200 aa, Unknown
  Bacterial polypetide isolated from the Sargasso Sea
KLSDEHGGGSLTALPIIETQGGDVSAYIPTNVISITDGQIFLETELFNQGIRPAINVGLSVSRVGSAAQTKAMKKVSGSMKLELAQYREMAAFAQFGSDLDASTQQLLNRGSKLTELLKQKQYSPMTVAEQVISVFCGVKGYLDDIDLKDVSDFENKIIERFKSDKPEIMNSILSSGKLEENSEKSLIEMITQLKKTFKS

SEQ ID NO: 173460 - protein, 102 aa, Unknown
  Bacterial polypetide isolated from the Sargasso Sea
MASLDDLKKRITSVKSTQKITKAMKMVAAAKLKRAQESAEKGRPYSEKMNNIILNLSSGISDKESAPKLLSGSGKEKVHLCVVMTSDRGLCGGFNANIIKKA

SEQ ID NO: 173461 - protein, 137 aa, Unknown
  Bacterial polypetide isolated from the Sargasso Sea
RQISELGIYPAVDPLDSTSRQLDPFVVGDDHYEVAQGVQKILQRYNELKDIIAILGMDELSEEDKGLVARARKAQRFLSQPFFVAEIFTGTPGKYVSLEDTIKAFKGILNGDYDHLPEQAFYMVGTIEEAVEKAKTL

SEQ ID NO: 173462 - protein, 217 aa, Unknown
  Bacterial polypetide isolated from the Sargasso Sea
RDVKRVGYLVVSTDRGLCGGWNINLFKKLLADMKTWSDKGVQCDIAMIGSKGVSFFNSVGGNVIAQVTGMGDNPSLSELIGPVKVMLQAYDEGRLDRLYVVSNKFINTMSQTPTITQLLPLPASDDDELKRKSWDYLYEPDPKALLDTLLRRYVESQVYQGVVENLASEQAARMVAMKAATDNGGSLIKELQLVYNKARQASITQELTEIVGGASAV

SEQ ID NO: 173463 - protein, 95 aa, Unknown
  Bacterial polypetide isolated from the Sargasso Sea
MATGKIVQVIGAVVDVEFPQDAVPRVYDALEVMNGKESLVLEVQQQLGGGIVRTIAMGSSDGLRRGLEVKDLEHPIEVPVGKATLGRIMNVLGHP

SEQ ID NO: 173464 - protein, 316 aa, Unknown
  Bacterial polypetide isolated from the Sargasso Sea
VDTPVGKELLGRVVDGLGNPIDGKGNLDKSVKRSRVEVKAPGIIPRKSVSEPMQTGLKSIDSLVPIGRGQRELIIGDRQTGKTAVAIDAIINQKKINESGDEKQKLYCVYVAIGQKRSTVRQIEKTLEEAGAMEYTTIVAATASDAAPLQFLAPYTGCAMGEYFRDNGMHALIIYDDLSKQAVAYRQMSLLLRRPPGREAYPGDVFYLHSRLLERAAKLSDEHGGGSLTALPIIETQGGDVSAFIPTNVISITDGQIFLETELFNQGIRPAINVGLSVSRVGSSAQTKAMKKVSGSMKLELAQYREMAAFAQFDQT

SEQ ID NO: 173465 - protein, 288 aa, Unknown
  Bacterial polypetide isolated from the Sargasso Sea
VKSLEDAGAMEYTTIVSATASDPAPLQFLAPYTGCTMGEYFRDNGMHALIIYDDLSKQAVAYRQMSLLLRRPPGREAYPGDVFYLHSRLLERAAKLNDDKGGGSLTALPIIETQAGDVSAYIPTNVISITDGQIFLETELFNQGIRPAVNVGLSVSRVGSAAQTKAMKKVAGSIKLELAQYREMAAFAQFGSDLDASTQKLLNRGSKLTELLKQDQYSPMPVAQQVIAVFSGVRGFLDDVELANIKNIEKQIYDEVKSSNPEIIDSINSTGKLEDEIEKKLVSVIEKL

SEQ ID NO: 173466 - protein, 282 aa, Unknown
  Bacterial polypetide isolated from the Sargasso Sea
ILKEQIKNFGDKAEVTEVGQVLSVGDGIARIYGLDNVQAGEMVEFADGSKGMALNLENENVGVVIFGDDRNIKEGDTVKRTGSIVDTPVGKELLGRVVDGLGNPIDGKGPLDKNVKKSRVEVKAPGIIPRQSVSEPMQTGLKSIDSLVPVGRGQRELIIGDRQTGKTAVAIDAIINQKKINESGDEKQKLYCIYVAIGQKRSTVRQIQKTLEEAGAMEYTTIIAATASDSAPLQFLAPYTGCTMGEYFRDNGMHGLIIYDDLSKQAVAYRQMSLLLRRPPGR

SEQ ID NO: 173467 - protein, 70 aa, Unknown
  Bacterial polypetide isolated from the Sargasso Sea
KIKRFLSQPFNVAEVFTGSPGVLVPLEDTIKGFKGIADGEYDDLPETAFYMVGTIEEAIEKAKKLAKDAA

SEQ ID NO: 173468 - protein, 139 aa, Unknown
  Bacterial polypetide isolated from the Sargasso Sea
MTKNGKIIQVIGAVVDVQFDGALPEILTALEVDNSGNKLVLEVAQHLGENSVRTIAMDSTEGLKRGDAVQNTGAPISVPVGPETLGRIINVIGQPIDQKGDVKTKEKWPIHREAPKFTDQSTETEILETGIKVIDLLAP

SEQ ID NO: 173469 - protein, 181 aa, Unknown
  Bacterial polypetide isolated from the Sargasso Sea
MSQLNPSEISSVLKEKIAGLDLSAERKNEGIIVSVSDGIVRIHGMGDVMYGEVIEFENGTKGLALNLEQDSVGAVVLGDYLELVEGQKAVCTGKVLEVPVGEALLGRVVNTLGVPIDGKGEIKSEGTAPVEVVAPGVIARQSVDQPVQIGLKAVDAMVPIGRGQRELIIGDRQTGKTAVQS

SEQ ID NO: 173470 - protein, 74 aa, Unknown
  Bacterial polypetide isolated from the Sargasso Sea
ARARKIQRFLSQPFFVAEVFTGSPGKLVDLESTIKGFDAICKGEYDHLPEAAFYMVGTIEEAIEKAEKMKKDAA

SEQ ID NO: 173471 - protein, 138 aa, Unknown
  Bacterial polypetide isolated from the Sargasso Sea
MDIQPSEISKILKEEIKNFGSDSEISEVGQVLSIGDGIARIYGLDNVQAGEMVLFDDGTKGMALNLEDDNVGVVLFGSDANIKEGDTVKRTNAIVDVPVGKELLGRVVDALGNPIDGKGNIDSENRSRIEVKAPRDYS

SEQ ID NO: 173472 - protein, 252 aa, Unknown
  Bacterial polypetide isolated from the Sargasso Sea
MSKNGKIIQVIGAVVDVQFDGALPEILTALEVDNSGNKLVLEVAQHLGENSVRTIAMDSTEGLKRGDNVQNTGAPISVPVGPETLGRIINVIGQPIDQKGEVKTKEKWPIHREAPKFTDQSTETEILETGIKVIDLLAPYSKGGKIGLFGGAGVGKTVIIMELINNIAKAHGGFSVFAGVGERTREGNDLYHEMIESGVIKPEGKGSKAALVYGQMNEPPGARARVGLTGLTVAEYFRDKEGQDVLFFVDNI

SEQ ID NO: 173473 - protein, 231 aa, Unknown
  Bacterial polypetide isolated from the Sargasso Sea
MSTKINPSEISSIIKKKIEDYKGASSESNVGEVLSTADGIVQIFGLEDAMYGELLDFGEGTYGLALNLENDSVGAVVLGDAGHIKEGQKVKTTGRILEVPVGEGLKGRVIDALGRPIDGKGEVKSETNAPIEVVAPGVIDRQGVDQPVQTGIKSIDVMVPIGRGQRELIIGDRQTGKTAIAVDAIIKQKDSDITCVYVAIGQKQSTVATVVRQLEEADALKNTIVVSASAA

SEQ ID NO: 173474 - protein, 299 aa, Unknown
  Bacterial polypetide isolated from the Sargasso Sea
MNEVQFESKKSLPIHRAAPDFVDQSTETEVLVTGIKVIDLLAPYSKGGKIGLFGGAGVGKTVLIMELINNVAKAHGGYSVFAGVGERTREGNDLYHEMIESGVINLDGDTSKVSLVYGQMNEPPGARSRVALSGLTQAEYFRDEENQDVLFFVDNIFRFTQAGSEVSALLGRIPSAVGYQPTLATDMGALQERITTTNKGSITSVQAIYVPADDLTDPAPATSFSHLDATTVLNRSIAELGIYPAVDPLDSTSRILEPRTLGDKHYQVARDVQKTLQTYKSLQDIIAILGMDELSEEDN

SEQ ID NO: 173475 - protein, 103 aa, Unknown
  Bacterial polypetide isolated from the Sargasso Sea
VLQTYKSLQDIIAILGMDELSEDDKLTVARARKIQRFLSQPFFVAEVFTGSPGKLVDLESTIKGFDAICKGEYDHLPEAAFYMVGTIEEAVEKAEKMAKEAAA

SEQ ID NO: 173476 - protein, 264 aa, Unknown
  Bacterial polypetide isolated from the Sargasso Sea
MPSLDDLKKRIKSVKSTQKITKAMKMVAAAKLRKAQESAEKGRPFSQKMQNIILNLTKSISDRENAPKLLVGTGKDITYLLVILTADRGLCGGFNSNICKLAKINFKKLISEGKKIKIITVGSKGEDQIKREFGKYIIKKFSFKEKKQITFKEAELIGNEIINLFKKNEFDKCILFYNNFKNVITQIPQALQIIPADTKSSEPKEEKISSYEFEPDEDEILEDLLPKNISTQVFRAFLENAASEQGSRMTAMDNATRNAGDLVD

SEQ ID NO: 173477 - protein, 110 aa, Unknown
  Bacterial polypetide isolated from the Sargasso Sea
MAAFAQFASDLDPATQRLLARGERLTELLKQGQYAPLPVEEQVVSIFAGVRGYLDQVDVGDVTRFEQGLLSDIKANGSDILTKIRDEQELSEATDKELVSFVESYAKKFV

SEQ ID NO: 173478 - protein, 145 aa, Unknown
  Bacterial polypetide isolated from the Sargasso Sea
NVGLSVSRVGSAAQTKAMKKVSGSMKLELAQYREMAAFAQFGSDLDASTQQLLNRGSKLTELLKQKQYSPMTVAEQVISVFCGVKGYLDDIDLKDIADFENKIIEKCKSDKPEIIDSILSSGKLEEDPEKNLIEVITNLKKAFKS

SEQ ID NO: 173479 - protein, 125 aa, Unknown
  Bacterial polypetide isolated from the Sargasso Sea
MASLDDLKKRINSVKSTQKITKAMKMVAAAKLKRAQENAERGRPYSQKMNNVILNLSNNISDKDNAPKLLSGTGKEDIHLCVVITSDRGLCGGFNANIIKKAKNYFLNLTNEGKTLKIITVGSKR

SEQ ID NO: 173480 - protein, 146 aa, Unknown
  Bacterial polypetide isolated from the Sargasso Sea
MANNLTGKISQVLGAVVDIEFEGELPSIMNALEVDNNGTLLVLEVAQHLGENAVRTIAMDTTDGLVRGQTATDTGAPISMPVGPETLGRIMNVVGEPVDERGDIGTSKTYPIHRPAPEFVDQSTETEVLVTGIKVVDLLAPYARGG

SEQ ID NO: 173481 - protein, 278 aa, Unknown
  Bacterial polypetide isolated from the Sargasso Sea
VTGIKVVDLLAPYARGGKIGLFGGAGVGKTVLIMELINNIAKAHGGYSVFAGVGERTREGNDLYHEMIESGIIDLKGDKSKVALVYGQMNEPPGARARVALSGLTQAEYFRDEEGQDVLFFVDNIFRFTQAGSEVSALLGRIPSAVGYQPTLATDMGALQERITTTNKGSITSVQAIYVPADDLTDPAPATSFSHLDATTVLNRAISEKGIYPAVDPLDSTSRILDPQVVGDDHYRVAREVQRVLQTYKSLQDIIAILGMDELSEEDKLTVARARKMK

SEQ ID NO: 173482 - protein, 186 aa, Unknown
  Bacterial polypetide isolated from the Sargasso Sea
MEINPSEVTKILKEQIKKFGDKAEVTEVGQVLSVGDGIARIYGLDNVQAGEMVEFSDGSKGMALNLESDNVGVVIFGDDRAVKEGDTVKRTGAIVDTPVGKELLGRVVDGLGNPIDGKGALDKSIKKSRVEVKAPGIIPRKSVNEPMQSGLKSVDSLVPIGRGQRELIIGDRQTGKTAVAIDTIIN

SEQ ID NO: 173483 - protein, 196 aa, Unknown
  Bacterial polypetide isolated from the Sargasso Sea
MTINPSEITKLLKDQIKNFGEKAEISEIGKVLSVGDGIARVYGLDNVQAGEMVEFEDGSKGMALNLENDNVGVVIFGDDRNIKEGDTIKRTNAIVDVPVGKELLGRVVDGLGNPIDGKGSLSVKSRKRVEVKAPGIIPRQSVNEPMQTGLKSIDSLIPIGRGQRELIIGDRQTGKTAVAIDAIINQKKINESSEKR

SEQ ID NO: 173484 - protein, 92 aa, Unknown
  Bacterial polypetide isolated from the Sargasso Sea
IAILGMDELSEEDKLTVARARKIQRFMSQPFFVAEVFTGTPGKYVELEDTIKGFDAICKGEYDHLPEAAFYMVGTIEEAIQKAEKMAEEAAA

SEQ ID NO: 173485 - protein, 160 aa, Unknown
  Bacterial polypetide isolated from the Sargasso Sea
ESSVRTIAMDSTEGLKRGDKVKNTKAPISVPVGPETLGRIINVIGQPIDEKGEVSTKEKWPIHRDAPKFTDQSTETEILVTGIKVIDLLAPYAKGGKIGLFGGAGVGKTVTIMELINNIAKAHGGFSVFAGVGERTREGNDLYHEMIESGVIKKDGKGSK

SEQ ID NO: 173486 - protein, 156 aa, Unknown
  Bacterial polypetide isolated from the Sargasso Sea
TSFAHLDATTVLSRQIAEIGIYPAVDPLDSTSRILDPRIVGDEHYRVAREVQKVLQTYKSLQDIIAILGMDELSEEDKLIVARARKIQRFLSQPFFVAEVFTGSPGKLVDLESTIKGFDAICKGEYDHLPEAAFYMVGTIEEAIEKAEKMAKDAAA

SEQ ID NO: 173487 - protein, 300 aa, Unknown
  Bacterial polypetide isolated from the Sargasso Sea
RILNVVGSPVDERGPINTKQSLPIHRDAPEFVEQSTETEILVTGIKVVDLLAPYSRGGKVGLFGGAGVGKTVIIMELINNIAKAHGGYSVFAGVGERTREGNDLYHEMIESGVIDLEGASKAALVYGQMNEPPGARARVALTGLTLAEYFRDSEGQDVLLFVDNIFRFTQAGSEVSALLGRIPSAVGYQPTLATDMGAMQERITTTNKGSITSVQAIYVPADDLTDPAPATSFAHLDATTVLSRQIAELGIYPAVDPLDSTSRILDPRILGDEHYEVARSVQEVLQRYKSLQDIIAILGM

SEQ ID NO: 173488 - protein, 299 aa, Unknown
  Bacterial polypetide isolated from the Sargasso Sea
MSINPSEITKILKEQIKNFGDKAEVTEVGKVLTVGDGIARIYGLDNVQAGEMVEFDDGSKGMALNLESDNVGVVIFGDDRKIKEGDTVKRTGSIVDVPVGKDLLGRVVDGLGNPIDGKGNLNDKAQRKRVEVKAPGIIPRQSVSEPMQTGLKAIDSLIPIGRGQRELIIGDRQTGKTAVAIDTIINQKEINESNEEKKKLYCVYVAIGQKRSTVAQIVKTLEDAGAMKYTTIVSATASDSAPLQFLAPYTGCTIGEYFRDNGMHALIIYDDLSKQAVAYRQMSLLLRRPPGREAYPGDV

SEQ ID NO: 173489 - protein, 138 aa, Unknown
  Bacterial polypetide isolated from the Sargasso Sea
LGIYPAVDPLDSTSRILDPRIVGEEHYRVARSVQKILQTYKSLQDIIAILGMDELSEEDKLTVARARKIQRFLSQPFFVAEVFTGSPGKLVDLESTIKGFDAICKGEYDHLPEAAFYMVGTIEEAVQKAEKMAKEAAA

SEQ ID NO: 173490 - protein, 302 aa, Unknown
  Bacterial polypetide isolated from the Sargasso Sea
LEVAQHLGESTTRTIAMDATEGLKRGDEVVNTKAPIKVPVGPETLGRIINVVGEPIDEKGEVKTKESWPIHRPAPEFNDQSTETEILVTGIKVIDLLAPYAKGGKIGLFGGAGVGKTVLIMELINNVAKAHGGFSVFAGVGERTREGNDLYHEMMESGVIKSDGPGSKAALVYGQMNEPPGARARVALTGLTVAEYFRDQEGQDVLFFVDNIFRFTQAGSEVSALLGRIPSAVGYQPTLATDMGNLQERITTTNKGSITSVQAIYVPADDLTDPAPATSFAHLDATTVLSRQIAEIGIYPAV

SEQ ID NO: 173491 - protein, 209 aa, Unknown
  Bacterial polypetide isolated from the Sargasso Sea
MSKNGKIIQVIGAVVDVQFEGELPEILTALEVDNSGNKLILEVAQHLGENGVRTIAMDSTEGLKRGDPVQNTGAPISVPVGPETLGRIINVIGQPIDQKGEVKTKERWPIHREAPKFTDQSTETEILETGIKVIDLLAPYSKGGKIGLFGGAGVGKTVIIMELINNIAKAHGGFSVFAGVGERTREGNDLYHEMIESGVIKPDGKGSKA

SEQ ID NO: 173492 - protein, 134 aa, Unknown
  Bacterial polypetide isolated from the Sargasso Sea
MAISLKVLAPNKNVYQGEAEEVILPSTTGQLGILPGHISLVTAIDIGVLRLRMNSQWKSIALMGGFAEIESDEVIVLVNNAEIGSEVNVQNAEQDLKEAKSIISKFSDTEKTPEKIKALKEVSKAEARIQAAKN

SEQ ID NO: 173493 - protein, 52 aa, Unknown
  Bacterial polypetide isolated from the Sargasso Sea
GVGERTREGNDAYHEMIESGVIKPDGKGSKAALGKGQMNEPPGARARVGPTG

SEQ ID NO: 173494 - protein, 215 aa, Unknown
  Bacterial polypetide isolated from the Sargasso Sea
IVLTADRGLCGGFNTNIIKKAKSYFEKIISENKTLKIITVGSKGYDQLKRQYKSYIVENISFKESKNINYFDADKVGKIIIEKFEKNEFDVCAIFYNKFKNVITQIPQEQQIVPLNEDKDDKDDKDDSGNDNDYEFEPDEDEILSNLLPKNISTQIFKAMLENSASEQGSRMTAMDNATRNAGELVDRLTIEYNRSRQAAITKELIEIISGAESL

SEQ ID NO: 173495 - protein, 316 aa, Unknown
  Bacterial polypetide isolated from the Sargasso Sea
MSNEKVIQIIGAVIDVEFEKDNIPNVYEALTIDGLEIILEVQQQLGDGIVRTIAMGTTEGLKRGLQAERTNAPISVPVGTETLGRIMDVLGNPIDEKGLIGEQERMPIHRKPPSYVDQSGSNELLETGIKVIDLICPFAKGGKIGLFGGAGVGKTVNMMELINNIATEHSGLSVFAGVGERTREGNDFYYEMQESGVVNVEKPSESKVAMVYGQMNEPPGNRLRVALTGLTIAEKFRDEGRDVLLFIDNIYRYTLAGVEVSALLGRMPSAVGYQPTLAEEMGALQERITSTKTGSITSIQTVYVPADDLTDPSPAT

SEQ ID NO: 173496 - protein, 223 aa, Unknown
  Bacterial polypetide isolated from the Sargasso Sea
MLSGTGEDKVHLCVVMTSDRGLCGGFNTNIIKKAKIFFQKILDEGKTLKIITVGSKGYDQLKRVYGDNIIERISFKDSKNVNYFDADKVGKLVIEKFEKKEFDVCTIFYNQFKNVITQIPQEQQIIPLNTSEKAENSSEDNYEFEPEEDEILSNLLPKNISTQIFKAMLENSASEQGSRMSAMDNATRNAGEMVDKLTIEYNRSRQAAITKELIEIISGAESL

SEQ ID NO: 173497 - protein, 203 aa, Unknown
  Bacterial polypetide isolated from the Sargasso Sea
RAAKLGDEHGGGSLTALPIIETQGGDVSAFIPTNVISITDGQIFLETELFNQGIRPAINVGLSVSRVGSSAQTKAMKKVSGSMKLELAQYREMAAFAQFGSDLDASTQKLLNRGSKLTELLKQNQYSPMTVAEQVISVFCGVRGHLDDIEQKDIASFESKIIEKCKAEKPDIIESITSSGKLEDDKEKELNEIITQLKKDFNS

SEQ ID NO: 173498 - protein, 256 aa, Unknown
  Bacterial polypetide isolated from the Sargasso Sea
MRKGKITQVIGAVVDVKFDGELPEILTALECNNAGNRLVLEVAQHLGESSVRTIAMDATEGLKRGDQVTDTGSPIKVPVGPETLGRIVNVIGEPIDEKGEVKTKESWPIHRAAPEFNDQSTETEILVTGIKVVDLLAPYAKGGKIGLFGGAGVGKTVIIMELINNIAKAHGGFSVFAGVGERTREGNDLYHEMIESGVIKPEGPGSKAALVYGQMNEPPGARSRVALTGLTVAEYFRDQEGQDVLFFVDNIFRFTQ

SEQ ID NO: 173499 - protein, 287 aa, Unknown
  Bacterial polypetide isolated from the Sargasso Sea
RGQRELIIGDRQTGKTAVQIDAIINQKGTGIKCIYVAIGQKQSTVANVVRKLEEHGAMEHTIVVSATAADPAPMQYLSAYAGCTMGEYFRDKGEDALIVYDDLSKQAVAYRQVSLLLKRPPGREAYPGDVFYLHSRLLERAARVNADYVEQVTGGKVKGKTGSLTALPIIETLAGDVSAFVPTNVISITDGQIYLETELFNSGVRPAINPGLSVSRVGGSAQTKIMKKLAGGVRTALAQYRELAAFSQFASDLDDATKQQLANGKAFTELLKQKQYAPMSVAQQALS

SEQ ID NO: 173500 - protein, 220 aa, Unknown
  Bacterial polypetide isolated from the Sargasso Sea
MEINPSEVTKILKEQIKQFGDKAEVSEVGQVLSVGDGIARIYGLDNVQAGEMVEFSDGSKGMALNLESENVGVVIFGDDRAVKEGDTVKRTGAIVDTPVGKELLGRVVDGLGNPIDGKGALDKGIKKSRVEVKAPGIIPRKSVSEPMQTGLKSIDSLVPIGRGQRELIIGDRQTGKTAVAIDAIINQKKINESGDEKQKLYCIYVAIGQKRSTVRQMKRL

SEQ ID NO: 173501 - protein, 290 aa, Unknown
  Bacterial polypetide isolated from the Sargasso Sea
DNVGVVIFGDDRAVKEGDTVKRTGSIVDTPVGKELLGRVVDGLGNPIDGKGALDKKIKRSRVEVKAPGIIPRKSVSEPMQSGLKSVDSLVPIGRGQRELIIGDRQTGKTAVAIDTIINQKKINESNDEKQKLYCIYVAIGQKRSTVRQIEKSLEEAGAMEYTTIVAATASDAAPLQFLAPYTGCAMGEYFRDNGMHALIIYDDLSKQAVAYRQMSLLLRRPPGREAYPGDVFYLHSRLLERAAKLSDDHGGGSLTALPIIETQGGDVSAFIPTNVISITDGQIFLETKFI

SEQ ID NO: 173502 - protein, 264 aa, Unknown
  Bacterial polypetide isolated from the Sargasso Sea
LGESSVRTIAMDSTEGLKRGDEVKDTGAPIQVPVGPETLGRIVNVIGEPIDEKGQISTKENWPIHRQAPSFNDQSTETEILVTGIKVIDLLAPYAKGGKIGLFGGAGVGKTVIIMELINNIAKAHGGFSVFAGVGERTREGNDLYHEMIESGVIKPEGTGSKAALVYGQMNEPPGARARVALTGLTVAEYFRDQEGQDVLFFVDNIFRFTQAGSEVSALLGRIPSAVGYQPTLATDMGNLQERITTTNKGSITSVQAIYVPADD

SEQ ID NO: 173503 - protein, 195 aa, Unknown
  Bacterial polypetide isolated from the Sargasso Sea
MPSLDDLRKRITSVKSTQKITKAMKMVAAAKLRKAQENAEKGRPYSEKMNNVILNLSKSITDKENAPKLLVGTGEEKVHLCIVLTADRGLCGGFNTNIIKKAKSYFEKIISENKTLKIITVGSKGYDQLKRQYKSYIVENISFKESKNINYFDADKVGKIIIEKFEKNEFDVCAIFYNKFKNVITQIPQEQQIVP

SEQ ID NO: 173504 - protein, 148 aa, Unknown
  Bacterial polypetide isolated from the Sargasso Sea
MPSLDDLRKRIASVKSTQKITKAMKMVAAAKLRKAQEMAEKGRPYSEKMDIIIQNLSKAINDPSNAPRLLVGTGEDKSYLCVVMTADRGLCGGFNTNIVKLAKNYFNKILNDSKSLKIITVGTKGLDQLKRDYGKYIIKKINFKDKKK

SEQ ID NO: 173505 - protein, 150 aa, Unknown
  Bacterial polypetide isolated from the Sargasso Sea
QLLMWVFSVSRVGSAAQTKAMKKVAGSIKLELAQYREMAAFAQFGSDLDASTQKLLNRGSKLTELLKQNQYSPMTVAEQVVTIYAGVKGYLDSIDLSQIGSFEKGLLELVKSDKPEILESIQKSGKIEDDIDKILSEVITSYKKTNFEKK

SEQ ID NO: 173506 - protein, 138 aa, Unknown
  Bacterial polypetide isolated from the Sargasso Sea
NGIYPAVDPLDSTSRILDPRIVGDEHYRVARDVQRILQSYKSLQDIIAILGMDELSEEDKLVVARARKIQRFLSQPFFVAEVFTGSPGKLVDLDSTIKGFDAICKGEYDHLPEAAFYMVGTIEEAIEKAKKMEQEAAA

SEQ ID NO: 173507 - protein, 275 aa, Unknown
  Bacterial polypetide isolated from the Sargasso Sea
AAGDDDSKKLFCIYVAVGQKRSTVAQIVKTLEDYGAMEYSIVIASTASEPAPMQFLAPYAGCTMGEYFRDNGMHALIVYDDLSKQAVAYRQMSLLLRRPPGREAYPGDVFYIHSRLLERAAKMNDDNGAGSLTALPVIETQAGDVSAYIPTNVISITDGQIFLETELFYRGIRPAVNVGLSVSRVGSAAQIKAMKQVAGRIKLELAQYREMAAFAQFASDLDPVTQRLLARGVRLTELLKQGQYAPLTVEEQVVSIFAGVRGYLDEIEVNEVTRF

SEQ ID NO: 173508 - protein, 230 aa, Unknown
  Bacterial polypetide isolated from the Sargasso Sea
KLLTGTGKDEKYLIIPVTADRGLCGGFNSSINRATTKFINSLESDGKNTSLITIGKKSRDFFNRTMKDKIIESYIDLGESGYDSSLQISNKIQNLYFDNQFDKCILIYNKFVSAITQDVTRQQLIPLDIKQNDKEETVDTSGKKNSAIYTYEPDESSILKDLLPKNISIQIFKVLLESSAGEQGARMAAMDNATRNAGEMIDNLTLKYNRTRQAFITKELIEIISGAEAI

SEQ ID NO: 173509 - protein, 173 aa, Unknown
  Bacterial polypetide isolated from the Sargasso Sea
IPTNVISITDGQIYLETNLFNSGIRPAIDVGLSVSRVGGNAQIKAMKSVAGTLRLDLAQYRELEAFAKFGSDLDKATLSQLTRGERMVEILKQNQYVPMDVEKQIAIIFAASKGQLDDLDIEEISDFETGLFEYLDANASESLASIVNEGTISENTGEKLEKAISDFKAGFKA

SEQ ID NO: 173510 - protein, 278 aa, Unknown
  Bacterial polypetide isolated from the Sargasso Sea
MSNGTVIQIIGAVIDVEFPKENLPKIYDALTVDETGLVLEVQQQLGDGVVRTIAMGASEGLKRGVSVTNTENPISVPVGEATLGRIMNVLGEPIDEKGPVDAKSAMPIHRNPPSYEDQAETTELLETGIKVIDLICPFAKGGKVGLFGGAGVGKTVNIQELIRNIAYEHSGYSVFAGVGERTREGNDMYHEMIEGGVLDKVALVYGQMNEPPGNRLRVALSGLTMAENFRDEGRDVLLFVDNIYRYTLAGTECSALLGRMPSAVGYQPTLAEEMGVLQ

SEQ ID NO: 173511 - protein, 166 aa, Unknown
  Bacterial polypetide isolated from the Sargasso Sea
VISITDGQIFLETELFNQGIRPAVNVGLSVSRVGSAAQTKAMKKVAGSIKLELAQYREMAAFAQFGSDLDASTQQLLNRGAKLTELLKQDQYSPMTVAEQVISVFAGVKGYLDDVDLGKIKGFEKDIIEKIKNDKPEIIEAIQSSGKLDEDTENQLKQVIEEYKKK

SEQ ID NO: 173512 - protein, 254 aa, Unknown
  Bacterial polypetide isolated from the Sargasso Sea
ILRKRVEVKAPGIIPRQSVNEPMQTGLKAIDSLIPIGRGQRELIIGDRQTGKTAVAVDTIINQKAINESNDEKKKLYCVYVAIGQKRSTVAQIVKTLEDAGAMKYTTVVSATASDSAPLQFLAPYTGCTIGEYFRDNGMHALIIYDDLSKQAVAYRQMSLLLRRPPGREAYPGDVFYLHSRLLERAAKLNEKNGGGSLTALPIIETQAGDVSAYIPTNVISITDGQIFLETELFNQGIRPAVNVGLSVSRVGSA

SEQ ID NO: 173513 - protein, 270 aa, Unknown
  Bacterial polypetide isolated from the Sargasso Sea
MNKKGKITQIIGAVVDVNFDSDLPEIYTALEANNSGNKLILEVAQHLGENDVRTIAMDATEGLKRGDEVINTESPISVPVGPETLGRIINVVGDSIDEKGDVKTKEKWPIHRPAPKFTDQATETEQLVTGIKVVDLLAPYAKGGKIGLFGGAGVGKTVTIMELINNIAKAHGGFSVFAGVGERTREGNDLYHEMIESGVIKTDGKGSKAALVYGQMNEPPGARARVALTGLTVAEYFRDKEGQDVLFFIDNIFRFTQAGSEVSALLGRIH

SEQ ID NO: 173514 - protein, 89 aa, Unknown
  Bacterial polypetide isolated from the Sargasso Sea
GAIAIIYFEPTKEEIVTELVPKSLKIQLFKSLLDSHAAEHGARMTAMHKATDNASELQKDLKLSYNKARQAAITNEILEIVGGAEALNA

SEQ ID NO: 173515 - protein, 300 aa, Unknown
  Bacterial polypetide isolated from the Sargasso Sea
MSVGDGIARIYGLDNVQAGEMVEFSDGSKGMALNLETDNVGVVIFGDDRAVKEGDTVKRTGAIVDTPVGKELLGRVVDGLGNPIDGKGALDKGIKRSRVEVKAPGIIPRKSVSEPMQSGLKSVDSLVPIGRGQRELIIGDRQTGKTAVAIDTIINQKKINESNDEKQKLYCIYVAIGQKRSTVRQIEKSLEEAGAMEYTTIVAATASDAAPLQFLAPYTGCAMGEYFRDNGMHALIIYDDLSKQAVAYRQMSLLLRRPPGREAYPGDVFYLHSRLLERAAKLSDEHGGGSLTALPIIETQ

SEQ ID NO: 173516 - protein, 225 aa, Unknown
  Bacterial polypetide isolated from the Sargasso Sea
APKLLSGTGQEKNHLCVVMTSDRGLCGGFNSNIIKKAKSYFVKILDEGKELKIITVGSKGNDQLKRVYGNKIIENISFKESKNANYFDADKVGKMVIEKFEAGEFDVCTIFYNQFKNVITQIPQAQQIIPLNNEGEKNSSDESYEFEPDEDEILNNLLPKNISTQIFKAMLENSASEQGSRMSAMDNATRNAGEMVDKLTIEYNRSRQAAITKELIEIISGAESL

SEQ ID NO: 173517 - protein, 273 aa, Unknown
  Bacterial polypetide isolated from the Sargasso Sea
MGDVMYGELVEFENGVFGLALNLEQDSVGVVVLGDYLGLSEGQKVTCTGKILEVPVGEEMLGRVVDALGNPIDGKGELKTKQTAPIEVVAPGVIARQSVDQPVQIGLKSIDAMVPIGRGQRELIIGDRQTGKTAVAIDAIINQKGTGIKCIYVAIGQKQSTIANVVAKLEEYGAMEHTIVVSAAAADPAAMQYLSAYSGCAMGEYFRDTGQDALIVYDDLSKQAVAYREISLLLRRPPGREAFPGDVFYLHSRLLERAARVNAEYVEKIQKER

SEQ ID NO: 173518 - protein, 272 aa, Unknown
  Bacterial polypetide isolated from the Sargasso Sea
MEIKAAEISSVIKDQIANFDSKSDVAEVGTVLSVGDGIARVYGLDKVQAGEMVEFPGGIKGMALNLEMDNVGVSIFGDDTGIKEGDTVKRTGEIVDVPVGKELLGRVVDGLGNPIDGKGPIKSTDKRRIEIKAPGIIPRQSVSEPMQTGIKALDALVPIGRGQRELIIGDRQTGKTAVAIDTILNQKTVNQSTNEKEKLYCIYVAIGQKRSTVAQIVKTLEDNGAMEYTIVVSATASEPAPLQFLSAYTGCTMGEYFRDNGMHALIVYDDLS

SEQ ID NO: 173519 - protein, 285 aa, Unknown
  Bacterial polypetide isolated from the Sargasso Sea
MTFLVGKELLGRVVDGLGNPIDGKGPIQSSEKRRIELKAPGIIPRQSVSEPMQTGIKALDALVPVGRGQRELIIGDRQTGKTAVAIDTILNQKSVNQSDNEKEKLYCIYVAIGQKRSTVAQIVKTLEDNGAMEYTIVVSATASEPAPLQFLSAYTGCTMGEYFRDNGMHALIVYDDLSKQAVAYRQMSLLLRRPPGREAYPGDVFYIHSRLLERAAKMSDEHGGGSLTALPIIETQAGDLSAYIPTNVISITDGQIFLETNLFFAGIRPAINVGLSVSRVGSAAQ

SEQ ID NO: 173520 - protein, 257 aa, Unknown
  Bacterial polypetide isolated from the Sargasso Sea
MPSLDDLRKRIASVKSTQKITKAMKMVAAAKLRKAQEMAEKGRPFSDKMDTIIQNLSKAINDPSNAPKLLVGTGKDSTHLCVVMTADRGLCGGFNTNIVKLAKNYFNIILKDSKNLKIITVGTKGLDQLKRDYGKFIIKKINFKDKKNLSFQDAEIIGNEIVKLFKNNEFDKCVIFFNKFKNVMTQIPQNQQVIPAKKDEESKVVENSSYEFEPEEDEILEDLLPKNISTQIYKGILENSASEQGSRMTAMDNATRK

SEQ ID NO: 173521 - protein, 190 aa, Unknown
  Bacterial polypetide isolated from the Sargasso Sea
STEMGDLQKRITSTKNGSITSVQAVYVPADDLTDPAPATAFAHLDATSVLERKIAELGIYPAVDPLASTSRILDPRIIGDRHYDTAQKVQAVLQQYKDLQDIIAILGMDELSDDDKLTVSRARKMQKFMSQPFFVAEQFTGFEGRYCSLEDTVSGFEAILNGDVDELAENSFAYVGTIDEAIDKDKKAAA

SEQ ID NO: 173522 - protein, 297 aa, Unknown
  Bacterial polypetide isolated from the Sargasso Sea
GKVLEVPVGEELLGRVVNTLGTPIDGKGEIKAEKTLPVEVVAPGVIARQSVDQPVQIGLKAVDAMVPIGRGQRELIIGDRQTGKTAVAVDAIINQKGTGIKCIYVAIGQKQSTVANVVRKLEEYGAMEHTIVVSATAADPAPMQYLSAYAGCTMGEYFRDKGEDALIVYDDLSKQAVAYRQVSLLLKRPPGREAYPGDVFYLHSRLLERAARVNAEYVEQVTGGKVKGKTGSLTALPIIETLAGDVSAFVPTNVISITDGQIYLETELFNSGVRPAINPGLSVSRVGGSAQTKIMKK

SEQ ID NO: 173523 - protein, 290 aa, Unknown
  Bacterial polypetide isolated from the Sargasso Sea
LEEAGAMEYTTIVAATASDSAPLQFLAPYTGCAMGEYFRDNGMHALIIYDDLSKQAVAYRQMSLLLRRPPGREAYPGDVFYLHSRLLERAAKLSDEHGGGSLTALPIIETQGGDVSAFIPTNVISITDGQIFLETELFNQGIRPAINVGLSVSRVGSSAQTKAMKKVSGSMKLELAQYREMAAFAQFGSDLDASTQQLLNRGSKLTELLKQKQYSPLTVAEQVISVFCGVKGYLDDIDLKDVSEFESKIINKCKSDKPEIIEAIQSTGKLDEDKEKLLVEVITQLKGTFK

SEQ ID NO: 173524 - protein, 135 aa, Unknown
  Bacterial polypetide isolated from the Sargasso Sea
VSAAQIKAMKQVAGRIKLELAQYREMAAFAQFASDLDPVTQRLLARGVRLTELLKQGQYAPLTVEEQVVSIFAGVRGYLDEIAVNDVTRFEQGLLSEVRASGASILASIRDEQELSDDTDKALTEFVDAYAKKFA

SEQ ID NO: 173525 - protein, 200 aa, Unknown
  Bacterial polypetide isolated from the Sargasso Sea
GYQPTLATDMGSLQERITSTNKGSITSVQAIYVPADDLTDPAPATSFAHLDATTVLSRQIAELGIYPAVDPLDSTSRILDPRVVGDEHYQVARNVQAVLQTYKSLQDIIAILGMDELSEEDKLTVARARKIQRFMSQPFFVAEVFTGTPGKYVELEDTIKGFDAICKGEYDHLPEAAFYMVGTIEEAIQKAEKMAEEAAA

SEQ ID NO: 173526 - protein, 212 aa, Unknown
  Bacterial polypetide isolated from the Sargasso Sea
MPSLDDLKKRIKSVKSTQKITKAMKMVAAAKLKKAQDNAEKGRPYSEKLQNIILNLTKSLSEGSNAPKLLVGSGKDKVHLCVVITADRGLCGGFNSNICKLAKSHFKKILKGGKELKIITVGSKGHDQIKAEYGDYIIYKKSFKEKKQITFNEANEIGKKVMELYDQEQFDKCFIFYNNFKNVITQIPQAEQIIPTFIKQEDKNKEKALFYE

SEQ ID NO: 173527 - protein, 294 aa, Unknown
  Bacterial polypetide isolated from the Sargasso Sea
MILPVGKELLGRVVDGLGNPIDGKGPLDKGIKKSRVEVKAPGIIPRQSVSEPMQTGLKSIDSLVPIGRGQRELIIGDRQTGKTAVAVDAIINQKKINESGDEKQKLYCIYVAVGQKRSTVRQIQKTLEEAGAMEYTTIVAATASDSAPLQFLAPYTGCAMGEYFRDNGMHALIIYDDLSKQAVAYRQMSLLLRRPPGREAYPGDVFYLHSRLLERAAKLSDEHGGGSLTALPIIETQGGDVSAFIPTNVISITDGQIFLETELFNQGIRPAINVGLSVSRVGSSAQTKAMKKVS

SEQ ID NO: 173528 - protein, 204 aa, Unknown
  Bacterial polypetide isolated from the Sargasso Sea
LLGRMPSAVGYQPTLAEEMGVLQERITSTKSGSITSIQAVYVPADDLTDPSPATTFAHLDATVVLSRNIAELGIYPAVDPLDSTSRQLDPLILGQEHYDTTRAVQGVLQKYKELKDIIAILGMDELSEEDKLAVNRARKIQRYLSQPFYVAETFTGTPGKYVALKDTMKGFQSIVNGDMDHLPEQAFYMIGEISEAEKKAEDVK

SEQ ID NO: 173529 - protein, 248 aa, Unknown
  Bacterial polypetide isolated from the Sargasso Sea
HALIIYDDLSKQAVAYRQMSLLLRRPPGREAYPGDVFYLHSRLLERAAKLSDEHGGGSLTALPIIETQGGDVSAFIPTNVISITDGQIFLETNLFNQGIRPAINVGLSVSRVGSSAQTKAMKKVSGSMKLELAQYREMAAFAQFGSDLDASTQKLLNRGSKLTELLKQKQYSPMTVAEQVISVFCGVKGYLDDLELKDISSFERKIIEKCKSEKPEILESISKSGKLEEDTENLLVETIKELKQNFNS

SEQ ID NO: 173530 - protein, 273 aa, Unknown
  Bacterial polypetide isolated from the Sargasso Sea
DLICPFTKGGKVGLFGGAGVGKTVTMMELINNIATEHSGYSVFAGVGERTREGNDFYHEMSESNVLDKVSLVYGQMNEPPGNRLRVALTGLTVAESFRDEGRDVLLFVDNIYRYTLAGVEVSALLGRMPSAVGYQPTLAAEMGALQERITSTKNGSITSIQAVYVPADDLTDPSPATTFSHLDATVVLSRQIAELGIYPAVDPLDSTSRQLDPLVVGKEHYEVARGVQQTLQRYKELKDIIAILGMDELSEEDKLIVSRARKIQRFLSQPFFV

SEQ ID NO: 173531 - protein, 257 aa, Unknown
  Bacterial polypetide isolated from the Sargasso Sea
GIKEGDTVKRTGEIVDVPVGKELLGRVVDGLGNPIDGKGPIQSSEKRRIELKAPGIIPRQSVSEPMQTGIKALDALVPVGRGQRELIIGDRQTGKTAVAIDTILNQKSVNQSDNEKEKLYCIYVAIGQKRSTVAQIVKTLEDNGAMEYTIVVSATASEPAPLQFLSAYTGCTMGEYFRDNGMHALIVYDDLSKQAVAYRQMSLLLRRPPGREAYPGDVFYIHSRLLERAAKMSDEHGGGSLTALPIIETQAGDLSAY

SEQ ID NO: 173532 - protein, 174 aa, Unknown
  Bacterial polypetide isolated from the Sargasso Sea
MASLDDLKKRITSVKSTQKITKAMKMVAAAKLKRAQDSAEKGRPYSQKMNNIILNLSGGISDKTNAPKLLSGTGKELVHLCVVMTSDRGLCGGFNANIIKKAKSYFSKLKNEGKELKIITVGSKGNDQLKRTYGDKIIENISFKNSKNANYFDAEKVGKIIIDKLKKRNLIFVQ

SEQ ID NO: 173533 - protein, 144 aa, Unknown
  Bacterial polypetide isolated from the Sargasso Sea
VGLSVSRVGSAAQTKAMKKVSGSMKLELAQYREMAAFAQFGSDLDASTQQLLNRGSKLTELLKQKQYSPMTVAEQVISVFCGVKGYLDDIELKEISDFENKIIDRCKSDKPEIMESILSSGKLEEASEKSLIEVITNLKKNYKS

SEQ ID NO: 173534 - protein, 235 aa, Unknown
  Bacterial polypetide isolated from the Sargasso Sea
MVSIRPDEISSILKQQITDYDQSVSVSNVGTVLQIGDGIARIYGLDQVMAGELLEFEDGTEGIALNLEDDNVGAVLMGEALGVQEGSNVKSTGKIASVPVGEAMQGRVVNPLGQPIDGKGEIPTSDTRLIEEMAPGIIKRRSVHEPMQTGITSIDAMIPVGRGQRELIIGDRQTGKSAIAIDTIINQKGQDVVCVYVAIGQKSASVANIVEVLRERGALDYTVVVSAGASEPAAC

SEQ ID NO: 173535 - protein, 255 aa, Unknown
  Bacterial polypetide isolated from the Sargasso Sea
MTINPTEISDIIKDKINKLDTKTQSHNQGTVISLTDGIARIYGITDALQGEMLEFPNNIFGLALNLERDSVGAVILGDYKSISEGDTVKCTGKILEVPVGEALLGRVVNSLGEPIDNAGEIKSGLSSPIEKIAPGVIERKSVDQPVQTGLKSIDSMVPIGRGQRELIIGDRQTGKTAVAVDAIINQKDTGVKCIYVAIGQKASSIAAVVRKLEEHDALKHTIIVAASAADSAAMQYIAPYSGCAMGEYFRDNGED

SEQ ID NO: 173536 - protein, 199 aa, Unknown
  Bacterial polypetide isolated from the Sargasso Sea
GGLNINLFRQVLQSMSEWRDKGVEIDVTIIGRKGLGFFKRVGVNIVSEATQLGDKPQLADLIGAMKVMMDAFSEGQIDRLFLAHNGFVTTMTQEPRVDQLLPVSAAEPDERLEQHWDYLYEPDAREVVDALMMRYVESLIYRGVVENISCEMAARMVAMKSASDNAGNLIDELQLVYNKARQAAITQEISEIVGGAAAV

SEQ ID NO: 173537 - protein, 319 aa, Unknown
  Bacterial polypetide isolated from the Sargasso Sea
FYVIGDPVDDGKPVKSKTTLPIHRDAPEYVDQSTSADILVTGIKVVDLLAPYAKGGKIGLFGGAGVGKTVLIMELINNVAKAHGGYSVFAGVGERTREGNDLFHEMVESGVIVPDGPGSKAALVYGQMNEPPGARARVALTGLTLAEYFRDQEGQDVLFFVDNIFRFTQAGSEVSALLGRIPSAVGYQPTLATDMGALQERITTTTKGSITSVQAIYVPADDLTDPAPATSFAHLDATTVLSRQIAEIGIYPAVDPLDSTSRMLDPRIVGEEHYEVARRVQEVLQQYKSLQDIIAILGMDELSEEDKLVVSRARKIQRF

SEQ ID NO: 173538 - protein, 179 aa, Unknown
  Bacterial polypetide isolated from the Sargasso Sea
DKDHITSVQAIYVPADDLTDPAPATSFSHLDATTVLSRQIAEIGIYPAVDPLDSTSRILDPRIVGEEHYRVARDVQRILQAYKSLQDIIAILGMDELSEEDKLTVARARKIQRFLSQPFFVAEVFTGSPGKLVDLDSTIKGFDAICKGEYDHLPEAAFYMVGGIEEVIEKGEKLNKDSK

SEQ ID NO: 173539 - protein, 310 aa, Unknown
  Bacterial polypetide isolated from the Sargasso Sea
CRSARRTLGRIMDVLGNPVDEAGPVGADASLPIHRKAPGYADQSPTVDILETGIKVIDLIMPISKGGKIGLFGGAGVGKTVTIMELINNIAKEHSGLSVFAGVGERTREGNDFFHEMKESGVLDKVAMVFGQMNEPPGNRLRVALTGLTMAEHFRDESRDVLLFVDNIYRYTLAGTEVSALLGRMPSAVGYQPTLAAEMGVLQERITSTRTGSITSFQAVYVPADDLTDPSPATTFAHLDATLVLSRQVAELGIYPAVDPLDSTSRQLDPLVVGQEHYDTARAVQGTLQRYKELRDIIAILGMDELSEED

SEQ ID NO: 173540 - protein, 282 aa, Unknown
  Bacterial polypetide isolated from the Sargasso Sea
MECKNGDNRLVLEVAQHLGETTVRTIAMDATEGLKRGDEVINTNAPIQVPVGPETLGRIINVIGEPIDERGKVKTKESWPIHRAAPEFNDQSTETEILVTGIKVIDLLAPYAKGGKIGLFGGAGVGKTVLIMELINNVAKAHGGFSVFAGVGERTREGNDLYHEMMDSGVIKKDGPGSKAALVYGQMNEPPGARARVALTGLTVAEYFRDQEGQDVLFFVDNIFRFTQAGSEVSALLGRIPSAVGYQPTLATDMGNLQERITTTNKGSITSVQAIYVPADDL

SEQ ID NO: 173541 - protein, 242 aa, Unknown
  Bacterial polypetide isolated from the Sargasso Sea
YAEGMRKVIGNIANGSIEYRHPFLTERPVKNVGYIVISTDRGLCGGLNTNEFKRIALDMKNWKEQGAQAQIAVIGNKATAFFKRFGGKVLAQQTGPGDNPRLADVIGSVQVMLKAYEEGRIDRLFLVFNKFVNTMKQEPVIEQLLPLPKADVTAKSHSWDYIYEPDPKVILDKLLSRYVESQVYQGVVENAASEQAARMVAMKAATDNAGSLMDDLKLVYNKARQAAITQELSEIVAGAAAV

SEQ ID NO: 173542 - protein, 194 aa, Unknown
  Bacterial polypetide isolated from the Sargasso Sea
MASLDDLKKRISSVKSTQKITKAMKMVAASKLRRAQENAEKGRPYSEKMNNIILNLSNNISDKENSPKLLAGSGENKVHLCIVMTSDRGLCGGFNTNIIKKAKSYFQKISDEGKDLKIITVGSKGYDQLKRIYKDNIIEKISFKDSKYANYFDADKVGKIIIEKFEKKEFDVCAIFYNQFKNVITQIPQEQQII

SEQ ID NO: 173543 - protein, 285 aa, Unknown
  Bacterial polypetide isolated from the Sargasso Sea
NGDNRLVLEVAQHLGETTVRTIAMDATEGLKRGDEVMNTNAPIQVPVGPETLGRIINVIGEPIDERGEVKTKESWPIHRAAPEFNDQSTETEILVTGIKVIDLLAPYAKGGKIGLFGGAGVGKTVLIMELINNVAKAHGGFSVFAGVGERTREGNDLYHEMMDSGVIKKDGPGSKAALVYGQMNEPPGARARVALTGLTVAEYFRDQEGQDVLFFVDNIFRFTQAGSEVSALLGRIPSAVGYQPTLATDMGNLQERITTTNKGSITSVQAIYVPADDLTDPAPAT

SEQ ID NO: 173544 - protein, 231 aa, Unknown
  Bacterial polypetide isolated from the Sargasso Sea
LNLENDNVGVVIFGDDRLIKEGDTVKRTNSIVDVPVGKELLGRVVDGLGNPIDGKGELPSKVLRKRVEVKAPGIIPRQSVNEPMQTGLKAIDSLIPIGRGQRELIIGDRQTGKTAVAVDTIINQKAINELDDEKKKLYCVYVAIGQKRSTVAQIVKTLEDAGAMKYTTVVSATASDSAPLQFLAPYTGCTIGEYFRDNGMHALIIYDDLSKQAVAYRQMSLLLRRPPGREA

SEQ ID NO: 173545 - protein, 164 aa, Unknown
  Bacterial polypetide isolated from the Sargasso Sea
MAKYFLETNLFNQGIRPAINVGLSVSRVGSSAQTKAMKKVSGSMKLELAQYREMAAFAQFGSDLDASTQKLLNRGSKLTELLKQKQYSPMTVAEQVISVFCGVRGFLDDVELKDISKFESKIIEKCKSEKPEILSSISSSGKLEENIEKMLSEVIVELKKNYNS

SEQ ID NO: 173546 - protein, 146 aa, Unknown
  Bacterial polypetide isolated from the Sargasso Sea
MASLDDLKKRIQSVKSTQKITKAMKMVAAAKLRKAQENAEKGRPYSEKMNNIILNLSNGISDKENAPKLLTGSGDEKVHLCVVLTSDRGLCGGFNSNIIRKAKSYFQKILNEGKNLKIITVGSKGYDQLKRTFNENIVDKITFKES

SEQ ID NO: 173547 - protein, 182 aa, Unknown
  Bacterial polypetide isolated from the Sargasso Sea
MSNGVVTQIIGAVIDVEFDRENIPSVYEALNIVGLETVLEVQQQLGDGIVRTIAMGSTEGLKRGLEVVRTNAPISVPVGQETLGRIMDVLGNPIDEKGDIGEKERQPIHKSPPSYTDQAGSNELLETGIKVIDLMCPFAKGGKVGLFGGAGVGKTVNMMELIRNIAIEHSGFSVFAGVGERT

SEQ ID NO: 173548 - protein, 291 aa, Unknown
  Bacterial polypetide isolated from the Sargasso Sea
MTINPSEVTKLLKDQIKNFGEKAEVSEIGKVLSVGDGIARVYGLDNVQAGEMVEFEDGSKGMALNLENDNVGVVIFGDDRNIKEGDTIKRTNAIVDVPVGKELLGRVVDGLGNPIDGKGSLSIKNRKRVEVKAPGIIPRQSVNEPMQTGLKSIDSLIPIGRGQRELIIGDRQTGKTAVAIDAIINQKKINESTDEKKKLYCVYVAIGQKRSTVAQITKTLEEAGALKYTTIVAATASDSAPLQFLAPYTGCTIGEYFRDNGMHALIVYDDLSKQAVAYRQMSLLLRRPPGR

SEQ ID NO: 173549 - protein, 202 aa, Unknown
  Bacterial polypetide isolated from the Sargasso Sea
RMPSAVGYQPTLATEMGALQERITTTKNGSITSVQAIYVPADDYTDPGVVTAFSHLDGRIVLERNLADQGLYPAVDPLASNSRILDPRVVGDEHYDVAQGVQQILQRYNDLKEIIAILGIDELSDDDKLVVGRARRIQMYLTQPFTVGEGFTGIPGEYVKIEDTVRGFKGLVDGEYDDLPETAFYMVGTIEQAVEKAKGMSS

SEQ ID NO: 173550 - protein, 288 aa, Unknown
  Bacterial polypetide isolated from the Sargasso Sea
LSVGDGIARVYGLDNVQAGEMVEFKDGSKGMALNLESDNVGIVIFGDDKAIKEGDTVKRTGAIVDVPVGKELLGRVVDALGNPIDGKETLKKGVKRKRVEVKAPGIIPRKSVSEPMQTGLKAIDSLIPIGRGQRELIIGDRQTGKTAVAIDTIINQKKINESNDEKKKLYCIYVAIGQKRSTVAQILKTLQDAGAMDYTIIVSATASDPAPLQFLAPYTGCTFGEFFRDNGMHALIIYDDLSKQAVAYRQMSLLLRRPPGREAYPGDVFYLHSRLLERAAKLNDDNGG

SEQ ID NO: 173551 - protein, 271 aa, Unknown
  Bacterial polypetide isolated from the Sargasso Sea
SDPAPMQFLAPYAAAAMGEFFRDNEMHAVVVYDDLSKQAVAYRQMSLLLRRPPGREAYPGDVFYLHSRLLERAAKLNGDNGSGSLTALPIIETQGGDVSAFIPTNVISITDGQIFLETELFYKGIRPAVNVGLSVSRVGSAAQIKAMKQVAGTIKLDLAQYREMAAFAQFASDMDASTRQLLSRGERLTELLKQSQYSPMEVEEQVAVIFAGVKGYLDQIPTQKIGEFEQSLLQKLKAKDSKILDVIRKDKAISDETEKALKDTLDQLIKN

SEQ ID NO: 173552 - protein, 242 aa, Unknown
  Bacterial polypetide isolated from the Sargasso Sea
MQINPSEVTKILKEQIKKFGEKAEVTEVGQVLSVGDGIARVYGLDNVQAGEMVEFSGGLKGMALNLENDNVGVVIFGDDRSIKEGDVVKRTGSIVDAPVGKNLLGRVVDALGNPIDGKGDLDKKIERRRVDVKAPGIIPRQSVNQPMQTGLKAIDSLIPIGRGQRELIIGDRQTGKTAVAIDTIINQKEVNKTSEEKNKLYCIYVAIGQKRSTVAQIVKALEDAGAMEYTTIVSATASDPAP

SEQ ID NO: 173553 - protein, 298 aa, Unknown
  Bacterial polypetide isolated from the Sargasso Sea
MANAKGKITQVIGAVVDVQFEDHLPEILNALTTDNNGKKLVLEVAQHLGENTVRTIAMDASEGLVRGQEVVDTAGPISVPVGNATLGRILNVVGEPVDEQGPVKAKESRAIHQPAPEFNEQSTESEVLVTGIKVIDLLAPYSKGGKIGLFGGAGVGKTVLIMELINNIAKVHSGFSVFAGVGERTREGNDLYHEMIESNVIKPDNLEESQVALVYGQMNEPPGARARVALTGLTLAEQFRDQSGTDVLFFVDNIFRFTQAGSEVSALLGRIPSAVGYQPTLATDMGAMQERITSTKNG

SEQ ID NO: 173554 - protein, 266 aa, Unknown
  Bacterial polypetide isolated from the Sargasso Sea
QLGNNTVRTLSMGISDGLQRGQTVLSTGGPIKTPVGKCMLGRIVNVLGEKIDDGDPIKAQTYASIHSPAPKLPMLNPSTDILSTGIKVIDLMCPIAKGGKVGCFGGAGVGKTVIMLELIRNIAVETKGLSVFAGVGERTREGNDFFHEMIASKVIDKTALVYGQMNEPPGNRLRTANTALTIAEHFRDQGNDILVFIDNIFRFTQAGSEVSALLGRMPSAVGYQPTLAEEMGKLQERIASTKDGSITSVQAIYVPADDLTDPSPAT

SEQ ID NO: 173555 - protein, 243 aa, Unknown
  Bacterial polypetide isolated from the Sargasso Sea
AERIRQVIGHLAFANPEYRHPFMVERPVKRVGYIVVSTDRGLCGGLNINLFKVLIKNMKEWHDQKVEVDLCVIGNKGASFFRSFGGNVVAAIGNLGEEPSINDLIGSVKVMLDGFHEGRIDRLYLVSNKFINTMTQKPTVDQLLPLAADENAEPVKKGQWDYLYEPDAQQLLDALLVRFIESQAYQAVVENGAAEQAARMIAMKNATDNAGELIGDLQLVYNKARQAAITQEISEIVGGAAAV

SEQ ID NO: 173556 - protein, 302 aa, Unknown
  Bacterial polypetide isolated from the Sargasso Sea
LSVGDGIARVYGLDNVQAGEMVEFKDGSKGMALNLESDNVGIVIFGDDKGIKEGDTVKRTGAIVDVPVGKELLGRVVDALGNPIDGKEPLKKGIKRQRVEVKAPGIIPRKSVNEPMQTGLKAIDSLIPVGRGQRELIIGDRQTGKTAVAIDTIINQKKINESDDEKKKLYCIYVAIGQKRSTVAQILKTLQDAGAMEYTIIVSATASDPAPLQFLAPYTGCTFGEFFRDNGMHALIIYDDLSKQAVAYRQMSLLLRRPPGREAYPGDVFYLHSRLLERAAKLNEDNGGGSLTALPIIETQAG

SEQ ID NO: 173557 - protein, 313 aa, Unknown
  Bacterial polypetide isolated from the Sargasso Sea
GLKRGDEVVNTNAPIKVPVGPETLGRIINVIGEPIDERGAVKTKESWPIHRPAPEFNDQSTETEILVTGIKVIDLLAPYAKGGKIGLFGGAGVGKTVLIMELINNVAKAHGGFSVFAGVGERTREGNDLYHEMIESGVIKKDGAGSKAALVYGQMNEPPGARARVALTGLTVAEYFRDQEGQDVLFFVDNIFRFTQAGSEVSALLGRIPSAVGYQPTLATDMGNLQERITTTNKGSITSVQAIYVPADDLTDPAPATSFAHLDATTVLSRQIAEIGIYPAVDPLDSTSRILDPRIVGDEHYRVAREVKKFFNI

SEQ ID NO: 173558 - protein, 290 aa, Unknown
  Bacterial polypetide isolated from the Sargasso Sea
MDINPSEVTKILKEQIKNFGEKAEISEVGQVLSVGDGIARIYGLDNVQAGEMVEFSDGSKGMALNLESENVGVVIFGDDRNIKEGDVVKRTGSIVDTPVGKELLGRVVDGLGNPIDGKGPLDKSVKKSRVEVKAPGIIPRQSVSEPMQTGLKSIDSLVPIGRGQRELIIGDRQTGKTAVAVDTIINQKKINESGDEKQKLYCIYVAVGQKRSTVRQIQKTLEEAGAMEYTTIVAATASDSAPLQFLAPYTGCAMGEYFRDNGMHALIIYDDLSKQAVAYRQMSLILRRPP

SEQ ID NO: 173559 - protein, 289 aa, Unknown
  Bacterial polypetide isolated from the Sargasso Sea
GLKSIDAMVPIGRGQRELIIGDRQTGKTAVAIDAIINQKGTGIKCIYVAIGQKQSTIANVVAKLEEYGAMEHTIVVSAAAADPAAMQYLSAYSGCAMGEYFRDTGQDALIVYDDLSKQAVAYREISLLLRRPPGREAFPGDVFYLHSRLLERAARVNAEYVEKITEGKVKGKTGSLTALPIIETQAGDVSAFVPTNVISITDGQIFLETDLFNSGVRPAIDPGLSVSRVGGAAQTKIIKKLSGGIRTDLAQYRELAAFSQFASDLDDATKEQLEHGKRITELLKQKQYL

SEQ ID NO: 173560 - protein, 317 aa, Unknown
  Bacterial polypetide isolated from the Sargasso Sea
RLFLELNQYKGGYMANNLTGKISQVLGAVVDVEFDGELPAIMNALKVDNNGTRLMLEVAQHLGENAVRTIAMDTTDGLVRGQTATDTGAPISMPVGPETLGRIMNVVGEPVDERGDIGTSKSYPIHRPAPEFVDQSTETEVLVTGIKVVDLLAPYARGGKIGLFGGAGVGKTVLIMELINNIAKAHGGYSVFAGVGERTREGNDLYHEMIESGIIDLKGKDSKVALVYGQMNEPPGARARVALSGLTQAEYFRDEEGQDVLFFVDNIFRFTQAGSEVSALLGRIPSAVGYQPTLATDMGALQERITTTKKGSITSVQ

SEQ ID NO: 173561 - protein, 196 aa, Unknown
  Bacterial polypetide isolated from the Sargasso Sea
MDINPSEITKILKEQIKNLGDKTEVSEIGKVLSVGDGIARVYGLDNVQAGEMVEFKDGLKGMALNLESDNVGIVIFGDDKSIKEGDTVKRTGAIVDVPVGKELLGRVVDALGNPIDGKEALKKGVKRKRVEVKAPGIIPRKSVSEPMQTGLKAIDSLIPIGRGQRELIIGDRQTGKTAVAIDTIINQKKINESNDE

SEQ ID NO: 173562 - protein, 130 aa, Unknown
  Bacterial polypetide isolated from the Sargasso Sea
PLDSTSRILDPRIVGEEHYRVARSVQKILQTYKSLQDIIAILGMDELSEEDKLTVARARKIQRFLSQPFFVAEVFTGSPGKLVDLDSTIKGFDAICKGEYDHLPEAAFYMVGTIEEVVQKAEKMAKEAAA

SEQ ID NO: 173563 - protein, 204 aa, Unknown
  Bacterial polypetide isolated from the Sargasso Sea
DQSLSDDLLETGIKVIDLICPFAKGGKIGLFGGAGVGKTVNMMELINNIATEHSGLSVFAGVGERTREGNDFYYEMQESGVVNVEKPSESKVAMVYGQMNEPPGNRLRVALTGLTMAEKFRDEGRDVLLFIDNIYRYTLAGVEVSALLGRMPSAVGYQPTLAEEMGALQERITSTKDGSITSIQAVYVPADDLQTPSQQRHLLT

SEQ ID NO: 173564 - protein, 283 aa, Unknown
  Bacterial polypetide isolated from the Sargasso Sea
KAHGGFSVFAGVGERTREGNDLYHEMIESGVIKTEGKGSKAALVYGQMNEPPGARARVALTGLTVAEYFRDKEGQDVLFFVDNIFRFTQAGSEVSALLGRIPSAVGYQPTLATDMGNLQERITSTDKGSITSVQAIYVPADDLTDPAPATSFSHLDATTVLSRQIAEIGIYPAVDPLDSTSRILDPRIVGEEHYRVARDVQRILQAYKSLQDIIAILGMDELSEEDKLTVARARKIQRFLSQPFFVAEVFTGSPGKLVDLESTIKGFDAICKGEYDHLPEAAF

SEQ ID NO: 173565 - protein, 298 aa, Unknown
  Bacterial polypetide isolated from the Sargasso Sea
LNPQTLDLLKQLHQGIVARKSVHQPMQTGLKAIDSMVPIGRGQRELIIGDRQTGKTAIAIDTIINQKGGDVICIYVGIGQKRSTMAQIVQRLENEGAMEHTIVVSSTASEPAPLQFLAPYSGVSIGEYFRDKGGHVLCVYDDLSKQAVAYRQLSLLLRRPPGREAYPGDVFYLHSRLLERACKLSDELGAGSLTALPIIETQAGDVSAYIPTNVISITDGQIFLSTDLFNSGVRPAINVGLSVSRVGGAAQVKAVKQVAGTLRLDLAQYREKEAFAQFGSDLDQATQKQLQRGQRLVE

SEQ ID NO: 173566 - protein, 153 aa, Unknown
  Bacterial polypetide isolated from the Sargasso Sea
FLSLDATTVLNRAISEKGIYPAVDPLDSTSRILDPQVVGNDHYRVAREVQRVLQTYKSLQDIIAILGMDELSEEDKLTVARARKIEKFLSQPFFVAEIFTGSPGKYVDLEDTIKSFDGLVKGEYDHMPEAAFYMVGGMDEAIEKAKKLEAEAA

SEQ ID NO: 173567 - protein, 95 aa, Unknown
  Bacterial polypetide isolated from the Sargasso Sea
ELQDIIAILGMEELSEDDKLAVARARKVQRFLSQPFHVAEQFTGIPGVLVDIKDTIKGFNMIMDGELDHLPEAAFNLKGNIEEAIAAGEKMLSEA

SEQ ID NO: 173568 - protein, 191 aa, Unknown
  Bacterial polypetide isolated from the Sargasso Sea
MGNLQERITTTGKGSITSVQAIYVPADDLTDPAPATSFSHLDATTVLSRQIAELGIYPAVDPLDSTSRILDPRILGEEHYRVARQVQKILQTYKSLQDIIAILGMDELSEEDKLTVARARKIQRFLSQPFFVAEVFTGTPGKLVSLDATIKGFDSICKGEYDHLPEAAFYMVGTIEEAIAKAEKMAKEAAA

SEQ ID NO: 173569 - protein, 198 aa, Unknown
  Bacterial polypetide isolated from the Sargasso Sea
SEELGGGSLTGLPIIETKAGDVSAFIPTNVISITDGQIYLESELFYSGVRPAVNPGTSVSRVGGAAQTKAMKKVSGPLRINLAQFRELEAFAEFGSDLDAASQAQLDRGRRVVELLKQPQYQPVPMEEQVVSLYAVTEGFLDVVDPADIPQAEQDLIEFVKTRHSDVINSIKTTGELPVDELKAAVEAFVSTLEKKEE

SEQ ID NO: 173570 - protein, 281 aa, Unknown
  Bacterial polypetide isolated from the Sargasso Sea
SNFPGGIKGMALNLETDNVGVVIFGDDRNIREGDTVKRTGAIVDVPVGKGLLGRVVDGLGNPIDGKGPIEDAKRMRVEVKAPGIIPRKSVHEPVQTGLKAIDSLIPVGRGQRELIIGDRQTGKTAVIIDTILNQKAANEGDKESEKLYCVYVAIGQKRSTVAQLVKTLEDNDAMKYSIVVAATASEPAPLQFLAPYTGCTMGEYFRDNGMHACIFYDDLSKQAVAYRQMSLLLRRPPGREAYPGDVFYLHSRLLERAAKMGDKAGNGSLTALPVIETQAGD

SEQ ID NO: 173571 - protein, 290 aa, Unknown
  Bacterial polypetide isolated from the Sargasso Sea
APIKVPVGPETLGRIINVIGEPIDERGEVKSSDNWPIHRAAPEFNDQSTETEILVTGIKVIDLLAPYAKGGKIGLFGGAGVGKTVLIMELINNVAKAHGGFSVFAGVGERTREGNDLYHEMIDSGVIKTDGEGSKAALVYGQMNEPPGARARVALTGLTVAEYFRDQEGQDVLFFVDNIFRFTQAGSEVSALLGRIPSAVGYQPTLATDMGNLQERITTTNKGSITSVQAIYVPADDLTDPAPATSFAHLDATTVLSRQIAEIGIYPAVDPLDSTSRILDPRIVGDEHYR

SEQ ID NO: 173572 - protein, 249 aa, Unknown
  Bacterial polypetide isolated from the Sargasso Sea
ESGVIKLDTDESKAALVYGQMNEPPGARARVALTGLTLAEYFRDEEGQDVLLFVDNIFRFTQAGSEVSALLGRIPSAVGYQPTLSTDMGALQERITSTNKGSITSVQAIYVPADDLTDPAPATSFAHLDATTVLSRQIAELGIYPAVDPLDSTSRILDPRIIGQEHYSVARKVQETLQKYKSLQDIIAILGMDELSDEDKLVVDRARKIQRFLSQPFHVAEVFTGTPGVFVGLQDTIKGFKGLVKVNLI

SEQ ID NO: 173573 - protein, 262 aa, Unknown
  Bacterial polypetide isolated from the Sargasso Sea
MQTGVKAVDSMIPIGRGQRELIIGDRKTGKTAVGVDTIINQKRYWGTDDAVVCIYVAVGQKESTVAGVVEALRENGALEYTIVVSASASDPAPMSYIAPYAGCAMGEYFMWAGKDGKTPKHALLVYDDLSKQAVAYRQLSLLLRRPPGREAYPGDVFYLHSRLLERATKLSDENGGGSLTALPIIETQEGDVSAYIPTNVISITDGQIYLEPELFFAGQRPAVNVGISVSRVGGNAQIKAMKQIAGSLRLDLAAFRELEAFA

SEQ ID NO: 173574 - protein, 209 aa, Unknown
  Bacterial polypetide isolated from the Sargasso Sea
LLGRIPSAVGYQPTLATDMGNLQERITTTNKGSITSVQAIYVPADDLTDPAPATSFSHLDATTVLSRQIAEIGIYPAVDPLDSTSRILDPRIVGDEHYRVAREVQKVLQTYKSLQDIIAILGMDELSEEDKLTVARARKIQRFLSQPFFVAEVFTGSPGKLVDLESTIKGFDAICKGEYDHLPEAAFYMVGTIEEAIEKAEKMAKDAAA

SEQ ID NO: 173575 - protein, 131 aa, Unknown
  Bacterial polypetide isolated from the Sargasso Sea
QPIDGKGEIPTSDTRLIEEMAPGIIKRRSVHEPMQTGITSIDAMIPVGRGQRELIIGDRQTGKSAIAIDTIINQKGQDVVCVYVAIGQKSASVANIVEVLRERGALDYTVVVSAGASEPAALQYLAPYTGA

SEQ ID NO: 173576 - protein, 264 aa, Unknown
  Bacterial polypetide isolated from the Sargasso Sea
MATAIASDKKNGKVTQVIGSTFDVEFPESSLPAIYNAVRIDADHKGVKLELVGEVQQHLGGGKVRCVALGSTDGLIRGQEVVDTGSPVSVPVGPATLGRVFNMLGEPIDNGGEVNADERWSIHRDAPPISELSTKTELFETGIKVIDLLTPFVRGGKAGLFGGAGLGKTVILTELIARIASAHGGNSVFAGVGERTREGTDLWLEMQDAKIGDTGRSVIEQTCMVFGQMNEPPGARLRVALSALTMAEYIRDTTGTDTLLFVDN

SEQ ID NO: 173577 - protein, 140 aa, Unknown
  Bacterial polypetide isolated from the Sargasso Sea
AELGIYPAVDPLDSTSRILDPRIVGEEHYRVARQVQKILQTYKSLQDIIAILGMDELSEEDKLTVARARKIQRFLSQPFFVAEVFTGTPGKLVNLDSTIKGFDAICKGDYDHLPEAAFYMVGTIEEALAKAEKMAKEAAA

SEQ ID NO: 173578 - protein, 173 aa, Unknown
  Bacterial polypetide isolated from the Sargasso Sea
MSKGTITQVIGAVVDVKFEGDLPEILTALECKNGDNRLVLEVAQHLGESTVRTIAMDATEGLKRGDEVMNTNSPIKVPVGPETLGRIINVIGEPIDEKGEVKTKESWPIHRPAPEFNDQSTETEILVTGIKVIDLLAPYAKGGKIGLFGGAGVGKTVLIMELINNVAKAHGGF

SEQ ID NO: 173579 - protein, 305 aa, Unknown
  Bacterial polypetide isolated from the Sargasso Sea
MYLCSRGQKRSTVRQIEKTLEEAGAMEYTTIVAATASDAAPLQFLAPYTGCTMGEYFRDNGMHALIIYDDLSKQAVAYRQMSLLLRRPPGREAYPGDVFYLHSRLLERAAKLSDEHGGGSLTALPIIETQGGDVSAFIPTNVISITDGQIFLETELFNQGIRPAINVGLSVSRVGSSAQTKAMKKVSGSMKLELAQYREMAAFAQFGSDLDASTQKLLNRGSKLTELLKQDQYSPMTVAEQVISVFCGVRGHLDDIEQKDISSFENKIIEKCKAEKPDIIESITASGKLEDDKEKELNEIILQLK

SEQ ID NO: 173580 - protein, 126 aa, Unknown
  Bacterial polypetide isolated from the Sargasso Sea
MRKGKITQVIGAVVDVKFEGELPEILTALECKNDGSRLVLEVAQHLGESSVRTIAMDATEGLKRGDEVIDTGAPIKVPVGPETLGRITNVVGEPIDEKGEVKTKENWPINRAAPEFNDQSTETEIL

SEQ ID NO: 173581 - protein, 285 aa, Unknown
  Bacterial polypetide isolated from the Sargasso Sea
MEYTTIVAATASDSAPLQFLAPYTGCAMGEYFRDNGMHALIIYDDLSKQAVAYRQMSLLLRRPPGREAYPGDVFYLHSRLLERAAKLSDEHGGGSLTALPIIETQGGDVSAFIPTNVISITDGQIFLETELFNQGIRPAINVGLSVSRVGSSAQTKAMKKVSGSMKLELAQYREMAAFAQFGSDLDASTQQLLNRGSKLTELLKQKQYSPMTVAEQVISVFCGVKGYLDDIDLKDVAEFESKIIEKCKSDKPEIIESILTSGKLEEDKEKLLVEVITQLKGNFKS

SEQ ID NO: 173582 - protein, 233 aa, Unknown
  Bacterial polypetide isolated from the Sargasso Sea
MPSLDDLKKRIKSVKSTQKITKAMKMVAAAKLRKAQESAEKGRPYSQKLQNIILNLTKSISDPQNAPKLLVGTGEDKKYLCVVLTADRGLCGGFNSNICKLAKTNFKKIISEGKELKIITVGSKGYDQIRREYGKHVIKKFSFKDKKNITFKEANEVGNEILSLFNQNEFDKCIIFFNNFKNVITQIPQAQQIIPAHTKNIKENNFENFSYEFEPEEDEILEDLLPKNISTPV

SEQ ID NO: 173583 - protein, 319 aa, Unknown
  Bacterial polypetide isolated from the Sargasso Sea
TEGLKRGDEVTDTGAPIKVPVGPETLGRIINVIGEPIDEKGDVKSKENWPIHRAAPEFNDQSTETEILVTGIKVIDLLAPYAKGGKIGLFGGAGVGKTVLIMELINNVAKAHGGFSVFAGVGERTREGNDLYHEMIDSGVIKPEGKGSKAALVYGQMNEPPGARARVALTGLTVAEYFRDQEGQDVLFFVDNIFRFTQAGSEVSALLGRIPSAVGYQPTLATDMGNLQERITTTNKGSITSVQAIYVPADDLTDPAPATSFAHLDATTVLSRQIAEIGIYPAVDPLDSTSRILDPRDCGDEHYRVAREVQKVFRHTNLY

SEQ ID NO: 173584 - protein, 191 aa, Unknown
  Bacterial polypetide isolated from the Sargasso Sea
MEINPSEVTKILKEQIKNFGNKAEITEVGQVLSVGDGIARIYGLDNVQAGEMVEFTDGSKGMALNLESENVGVVIFGDDKAIKEGDTVKRTGAIVDTPVGKELLGRVVDGLGNPIDGKGALDKGVKRSRVEVKAPGIIPRKSVSEPMQTGLKSIDSLVPIGRGQRELIIGDRQTGKTAVAIDAIINQKKIN

SEQ ID NO: 173585 - protein, 135 aa, Unknown
  Bacterial polypetide isolated from the Sargasso Sea
MPSLDDLKKRISSVKSTQKITKAMKMVAAAKLRRAQESAEKGRPFSEKMNNIILNLSKTVSDKDSASKFLVGTGKDDIHLCVVITADRGLCGGFNTNICRKAKNYFEKVLKEGKTLKIFTVGSKGHDQLKRGYGQ

SEQ ID NO: 173586 - protein, 254 aa, Unknown
  Bacterial polypetide isolated from the Sargasso Sea
RGQRELVIGDRQTGKTTVCIDTILNQKEFYDAGEPVFCIYVAIGQKASTVAAIAKTLEDKGALAYTVIVAANASDPAPMQVFAPFSGACIGEYFRDTGRPALIIYDDLSKQAVAYREVSLLLRRPPGREAYPGDVFYLHSRLLERSAKVVNDDKVASGMNDLPDSLKSKVKGGGSLTALPIIETQAGDVSAYIPTNVISITDGQIFLESDLFNSGVRPAINVGISVSRVGGSAQIKSMKKVAGTLKLDQAQYRE

SEQ ID NO: 173587 - protein, 290 aa, Unknown
  Bacterial polypetide isolated from the Sargasso Sea
MEIKAAEISSVIKDQISNFEAKADVSEVGTVLSVGDGIARVYGLDKVQAGEMVEFPGGIKGMALNLEMDNVGVSIFGDDTGIKEGDTVKRTGEIVDVPVGKELLGRVVDGLGNPIDGKGPIKSENRRRIELKAPGIIPRQSVSEPMQTGIKALDALVPIGRGQRELIIGDRQTGKTAVAIDTILNQKTINQSNNEKDKLYCIYVAIGQKRSTVAQIVKTLEDNGAMDYTIVVSATASEPAPLQFLSAYTGCTMGEYFRDNGMHALIVYDDLSKQAVAYRQIVITFKKTSR

SEQ ID NO: 173588 - protein, 205 aa, Unknown
  Bacterial polypetide isolated from the Sargasso Sea
IVAATASDSAPLQFLAPYTGCTIGEYFRDNGMHALIIYDDLSKQAVAYRQMSLLLRRPPGREAYPGDVFYLHSRLLERAAKLNDKSGGGSLTALPIIETQAGDVSAYIPTNVISITDGQIFLETELFNQGIRPAVNVGLSVSRVGSAAQTKAMKKVAGSIKLELAQYREMAAFAQFGSDLDASTQQLLNRGAKLTELLKQDQYSP

SEQ ID NO: 173589 - protein, 175 aa, Unknown
  Bacterial polypetide isolated from the Sargasso Sea
MASLDDLKKRIASVKSTQKITKAMKMVAAAKLKRAQESAEKGRPYSEKMNNVILNLSNGISDKENAPRLLSGTGKDKVHLCVVMTSDRGLCGGFNSNIIKKAKSYFAKLSEEGKDLKIVTVGSKGNDQLKRVYGDKIIANISFKESKNANYFDAEKVGKMVIEKFEAEEFDVCTI

SEQ ID NO: 173590 - protein, 100 aa, Unknown
  Bacterial polypetide isolated from the Sargasso Sea
MSKKSGKITQVIGAVVDVQFDGQLPEILTALECNNSGNRLVLEVAQHLGETTVRTIAMDSTEGLKRGNEVIDTGSPITVPVGPETLGRIINVIGEPIDQK

SEQ ID NO: 173591 - protein, 238 aa, Unknown
  Bacterial polypetide isolated from the Sargasso Sea
MSKGIITQVIGAVVDVKFDGDLPEILTALECKNGDNRLVLEVAQHLGESTVRTIAMDATEGLKRGDEVTNTKAPIQVPVGPETLGRIINVIGEPIDERGEVKTKESWPIHRAAPEFNEQSTETEILVTGIKVIDLLAPYAKGGKIGLFGGAGVGKTVLIMELINNVAKAHGGFSVFAGVGERTREGNDLYHEMIDSGVIKKDGDGSKAALVYGQMNEPPGARARVALTGLTVAEYLEI

SEQ ID NO: 173592 - protein, 255 aa, Unknown
  Bacterial polypetide isolated from the Sargasso Sea
MASLDDLKKRIASVKSTQKITKAMKMVAAAKLRRAQESAEKGRPYSEKMNNVILNLSNGISDKENAPKLLSGTGQEKTHLCVVMTSDRGLCGGFNSNIIKKAKSYFAKILDEGKELKIITVGSKGNDQLKRVYGDKIIENISLKESKNANYFDADKVGKMVIEKFEAGEFDVCTIFYNQFKNVITQIPQAQQIIPLNNEGEETSSEESYEFEPDEDEILSNLLPKNISTQIFKAMLENSASEQGSRMSAMDNATR

SEQ ID NO: 173593 - protein, 166 aa, Unknown
  Bacterial polypetide isolated from the Sargasso Sea
RDFITDGQIFLETELFNQGIRPAVNVGLSVSRVGSAAQTKAMKKVAGSIKLELAQYREMAAFAQFGSDLDASTQQLLNRGAKLTELLKQNQYSPMTVAEQVISVFTGVRGYLDDIDLGKIKEFEKNIIQLVKSEKPEIIDEIETTGKLDDKSEKLLEQILQEYKKG

SEQ ID NO: 173594 - protein, 109 aa, Unknown
  Bacterial polypetide isolated from the Sargasso Sea
MPSLDDLKKRIKSVKSTQKITKAMKMVAAAKLRKAQENAEKGRPYSQKMQNIILNLTKSINDPDSAPRLLVGTGKDKTYLCVLLTADRGLCGGFNSNISKLAKLNFKKI

SEQ ID NO: 173595 - protein, 249 aa, Unknown
  Bacterial polypetide isolated from the Sargasso Sea
ILTALECDNSGNRLVLEVAQHLGESSVRTIAMDATEGLKRGDEVTDTGAPIKVPVGPETLGRIINVIGEPIDEKGEVKTKENWPIHRSAPEFSDQSTETEILVTGIKVVDLLAPYAKGGKIGLFGGAGVGKTVLIMELINNVAKAHGGFSVFAGVGERTREGNDLYHEMIESGVIKPEGSGSKAALVYGQMNEPPGARARVALSGLTVAEYFRDQEGQDVLFFVDNIFRFTQAGSEVSALLGRIPSAVG

SEQ ID NO: 173596 - protein, 183 aa, Unknown
  Bacterial polypetide isolated from the Sargasso Sea
MDIKAAEISSILKDQIKNFGTDAEVTEIGKVLSVGDGIARVHGLDEIKAGEMVEFDGGIAGMALNLEKDNVGIVIFGSDKDIKEGDIVKRTGSIVDVPSGQGLLGRVVDALGNPIDGKGALKNVKRARVETKAPGIMPRQSVHEPMQTGLKAIDSLIPIGRGQRELIIGDRQTGKTAIAIDTF

SEQ ID NO: 173597 - protein, 284 aa, Unknown
  Bacterial polypetide isolated from the Sargasso Sea
NQKQINESSDESKKLYCVYVAIGQKRSTVAQITKTLEEAGALKYTTIVAATASDSAPLQFLAPYTGCTIGEFFRDNGMHALIVYDDLSKQAVAYRQMSLLLRRPPGREAYPGDVFYLHSRLLERAAKLSEKNGGGSLTALPIIETQAGDVSAYIPTNVISITDGQIFLETELFNQGIRPAVNVGLSVSRVGSAAQTKAMKKVAGSIKLELAQYREMAAFAQFGSDLDSSTQKLLNRGAKLTELLKQDQYSPMTVAEQVISVFTGVKGYLDDIDLSKIKKFEEDV

SEQ ID NO: 173598 - protein, 185 aa, Unknown
  Bacterial polypetide isolated from the Sargasso Sea
DGSVLVLEVQSHIGENAVRTISMDSTDGVSRGTEVVSTGNPIQMPIGKNVYGRLFNVVGDPIDGLEVLPKTKSDGMSIHREAPAFDQLSTSTEVLFTGIKVIDLIEPYAKGGKIGLFGGAGVGKTVLIQELINNIAKGHGGLSVFAGVGERTREGNDLLREMIESGIINYGAEFKKSMEAGEWDL

SEQ ID NO: 173599 - protein, 128 aa, Unknown
  Bacterial polypetide isolated from the Sargasso Sea
LDSTSRILDPQVVGDDHYRVAREVQRVLQTYKSLQDIIAILGMDELSEEDKLTVARARKIEKFLSQPFFVAEVFTGSPGKYVDLEDTIKSFDGLVKGEYDHMPEAAFYMVGGIDEAIEKAKKLEAEAA

SEQ ID NO: 173600 - protein, 194 aa, Unknown
  Bacterial polypetide isolated from the Sargasso Sea
GGGSLTALPIIETQGGDVSAFIPTNVISITDGQIFLETNLFNQGIRPAINVGLSVSRVGSSAQTKAMKKVSGSMKLELAQYREMAAFAQFGSDLDASTQKLLNRGSKLTELLKQKQYSPMTVAEQVISVFCGVRGYLDNIELKNIAEFEKKIVEKCKSEKPEILDSISQSGKLEENTEKTLIEVINEFKKNFNS

SEQ ID NO: 173601 - protein, 233 aa, Unknown
  Bacterial polypetide isolated from the Sargasso Sea
RQMSLLLRRPPGRKAYPGDVFYLHSRLLERAAKLNEKNGGGSLTALPIIETQAGDVSAYIPTNVISITDGQIFLETELFNQGIRPAVNVGLSVSRVGSAAQTKAMKKVAGSIKLELAQYREMAAFAQFGSDLDVSTQKLLNRGSKLTELLKQNQYSPLTVAEQVVSIFTGVSGYLDNIELNKIKKFETNLLEKIRSDYPEILENINTSGKLEDETKNKLIEIIEVQKKEVSNA

SEQ ID NO: 173602 - protein, 266 aa, Unknown
  Bacterial polypetide isolated from the Sargasso Sea
MGVIKPDGKGSKAALVYGQMNEPPGARARVGLTGLTVAEYFRDKEGQDVLFFVDNIFRFTQAGSEVSALLGRIPSAVGYQPTLATDMGNLQERITTTNKGSITSVQAIYVPADDLTDPAPATSFAHLDATTVLSRQIAELGIYPAVDPLDSTSRILDPRIVGEEHYRVAREVQRVLQAYKSLQDIIAILGMDELSEEDKLTVARARKIQRFLSQPFFVAEVFTGTPGKLVDLEATIKGFDAICKGEYDHLPEGAFYMVGTIEEAVE

SEQ ID NO: 173603 - protein, 64 aa, Unknown
  Bacterial polypetide isolated from the Sargasso Sea
IFPRQSVSEPMQTGIKALDALVPVGRGQRELIIGDRQTGKTAVAIDTILNQKTVNQSNNEKEKL

SEQ ID NO: 173604 - protein, 281 aa, Unknown
  Bacterial polypetide isolated from the Sargasso Sea
LETGIKVIDLLAPYSKGGKIGLFGGAGVGKTVIIMELINNIAKAHGGFSVFAGVGERTREGNDLYHEMIESGVIKPEGKGSKAALVYGQMNEPPGARARVGLTGLTVAEYFRDKEGQDVLFFVDNIFRFTQAGSEVSALLGRIPSAVGYQPTLATDMGNLQERITTTGKGSITSVQAIYVPADDLTDPAPATSFSHLDATTVLSRQIAELGIYPAVDPLDSTSRILDPRIVGEEHYRVAREVQKILQTYKSLQDIIAILGMDELSEEDKLTVARARKIQRF

SEQ ID NO: 173605 - protein, 213 aa, Unknown
  Bacterial polypetide isolated from the Sargasso Sea
DVFYLHSRLLERAAKLTEKNGGGSLTALPIIETQAGDVSAYIPTNVISITDGQIFLETELFNQGIRPAVNVGLSVSRVGSAAQTKAMKKVAGSIKLELAQYREMAAFAQFGSDLDASTQQLLNRGAKLTELLKQDQYSPMTVAEQVISVFTGVKGYLDDVDLAQIKKFEKDIVEKIKSEKSEIIETIQSSGKLDDDTEKLLIQVIEDYKKGKK

SEQ ID NO: 173606 - protein, 99 aa, Unknown
  Bacterial polypetide isolated from the Sargasso Sea
MPSLDDLKKRIKSVKSTQKITKAMKMVAAAKLRKAQESAEKGRPYSQKMQNIILNLVKSIKDFDNAPKLLVGTGKDKSYLCVVLTADRGLCGGFNSNIC

SEQ ID NO: 173607 - protein, 88 aa, Unknown
  Bacterial polypetide isolated from the Sargasso Sea
DVFYIHSRLLERAAKMNDENGAGSLTALPVIETQAGDVSAYIPTNVISITDGQIFLETELFYRGIRPAVNVGLSVSRVGSAAQIKAMK

SEQ ID NO: 173608 - protein, 257 aa, Unknown
  Bacterial polypetide isolated from the Sargasso Sea
TEILVTGIKVIDLLAPYAKGGKIGLFGGAGVGKTVLIMELINNVAKAHGGFSVFAGVGERTREGNDLYHEMIESGVIKPNEAGSKAALVYGQMNEPPGARARVALTGLTVAEYFRDQEGQDVLFFVDNIFRFTQAGSEVSALLGRIPSAVGYQPTLATDMGNLQERITTTNKGSITSVQAIYVPADDLTDPAPATSFAHLDATTVLSRQIAEIGIYPAVDPLDSTSRILDPRIVGDEHYRVAREVQKVLQTYKSLQD

SEQ ID NO: 173609 - protein, 230 aa, Unknown
  Bacterial polypetide isolated from the Sargasso Sea
MPSLDDLKKRISSVKSTQKITKAMKMVAAAKLRRAQESAEKGRPFSDKMNNIILNLSSSIPDKENASKFLVGTGKDNTHLCVVITADRGLCGGFNTNICRKARNDFEEILKKGKTLKIFTVGSKGYDQLKRTYGKYIIEKLNFKGFKKITYKEADEVGKKIIKLFNENQFDVCNIYYNKFKNVITQIPQSQQIIPIEKPKKDEKKTENFYEFEPEESEILDDLLPTPIFQ

SEQ ID NO: 173610 - protein, 265 aa, Unknown
  Bacterial polypetide isolated from the Sargasso Sea
SQEKAEAARPYSSRLEEMLSSLASSASSGEGIIKLLTGTGEDQNYIVVPVSADRGLCGGFNSSINRETFKLVKKLESENKKVQLLPIGKKSRDFFLRTLKDNITDSFVDTNVSSAGYNIALEISAKLQSLYFEGKFDKCILVYNKFKSAISQEVTQQQLIPLDISNKDNEDKPSETESSDKAIYTYEPDEETILQDLLPKNVSIQIFKVLLESDAGEQGARMAAMDNATRNAGEMIDSLTLKYNRTRQAFITKELIEIISGAESI

SEQ ID NO: 173611 - protein, 72 aa, Unknown
  Bacterial polypetide isolated from the Sargasso Sea
VFAGVGERTREGNDLYHEMIESGVIKPEGKGSKAALVYGQMNEPPGARARVGLTGLTVAEYFRDKEGQDVLF

SEQ ID NO: 173612 - protein, 274 aa, Unknown
  Bacterial polypetide isolated from the Sargasso Sea
VYDALKVDEAGLTLEVQQQLGDGIVRTIAMGTSDGIKRGFDVTNTGAPISVPVGEKTLGRIMNVLGEPVDEAGPIDAPKAMPIHRKPPTYEEQAGGNELLETGIKVIDLLCPFAKGGKVGLFGGAGVGKTVNMMELIRNIATEHSGYSVFAGVGERTREGNDFFHEMKESQVLDKVSLVYGQMNEPPGNRLRVALTGLTMAEDFRDEGKDVLMFIDNIYRYTLAGTEVSALLGRMPSAVGYQPTLAEEMGALQERITSTQSGSITSIQAVYVPA

SEQ ID NO: 173613 - protein, 293 aa, Unknown
  Bacterial polypetide isolated from the Sargasso Sea
ALAFEVIVDGESTTVMAEVAQQIGDSRVRAVSLKPTDGLTRGTAVRNTGSGIEVPVGDVTLGHVWNVIGEPLDVDASTLEIDEKWEIHRPAPDFDSLEPSAKMFETGIKVIDLLTPYKEGGKIGLFGGAGVGKTVLITEMINRVATQHGGVSVFAGVGERTREGTDLFLEMEESGVLDKAALVFGQMDEPPGVRLRIALAGVTMAEYFRDVQNQDVLLFIDNIFRFVQAGSEVSTLLGRMPSAVGYQPTLADEMGELQERITSTRGKSITSLQAVYVPADDYTDPAPFTSFTH

SEQ ID NO: 173614 - protein, 225 aa, Unknown
  Bacterial polypetide isolated from the Sargasso Sea
KLLVGNKKDATYLCVVLTADRGLCGGFNSNICKLAKSNFKKILNEGKNLKIITVGSKGLDQIKREYGKYIIEKISFKDKKQITFNEAEFVGNKIINLFKNDEFDKCILFFNNFKNVITQIPQAQQIIPVENNQSKDESKNTQTYEFEPEEDEILDELLPKNISTQVFKAFLENAASEQGSRMTAMDNATRNAGDLVDKLTINYNRSRQASITKELIEIISGAESL

SEQ ID NO: 173615 - protein, 295 aa, Unknown
  Bacterial polypetide isolated from the Sargasso Sea
AHGGYSVFAGVGERTREGNDLYHEMVESGVIKTDGDGSKAALVYGQMNEPPGARARVALSGLTLAEYFRDEEGQDVLLFIDNIFRFTQAGSEVSALLGRIPSAVGYQPTLSTDMGGLQERITSTNKGSITSVQAIYVPADDLTDPAPATSFAHLDATTVLSRQIAEIGIYPAVDPLDSTSRVLDPRIVGDEHYETARLVQEVLQQYKALQDIIAILGMDELSEEDKLTVARARKIQRFLSQPFHVAEVFTGTPGVLVGLEDTIKGFKGIAKGDYDHLPEASFYMVGTIEEAISKA

SEQ ID NO: 173616 - protein, 298 aa, Unknown
  Bacterial polypetide isolated from the Sargasso Sea
RGQRELIIGDRQTGKTAVAIDAIINQKKINESGDEKQKLYCVYVAIGQKRSTVRQIEKTLQEAGAMEYTTIVAATASDAAPLQFLAPYTGCAMGEYFRDNGMHALIIYDDLSKQAVAYRQMSLLLRRPPGREAYPGDVFYLHSRLLERAAKLSDEHGGGSLTALPIIETQGGDVSAFIPTNVISITDGQIFLETELFNQGIRPAINVGLSVSRVGSSAQTKAMKKVSGSMKLELAQYREMAAFAQFGSDLDASTQKLLNRGSKLTELLKQKQYSPMTVAEQVISIFCGVKGHLDDIDQ

SEQ ID NO: 173617 - protein, 49 aa, Unknown
  Bacterial polypetide isolated from the Sargasso Sea
GRIPSAIGYQPTLATDMGNLQERITTTNKGSITSVQAIYVPADDLTDPA

SEQ ID NO: 173618 - protein, 328 aa, Unknown
  Bacterial polypetide isolated from the Sargasso Sea
STQVIGAVVDVKFDGELPEILTALECKNGDNRLVLEVAQHLGETTVRTIAMDATEGLKRGDEVINTNAPIQVPVGPETLGRIINVIGEPIDERGEVKTKESWPIHRAAPEFNDQSTETEILVTGIKVIDLLAPYAKGGKIGLFGGAGVGKTVLIMELINNVAKAHGGFSVFAGVGERTREGNDLYHEMMESGVIKQDGPGSKAALVYGQMNEPPGARARVALTGLTVAEYFRDQEGQDVLFFVDNIFRFTQAGSEVSALLGRIPSAVGYQPTLATDMGNLQERITTTNKGSITSVQAIYVPADDLTDPAPATSFAHLDATTVLSRQIA

SEQ ID NO: 173619 - protein, 290 aa, Unknown
  Bacterial polypetide isolated from the Sargasso Sea
KTLEEAGALKYTTIVAATASDSAPLQFLAPYTGCTIGEYFRDNGMHALIVYDDLSKQAVAYRQMSLLLRRPPGREAYPGDVFYLHSRLLERAAKLNDKSGGGSLTALPIIETQAGDVSAYIPTNVISITDGQIFLETELFNQGIRPAVNVGLSVSRVGSAAQTKAMKKVAGSIKLELAQYREMAAFAQFGSDLDASTQQLLNRGAKLTELLKQDQYSPMTVAEQVISVFTGVKGYLDDVEISKIKKFENDIIEKIKSEKPEIIESIQSSGKLEEETEKLVIQVIEEYKKR

SEQ ID NO: 173620 - protein, 268 aa, Unknown
  Bacterial polypetide isolated from the Sargasso Sea
MQINPSEVTKILKEQIKKFGEKAEVSEVGQVLSVGDGIARVYGLDNVQAGEMVEFSKGIKGMALNLENDNVGVVIFGDDRSIKEGDVVKRTGAIVDTPVGKSLLGRVVDALGNPIDGKGDLEKKIKRKRVEVKAPGIIPRKSVNQPMQTGLKAIDSLIPIGRGQRELIIGDRQTGKTAVAIDTIINQKDINKSGEEKDKLYCIYVAIGQKRSTVAQIVKSLEDAGAMEYTTIVSATASDPAPLQFLAPYTGCTMGEYFRDNGNACFNY

SEQ ID NO: 173621 - protein, 229 aa, Unknown
  Bacterial polypetide isolated from the Sargasso Sea
EVKTKESWPIHRAAPEFNDQSTETEILVTGIKVVDLLAPYAKGGKIGLFGGAGVGKTVIIMELINNIAKAHGGFSVFAGVGERTREGNDLYHEMIESGVIKPEGPGSKAALVYGQMNEPPGARSRVALTGLTVAEYFRDQEGQDVLFFVDNIFRFTQAGSEVSALLGRIPSAVGYQPTLATDMGNLQERITTTNKGSITSVQAIYVPADDLTDPAPATSFAHLDATTVL

SEQ ID NO: 173622 - protein, 328 aa, Unknown
  Bacterial polypetide isolated from the Sargasso Sea
VERTGQVMSVPVGEAMLGRVVDALGAPIDGDGSIETTSRRPIERVAAGVCERQPVTEPLQTGIKPIDMMIPIGRGQRELIIGDRKTGKTAIAIDTILNQKNDDVICIYVAIGQKKSTVAQIVQTLKDNGALDYTVVVNASASDSATLQYLAPYTGCTIGEEFLDNGKHVLVVYDDLSKHAVAYRQLSLLLKRPPGREAYPGDVFYLHSRLLERALKYSDEKGAGSLTALPIIETLAGDVSAYIPTNVISITDGQIYLQSDLFNSGIRPAVNPGISVSRVGGNAQIKATKQVAGSLRLDLSQYWEMEAFAQFGSDLDKATLKQLERVSD

SEQ ID NO: 173623 - protein, 237 aa, Unknown
  Bacterial polypetide isolated from the Sargasso Sea
AQIVKILEDNGSLEYTIVVSATASEPAPLQFLSAYTGCTMGEYFRDNGMHALIIYDDLSKQAVAYRQMSLLLRRPPGREAYPGDVFYIHSRLLERAAKMSEEHGGGSLTALPVIETQAGDLSAYIPTNVISITDGQIFLETNLFFAGIRPAINVGLSVSRVGSSAQTKAMKKIAGSIKLELAQYREMAAFAQFASDLDASTRKLLDRGARLTELLKQGQYSPLTVPEQVVSIYAGVN

SEQ ID NO: 173624 - protein, 319 aa, Unknown
  Bacterial polypetide isolated from the Sargasso Sea
VRGIIWRINPSEVTKILKEQIKSYGEKAEISQVGKVLSVGDGIARIFGLDNVQAGEMVEFEDNSKGMALNLENDNVGVVIFGDDKNIKEGSTVKRTGSIVDAPVGKELLGRVLDGLGNPIDGKGNLSSKVKRNRVEVKAPGIIPRQSVSEPMQTGLKAIDSLIPIGRGQRELIIGDRQTGKTAVAIDAIINQKFINDTDDEKKKLYCVYVAIGQKRSTVAQIVKTLEDAGAMKYTTVVSATASDSAPLQFLAPYTGCTIGEYFRDNGMHALIIYDDLSKQAVAYRQMSLLLRRPPGREAYPGDVFYLHSRLLERAAKLN

SEQ ID NO: 173625 - protein, 165 aa, Unknown
  Bacterial polypetide isolated from the Sargasso Sea
MSKKGKITQIIGAVVDVNFESDLPEIYTALEASNSGNKLILEVAQHLGENGVRTIAMDATEGLKRGDEVINTGSPISVPVGPETLGRIINVIGDSIDEKGEVKTKEKWPIHRPAPKFTDQATETEQLVTGIKVIDLLAPYAKGGKIGLFGGAGVGKTVTIMELIN

SEQ ID NO: 173626 - protein, 182 aa, Unknown
  Bacterial polypetide isolated from the Sargasso Sea
FQERITSTKTGSITSIQAVYVPADDLTDPSPATTFAHLDATVVLARSIAELGIYPAVDPLDSNSRQLDPGIVGQEHYDTARSVQQVLQRYKELQDIIAILGMDELSEEDKLTVQRARKIQRFLSQPFFVAEVFTGSPGQYVSLRDSIKAFQGIVAGDYDDLPEQAFYMVGTIEEAVEKAKSM

SEQ ID NO: 173627 - protein, 283 aa, Unknown
  Bacterial polypetide isolated from the Sargasso Sea
KRISSVKSTQKITKAMKMVAASKLRRAQENAEKGRPYSDKMNNIILNLSNSISDKENSPKLLTGSGEDKIHLCVVMTSDRGLCGGFNTNIIKKAKAYFQKILKEGKNLKIITVGSKGYDQLKRIYKDNIIEKISFKESKYANYFDADKVGKIIIDKFEKKEFDVCTIFYNQFKNVITQIPQEQQIIPLKTSESEGSSSEDNYEFEPEEDEILSNLLPKNISTQIFKAMLENSASEQGSRMSAMDNATRNAGEMVDKLTIQYNRSRQAAITKELIEIISGAESL

SEQ ID NO: 173628 - protein, 307 aa, Unknown
  Bacterial polypetide isolated from the Sargasso Sea
LYCIYVAIGQKRSTVAQIVKTLEDNGAMEYTIVVSATASEPAPLQFLSAYTGCTMGEYFRDNGMHALIVYDDLSKQAVAYRQMSLLLRRPPGREAYPGDVFYIHSRLLERAAKMSDEHGGGSLTALPIIETQAGDLSAYIPTNVISITDGQIFLETNLFFAGIRPAINVGLSVSRVGSAAQTKAMKKIAGPVKLELAQYREMAAFAQFASDLDASTKQLLDRGARLVEILKQGQYSPLTVSEQVVSIYAGVRGYLDKVAVGDVVRFETEALNEVRTNHSDLLDAIANEKELSQENDDKLKSILDNLV

SEQ ID NO: 173629 - protein, 313 aa, Unknown
  Bacterial polypetide isolated from the Sargasso Sea
FNDQSTETEILVTGIKVIDLLAPYAKGGKIGLFGGAGVGKTVLIMELINNVAKAHGGFSVFAGVGERTREGNDLYHEMIESGVIKKEGAGSKAALVYGQMNEPPGARARVALTGLTVAEYFRDQEGQDVLFFVDNIFRFTQAGSEVSALLGRIPSAVGYQPTLATDMGNLQERITTTNKGSITSVQAIYVPADDLTDPAPATSFAHLDATTVLSRQIAEIGIYPAVDPLDSTSRILDPRIVGDQHYRVARDVQRILQSYKSLQDIIAILGMDELSEEDKLVVARARKIQRFLSQPFFVAEVFTGSPGKLVDLD

SEQ ID NO: 173630 - protein, 285 aa, Unknown
  Bacterial polypetide isolated from the Sargasso Sea
QSTETEVLVTGIKVVDLLAPYARGGKIGLFGGAGVGKTVLIMELINNIAKAHGGYSVFAGVGERTREGNDLYHEMIESGIIDLKGKDSKVALVYGQMNEPPGARARVALSGLTQAEYFRDEEGQDVLFFVDNIFRFTQAGSEVSALLGRIPSAVGYQPTLATDMGALQERITTTKKGSITSVQAIYVPADDLTDPAPATSFSHLDATTVLNRAISEKGIYPAVDPLDSTSRILDPQVVGDDHYRVAREVQRVLQTYKSLQDIIAILGMDELSEEDKVNSCKSKKN

SEQ ID NO: 173631 - protein, 284 aa, Unknown
  Bacterial polypetide isolated from the Sargasso Sea
MEINPSEVTKILKEQIKNFGDKAEVTEVGQVLSVGDGIARIYGLDNVQAGEMVEFADGSKGMALNLESENVGVVIFGDDRNVKEGDVVKRTGNIVDTPVGKELLGRVVDGLGNPIDGKGPLDKGIKKSRVEVKAPGIIPRQSVSEPMQTGLKSIDSLVPIGRGQRELIIGDRQTGKTAVAVDAIINQKKINESGDEKQKLYCIYVAVGQKRSTVRQIQKTLEEAGAMEYTTIVAATASDSAPLQFLAPYTGCAMGEYFRDNGMHALIIYDDLSKQAVAYRQMSL

SEQ ID NO: 173632 - protein, 215 aa, Unknown
  Bacterial polypetide isolated from the Sargasso Sea
MHSRLLERSCKLSDELGAGSLTALPIIETQAGDVSAYIPTNVISITDGQIFLSTDLFNSGVRPAINVGLSVSRVGGAAQVKAVKQVAGTLRLDLAQYREKEAFAQFGSDLDQATQKQLQRGQRLVEILKQPQYQPMPWVDQAISIFAATNGFLDDQPINKLGKFESEFLTFIQTKKADLRKSIEEKEMIDETAETELKSALNEFAEAFSAENSST

SEQ ID NO: 173633 - protein, 230 aa, Unknown
  Bacterial polypetide isolated from the Sargasso Sea
DVLFFVDNIFRFTQAGSEVSALLGRIPSAVGYQPTLATDMGNLQERITTTNKGSITSVQAIYVPADDLTDPAPATSFAHLDATTVLSRQIAELGIYPAVDPLDSTSRILDPRIVGEEHYRVAREVQKILQTYKSLQDIIAILGMDELSEEDKLTVARARKIQRFLSQPFFVAEVFTGTPGKLVDLEATIKGFDAICKGEYDHLPETAFYMVGTIEEAVEKAEKMAKEAAA

SEQ ID NO: 173634 - protein, 200 aa, Unknown
  Bacterial polypetide isolated from the Sargasso Sea
AKLSDEHGGGSLTALPIIETQGGDVSAFIPTNVISITDGQIFLETELFNQGIRPAINVGLSVSRVGSSAQTKAMKKVSGSMKLELAQYREMAAFAQFGSDLDASTQQLLNRGSKLTELLKQKQYSPLTVAEQVVSVFCGVKGYLDDINLKDIAEFESKIIEKCKSDKPEIIESIQSSGKLEEDKEKLLIEVITQLKQNFK

SEQ ID NO: 173635 - protein, 242 aa, Unknown
  Bacterial polypetide isolated from the Sargasso Sea
EVKTKESWPIHRAAPEFNDQSTETEILVTGIKVIDLLAPYAKGGKIGLFGGAGVGKTVLIMELINNVAKAHGGFSVFAGVGERTREGNDLYHEMIESGVIKKEGAGSKAALVYGQMNEPPGARARVALTGLTVAEYFRDQEGQDVLFFVDNIFRFTQAGSEVSALLGRIPSAVGYQPTLATDMGNLQERITTTNKGSITSVQAIYVPADDLTDPAPATSFAHLDATTVLSRQIAEIGIYPAV

SEQ ID NO: 173636 - protein, 313 aa, Unknown
  Bacterial polypetide isolated from the Sargasso Sea
QATESEILETGIKVVDLLAPYAKGGKIGLFGGAGVGKTVLIMELINNVAKAHGGYSVFAGVGERTREGNDLYNEMIESNVIIPDGPGSKAALVYGQMNEPPGARARVGLTGLTLAEYFRDEEGQDVLFFVDNIFRFTQAGSEVSALLGRIPSAVGYQPTLSTDMGALQERITTTTKGSITSVQAIYVPADDLTDPAPATSFAHLDATTVLSRAISEKGIYPAVDPLDSTSRMLDPRIVGDEHYETARSVQSILQQYKALQDIIAILGMDELSEEDKLTVARARKIERFLSQPFHVAEVFTGSPGKLVSLEDTI

SEQ ID NO: 173637 - protein, 288 aa, Unknown
  Bacterial polypetide isolated from the Sargasso Sea
NDQSTETEILVTGIKVIDLLAPYAKGGKIGLFGGAGVGKTVLIMELINNVAKAHGGFSVFAGVGERTREGNDLYHEMIDSGVIKTDGEGSKAALVYGQMNEPPGARARVALTGLTVAEYFRDQEGQDVLFFVDNIFRFTQAGSEVSALLGRIPSAVGYQPTLATDMGNLQERITTTNKGSITSVQAIYVPADDLTDPAPATSFAHLDATTVLSRQIAEIGIYPAVDPLDSTSRILDPRIVGDEHYRVAREVQKVLQTYKSLQDIIAILGMDELSEEDKLVVARARKIQ

SEQ ID NO: 173638 - protein, 222 aa, Unknown
  Bacterial polypetide isolated from the Sargasso Sea
PGREAYPGDVFYLHSRLLERAAKLSDEHGGGSLTALPIIETQGGDVSAFIPTNVISITDGQIFLETELFNQGIRPAINVGLSVSRVGSSAQTKAMKKVSGSMKLELAQYREMAAFAQFGSDLDASTQQLLNRGSKLTELLKQKQYSPMTVAEQVISVFCGVKGYLDDVDLKDVAEFEGKIIEKCKSDKPEIIEGIQGSGKLDDDKEKLLIEVITQLKGTFKS

SEQ ID NO: 173639 - protein, 97 aa, Unknown
  Bacterial polypetide isolated from the Sargasso Sea
MASLDDLKKRIASVKSTQKITKAMKMVAAAKLRRAQESAEKGRPYSEKMNNVISNLSNGISDKENAPKLLSGTGHDKVHLCVVMTSDRGLCGGFNSN

SEQ ID NO: 173640 - protein, 188 aa, Unknown
  Bacterial polypetide isolated from the Sargasso Sea
LRVRWCGERTREGNDLYEEFKESGVINADDLSKSKVALCYGQMNEPPGARMRVGLSALTMAEHFRDVNKQDVLLFVDNIFRFVQAGSEVSALLGRMPSAVGYQPTLGTDVGALQERVASTVEGSITSIQAVYVPADDLTDPAPATTFAHLDATTVLNRALASKGIYPAVDPLDSTSTMLQPAVVGDEH

SEQ ID NO: 173641 - protein, 172 aa, Unknown
  Bacterial polypetide isolated from the Sargasso Sea
MEINPSEVTKILKEQIKKIGDKAEVSEVGQVLSVGDGIARIYGLDNVQAGEMVEFSDGSKGMALNLESDNVGVVIFGDDKSVKEGDNVKRTGAIVDTPVGKELLGRVVDGLGNPIDGKGSLDKGVKRSRVEVKAPGIIPRKSVSEPMQTGLKSIDSLVPIGRGQRELIIGDR

SEQ ID NO: 173642 - protein, 221 aa, Unknown
  Bacterial polypetide isolated from the Sargasso Sea
IGLFGGAGVGKTVIIMELINNIAKAHGGFSVFAGVGERTREGNDLYHEMIESGVIKPDGKGSKAALVYGQMNEPPGARARVGLTGLTVAEYFRDKEGQDVLFFVDNIFRFTQAGSEVSALLGRIPSAVGYQPTLATDMGNLQERITTTGKGSITSVQAIYVPADDLTDPAPATSFSHLDATTVLSRQIAELGIYPAVDPLDSTSRILDPRIVGEEHYRVAR

SEQ ID NO: 173643 - protein, 303 aa, Unknown
  Bacterial polypetide isolated from the Sargasso Sea
NNIALQHSGLSVFAGVGERTREGNDFYYEMQESGVVNIDKLSESKVAMVYGQMNEPPGNRLRVALTGLTMAESFRDEGKDVLLFIDNIYRYTLAGVEVSALLGRMPSAVGYQPTLAEEMGALQERITSTKTGSITSIQAVYVPADDLTDPSPATTFAHLDATVVLSRQISELGIYPAVDPLDSTSRQLDPFVVGDEHYEVAQGVQKILQRYNELKDIIAILGMDELSEEDKGLVARARKAQRFLSQPFFVAEIFTGTPGKYVSLDDTIKAFKGILNGDYDHLPEQAFYMVGTIEEAVEKAKDL

SEQ ID NO: 173644 - protein, 281 aa, Unknown
  Bacterial polypetide isolated from the Sargasso Sea
MQINPSEITKILKEQIKKFGEKAEISEVGQVLSVGDGIARVYGLDNVQAGEMVEFSDGSKGMALNLESDNVGVVIFGDDKSIKEGDVVKRTGAIVDTPVGKKLLGRVVDALGNPIDGKGDLDKKLERKRVEVKAPGIIPRQSVNQPMQTGLKAIDSLIPIGRGQRELIIGDRQTGKTAVAIDTIINQKEINKSGDEKNKLYCIYVAIGQKRSTVAQIVKSLEDAGAMEYTTIVSATASDPAPLQFLAPYTGCTMGEYFRDNGMHALIIYDDLSKQAVAYRQ

SEQ ID NO: 173645 - protein, 215 aa, Unknown
  Bacterial polypetide isolated from the Sargasso Sea
KVHLCVVMTSDRGLCGGFNSNIIKKAKSYFSKILSEGKELKIITVGSKGNDQLKRMYGDKIIENISFKESKNANYFDADKVGKIIIDKFVSSEFDICTIFYNQFKNVITQIPQAQQIIPLNSENSEDNTSEESYEFEPDEDEILSNLLPKNISTQIFKAMLENSASEQGSRMSAMDNATRNAGEMVDKLTIQYNRSRQAAITKELIEIISGAESL

SEQ ID NO: 173646 - protein, 246 aa, Unknown
  Bacterial polypetide isolated from the Sargasso Sea
RLVLEVAQHLGESSARTIAMDSTEGLKRGDEVVDTGKPIQVPVGPETLGRIINVIGEPIDQKGNVQTKENWPIHRQAPSFNDQSTETEILVTGIKVIDLLAPYAKGGKIGLFGGAGVGKTVIIMELINNIAKAHGGFSVFAGVGERTREGNDLYHEMIESGVIKPDGDGSKAALVYGQMNEPPGARARVALTGLTVAEYFRDQEGQDVLFFVDNIFRFTQAGSEVSALLGRIPSAVGYQPTLATDM

SEQ ID NO: 173647 - protein, 215 aa, Unknown
  Bacterial polypetide isolated from the Sargasso Sea
SSVSADRGLCGGFNSSINRETFKLVKSLEGNGKKVQLMPVGKKSRDFFNRVMKDQIIDSFVDLNVSSTGYESALNISNKLQELYFDEKFDKCILVFNKFKSAISQEVTQQQLIPLDVSSSEKEEEKENSSNAIYDYEPDEETILKDLLPKNVSIQVFKVLLESDAGEQGARMAAMDNATRNAGEMIDSLTLKYNRTRQAFITKELIEIISGAESI

SEQ ID NO: 173648 - protein, 289 aa, Unknown
  Bacterial polypetide isolated from the Sargasso Sea
KTKERWPIHREAPKFTDQSTETEILETGIKVIDLLAPYSKGGKIGLFGGAGVGKTVIIMELINNIAKAHGGFSVFAGVGERTREGNDLYHEMIESGVIKPEGKGSKAALVYGQMNEPPGARARVGLTGLTVAEYFRDKEGQDVLFFVDNIFRFTQAGSEVSALLGRIPSAVGYQPTLATDMGNLQERITTTGKGSITSVQAIYVPADDLTDPAPATSFSHLDATTVLSRQIAELGIYPAVDPLDSTSRILDPRILGEEHYRVARQVQKILQTYKSLQDIIAILGMDELS

SEQ ID NO: 173649 - protein, 245 aa, Unknown
  Bacterial polypetide isolated from the Sargasso Sea
VYDDLSKQAVAYRQMSLLLRRPPGREAYPGDVFYIHSRLLERAAKMSDEHGGGSLTALPIIETQAGDLSAYIPTNVISITDGQIFLETNLFFAGIRPAINVGLSVSRVGSAAQTKAMKKIAGPVKLELAQYREMAAFAQFASDLDASTKQLLDRGARLVEILKQGQYSPLTVSEQVVSIYAGVRGYLDKVDVSDVVRFETEALNEVRSNHSDLLEAIANEKELSKENDDKLKSILDSHVQKFTSK

SEQ ID NO: 173650 - protein, 246 aa, Unknown
  Bacterial polypetide isolated from the Sargasso Sea
ISQVLGAVVDVEFDSELPAIMNALEVDNNGTRLMLEVAQHLGENAVRTIAMDTTDGLVRGQTATDTGAPISMPVGPETLGRIMNVVGEPVDERGDIGATKTYPIHRPAPEFVDQSTETEVLVTGIKVVDLLAPYARGGKIGLFGGAGVGKTVLIMELINNIAKAHGGYSVFAGVGERTREGNDLYHEMIESGIIDLKGKDSKVALVYGQMNEPPGARARVALSGLTQAEYFRDEEGQDVLFFVDNI

SEQ ID NO: 173651 - protein, 190 aa, Unknown
  Bacterial polypetide isolated from the Sargasso Sea
MPKNGKISQVMGAVVDVVFEDGHLPDIYNALKVDRGEEGTLVLEVAQHLGDSVVRTVAMDTTDGLVRGHVVEDSGEPISVPVGEKTLGRLFDVLGNTIDQKGDCETEKRNPIHRPAPKHEDLATSTEALVTGIKVVDLMEPYTRGGKTGLFGGAGVGKTVLIQELIRNIATEHGGYSVFAGVGERTREGN

SEQ ID NO: 173652 - protein, 278 aa, Unknown
  Bacterial polypetide isolated from the Sargasso Sea
HLPEILNALNTDNNGKTLVLEVAQHLGENTVRTIAMDATEGLVRGQEVIDTAGPISVPVGNATLGRIVNVVGEPVDEQGPVKSDEYRAIHQPAPEFAEQSTESEVLVTGIKVIDLLAPYSKGGKIGLFGGAGVGKTVLIMELINNIAKVHSGFSVFAGVGERTREGNDLYHEMIESNVIKPDNLEESQVALVYGQMNEPPGARARVALTGLTLAEQFRDQSGTDVLFFVDNIFRFTQAGSEVSALLGRIPSAVGYQPTLATDMGAMQERITSTKNGSI

SEQ ID NO: 173653 - protein, 318 aa, Unknown
  Bacterial polypetide isolated from the Sargasso Sea
VKGLVLNLEEDNVGAVLMGDSSNIKEGDTVKRSGEIASIDVGDGVCGRVLDTLGNPIDGQGPIKGKVFTMPLERKAPGVVYRQPVNEPLQTGIKAIDSMIPIGRGQRELIIGDRQTGKTAVAIDTILNQKEFYDKGEPVYCIYVACGQKASTVAQVTNILEKNGALPYTTVVSAPSSAPAPMQFFAPFAGAAIGEYFRDTGRPALVIFDDLSKQAVSYREVSLLLRRPPGREAYPGDVFYLHSRLLERSAKIINDDKLAADMNDLPDSLKGMVKGGGSLTALPIIETQEGDVSAYIPTKMLFQLLMAKYFLESNLLTP

SEQ ID NO: 173654 - protein, 320 aa, Unknown
  Bacterial polypetide isolated from the Sargasso Sea
LLLGDRQIGKTAVAVDTIINQKDTDVKCIYVAIGQKSSTVAEVVERFEQEGVLDKVVIVNAPASAAAALQMYAPYAGSAIGQHWMYNGEHGLIVFDDLSKQAIAYRQISLLLRRPPGREAYPGDVFYLHSRLLERCAKVSEELGGGSLTGLPIIETKAGDVSAFIPTNVISITDGQIYLESELFYSGVRPAVNPGTSVSRVGGAAQTKAMKKVSGPLRINLAQFRELEAFAEFGSDLDAASQAQLDRGRRVVELLKQPQYQPVPMEEQVVSLYAVTEGFLDVVDPADIPQAEQDLIDFVKTRHSDVIKFIKTTGELPGER

SEQ ID NO: 173655 - protein, 177 aa, Unknown
  Bacterial polypetide isolated from the Sargasso Sea
GSITSVQAIYVPADDLTDPAPATSFAHLDATTVLSRQIAELGIYPAVDPLDSTSRILDPRIVGDEHYRVAREVQKILQTYKSLQDIIAILGMDELSEEDKLIVARARKIQRFLSQPFFVAEVFTGSPGKLVDLESTIKGFDAICNGEYDHLPEAAFYMVGTIEEAIEKAEKMAKDVA

SEQ ID NO: 173656 - protein, 140 aa, Unknown
  Bacterial polypetide isolated from the Sargasso Sea
MSKNGKIVQVIGAVVDVQFDGDLPEILTALEGDNSGNKIILEVAQHLGENSVRTIAMDSTEGLKRGDIVQNTGAPISVPVGPETLGRIINVIGQPIDQKGEVKTKEKWPIHREAPKFTDQSTETEILETGIKVIDLLAPY

SEQ ID NO: 173657 - protein, 221 aa, Unknown
  Bacterial polypetide isolated from the Sargasso Sea
GREAFPGDVFYLHSRLLERASKLSKEHGGGSLTALPVIETQEGDVSAYIPTNVISITDGQIYLETNLFNSGIRPAIDVGLSVSRVGGNAQIKAMKKVAGTLRLDLAQYRELEAFAKFGSDLDKSTLAQLTRGERMVEILKQNQYVPMAVEKQVAIIFAASKGYLDDIAADKVDEFESGLFNYLDANAAEKLKAIRDEGDISEENSDALDKAISDYKNSFSG

SEQ ID NO: 173658 - protein, 189 aa, Unknown
  Bacterial polypetide isolated from the Sargasso Sea
MNKNLGKIKQIIGPVVDVEFEGELPPILNALHVNVGDNRVVIEVAQHLGENTLRSIAMSATEGLKRGAEVIDTGAPIQVPVGPETLGRITNVVGEPIDEIGEIKAKKTYPIHRQAPKYIEQSTNTEMLVTGIKVVDLLAPYSKGGKIGLFGGAGVGKTVLIMELINNVAKGHGGYSVFAGVGERTREGN

SEQ ID NO: 173659 - protein, 243 aa, Unknown
  Bacterial polypetide isolated from the Sargasso Sea
MEINPSEVTKILKEEIKNFGNKAEVSEVGQVLSVGDGIARIYGLDNVQAGEMVEFSDSSKGMALNLESDNVGVVIFGDDKAIKEGDTAKRTGAIVDTPVGKELLGRVVDGLGNPIDGKGALAKSTKRSRVEIKAPGIIPRKSVSEPMQTGLKSIDSLVPIGRGQRELIIGDRQTGKTAVAIDAIINQKKINETGDEKQKLYCVYVAIGQKRSTVRQIEKTLEEAGAMEYTTIVAATASDAAPL

SEQ ID NO: 173660 - protein, 247 aa, Unknown
  Bacterial polypetide isolated from the Sargasso Sea
MSKGIITQVIGAVVDVKFDGELPEILTALECKNGNNRLVLEVAQHLGETTVRTIAMDATEGLKRGDEVTNTNAPIQVPVGPETLGRIINVIGEPIDERGEVKTKESWPIHRGAPEFNDQSTETEILVTGIKVIDLLAPYAKGGKIGLFGGAGVGKTVLIMELINNVAKAHGGFSVFAGVGERTREGNDLYHEMIESGVIKQDGPGSKAALVYGQMNEPPGARARVALTGLTVAEYFRDQEGQDVLFF

SEQ ID NO: 173661 - protein, 233 aa, Unknown
  Bacterial polypetide isolated from the Sargasso Sea
YRQMSLLLRRPPGREAYPGDVFYIHSRLLERAAKMSEEHGGGSLTALPVIETQAGDLSAYIPTNVISITDGQIFLETNLFFAGIRPAINVGLSVSRVGSAAQTKAMKKIAGSVKLELAQYREMAAFAQFASDLDASTRKLLDRGARLTELLKQGQYSPLTVPEQVVSIYSGVNGYLDDISINDVNHFESEALSEIKSKHSDILESIEKEKELSDENSSKLKSFFDAFVGKFKK

SEQ ID NO: 173662 - protein, 317 aa, Unknown
  Bacterial polypetide isolated from the Sargasso Sea
APEFNDQSTETEILVTGIKVIDLLAPYAKGGKIGLFGGAGVGKTVLIMELINNVAKAHGGFSVFAGVGERTREGNDLYHEMMESGVIKPEGPGSKAALVYGQMNEPPGARARVALTGLTVAEYFRDQEGQDVLFFVDNIFRFTQAGSEVSALLGRIPSAVGYQPTLATDMGNLQERITTTNKGSITSVQAIYVPADDLTDPAPATSFAHLDATTVLSRQIAEIGIYPAVDPLDSTSRILDPRIVGDEHYRVAREVQKILQTYKSLQDIIAILGMDELSEEDKLVVARARKIQRFLSQPFFVAEVFTGSPGKLVDLES

SEQ ID NO: 173663 - protein, 292 aa, Unknown
  Bacterial polypetide isolated from the Sargasso Sea
MPSLDDLKKRIKSVKSTQKITKAMKMVAAAKLRKAQESAEKGRPYSEKMLNIILNLSKTIEKNSDAPKLISGSGKDNTYLCVVMTADRGLCGGFNTNICKLAKKKFKNFLKDGKQIKIITVGTKGYDQIKREYGKFIIKQISLKDKKKITFKDADEIGANIITLFENKEFDKCILFYNNFKNVITQIPQSQQIIPVELKLDSKTNENQNIFYEFEPDETEILEELLPKNISTQIFKAFLENAASEQGSRMTAMDNATRNAGDLVDKLTINYNRSRQASITKELIEIISGAES

SEQ ID NO: 173664 - protein, 210 aa, Unknown
  Bacterial polypetide isolated from the Sargasso Sea
ISADRGLCGGFNNNISKEVRRRVKELENGGKIVKLILVGRKIGSVLKREMGDRIIGSFTGIQGDNLTFTKVSPVSLQILSLFEENNVDEVEMLYNRFQSVISQVVTKKQLIPAEVSDKKIEEEDQQTTYEYEPEEEIILNDLLPRNLSTQIYSALLESSAGELAARMTAMDNATRNAGELIDRLTLEYNRTRQAFITKELIEIISGAEAV

SEQ ID NO: 173665 - protein, 228 aa, Unknown
  Bacterial polypetide isolated from the Sargasso Sea
LLRRPPGREAYPGDVFYCHSRLLERAAKLSDAMGAGSMTSLPIIETQAGDVSAYIPTNVISITDGQIFLSSDLFNSGLRPAINVGISVSRVGGAAQTKAIKKIAGTLKLELAQFDELAAFSQFASDLDEATQKQLGRGKRLRELLKQPQFDPLNLAEQVAIVYAGVKGLIDEVPEEEVVKFARELRDYLKTNKADFLKNVLSEKVLSEASESMLKDAISEVKSSMLAA

SEQ ID NO: 173666 - protein, 218 aa, Unknown
  Bacterial polypetide isolated from the Sargasso Sea
SKISLLIINSSDRGLCGGFNSNLFRNAKNWISEQQGKGKSVKIITVGKKASSFYRKTDLDVIANFDDLNSNDKQLQVSEEIKNKIMELFENNEIDEVSILFNKFVSVIAQEPTYQSLIPLSNDEADEEVTDTSNAVFEFEPDKNELLEYLVPRNFLTQIYRSVLESSASEHAARMTSMDNATRNAGDMIDGLTLTYNRTRQAFITKELIEIISGAEAV

SEQ ID NO: 173667 - protein, 190 aa, Unknown
  Bacterial polypetide isolated from the Sargasso Sea
LTALPIIETQGGDVSAFIPTNVISITDGQIFLETELFNQGIRPAINVGLSVSRVGSSAQTKAMKKVSGSMKLELAQYREMAAFAQFGSDLDASTQQLLNRGSKLTELLKQKQYSPMTVAEQVISVFCGVKGYLDDIELKDIAEFENKIIEKSRSDKPEIIDSIQSTGKLEDDKEKLLIEVITQLKENFKS

SEQ ID NO: 173668 - protein, 138 aa, Unknown
  Bacterial polypetide isolated from the Sargasso Sea
MSGSLTLRVLSPDKNVFDGSADEVILPSTTGQLGILPGHISLLTAIDVGVLRVRADGGWNSIALMGGFAEVDADEVTVLVNNAELGSTIDPSVAESELQAASTAVTGMEGQPASPEKVKAQQQLSLAKARVQASKSSD

SEQ ID NO: 173669 - protein, 245 aa, Unknown
  Bacterial polypetide isolated from the Sargasso Sea
MSKNIGKVSKVIGAVVDVEFSSKESTLPEIYDSLEIKREDGTILVLEVQSHIGENIVRTISMDSTDGLSRGTEAVATGNPIQMPIGKEVYGRLFNVVGDPIDGLEVLPKINDDGMSIHRQAPDFDQLSTSTEVLFTGIKVIDLIEPYAKGGKIGLFGGAGVGKTVLIQELINNIAKGHGGLSVFAGVGERTREGNDLLREMIESGIINYGDDFKKSMEAGEWDLSKVDKKALLESKATFVFGRNE

SEQ ID NO: 173670 - protein, 242 aa, Unknown
  Bacterial polypetide isolated from the Sargasso Sea
AGVGERTREGNDLYHEMIESGVIKPEGTGSKAALVYGQMNEPPGARARVALSGLTVAEYFRDQEGQDVLFFVDNIFRFTQAGSEVSALLGRIPSAVGYQPTLATDMGNLQERITTTNKGSITSVQAIYVPADDLTDPAPATSFSHLDATTVLSRQIAEIGIYPAVDPLDSTSRILDPRIVGDEHYRVAREVQKVLQTYKSLQDIIAILGMDELSEEDKLTVARARKIQRFLSQPFFVAEVFT

SEQ ID NO: 173671 - protein, 88 aa, Unknown
  Bacterial polypetide isolated from the Sargasso Sea
MANNLTGKISQVLGAVVDVEFDGELPAIMNALEVDNNGTRLMLEVAQHLGENAVRTIAMDTTDGLVRGQTATDTGAPISMPVGPETLR

SEQ ID NO: 173672 - protein, 249 aa, Unknown
  Bacterial polypetide isolated from the Sargasso Sea
MEIKTDQLTKLLREQIDKFEGSFNVSEVGEVIEIGDGVARISGLENVMSSELVELPNDIFGMALNLEEDNVGIVLFGDSRLVKEGDLAKRTGKVVEVPVGDSMLSRVVNPLGQAIDGRGEIDTSETLPIERKALGVMARSPVKQPLQTGIKAIDSMIPIGRGQRELIIGDRQTGKTAVAIDTIINQKDTHNTDSPVYCIYVAIGQKASTVAALVKELENNGAMDYTTVVAANASDPAPMQYIAPYAGAA

SEQ ID NO: 173673 - protein, 130 aa, Unknown
  Bacterial polypetide isolated from the Sargasso Sea
MANNLTGKISQVLGAVVDVEFDGELPAIMNALELDNDGTRLMLEVAQHLGENAVRTIAMDTTDGLVRGQAVTDTGAPISMPVGPETLGRIMNVIGEPVDERGDIGTTKTYPIHRPAPEFVEQSTRTEVLV

SEQ ID NO: 173674 - protein, 189 aa, Unknown
  Bacterial polypetide isolated from the Sargasso Sea
MEINPSEVTKILKEQIKNFGDKAEVTEVGQVLSVGDGIARIYGLDNVQAGEMVEFADGSKGMALNLESENVGVVIFGDDRNVKEGDVVKRTGNIVDTPVGKELLGRVVDGLGNPIDGKGPLDKGIKKSRVEVKAPGIIPRQSVSEPMQTGLKSIDSLVPIGRGQRELIIGDRQTGKTAVAVDAIINQKK

SEQ ID NO: 173675 - protein, 298 aa, Unknown
  Bacterial polypetide isolated from the Sargasso Sea
VGTSSGWSGNPLDGKGSIQSKDRSVADVKAPGIIPRKSVHEPMATGLKSVDAMIPIGRGQRELIIGDRQTGKTAVALDTILNQKSYNDAAGDDDSKKLYCVYVAVGQKRSTVAQLVKKLEESGAIEYSIVVAATASDPAPMQFLAPYAATSMAEFFRDNGKHALIIYDDLSKQAVAYRQMSLLLRRPPGREAYPGDVFYLHSRLLERSAKLSDDHGNGSLTALPIIETQGGDVSAFIPTNVISITDGQIFLETELFYQGIRPAVNTGLSVSRVGSSAQTDSMKSVAGPVKLSLAQYRE

SEQ ID NO: 173676 - protein, 228 aa, Unknown
  Bacterial polypetide isolated from the Sargasso Sea
MNDSLRAEEITNIIRERISNFETRLKVDEVGTVLTVGDGVARVFGLKNVEAGELVEFASGTKGMVLNLESNNVGVAILGDDPKIKEGSSVKRTEKIVQVPVGDALLGRVVNAIGEPIDGLGEIQTEESRIVELKAPGIIARKSVHEPLQTGLKAIDSMIPIGRGQRELIIGDRKTGKTAVAIDTIINQKGKNCVCIYVAIGQKQSTVRLVHQKLKEAGALDYTIIVSA

SEQ ID NO: 173677 - protein, 286 aa, Unknown
  Bacterial polypetide isolated from the Sargasso Sea
IMGDRQTGKTAVAIDAIINQKGTGIKCIYVAIGQKASSIAGVVRKLEEEGAMEHTIVVAAAAADSPAMQYIAPYSGTSMGEYFLDNGEDALIIFDDLTKQAWAYRQVSLLLRRPPGREAYPGDVFYLHSRLLERASRVSEEHVESVSGGKIKGKTGSLTALPIIETQAGDVSAFVPTNVISITDGQIFLETDLFNAGIRPAINAGLSVSRVGGSAQTKIIKKLGGGIRLALAQYRELAAFAQFASDLDEATRKQLERGQRATELMKQKQYSPLSVSEMALSLFAVN

SEQ ID NO: 173678 - protein, 283 aa, Unknown
  Bacterial polypetide isolated from the Sargasso Sea
MYHEMIESGVIKTDGKGSKAALVYGQMNEPPGARARVALTGLTVAEYFRDKEGQDVLFFVDNIFRFTQAGSEVSALLGRIPSAVGYQPTLATDMGNLQERITSTDKGSITSVQAIYVPADDLTDPAPATSFSHLDATTVLSRQIAEIGIYPAVDPLDSTSRILDPRVVGEEHYRVARDVQKILQAYKSLQDIIAILGMDELSEEDKLTVARARKIQRFLSQPFFVAEVFTGSPGKLVDLDATIKGFDSICKGEYDHLPEAAFYMVGGIEEVVEKANKLKKESK

SEQ ID NO: 173679 - protein, 248 aa, Unknown
  Bacterial polypetide isolated from the Sargasso Sea
MEINPSEVTKILKEQIKKFGDKAEVTEVGQVLSVGDGIARIYGLDNVQAGEMVEFSDGSKGMALNLESDNVGVVIFGDDRAVKEGDTVKRTGAIVDTPVGKELLGRVVDGLGNPIDGKGALDKGIKRSRVEVKAPGIIPRKSVSEPMQSGLKSVDSLVPIGRGQRELIIGDRQTGKTAVAIDTIINQKKINESNDEKQKLYCIYVAIGQKRSTVRQIEKSLEEAGAMEYTTIVAATASDAAPLQFLAP

SEQ ID NO: 173680 - protein, 155 aa, Unknown
  Bacterial polypetide isolated from the Sargasso Sea
ELFNQGIRPAVNVGLSVSRVGSAAQTKAMKKVAGSIKLELAQYREMAAFAQFGSDLDASTQQLLNRGSKLTELLKQDQYSPMTVAEQVISVFTGVKGYLDDVDLTKIKNFEKDIIEKIKSDKPEIIESIEKSGKLEENIDKALSSLIDDYKKGSK

SEQ ID NO: 173681 - protein, 128 aa, Unknown
  Bacterial polypetide isolated from the Sargasso Sea
MPSLDDLKKRIKSVKSTQKITKAMKMVAAAKLRKAQENAEKGRPYSQKMQNIILNLTKSINDPQNAPKLLVGTGKDDTYLCVVLTADRGLCGGFNSNICKLAKAKFKDILKEGKKLKIITVGSKGLDQ

SEQ ID NO: 173682 - protein, 282 aa, Unknown
  Bacterial polypetide isolated from the Sargasso Sea
ERGVVKTKESWPIHRAAPEFNDQSTETEILVTGIKVIDLLAPYAKGGKIGLFGGAGVGKTVLIMELINNVAKAHGGFSVFAGVGERTREGNDLYHEMIESGVIKKEGAGSKAALVYGQMNEPPGARARVALTGLTVAEYFRDQEGQDVLFFVDNIFRFTQAGSEVSALLGRIPSAVGYQPTLATDMGNLQERITTTNKGSITSVQAIYVPADDLTDPAPATSFAHLDATTVLSRQIAEIGIYPAVDPLDSTSRILDPRIVGDQHYRVARDVQRILQSYKSLQ

SEQ ID NO: 173683 - protein, 238 aa, Unknown
  Bacterial polypetide isolated from the Sargasso Sea
MSKNIGKVSKVIGAVVDVEFSSKESTLPEIYDSLEIKREDGTILVLEVQSHIGENIVRTISMDSTDGLSRGTEVVATGNPIQMPIGKEVYGRLFNVVGDPIDGLEVLPKINDDGMSIHRQAPDFDQLSTSTEVLFTGIKVIDLIEPYAKGGKIGLFGGAGVGKTVLIQELINNIAKGHGGLSVFAGVGERTREGNDLLREMIESGIINYGDEFIKSMEAGEWDLSKVDKKALLESKAT

SEQ ID NO: 173684 - protein, 239 aa, Unknown
  Bacterial polypetide isolated from the Sargasso Sea
YFRDEQKQDVLLFVDNIYRYILAGMEVSALLGRMPSAVGYQPTLSTEMGDLEERITTTVNGSITSFQAVYVPADDYTDPGIVTTFGHLDANVSLDRSLAAQFLFPAVDPLASNSRIMEPAIVGEDHYNAARGVQQVLQRYKDLQDVIAILGIDELSEEDQIIVARARKIQRFLTQPFFVGEVFTGIPGKYVPVADTVRGFLEIIDGKHDDLPEQAFYMVGGIEEAVAKAEEMNKQIESK

SEQ ID NO: 173685 - protein, 239 aa, Unknown
  Bacterial polypetide isolated from the Sargasso Sea
MIYQKQAVAYRQMSLLLRRPPGREAYPGDVFYLHSRLLERSAKLSDANGGGSLTALPIIETQAGDVSAYIPTNVISITDGQIFLETELFNQGIRPAVNVGLSVSRVGSAAQTKAMKKVAGSIKLELAQYREMAAFAQFGSDLDASTQQLLNRGAKLTELLKQDQYSPMTVAEQVVSVFAGVKGYLDDIDLENIKVFEKDIIEKIKNDKPEIIEAIQSSGKLEEDTENQLKQVIEKYKKK

SEQ ID NO: 173686 - protein, 120 aa, Unknown
  Bacterial polypetide isolated from the Sargasso Sea
MVSIRPDEISAILKQQIEDYDKSVSVSNVGSVLTVGDGIARVYGLQQAMAGELLEFEDGTEGIALNLEDDNVGAVLMGEGLGIQEGSTVKATGKIASVPVGEAMLGRVVNSLGRAIDGKG

SEQ ID NO: 173687 - protein, 279 aa, Unknown
  Bacterial polypetide isolated from the Sargasso Sea
KRVRCIAMDTTDGIKRGAKVLDTGNPISVPVGKSALGRMMNVVGEPIDGKGAIESNELSPIHKPAPSFQDQSTKTEVFATGIKVIDLLAPFLKGGKIGLFGGAGVGKTVLLMELINNVAKESGGYSFFAGVGERTREGNDLYMEMKESGVLANTGLVFGQMNEPPGARARVALTGLTQAEYFRDKEGQDVLLFVDNIFRFTQAGSEVSALLGRIPSAVGYQPTLATDLGALQERITSTVKGSITSVQAIYVPADDLTDPAPATTFAHLDGTIVLSRALA

SEQ ID NO: 173688 - protein, 66 aa, Unknown
  Bacterial polypetide isolated from the Sargasso Sea
LSKQAVAYRQMSLLLRRPPGREAYPGDVFYLHSRLLERAAKLNDKSGGGSLTALPIIETQAGDVSA

SEQ ID NO: 173689 - protein, 187 aa, Unknown
  Bacterial polypetide isolated from the Sargasso Sea
MEINPSEVTKILKEQIKNFGDKAEVTEVGQVLSVGDGIARIYGLDNVQAGEMVEFADGSKGMALNLESENVGVVIFGDDRNVKEGDVVKRTGNIVDTPVGKELLGRVVDGLGNPIDGKGVLDKGIKKSRVEVKAPGIIPRQSVSEPMQTGLKSIDSLVPIGRGQRELIIGDRQTGKTAVAVDAIINQ

SEQ ID NO: 173690 - protein, 285 aa, Unknown
  Bacterial polypetide isolated from the Sargasso Sea
DATEGLKRGDEVIDTGAPISVPVGPETLGRIINVVGESIDEKGDVKTKEKWPIHRAAPKFTDQATETEQLVTGIKVIDLLAPYAKGGKIGLFGGAGVGKTVTIMELINNIAKAHGGFSVFAGVGERTREGNDLYHEMIESGVIKTEGKGSKAALVYGQMNEPPGARARVALTGLTVAEYFRDKEGQDVLFFVDNIFRFTQAGSEVSALLGRIPSAVGYQPTLATDMGNLQERITSTDKGSITSVQAIYVPADDLTDPAPATSFSHLDATTVLSRQIAEIGIYTCC

SEQ ID NO: 173691 - protein, 294 aa, Unknown
  Bacterial polypetide isolated from the Sargasso Sea
TAPVEVVAPGVIARQSVDQPVQIGLKAVDTMVPIGRGQRELIIGDRQTGKTAVAVDAIINQKGTGIKCIYVAIGQKQSTVVNVVKKLEEYGALEHTIIVSASASDPAPMQYLSAYSGCSMGEYFRDKGEDALIVYDDLSKQAVAYRQVSLLLKRPPGREAYPGDVFYLHSRLLERAARVNADYVEKITNGNVKGKTGSLTALPIIETQAGDVSAFVPTNVISITDGQIFLETDLFNSGIRPAINPGISVSRVGGAAQTKIMKKLSGGVRTALAQYRELAAFSQFASDLDDATKA

SEQ ID NO: 173692 - protein, 205 aa, Unknown
  Bacterial polypetide isolated from the Sargasso Sea
MANNLTGKISQVLGAVVDVEFDGELPAIMNALEVDNNGNRLMLEVAQHLGENAVRTIAMDVTDGLVRGQTATDTGAPISMPVGPETLGRIMNVVGEPVDERGEIGTKKTYPIHRSAPEFVDQSTETEVLVTGIKVVDLLAPYARGGKIGLFGGAGVGKTVLIMELINNIAKAHGGYSVFAGVGERTREGNDLYHEMIESGIIDLK

SEQ ID NO: 173693 - protein, 196 aa, Unknown
  Bacterial polypetide isolated from the Sargasso Sea
AVGYQPNLAEEMGVLQERITSTKTGSITSIQAVYVPADDLTDPSPATTFAHLDATVVLARSIAELGIYPAVDPLDSNSRQLDPGIVGQEHYDTARSVQQVLQRYKELQDIIAILGMDELSEEDKLTVQRARKIQRFLSQPFFVAEVFTGSPGQYVSLRDSIKAFQGIVAGEYDDLPEQAFYMVGTIEEAVEKAKSM

SEQ ID NO: 173694 - protein, 207 aa, Unknown
  Bacterial polypetide isolated from the Sargasso Sea
LERAAKLSDAMGGGSMTALPIIETQAGDVSAYIPTNVISITDGQIFLSADLFNSGLRPAINVGISVSRVGGAAQTKAIKKIAGTLKLELAQFDELAAFSQFASDLDEATQQQLERGKRLRELLKQPQFSPLNLAEQVAVVYAGVKGLIDEVPVEDVTKFATELREYLKLNKAEFIEEILKEKKLNDGLEATLKEVINEVKSSMLATV

SEQ ID NO: 173695 - protein, 232 aa, Unknown
  Bacterial polypetide isolated from the Sargasso Sea
MANEKEIRTKIGSVKNTQKITKAMEMVAASKMRRTQETMKKALPYADKIRAVIGHIYNANPDYKHPFLEKRDVKTAGYIVVSSDRGLCGGLNVNMFRGLIAELKENKNNQVESKLCLVGAKAVQFFRSVDVDVVAAASHLGEEPQVEDLVGSIKTMLDEYIDGKIDQLFIVHNDFVNTMTQKPEIKTLLPIDPEDREEMQEHWDYIYEPDSKELLDYILMRYIESQVYRAVV

SEQ ID NO: 173696 - protein, 286 aa, Unknown
  Bacterial polypetide isolated from the Sargasso Sea
PGIITRKSVCEPVQTGITAIDSMIPIGRGQRELIIGDRQTGKTSVAIDTILNQKGEDVICVYVAIGQKASSVAAVCTSIEERGASPYTIVVAANADDPATLQYIAPYTGAALAEYFMYNGKATLVIYDDLTKQASAYRQMSLLLRRPPGREAYPGDVFYLHSRLLERAAKLSDELGGGSMTALPIIETQAGDVAAYIPTNVISITDGQIFLSGDLFNAGIRPAINVGISVSRVGSAAQIKAMKQVAGKLKLELAQFAELEAFSQFASDLDQATQNELARGQRLREI

SEQ ID NO: 173697 - protein, 197 aa, Unknown
  Bacterial polypetide isolated from the Sargasso Sea
AVGYQPTLAEEMGVLQERITSTKTGSITSVQAIYVPADDLTDPSPATTFAHLDATVVLSRQIASLGIYPAVDPLDSTSRQLDPAIVGQEHYDVAKGVQQVLQRYLELKDIIAILGMDELSDEDKQTVNRARRIEKYLSQPFFVAEVFTNSPGKFVSIKDTVRGFKGILEGEYDDLPEQAFLMAGKIEEVVENAEKLK

SEQ ID NO: 173698 - protein, 177 aa, Unknown
  Bacterial polypetide isolated from the Sargasso Sea
AYIPTNVISITDGQIFLGTELFNQGIRPAVNVGLSVSRVGSAAQTKAMKKVAGSIKLELAQYREMAAFAQFGSDLDASTQKLLNRGSKLTELLKQNQYSPMTVAEQVITIYAGVKGYLDSIDTSQIGSFEKGLLELVKSEKPEILESIQKSGKIEEDIDKILSEIITNYKKTNFEKK

SEQ ID NO: 173699 - protein, 203 aa, Unknown
  Bacterial polypetide isolated from the Sargasso Sea
ERAAKLNDDKGGGSLTALPIIETQAGDVSAYIPTNVISITDGQIFLETELFNQGIRPAVNVGLSVSRVGSAAQTKAMKKVAGSIKLELAQYREMAAFAQFGSDLDASTQKLLNRGSKLTELLKQDQYSPMPVAQQVIAVFSGVKGFLDDVELPNIKNIEKQIYEKVKSSNPEIIDNINNTGKLDENIEKNLISVIEKFKKENK

SEQ ID NO: 173700 - protein, 161 aa, Unknown
  Bacterial polypetide isolated from the Sargasso Sea
ADDLTDPSPATTFAHLDATLVLSRNIAELGIYPAVDPLDSTSRILDPLVIGQEHYDCARGVQAVLQRYKELQDIIAILGMDELSEDDKQIVNRARKIQKFLSQPFAVAEVFTNTPGKYVPLAETIRGFNGIVAGDYDHIPEQAFSYCGGIDEAVENAKKYQ

SEQ ID NO: 173701 - protein, 109 aa, Unknown
  Bacterial polypetide isolated from the Sargasso Sea
MRKNGKITQIIGAVVDVNFENELPEIYTALETNNSGNKLILEVAQHLGENDVRTIAMDATEGLKRGDEVVNTGSPISVPVGPETLGRIINVVGESIDEKGDVKTKEKWP

SEQ ID NO: 173702 - protein, 219 aa, Unknown
  Bacterial polypetide isolated from the Sargasso Sea
IGNIRLHGQVFLTSWILLGALLVFISLGTKKMENDPKGLQNLLEFLWDYIRDLARTQIGEKVYRDWMPFIGTLFLFVFVSNWGGALIPWRLIKLPSGELGAPTADINTTIALALLVSLSYFYAGLSNKGWRYFEYYVHPTPIMLPFKILEDFTKPLSLSFRLFGNILADELVVGVLVFLVPLILPIPVMFLGLFTSAIQALIFATLAAYYIGEAVEEHH

SEQ ID NO: 173703 - protein, 261 aa, Unknown
  Bacterial polypetide isolated from the Sargasso Sea
VYGQMNEPPGARARVGLTGLTLAEQFRDQSGTDVLFFVDNIFRFTQAGSEVSALLGRIPSAVGYQPTLATDMGALQERITSTKAGSITSVQAIYVPADDLTDPAPATSFAHLDATTVLSRAISELGIYPAVDPLDSNSRLMDPLIVGEEHYQVARDVQGILQRYKSLQDIIAILGMDELSEEDKLTVARARKIQRFLSQPFDVAKVFTGSDGVQVPLDVTIDSFKRVVAGEFDHLPEAAFYMVGGIDEVIEKAGKLETKVA

SEQ ID NO: 173704 - protein, 99 aa, Unknown
  Bacterial polypetide isolated from the Sargasso Sea
TYKSLQDIIAILGMDELSEEDKLTVARARKIQRFLSQPFFVAEVFTGSPGKLVDLESTIKGFDAICKGEYDHLPEAAFYMVGTIEEAIEKAEKMKKDAA

SEQ ID NO: 173705 - protein, 263 aa, Unknown
  Bacterial polypetide isolated from the Sargasso Sea
ALCYGQMNEPPGARMRVGLSALTMAEHFRDVNKQDVLLFVDNIFRFVQAGSEVSALLGRMPSAVGYQPTLGTDVGALQERVASTVEGSITSIQAVYVPADDLTDPAPATTFAHLDATTVLNRALASKGIYPAVDPLDSTSTMLQPAVVGDEHYRTARAVQSTLQRYKELQDIIAILGLDELSEDDRRIVDRARKVEKFLSQPFFVAEIFTGMPGKYVKLEETITGFNQILSGELDSLPEAAFYLVGNIEEVKAKAEKIAAETK

SEQ ID NO: 173706 - protein, 102 aa, Unknown
  Bacterial polypetide isolated from the Sargasso Sea
QGVLQRYKELKDIIAILGMDELSDDDKNTVSRARKVEKFLSQPFFVAEVFTGSPGKYVSIKDTIQGFKEILDGVHDDVPEQAFYMVGSMDEVLEKAKTIKSD

SEQ ID NO: 173707 - protein, 250 aa, Unknown
  Bacterial polypetide isolated from the Sargasso Sea
KINESNDEKKKLYCIYVAIGQKRSTVAQILKTLQDAGAMDYTIIVSATASDPAPLQFLAPYTGCTFGEFFRDNGMHALIIYDDLSKQAVAYRQMSLLLRRPPGREAYPGDVFYLHSRLLERAAKLNDDNGGGSLTALPIIETQAGDVSAYIPTNVISITDGQIFLGTELFNQGIRPAVNVGLSVSRVGSAAQTKAMKKVAGSIKLELAQYREMAAFAQFGSDLDASTQKLLNRGSKLTELLKQNQYSPMT

SEQ ID NO: 173708 - protein, 202 aa, Unknown
  Bacterial polypetide isolated from the Sargasso Sea
MSKNGKITQIIGAVVDVNFENELPEIYTALETNNSGNKLILEVAQHLGENDVRTIAMDATEGLKRGDEVVNTGSPISVPVGPETLGRIINVVGESIDEKGDVKTKEKWPIHRPAPKFTDQATETEQLVTGIKVIDLLAPYAKGGKIGLFGGAGVGKTVTIMELINNIAKAHGGFSVFAGVGERTREGNDLYHEMIESGVIKT

SEQ ID NO: 173709 - protein, 262 aa, Unknown
  Bacterial polypetide isolated from the Sargasso Sea
FDGELPEILTALECDNSGNRLVLEVAQHLGESSVRTIAMDATEGLKRGDEVIDTGAPIKVPVGPETLGRIINVIGEPIDEKGEVKTKENWPIHRSAPEFSDQSTETEILVTGIKVVDLLAPYAKGGKIGLFGGAGVGKTVLIMELINNVAKAHGGFSVFAGVGERTREGNDLYHEMIESGVIKSEGSGSKAALVYGQMNEPPGARARVALSGLTVAEYFRDQEGQDVLFFVDNIFRFTQAGSEVSALLGRIPSAVGYQPTLA

SEQ ID NO: 173710 - protein, 275 aa, Unknown
  Bacterial polypetide isolated from the Sargasso Sea
MVATPSTSSQTKGVVRQVIGPVLDVEFPAGKLPKILNALRIEAKNPAGQDIALTAEVQQLLGDHRVRAVAMSGTDGLVRGMEAIDTGAPISVPVGEATLGRIFNVLGEPVDEQGPVNTKDTAPIHRAAPKLTDLETKPKVFETGIKVIDLLAPYRQGGKVGLFGGAGVGKTVLIQELINNIAKEHGGVSVFGGVGERTREGNDLYEEFKESGVINADDLTQSKVALCFGQMNEPPGARMRVGLSALTMAEHFRDVNKQDVLLFVDNIFRFVQAGF

SEQ ID NO: 173711 - protein, 206 aa, Unknown
  Bacterial polypetide isolated from the Sargasso Sea
DRGLCGGFNTNICKLAKTSFKKILNEQKNLKIITVGSKGFDQIKREYGKHVIKKYSFKEKKQITFKEADTVGNEIIRLFNQNEFDKCILFFNNFKNVITQIPQAQQIIPVDKKSSVSKEENFLPYEFEPDEDEILEDLLPKNISTQVFKAFLENAASEQGSRMTAMDNATRNAGDLVDKLTINYNRSRQASITKELIEIISGAESL

SEQ ID NO: 173712 - protein, 301 aa, Unknown
  Bacterial polypetide isolated from the Sargasso Sea
DGIARVYGLDNVQAGEMVEFPGGISGMALNLESDNVGVVIFGDDRGIKEGDTVKRTGSIVDAPVGRELLGRVVDALGNPIDGKGEINAKERSIVDVRAPGIIPRKSVHEPVQTGLKAIDSLVPVGRGQRELIIGDRQTGKTAVAIDTILNQKAINDADDESKKLYCVYVAIGQKRSTVAQIVKELDERGALEYTVVVAATASEPAPLQYLAPYTGSAIGEWFRDNKMHSLIIYDDLSKQAVAYRQMSLLLRRPPGREAYPGDVFYLHSRLLERSAKLNEENGAGSMTALPIIETQGEMYLL

SEQ ID NO: 173713 - protein, 149 aa, Unknown
  Bacterial polypetide isolated from the Sargasso Sea
MASLDDLKKRIASVKSTQKITKAMKMVAAAKLRRAQESAERGRPYSEKMNNMILNLSGGISDKENAPKLLSGTGNDKVHLCIVMTSDRGLCGGFNSNIIKKAKSYFLKILNEGKELKIITVGSKGNDQLKRMYGDKIIENVSLKSSKNA

SEQ ID NO: 173714 - protein, 154 aa, Unknown
  Bacterial polypetide isolated from the Sargasso Sea
FTQGIRPAINVGLSVSRVGSSAQTKAMKKVSGSMKLELAQYREMAAFAQFGSDLDASTQQLLNRGSKLTELLKQKQYSPLTVAEQVISVFCGVKGYLDDIDLKDIAKFEIKIIEKCKSDKPEIIDSIQSSGKLEEDKEKLLVEVITELKQNFKS

SEQ ID NO: 173715 - protein, 228 aa, Unknown
  Bacterial polypetide isolated from the Sargasso Sea
MEINPSEVTKILKEQIKNFGEKAEVSEVGQVLSVGDGIARIYGLNNVQAGEMVEFSDGSKGMALNLESDNVGVVIFGDDKAVKEGDIVKRTGAIVDTPVGKELLGRVVDGLGNPIDGKGALDKGIKRSRVEIKAPGIIPRKSVSEPMQTGLKSIDSLVPIGRGQRELIIGDRQTGKTAVAIDAIINQKKINESGDEKQKLYCVYVAIGQKRSTVRQIEKTLQEAGAME

SEQ ID NO: 173716 - protein, 268 aa, Unknown
  Bacterial polypetide isolated from the Sargasso Sea
TKEKWPIHRPSPKFTDQSTETEILVTGIKVIDLLAPYAKGGKIGLFGGAGVGKTVTIMELINNIAKAHGGFSVFAGVGERTREGNDLYHEMIESGVIKKDGKGSKAALVYGQMNEPPGARARVALTGLTVAEYFRDQEGQDVLFFVDNIFRFTQAGSEVSALLGRIPSAVGYQPTLATDMGNLQERITSTGKGSITSVQAIYVPADDLTDPAPATSFSHLDATTVLSRQIAELGIYPAVDPLDSTSRILDPRVVGDEHYRVAREVQRI

SEQ ID NO: 173717 - protein, 227 aa, Unknown
  Bacterial polypetide isolated from the Sargasso Sea
MSSGIVTQIIGAVIDVEFDKDNIPKVYEALMVDESGTTLEVQQQLGDGVVRTIAMGATEGLKRGLSASRTNAPISVPVGPETLGRIVDVLGNPIDEKGPIGEKSKMPIHRKPPTYTDQSASSEVLETGIKVIDLMCPFAKGGKIGLFGGAGVGKTVNMMELINNIALQHSGLSVFAGVGERTREGNDFYYEMQESGVVNIDNLGESKVAMVYGQMNEPPGNRLRVAL

SEQ ID NO: 173718 - protein, 299 aa, Unknown
  Bacterial polypetide isolated from the Sargasso Sea
KEGDTVKRTNSIVDVPVGKELLGRVVDGLGVPIDGKGSLSKKSLRKRVEVKAPGIIPRQSVNEPMQTGLKAIDSLIPIGRGQRELIIGDRQTGKTAVAVDTIINQKAINDSNDEKKKLYCVYVAIGQKRSTVAQIVKTLEDAGAMKYTTVVSATASDSAPLQFLAPYTGCTIGEYFRDNGMHALIIYDDLSKQAVAYRQMSLLLRRPPGREAYPGDVFYLHSRLLERAAKLNEKNGGGSLTALPIIETQAGDVSAYIPTNVISITDGQIFLETELFNQGIRPAVNVGLSVSRVGSAAQT

SEQ ID NO: 173719 - protein, 256 aa, Unknown
  Bacterial polypetide isolated from the Sargasso Sea
MVATPSTSSQTKGVVRQVIGPVLDVEFPAGKLPKILNALRIEAKNPAGQDIALTAEVQQLLGDHRVRAVAMSGTDGLVRGMEAIDTGAPISVPVGEATLGRIFNVLGEPVDEQGPVNTKDTAPIHRAAPKLTDLETKPKVFETGIKVIDLLAPYRQGGKVGLFGGAGVGKTVLIQELINNIAKEHGGVSVFGGVGERTREGNDLYEEFKESGVINADDLTQSKVALCFGQMNEPPGARMRVGLSALTMAEHFRDVN

SEQ ID NO: 173720 - protein, 302 aa, Unknown
  Bacterial polypetide isolated from the Sargasso Sea
DVTGNVIDGKGAVSADKEYPIHRSAPKHEDLSTSTEMLVTGIKVVDMMEPYTKGGKTGLFGGAGVGKTVLIQELIRNIATEHGGYSVFAGVGERTREGNDLYNEMTESGVIEKTTMVFGQMNEPPGARLRVALSGLTMAEYFRDDEGRDVLLFIDNIFRFTQAGSEVSALLGRMPSAVGYQPTLGTEMGDLQERITSTKNGSITSVQAVYVPADDLTDPAPATAFAHLDATSVLERKIAELGIYPAVDPLASTSRILDPRVIGDNHYNTAREVQNILQKYKDLQDIIAILGMDELSDDDKLS

SEQ ID NO: 173721 - protein, 184 aa, Unknown
  Bacterial polypetide isolated from the Sargasso Sea
MNKGIITQVIGAVVDVKFDGELPEILTALECKNGDSRLVLEVAQHLGETTVRTIAMDATEGLKRGDEVINTKAPIQVPVGPETLGRIINVIGEPIDERGKVQTKENWPIHRAAPEFNDQSTETEILVTGIKVIDLLAPYAKGGKIGLFGGAGVGKTVLIMELINNVAKAHGGFSVFAGVGERTR

SEQ ID NO: 173722 - protein, 301 aa, Unknown
  Bacterial polypetide isolated from the Sargasso Sea
ILNALRIEAKNPAGQEIALTAEVQQLLGDHRVRAVAMSGTDGLVRGMEAIDTGAPISVPVGEATLGRIFNVLGEPVDEQGPVNTKDTAPIHRAAPKLTDLETKPKVFETGIKVIDLLAPYRQGGKVGLFGGAGVGKTVLIQELINNIAKEHGGVSVFGGVGERTREGNDLYEEFKESGVINADDLTQSKVALCFGQMNEPPGARMRVGLSALTMAEHFRDVNKQDVLLFVDNIFRFVQAGSEVSALLGRMPSAVGYQPTLGTDVGELQERITSTLEGSITSIQAVYVPADDLTDPAPATTL

SEQ ID NO: 173723 - protein, 224 aa, Unknown
  Bacterial polypetide isolated from the Sargasso Sea
MASLDDLKKRIASVKSTQKITKAMKMVAAAKLRRAQESAEKGRPYSEKMNNVILNLSNGISDKENAPKLLSGTGQEKTHLCVVMTSDRGLCGGFNSNIIKKAKNYFAKILNEGKELKIITVGSKGNDQLKRVYGDKIIENISFKESKNANYFDADKVGKMVIEKFEAGEFDVCTIFYNQFKNVITQIPQAQQIIPLNNEGEESSSEESYEFEPDEDEILSNLLP

SEQ ID NO: 173724 - protein, 286 aa, Unknown
  Bacterial polypetide isolated from the Sargasso Sea
MTALECNNSGNRLVLEVAQHLGESSVRTIAMDATEGLKRGDEVTDTGAPIKIPVGPETLGRIINVIGEPIDEKGEIKPTDNWPIHRSAPEFNDQSTETEVLVTGIKVIDLLAPYAKGGKIGLFGGAGVGKTVLIMELINNVAKAHGGFSVFAGVGERTREGNDLYHEMIESGVIKPNESGSKAALVYGQMNEPPGARARVALTGLTVAEYFRDKEGQDVLFFVDNIFRFTQAGSEVSALLGRIPSAVGYQPTLATDMGNLQERITTTNKGSITSVQAIYVPADDLT

SEQ ID NO: 173725 - protein, 189 aa, Unknown
  Bacterial polypetide isolated from the Sargasso Sea
MKIRAEEISNIIQQQIENFEKQTTKTEVGTVLEVGDGIARVYGLDNIVAGELVEFPNNLQGMALNLEEDNVGVVLFGDDRNIKEGDEARRTERIAEVPVGDAMLGRVVDPLGQPIDGKGPIETSESRRVEVIAPGIVTRKSVHEPLQTGLKAIDSMVPIGRGQRELIIGDRQTGKTAIAMDTIINQKGG

SEQ ID NO: 173726 - protein, 247 aa, Unknown
  Bacterial polypetide isolated from the Sargasso Sea
MEIKAAEISSVIKDQIANFETKADVAEVGTVLSVGDGIARVYGLDQVQAGEMVEFPGGIKGMALNLEMDNVGVSIFGDDTGIKEGDTVKRTGEIVDVPVGKELLGRVVDGLGNPIDGKGPIQSSEKRRIELKAPGIIPRQSVSEPMQTGIKALDALVPVGRGQRELIIGDRQTGKTAVAIDTILNQKSVNQSNNEKEKLYCIYVAIGQKRSTVAQIVKTLEDNGAMEYTIVVSATASEPAPLQFLSA

SEQ ID NO: 173727 - protein, 266 aa, Unknown
  Bacterial polypetide isolated from the Sargasso Sea
TWSKAALVYGQMNEPPGARARVALTGLTVAEYFRDQEGQDVLFFVDNIFRFTQAGSEVSALLGRIPSAVGYQPTLATDMGNLQERITTTNKGSITSVQAIYVPADDLTDPAPATSFAHLDATTVLSRQIAEIGIYPAVDPLDSTSRILDPRIVGDEHYRVAREVQKILQTYKSLQDIIAILGMDELSEEDKLVVARARKIQRFLSQPFFVAEVFTGSPGKLVDLESTIKGFDAICKGEYDHLPEAAFYMVGTIEEAIEKAEKMYKD

SEQ ID NO: 173728 - protein, 271 aa, Unknown
  Bacterial polypetide isolated from the Sargasso Sea
GPETLGRIMNVVGEPVDERGDIGTTKSYPIHRPAPEFVDQSTETEVLVTGIKVVDLLAPYARGGKIGLFGGAGVGKTVLIMELINNIAKAHGGYSVFAGVGERTREGNDLYHEMIESGIIDLKGKDSKVALVYGQMNEPPGARARVALSGLTQAEYFRDEEGQDVLFFVDNIFRFTQAGSEVSALLGRIPSAVGYQPTLATDMGALQERITTTKKGSITSVQAIYVPADDLTDPAPATSFSHLDATTVLNRAISEKGIYPAVDPLDSTSRI

SEQ ID NO: 173729 - protein, 129 aa, Unknown
  Bacterial polypetide isolated from the Sargasso Sea
MASLDDLKKRIASVKSTQKITKAMKMVAAAKLRRAQESAEKGRPYSEKMNNVILNLSNGISDKENAPKLLSGTGQEKTHLCVVMTSDRGLCGGFNSNIIKKAKSYFVKILDEGKELKIITVGSKGKTNK

SEQ ID NO: 173730 - protein, 166 aa, Unknown
  Bacterial polypetide isolated from the Sargasso Sea
NYRRTIFLETELFNQGIRPAINVGLSVSRVGSSAQTKAMKKVSGSMKLELAQYREMAAFAQFGSDLDASTQQLLNRGSKLTELLKQKQYSPMTVAEQVISVFCGVKGYLDDIDLKDVAEFESKIIEKCKSDKPEIIESILSSGKLEEDKEKLLVEVITQLKGNFKS

SEQ ID NO: 173731 - protein, 286 aa, Unknown
  Bacterial polypetide isolated from the Sargasso Sea
NDLYHEMIESGVIKPEGDGSKAALVYGQMNEPPGARARVALSGLTVAEYFRDQEGQDVLFFVDNIFRFTQAGSEVSALLGRIPSAVGYQPTLATDMGNLQERITTTNKGSITSVQAIYVPADDLTDPAPATSFSHLDATTVLSRQIAEIGIYPAVDPLDSTSRILDPRIVGDEHYRVAREVQKVLQTYKSLQDIIAILGMDELSEEDKLIVARARKIQRFLSQPFFVAEVFTGSPGKLVDLESTIKGFDSICKGEYDHLPEAAFYMVGTIEEAVEKAEKMAKEAAA

SEQ ID NO: 173732 - protein, 170 aa, Unknown
  Bacterial polypetide isolated from the Sargasso Sea
YKCISITDGQIFLETKLFNQGIRPAVNVGLSVSRVGSAAQTKAMKKVAGSIKLELAQYREMAAFAQFGSDLDAATQKLLNRGSKLTELLKQNQYSPMTVGEQVIAVFSGVKGFLDDVELSKIKDFEKNLYELIKSSNPEIIDTINSTGKLDEEIEKKLKSAIEKFKQTNK

SEQ ID NO: 173733 - protein, 162 aa, Unknown
  Bacterial polypetide isolated from the Sargasso Sea
MPSLDDLKKRISSVKSTQKITKAMKMVASAKLRKAQENAEKGRPFSEKMNNIILNLSNAIADKDSASKLLIGTGKNNVHLCVVITADRGLCGGFNTNICRKAKSYFENILKEGKTLKIFTVGSKGHDQLKRAYGQYIIEKINYKNVKKLTYKEAEDVAKKII

SEQ ID NO: 173734 - protein, 290 aa, Unknown
  Bacterial polypetide isolated from the Sargasso Sea
VHEPVQTGLKAIDSLIPVGRGQRELIIGDRQTGKTAVIIDTILNQKAVNEGDNESEKLYCVYVAVGQKRSTVAQLVKTLEDNDAMKYSIVVAATASEPAPLQFLAPYTGCTMGEYFRDNSMHACIFYDDLSKQAVAYRQMSLLLRRPPGREAYPGDVFYLHSRLLERAAKMGDNAGNGSLTALPVIETQAGDVSAYIPTNVISITDGQIFLETELFYKGIRPAVNVGLSVSRVGSAAQVKAMKQVAGSIKLELAQYREMAAFAQFASDLDASTQRLLARGARLTELLKQP

SEQ ID NO: 173735 - protein, 272 aa, Unknown
  Bacterial polypetide isolated from the Sargasso Sea
MSKGIITQVIGAVVDVKFDGELPEILTALECKNGDNRLVLEVAQHLGESTARTIAMDATEGLKRGDEVVNTKAPIKVPVGPETLGRIINVVGEPIDERGEVKTKENWPIHRAAPEFNDQSTETEILVTGIKVIDLLAPYAKGGKIGLFGGAGVGKTVLIMELINNVAKAHGGFSVFAGVGERTREGNDLYHEMMESGVIKSDGPGSKAALVYGQMNEPPGARARVALTGLTVAEYFRDQEGQDVLFFVDNIFRFTPAGSEVSALLGRIPSAV

SEQ ID NO: 173736 - protein, 184 aa, Unknown
  Bacterial polypetide isolated from the Sargasso Sea
SKHKGGDVSAFIPTNVISITDGQIFLETELFNQGIRPAINVGLSVSRVGSSAQTKAMKKVSGSMKLELAQYREMAAFAQFGSDLDASTQQLLNRGSKLTELLKQKQYSPMTVAEQVISVFCGVKGYLDDIDLKDVAEFESKIIEKCKSDKPEIIESILSSGKLEEDKEKLLVEVITQLKGNFKS

SEQ ID NO: 173737 - protein, 194 aa, Unknown
  Bacterial polypetide isolated from the Sargasso Sea
SLGTKKMENDPKGLQNLLEFLWDYIRDLARTQIGEKVYRDWMPFIGTLFLFVFVSNWGGALIPWRLIKLPSGELGAPTADINTTIALALLVSLSYFYAGLSNKGWRYFEYYVHPTPIMLPFKILEDFTKPLSLSFRLFGNILADELVVGVLVFLVPLVLPIPVMFLGLFTSAIQALIFATLAAYYIGEAVEEHH

SEQ ID NO: 173738 - protein, 248 aa, Unknown
  Bacterial polypetide isolated from the Sargasso Sea
MSQLNPSEISSVLKEKISGLDLSAERKNEGIIVSVSDGIIRIHGMGDVMYGELIEFENGVLGLALNLEQDSVGAVVLGDYLGIIEGQKAVCTGKILEVPVGEELLGRVVDALGNPIDGKGEIKTKSSAPVEVVAPGVIARQSVDQPVQIGLKAVDAMVPIGRGQRELIIGDRQTGKTAVAVDAIINQKGTGIKCIYVAIGQKQSTVVNVVKKLEEHGALEHTIIVSASASDPAPMQYLSAYSGCSMGE

SEQ ID NO: 173739 - protein, 132 aa, Unknown
  Bacterial polypetide isolated from the Sargasso Sea
MAEKGKISQVMGAVVDVVFEQGHLPDIYNALTVDRGEEGQLVLEVAQHLGDSAVRTVAMDSTDGLVRGIDVVDSGIPISVPVGPETLGRLFDVLGSTIDNKGDVKTEKVNPIHRPAPGMKILLLLLKFSLLE

SEQ ID NO: 173740 - protein, 251 aa, Unknown
  Bacterial polypetide isolated from the Sargasso Sea
MIEFPGDTFGLALNLEQDSVGAVVLGDYTHISEGAQVKTTNRILEVPVGEGLLGRVVDSLGTPLDGKGAVSSDQTAPIEKVAPGVISRQSVDQPVQTGLKSIDAMVPIGRGQRELIIGDRQTGKTAVAVDTIINQKGTGIKCIYVAVGQKNSSVANVVKKLEEEGALEHTIIVNAAASDSAAMQYIAPYSGCAMGEYFRDKGEDALIIFDDLTKQAWAYRQVSLLLKRPPGREAYPGDVFYLHSRLLERAA

SEQ ID NO: 173741 - protein, 98 aa, Unknown
  Bacterial polypetide isolated from the Sargasso Sea
KSLQDIIAILGMDELSEADKLTVARARKIQRFLSQPFFVAEVFTGTPGKLVNLDSTIKGFDAICKGDYDHLPEAAFYMVGTIEEAVAKAEKMAKEAAA

SEQ ID NO: 173742 - protein, 235 aa, Unknown
  Bacterial polypetide isolated from the Sargasso Sea
MEINPSEVTKILKEQINKFGDKAEVSEVGQVLSVGDGIARIYGLDNVQAGEMVEFSDGSKGMALNLESDNVGVVIFGDDKAVKEGDTVKRTGAIVDTPVGKELLGRVVDGLGNPIDGKGALDKGVKKSRVEVKAPGIIPRRSVSEPMQTGLKSIDSLVPIGRGQRELIIGDRQTGKTAVAIDAIINQKKINESNDEKQKLYCVYVAIGQKRSTVRQIEKTLEEAGAMEYTTIVQL

SEQ ID NO: 173743 - protein, 124 aa, Unknown
  Bacterial polypetide isolated from the Sargasso Sea
SRILDPRIVGDEHYRVAREVQKVLQTYKSLQDIIAILGMDELSEEDKLIVARARKIQRFLSQPFFVAEVFTGSPGKLVDLESTIKGFDAICKGEYDNLPEAAFYMVGTIEEAIEKAEKLAKDAA

SEQ ID NO: 173744 - protein, 188 aa, Unknown
  Bacterial polypetide isolated from the Sargasso Sea
MASLDDLKKRIASVKSTQKITKAMKMVAAAKLRRAQESAEKGRPYSEKMNNIILNLSNGISDKENAPKLLSGSGNNKIHLCVVMTSDRGLCGGFNSNIIKKAKSYFTKLSKDGKDLKIITVGSKGNDQLKRIYGDKIIANISFKESKHANYFDAEKVSKMIIEKIEAEGVDVCTIFYNQFKNVITQIP

SEQ ID NO: 173745 - protein, 125 aa, Unknown
  Bacterial polypetide isolated from the Sargasso Sea
VSGSMKLELAQYIEMAAFAQFGSDLDASTQQLLNRGSKLTELLKQKQFSPMTVAEQVISVFCGVKGYLDDIELKDIAEFENKIIEKCKTDKPEIIDSIQSSGKIEDDKEKLLVEVIIQLKENLKS

SEQ ID NO: 173746 - protein, 200 aa, Unknown
  Bacterial polypetide isolated from the Sargasso Sea
MAKKTPNITGKISQVIGAVVDVEFNGDLPPILNALEIDNEGNKLILEVAQHLGENEVRTIAMDTTDGLVRGMEVKDTGAPITVPVGPETLGRILNVIGEPVDDGKPVKSKQTLPIHRDAPEYIDQSTEAEILETGIKVVDLLAPYAKGGKIGLFGGAGVGKTVLIMELINNVAKAHGGYSVFAGVGERTREGNDLYHEMV

SEQ ID NO: 173747 - protein, 88 aa, Unknown
  Bacterial polypetide isolated from the Sargasso Sea
NQVSSVYEYEPSEEVILEELLNKNIATQLFSAQMESTASELAARMTAMDNATRNAGDLIDRLTLQYNRTRQAFITKELIEIISGAEAL

SEQ ID NO: 173748 - protein, 68 aa, Unknown
  Bacterial polypetide isolated from the Sargasso Sea
HVMAGELLEFEDGTEGIALNLEDDNVGAVLMGEALGVQEGSNVKSTGKIASVPVGEAMQGRVVNPLGQ

SEQ ID NO: 173749 - protein, 175 aa, Unknown
  Bacterial polypetide isolated from the Sargasso Sea
GDGIARVYGLSGVMAGEMVEFPGGIIGLAFNLEEDSVGVIILGDYLSINQGDEVKSLGKLLSVPVGDATMGRVVDPLGNPLDGKGPINVTETRPVEIIAPGVSERQPVCEPMQTGIKAVDAMTPIGRGQRELIIGDRKTGKTAIAVDAILNQKNTGVKCFYVAVGQKDSSVAQVI

SEQ ID NO: 173750 - protein, 278 aa, Unknown
  Bacterial polypetide isolated from the Sargasso Sea
MEIKAAEISSVIKDQIANFETKADVAEVGTVLSVGDGIARVYGLDKVQAGEMVEFPGGIKGMALNLEMDNVGVSIFGDDTGIKEGDTVKRTGEIVDVPVGKELLGRVVDGLGNPIDGKGPIQSSEKRRIELKAPGIIPRQSVSEPMQTGIKALDALVPVGRGQRELIIGDRQTGKTAVAIDTILNQKSVNQSNNEKEKLYCIYVAIGQKRSTVAQIVKTLEDNGAMEYTIVVSATASEPAPLQFLSAYTGCTMGEYFRDNGMHALIVYDDLSKQSCCL

SEQ ID NO: 173751 - protein, 230 aa, Unknown
  Bacterial polypetide isolated from the Sargasso Sea
MSLLLRRPPGREAYPGDVFYLHSRLLERAAKLSEDHGGGSLTALPIIETQGGDVSAFIPTNVISITDGQIFLETELFNQGIRPAINVGLSVSRVGSSAQTKAMKKVSGSMKLELAQYREMAAFAQFGSDLDASTQKLLNRGSKLTELLKQKQYSPMTVAEQVISVFCGVKGFLDDIEQKNIAEFENKIIEKCKSEKPEIIESIISSGKLEEDTEKSLIEIIDELKKSYKK

SEQ ID NO: 173752 - protein, 168 aa, Unknown
  Bacterial polypetide isolated from the Sargasso Sea
MNPSEVTKLLKDQIKNFGEKAEVSEIGKVLSVGDGIARVYGLDNVQAGEMVEFEDGSKGMALNLENDNVGVVIFGDDRKIKEGDTIKRTNAIVDVPVGKELLGRVVDGLGNPIDGKGVISSKVRKRVEVKAPGIIPRQSVSEPMQTGLKSIDSLIPVGRGQRELIIGD

SEQ ID NO: 173753 - protein, 270 aa, Unknown
  Bacterial polypetide isolated from the Sargasso Sea
MRKGQITQIIGAVVDVKFEGELPEILTALECDNGGNRLVLEVAQHLGESSVRTIAMDATEGLKRGDEVTDTAAPIKVPVGPETLGRIINVIGEPIDERGEVKSSDNWPIHRAAPEFNDQSTETEILVTGIKVIDLLAPYAKGGKIGLFGGAGVGKTVLIMELINNVAKAHGGFSVFAGVGERTREGNDLYHEMIDSGVIKTDGEGSKAALVYGQMNEPPGARARVALTGLTVAEYFRDQEGQDVLFFVDNIFRFTQAGSEVSALLGRIPS

SEQ ID NO: 173754 - protein, 214 aa, Unknown
  Bacterial polypetide isolated from the Sargasso Sea
TYSILHSRLLERSAKLNEDNGSGSLTACPIIETQGGDVSAFIPTNVISITDGQIFLETELFYQGIRPAVNTGLSVSRVGSSAQTKSMKSVAGSIKLELAQYREMAAFAQFGSDLDASTQALLNRGARLTELLKQPQYSPLTNAEQVIVIYAGTKGYLDKTPVNEVTSFEKNLVSYLRSEGKAVVDELTSHDQKIDGEIESKIKSLLDNFLNTQI

SEQ ID NO: 173755 - protein, 198 aa, Unknown
  Bacterial polypetide isolated from the Sargasso Sea
DNGGGSLTALPIIETQAGDVSAYIPTNVISITDGQIFLETELFNQGIRPAVNVGLSVSRVGSAAQTKAMKKVAGSIKLELAQYREMAAFAQFGSDLDASTQKLLNRGSKLTELLKQDQYSPMTVAEQVVSVYSGVKGYLDTIENNKIRSFEKGLLDLIKNEKPEILESIQKSGKIEEDTEKLLTEIITSYKKSNFDKK

SEQ ID NO: 173756 - protein, 258 aa, Unknown
  Bacterial polypetide isolated from the Sargasso Sea
NCFSFWSMNEPPGARLRVGLSALTMAEYFRDDEGRDVLLFVDNIFRFTQAGSEVSALLGRMPSAVGYQPTLSTEMGDLQERITSTKKGSITSVQAIYVPADDLTDPAPATAFAHLDATSVLERKIAELGIYPAIDPLTSTSRILDPRVIGDRHYNVARSVQATLQQYKDLQDIIAILGMDELSDEDKMVVSRARKMQKFMSQPFFVAEQFTGIEGRYVKLEDSIAGFEAILNGEVDDLPENAFSYVGSIDEAIEKGKK

SEQ ID NO: 173757 - protein, 247 aa, Unknown
  Bacterial polypetide isolated from the Sargasso Sea
LQHSGLSVFAGVGERTREGNDFYYEMQESGVVNIDNLGESKVAMVYGQMNEPPGNRLRVALTGLTMAESFRDEGKDVLLFIDNIYRYTLAGVEVSALLGRMPSAVGYQPTLAEEMGALQERITSTKTGSITSIQAVYVPADDLTDPSPATTFAHLDATVVLSRQISELGIYPAVDPLDSTSRQLDPFVVGDDHYEVAQGVQKILQRYNELKDIIAILGMDELSEEDKGLVARARKAQRFLSQPFFVA

SEQ ID NO: 173758 - protein, 283 aa, Unknown
  Bacterial polypetide isolated from the Sargasso Sea
ELINNIAKAHGGFSVFAGVGERTREGNDLYHEMIESGVIKTNGKGSKAALVYGQMNEPPGARARVALTGLTVAEYFRDKEGQDVLFFVDNIFRFTQAGSEVSALLGRIPSAVGYQPTLATDMGNLQERITSTDKGSITSVQAIYVPADDLTDPAPATSFSHLDATTVLSRQIAEIGIYPAVDPLDSTSRILDPRIVGEEHYRVARDVQRILQAYKSLQDIIAILGMDELSEEDKLTVARARKIQRFLSQPFFVAEVFTGSPGKLVDLDSTIKGFDAICKGEYD

SEQ ID NO: 173759 - protein, 309 aa, Unknown
  Bacterial polypetide isolated from the Sargasso Sea
WRLPNILGENDVRTIAMDATEGLKRGDEVINTGSPISVPVGPETLGRIINVVGESIDEKGDVKTKEKWPIHRSAPKFTDQATETEQLVTGIKVVDLLAPYAKGGKIGLFGGAGVGKTVTIMELINNIAKAHGGFSVFAGVGERTREGNDLYHEMIESGVIKTEGKGSKAALVYGQMNEPPGARARVALTGLTVAEYFRDKEGQDVLFFIDNIFRFTQAGSEVSALLGRIPSAVGYQPTLATDMGNLQERITSTDKGSITSVQAIYVPADDLTDPAPATSFSHLDATTVLSRQIAEIGIYPAVDPLDSTS

SEQ ID NO: 173760 - protein, 165 aa, Unknown
  Bacterial polypetide isolated from the Sargasso Sea
MTDNIGKIKQILGAVVDVSFVEKLPQILDALVVKHENKDLVLEVAQHLGENTVRTIAMDSTDGLVRGQDVLDTGNPISVPVGPETLGRILNVIGEPVDERGQLKTKLRSPIHKSAPEFIDQSTETEVLVTGIKVVDLLAPYAKGVKNRSFWWCRRGQDCINNGTY

SEQ ID NO: 173761 - protein, 50 aa, Unknown
  Bacterial polypetide isolated from the Sargasso Sea
MELINNIAKGHGGYSVFAGVGERTREGNDLYHEMIESGVIKLDSDESKAA

SEQ ID NO: 173762 - protein, 278 aa, Unknown
  Bacterial polypetide isolated from the Sargasso Sea
ALECNNSGNRLVLEVAQHLGESSVRTIAMDATEGLKRGNEVMDTGAPIKVPVGPETLGRIINVIGEPIDEKGKVETKENWPIHRSAPEFNDQSTETEILVTGIKVVDLLAPYAKGGKIGLFGGAGVGKTVLIMELINNVAKAHGGFSVFAGVGERTREGNDLYHEMIESGVIKPEGSGSKAALVYGQMNEPPGARARVALSGLTVAEYFRDQEGQDVLFFVDNIFRFTQAGSEVSALLGRIPSAVGYQPTLATDMGNLQERITTTNKGSITSVQAIYV

SEQ ID NO: 173763 - protein, 280 aa, Unknown
  Bacterial polypetide isolated from the Sargasso Sea
GAVVDVEFPKEAIPSVYDALTLKDGELVFEVQQQLGDGIVRTIAMGASEGLKRGLEVENTGAPISVPVGQETLGRVLDVLGNPIDEKGPVGAKANRPIHAKAPTFEEQSTEADVLETGIKVIDLLCPFAKGGKVGLFGGAGVGKTVTVMELIRNIAAEHDGFSVFAGVGERTREGNDFYHEMMESNVLDKVALVYGQMNEPPGNRLRVALTGLTIAENFRDEGRDVLMFIDNIYRYTLAGTEVSALLGRMPSAVGYQPNLAEEMGVLQERITSTKTGSIT

SEQ ID NO: 173764 - protein, 171 aa, Unknown
  Bacterial polypetide isolated from the Sargasso Sea
MKIRAEEISNIIQQQIENFEKQTTKTEVGTVLEVGDGIARVYGLDNIVAGELVEFPNNLQGMALNLEEDNVGVVLFGDDRNIKEGDEARRTERIAEVPVGDAMLGRVVDPLGQPIDGKGPIETSESRRVEVIAPGIVTRKSVHEPLQTGLKAIDSMVPIGRGQRELIIGDR

SEQ ID NO: 173765 - protein, 315 aa, Unknown
  Bacterial polypetide isolated from the Sargasso Sea
NRLVLEVAQHLGETTVRTIAMDATEGLKRGDEVINTNAPIQVPVGPETLGRIINVIGEPIDERGKVKTKESWPIHRAAPEFNDQSTETEILVTGIKVIDLLAPYAKGGKIGLFGGAGVGKTVLIMELINNVAKAHGGFSVFAGVGERTREGNDLYHEMMDSGVIKKDGPGSKAALVYGQMNEPPGARARVALTGLTVAEYFRDQEGQDVLFFVDNIFRFTQAGSEVSALLGRIPSAVGYQPTLATDMGNLQERITTTNKGSITSVQAIYVPADDLTDPAPATSFAHLDATTVLSRQIAEIGIYPAVDPLDSTSRI

SEQ ID NO: 173766 - protein, 176 aa, Unknown
  Bacterial polypetide isolated from the Sargasso Sea
MAKNVGKITQVIGAVVDVQFDEKLPEILNALETDNNGINVILEVAQHLGENTVRTIAMDSTEGLVRGNQVVDTEGPISVPVGNPTLGRILNVVGTPVDEKGEVKSTESRPIHRDAPEFSEQATETEILVTGIKVVDLLAPYSKGGKIGLFGGAGVGKTVLIMELINNIAKVHSGFS

SEQ ID NO: 173767 - protein, 254 aa, Unknown
  Bacterial polypetide isolated from the Sargasso Sea
MPSLDDLKKRIKSVKSTQKITKAMKMVAAAKLRKAQENAEKGRPYSQKMQNIILNLTKSISDPDNAPKLLVGTGKDKSYLCVVLTADRGLCGGFNTNICKLAKTNFKKILNEQKDLKIITVGSKGLDQIKRDFGKYVIKKFSFKDKKNITFAEAEIIGTEIIKLFKDNQFDKCLLFYNNFKNVITQIPQVQQIIPAQNEDSKDENESNFSYEFEPDEDEILEELLPKNISTQVFKAFLENAASEQGSRMTAMDN

SEQ ID NO: 173768 - protein, 252 aa, Unknown
  Bacterial polypetide isolated from the Sargasso Sea
MKKGKITQIIGAVVDVKFEGDLPEILTALECKNGNNRLVLEVAQHLGESSVRTIAMDATEGLKRGDEVTDTGAPIKVPVGPETLGRIVNVIGEPIDEKGEIKTKENWPIHRAAPEFNDQSTETEILVTGIKVVDLLAPYAKGGKIGLFGGAGVGKTVIIMELINNIAKAHGGFSVFAGVGERTREGNDLYHEMIESGVIKPEGPGSKAALVYGQMNEPPGARARVALSGLTVAEYFRDQEGQDVLFFVDNIF

SEQ ID NO: 173769 - protein, 194 aa, Unknown
  Bacterial polypetide isolated from the Sargasso Sea
MASLDDLKKRISSVKSTQKITKAMKMVAASKLRRAQESAEKGRPYSDKMNNIILNLSNSISDKENSPKLLSGSGEDKVHLCIVMTSDRGLCGGFNTNIIKKAKVYFQKILDEGKNLKIITVGSKGYDQLKRTYKDNIIEKISFKESKHANYFDADKVGKIIIDRFEKKEFDVCTIFYNQFKNVITQIPQEQQII

SEQ ID NO: 173770 - protein, 294 aa, Unknown
  Bacterial polypetide isolated from the Sargasso Sea
MAMGQTEGLQRGAKVSNTGDAVKVPVGEKTLGRILNVLGEPIDGKGDVGAEEQMPIHRAPPSYEDQAESSEILETGIKVIDLMCPFAKGGKVGLFGGAGVGKTVNMMELIRNIAYETSGYSVFAGVGERTREGNDFYLEMTESQVLDKVALVYGQMNEPPGCRMRVALSGLTIAEKFRDEGKDVLLFVDNIYRYTLAGVECSSLLGRMPSAVGYQPTLAEEMGVLQERITSTKTGSITSVQAIYVPADDLTDPSPATTFAHLDATVVLSRQIASLGIYPAVDPLDSTSRQLIQP

SEQ ID NO: 173771 - protein, 245 aa, Unknown
  Bacterial polypetide isolated from the Sargasso Sea
LASLASSASSGEGIIKLLTGTGNDQNYIVVPVSADRGLCGGFNSSINRETFKLVKSLEGDGKNVQIMPVGKKSRDFFNRVMKDQITESFVDLNISNTGYESALQVSNKLQELYFEGKFDKCILVFNKFKSAISQEVTQQQLIPLDVSESSNEDNINDSAAKAIYDYEPDEETILKDLLPKNVSIQIFKVLLESDAGEHGARMAAMDNATRNAGEMIDSLTLKYNRTRQAFITKELIEIISGAESI

SEQ ID NO: 173772 - protein, 219 aa, Unknown
  Bacterial polypetide isolated from the Sargasso Sea
REAYPGDVFYLHSRLLERAAKLNEKEGGGSLTALPIIETQAGDVSAYIPTNVISITDGQIFLETELFNQGIRPAVNVGLSVSRVGSAAQTKAMKKVAGSIKLELAQYREMAAFAQFGSDLDASTQKLLNRGAKLTELLKQDQYSPMTVAEQVISVFTGVKGYLDDVDLNKIKKFEKDIVDKIKSEKPEIIEAVQSSGKLEENIEKLLSQIIEEYKKGKK

SEQ ID NO: 173773 - protein, 219 aa, Unknown
  Bacterial polypetide isolated from the Sargasso Sea
HLGENTVRTIAMDATEGLQRGQEVQDNGDPISVPVGPETLGRIMNIIGEPIDERGPIESKKSLPIHRAAPDFVDQSTETEVLVTGIKVIDLLAPYSKGGKIGLFGGAGVGKTVLIMELINNVAKAHGGYSVFAGVGERTREGNDLYHEMIESGVINLEGDTSKVSLVYGQMNEPPGARARVALSGLTQAEYFRDEENQDVLFFVDNIFRFTQAGSEVSA

SEQ ID NO: 173774 - protein, 252 aa, Unknown
  Bacterial polypetide isolated from the Sargasso Sea
MEINPSEVTKILKEQIKQFGDKAEVSEVGQVLSVGDGIARIYGLDNVQAGEMVEFSDGSKGMALNLESENVGVVIFGDDRAVKEGDTVKRTGAIVDTPVGKELLGRVVDGLGNPIDGKGALDKGIKKSRVEVKAPGIIPRKSVSEPMQTGLKSIDSLVPIGRGQRELIIGDRQTGKTAVAIDAIINQKKINESGDEKQKLYCIYVAIGQKRSTVRQIEKTLEEAGAMEYTTIVAATASDAAPLQFLAPYTGC

SEQ ID NO: 173775 - protein, 243 aa, Unknown
  Bacterial polypetide isolated from the Sargasso Sea
MASLDDLKKRISSVKSTQKITKAMKMVAAAKLRRAQESAERGRPYSEKMNNIILNLSSGVSDKENAPKLLSGTGDDKVHLCVVLTADRGLCGGFNSNIIKKAKSYFQKISDTGKTLKIITVGSKGYDQLKRLYQDKIIENISFKESKNANYFDADKVGKIIIEKFENNEFDVCTIFYNQFKNVITQIAQEQQIIPLKTEEKDNKSSEENYEFEPDEDEILGNLLPKNISTQIFKAMLENSASE

SEQ ID NO: 173776 - protein, 263 aa, Unknown
  Bacterial polypetide isolated from the Sargasso Sea
ALVYGQMNEPPGARARVALTGLTVAEYFRDKEGQDVLFFVDNIFRFTQAGSEVSALLGRIPSAVGYQPTLATDMGNLQERITSTDKGSITSVQAIYVPADDLTDPAPATSFSHLDATTVLSRQIAEIGIYPAVDPLDSTSRILDPRIVGEEHYRVARDVQRILQAYKSLQDIIAILGMDELSEEDKLTVARARKIQRFLSQPFFVAEVFTGSPGKLVDLESTIKGFDSICKGEYDHLPEAAFYMVGGIEEVVEKANKLDKETK

SEQ ID NO: 173777 - protein, 216 aa, Unknown
  Bacterial polypetide isolated from the Sargasso Sea
MPSLDDLKKRIKSVKSTQKITKAMKMVAAAKLRKAQENAEKGRPYSQKMQNIILNLTKSMSDPQNAPKLLVGTGKDSTYLCVVLTADRGLCGGFNSNICKLAKTNFKKILNEGKELKIITVGTKGLDQIRREYGKNIIKKFSFKNKKQITFNEAEIIGAEIIDLFKKNEFDKCILFYNNFKNVITQIPQAQQIIPAENNSYKQKEENPTSYELNPR

SEQ ID NO: 173778 - protein, 196 aa, Unknown
  Bacterial polypetide isolated from the Sargasso Sea
MSTKINPSEISSIIKKKIEDYKGATSESNVGEVLSTADGIVQIFGLEDAMYGELLDFGEGTYGLALNLENDSVGAVVLGDAGHIKEGQKVKTTGRILEVPVGEGLKGRVIDALGRPIDGKGEVKSETNAPIEVVAPGVIDRQGVDQPVQTGIKSIDVMVPIGRGQRELIIGDRQTGKTAIAVDAIIKQKDSDITCV

SEQ ID NO: 173779 - protein, 222 aa, Unknown
  Bacterial polypetide isolated from the Sargasso Sea
MSQLNPSEISSVLKEKIAGLDLSAERKNEGVIVSVSDGIVRIHGMGEVMYGELIEFENGVFGLALNLEQDSVGAVVLGDYLDLIEGQKATCTGKILEVPVGNELLGRVVDALGNPIDGGGEINASLTAPVEVVAPGVIARQSVDQPVQTGLKAIDAMVPIGRGQRELIIGDRQTGKTAVAIDTIINQKGTGIKCIYVAIGQKQSTIANVVRKLEEYDALAHT

SEQ ID NO: 173780 - protein, 223 aa, Unknown
  Bacterial polypetide isolated from the Sargasso Sea
QSTETEILVTGIKVIDLLAPYAKGGKIGLFGGCWVGKTVLIMELINNVAKAHGGFSVFAGVGERTREGNDLYHEMIESGVIKQDGPGSKAALVYGQMNEPPGARARVALTGLTVAEYFRDQEGQDVLFFVDNIFRFTQAGSEVSALLGRIPSAVGYQPTLATDMGNLQERITTTNKGSITSVQAIYVPADDLTDPAPATSFAHLDATTVLSRQIAEIGIYPAV

SEQ ID NO: 173781 - protein, 149 aa, Unknown
  Bacterial polypetide isolated from the Sargasso Sea
DATTVLNRAISEKGIYPAVDPLDSNSRILDPQVVGDDHYRVAREVQKILQTYKSLQDIIAILGMDELSEEDKLTVARARKIEKFLSQPFFVAEVFTGSPGKYVELEETIKSFDGVVKGEYDHLPEAAFYMVGGIDEAIEKAKKLEAEAA

SEQ ID NO: 173782 - protein, 275 aa, Unknown
  Bacterial polypetide isolated from the Sargasso Sea
ASDSAPLQFLAPYTGCTMGEYFRDNGMHALIIYDDLSKQAVAYRQMSLLLRRPPGREAYPGDVFYLHSRLLERAAKLSDEHGGGSLTALPIIETQGGDVSAFIPTNVISITDGQIFLETELFNQGIRPAINVGLSVSRVGSSAQTKAMKKVSGSMKLELAQYREMAAFAQFGSDLDASTQQLLNRGSKLTELLKQKQYSPMTVAEQVISVFCGVKGYLDDIDLKDVAEFESKIIEKCKSDKPEIIESILTSGKLEEDKEKLLVEVITQLKGNFKS

SEQ ID NO: 173783 - protein, 255 aa, Unknown
  Bacterial polypetide isolated from the Sargasso Sea
MENTGKITQIIGAVVDVNFKGNLPEIYTALEANNSGNKLILEVAQHLGENDVRTIAMDATEGLKRGDNVVNTGSPISVPVGPETLGRIINVVGDSIDEKGEVKTKEKWPIHRPAPKFTDQATETEQLVTGIKVIDLLAPYAKGGKIGLFGGAGVGKTVTIMELINNIAKAHGGFSVFAGVGERTREGNDLYHEMIESGVIKTEGKGSKAALVYGQMNEPPGARARVALTGLTVAEYFRDKEGQDVLFFVDNIFRF

SEQ ID NO: 173784 - protein, 276 aa, Unknown
  Bacterial polypetide isolated from the Sargasso Sea
QEVVVEVKAPGIMPRKGVHEPMQTGLKAIDSLIPVGRGQRELIIGDRQTGKTAIAIDAFINQKSVNDAAGDDDSKKLFCIYVAVGQKRSTVAQIVKTLEDYGAMEYSIVIASTASEPAPMQFLAPYAGCTMGEYFRDNGMHALIVYDDLSKQAVAYRQMSLLLRRPPGREAYPGDVFYIHSRLLERAAKMNDENGAGSLTALPVIETQAGDVSAYIPTNVISITDGQIFLETELFYRGIRPAVNVGLSVSRVGSAAQIKAMKQVAGRIKLELAQYR

SEQ ID NO: 173785 - protein, 236 aa, Unknown
  Bacterial polypetide isolated from the Sargasso Sea
MTALKTEQNIGRITQIIGPVIDAVFPPNKMPNIYNSVVIEGKNEVGDPIKCVAEVQQLLGDNVVRAVSMSATDGLMRGMTVVDTGSALAVPVGKNTLGRIFNVLGEPVDELGNVETPEGTLPIHRPAPAFVDLDTNLSIFETGIKVVDLLAPYRRGGKIGLFGGAGVGKTVLIMELINNIAKAHGGVSVFAGVGERTREGNDLYQEMCESKVIDTGNLSNSKVALVYGQMNEPPGA

SEQ ID NO: 173786 - protein, 300 aa, Unknown
  Bacterial polypetide isolated from the Sargasso Sea
GASEGLKRGLEVENTGAPISVPVGQETLGRVLDVLGNPIDEKGPVGAKSNRPIHAKAPSFEEQSTEADVLETGIKVIDLLCPFAKGGKVGLFGGAGVGKTVTVMELIRNIAAEHDGFSVFAGVGERTREGNDFYHEMMESNVLDKVALVYGQMNEPPGNRLRVALTGLTIAENFRDEGRDVLMFIDNIYRYTLAGTEVSALLGRMPSAVGYQPNLAEEMGVLQERITSTKTGSITSIQAVYVPADDLTDPSPATTFAHLDATVVLARSIAELGIYPAVDPLDSNSRQLDPGIVGQEHYDT

SEQ ID NO: 173787 - protein, 131 aa, Unknown
  Bacterial polypetide isolated from the Sargasso Sea
AVDPLASSSRILDPQYVGERHYNVARRVQTTLQRYRELQDIIAILGVDELSEEDKLVVHRARRMERFLSQPFLVAEVFTGKPGEITSLEDTIRSFEEIADGKWDHLPEPAFMYVGPIEQAEEQAKKMAEKS

SEQ ID NO: 173788 - protein, 111 aa, Unknown
  Bacterial polypetide isolated from the Sargasso Sea
IESLVKFKKILQTYKSLQDIIAILGMDELSEEDKLVVARARKIQRFLSQPFFVAEVFTGSPGKLVDLESTIKGFDAICKGEYDHLPEAAFYMVGTIEEAIEKAEKIKKDAA

SEQ ID NO: 173789 - protein, 225 aa, Unknown
  Bacterial polypetide isolated from the Sargasso Sea
MRKGQITQVIGAVVDVKFDGELPEILTALECNNSGSRLVLEVAQHLGESSVRTIAMDATEGLKRGDEVTDTGSPIKVPVGPETLGRIVNVIGEPIDEKGEVKTKESWPIHRAAPEFNDQSTETEILVTGIKVVDLLAPYAKGGKIGLFGGAGVGKTVIIMELINNIAKAHGGFSVFAGVGERTREGNDLYHEMIESGVIKPEGPGSKAALVYGQMNGTSWSKIKS

SEQ ID NO: 173790 - protein, 232 aa, Unknown
  Bacterial polypetide isolated from the Sargasso Sea
MSKKGKITQIIGAVVDVNFDSDLPEIYTALEANNSGNKLILEVAQHLGENDVRTIAMDATEGLKRGDEVINTGSPISVPVGPETLGRIINVVGQSIDEKGDVKTKEKWPIHRSAPKFTDQATETEQLVTGIKVVDLLAPYAKGGKIGLFGGAGVGKTVTIMELINNIAKAHGGFSVFAGVGERTREGNDLYHEMIESGVIKTDGKGSKAALVYGQMNEPHGARARVALTGLT

SEQ ID NO: 173791 - protein, 136 aa, Unknown
  Bacterial polypetide isolated from the Sargasso Sea
MNKEGVITQLIGAVVDVKFQDNLPEIYTALEADNDGNKLILEVAQHLGENSLRTIAMDSTEGLKRGDKVFNTKPPISVPVGPETLGRIINVIGQPIDEKGDVNTKEKWPIHRPSPKFTDQSTETEILVTGIKVIDL

SEQ ID NO: 173792 - protein, 185 aa, Unknown
  Bacterial polypetide isolated from the Sargasso Sea
MASLDDLKKRIASVKSTQKITKAMKMVAAAKLRRAQESAERGRPYSEKMNNIILNLSNGISDKENAPKLLSGTGENKVHLCVVMTSDRGLCGGFNSNIIKKAKSYFSKTLDEGKQLKIITVGSKGNDQLKRVYGDKIIENISFKESKNANYFDADKVGRIIIEKFEAGEFDICTIFYNQFKNVIT

SEQ ID NO: 173793 - protein, 153 aa, Unknown
  Bacterial polypetide isolated from the Sargasso Sea
MPSLDDLKKRISSVKSTQKITKAMKMVAAAKLRRAQENAEKGRPYSEKMNNIILNLSNGISDKESAPKLLIGTGEEKIHLCIVMTSDRGLCGGFNSNIIKKAKSYFKKILDDNKTLKIITVGSKGYDQLKRAYNNYIIEKISFKESKNINYFD

SEQ ID NO: 173794 - protein, 280 aa, Unknown
  Bacterial polypetide isolated from the Sargasso Sea
MNKNGKITQVIGAVVDVKFDGDLPEILTALECNNRGNRLVLEVAQHLGESSVRTIAMDSTEGLKRGDEVKDTGAPIQVPVGPKTLGRIVNVIGEPIDEKGKIESKENWPIHRQAPSFNDQSTETEILVTGIKVIDLLAPYAKGGKIGLFGGAGVGKTVIIMELINNIAKAHGGFSVFAGVGERTREGNDLYHEMIESGVIKPEGEGSKAALVYGQMNEPPGARARVALTGLTVAEYFRDKEGQDVLFFVDNIFRFTQAGSEVSALLGRIPSAVGYPPTLA

SEQ ID NO: 173795 - protein, 158 aa, Unknown
  Bacterial polypetide isolated from the Sargasso Sea
DLTDPSPATTFAHLDATVVLSRQVAELGIYPAVDPLDSTSRQLDPLVIGNEHYDVARNVQNMLQKYKELKDIIAILGMDELSEEDKLVVARARKIQRFLSQPFFVAEVFTGSQGKYVSLKETIKGFKAIADGEYDHLPEQAFYMIGAIEEAEERAKEL

SEQ ID NO: 173796 - protein, 209 aa, Unknown
  Bacterial polypetide isolated from the Sargasso Sea
MASLDDLKKRILSVKSTQKITKAMKMVAAAKLKRAQENAERGRPYSEKMNNIILNLSNGISDKENAPKLLAGTGNNKVHLCVVLTSDRGLCGGFNSNIIKKAKAYFSKITSEGKNLKIITVGSKGYDQLKRQYNDKIVNKISFKESKNINFFDAEKVSKIIIESFQKNEFDVCTIFYNKFKNVITQIPQAQQIIPLKSSETGNKMKKIL

SEQ ID NO: 173797 - protein, 109 aa, Unknown
  Bacterial polypetide isolated from the Sargasso Sea
AAFAQFGSDLDASTQKLLNRGSKLTELLKQKQFSPMTVAEQVVSVFCGVRGYLDDIDQKDISDFENKILQKCKSDKPEILDSISSSGKLEENAEKMLIDLINEFKKGLK

SEQ ID NO: 173798 - protein, 240 aa, Unknown
  Bacterial polypetide isolated from the Sargasso Sea
LSKQAVAYRQMSLLLRRPPGREAYPGDVFYLHSRLLERAAKLSDEHGGGSLTALPIIETQGGDVSAFIPTNVISITDGQIFLETELFNQGIRPAINVGLSVSRVGSSAQTKAMKKVSGSMKLELAQYREMAAFAQFGSDLDASTQKLLNRGSKLTELLKQKQYSPMTVAEQVISIFCGVKGHLDDIEQKNISDFENKIIEKCKSEKKEILDSISTSGKLEEDSEKSLTEIITELKKSFNS

SEQ ID NO: 173799 - protein, 249 aa, Unknown
  Bacterial polypetide isolated from the Sargasso Sea
KTLEEAGAMEYTTIVAATASDAAPLQFLAPYTGCAMGEYFRDNGMHALIIYDDLSKQAVAYRQMSLLLRRPPGREAYPGDVFYLHSRLLERAAKLSDEHGGGSLTALPIIETQGGDVSAFIPTNVISITDGQIFLETELFNQGIRPAINVGLSVSRVGSSAQTKAMKKVSGSMKLELAQYREMAAFAQFGSDLDASTQKLLNRGSKLTELLKQKQYSPMTVAEQVISVFSGVKGHLDDIDQKNIADFEN

SEQ ID NO: 173800 - protein, 305 aa, Unknown
  Bacterial polypetide isolated from the Sargasso Sea
GDDRNIKEGDVVKRTGSIVDTPVGKELLGRVVDGLGNPIDGKGALDKGIKKSRVEVKAPGIIPRQSVSEPMQTGLKSIDSLVPIGRGQRELIIGDRQTGKTAVAIDAIINQKKINETGDEKQKLYCIYVAVGQKRSTVRQIQKTLEEAGAMEYTTIVAATASDSAPLQFLAPYTGCAMGEYFRDNGMHALIIYDDLSKQAVAYRQMSLILRRPPGREAYPGDVFYLHSRLLERAAKLSDEHGGGSLTALPIIETQGGDVSAYIPTNVISITDGQIFLETELFNQGIRPAINVGLSVSRVGSAAQT

SEQ ID NO: 173801 - protein, 225 aa, Unknown
  Bacterial polypetide isolated from the Sargasso Sea
FGDDRNVKEGDIVKRTGNIVDTPVGKELLGRVVDGLGNPIDGKGPLDKGIKKSRVEVKAPGIIPRQSVSEPMQTGLKSIDSLVPIGRGQRELIIGDRQTGKTAVAVDAIINQKKINESGDEKQKLYCIYVAVGQKRSTVRQIQKTLEEAGAMEYTTIVAATASDSAPLQFLAPYTGCAMGEYFRDNGMHALIIYDDLSKQAVAYRQMSLLLRRPPGREAYPGDVF

SEQ ID NO: 173802 - protein, 262 aa, Unknown
  Bacterial polypetide isolated from the Sargasso Sea
EYFRDKGEDALIVYDDLSKQAVAYRQVSLLLKRPPGREAYPGDVFYLHSRLLERAARVNADYVEQVTGGKVKGKTGSLTALPIIETLAGDVSAFVPTNVISITDGQIYLETELFNSGIRPAINPGLSVSRVGGSAQTKIMKKLAGGVRTALAQYRELAAFSQFASDLDDATKQQLASGKAFTELLKQKQYAPMSVAQQALSLFAADKGYMSDVEVDKILDFEEALHGYLSAEKGELEKQINTTGDWNDDIESQFTSLVEDFK

SEQ ID NO: 173803 - protein, 270 aa, Unknown
  Bacterial polypetide isolated from the Sargasso Sea
MVPIGRGQRELIIGDRQTGKTAVAIDAIINQKDTGVKCIYVAIGQKASSIAAVVRKLEEHDALKHTIIVAASAAESAAMQYIAPYSGCAMGEYFRDNGEDALIVYDDLTKQAWAYRQVSLLLKRPPGREAYPGDVFYLHSRLLERSARINEKAVQNITDGKIKNQTGSLTALPIIETQAGDVSAFVPTNVISITDGQIFLETDLFNAGIRPAINAGLSVSRVGGAAQTKIIKKLGGGVRLALAQYRELAAFSQFASDLDEATRKQLERGK

SEQ ID NO: 173804 - protein, 305 aa, Unknown
  Bacterial polypetide isolated from the Sargasso Sea
GEPIDEKGQVKAKESWPIHRSAPEFNDQSTETEILVTGIKVIDLLAPYAKGGKIGLFGGAGVGKTVIIMELINNIAKAHGGFSVFAGVGERTREGNDLYHEMIESGVIKPEGSGSKAALVYGQMNEPPGARARVALTGLTVAEYFRDQEGQDVLFFVDNIFRFTQAGSEVSALLGRIPSAVGYQPTLATDMGNLQERITTTNKGSITSVQAIYVPADDLTDPAPATSFSHLDATTVLSRQIAELGIYPAVDPLDSTSRILDPRIVGDEHYRVAREVQKILQTYKSLQDIIAILGMDELSEEDKLT

SEQ ID NO: 173805 - protein, 221 aa, Unknown
  Bacterial polypetide isolated from the Sargasso Sea
KLILGDVFYLHSRLLERAAKLNDENGGGSLTALPIIETQAGDVSAYIPTNVISITDGQIFLGTELFNQGIRPAVNVGLSVSRVGSAAQTKAMKKVAGSIKLELAQYREMAAFAQFGSDLDASTQKLLNRGSKLTELLKQDQYSPMTVAEQVVTIYAGVKGYLDSIDTNQIRSFEKGLLELVKSEKPEVIESIEKSGKIDEETDKILSEIITNYKKTNFENK

SEQ ID NO: 173806 - protein, 156 aa, Unknown
  Bacterial polypetide isolated from the Sargasso Sea
NLFNSGIRPAIDVGLSVSRVGGNAQIKAMKSVAGTLRLDLAQYRELEAFAKFGSDLDQATLSQLTRGERMVEILKQNQYVPMDVEKQVAIIFAASRGHLDDLSVDQISEFEYGLFEYLDANAKDSLDSIVKDGVISDEAEEMLDKAIKEYKAGFKA

SEQ ID NO: 173807 - protein, 259 aa, Unknown
  Bacterial polypetide isolated from the Sargasso Sea
MSNGLVTQIIGAVIDVEFDKSNIPNVYEALTISGMETVLEVQQQLGDGVVRTIAMGSTEGLKRGLDVNRTNAPISVPVGQETLGRIMDVLGNPIDEKGPIGEKETLPIHRKPPEYVDQAASNELLETGIKVIDLICPFAKGGKVGLFGGAGVGKTVNMMELIRNIAIEHSGFSVFAGVGERTREGNDFYHEMTDSNVIDKVSLVYGQMNEPPGNRLRVALTGLTIAEKFRDEGRDVLLFIDNIYRYTLAGVEVSALLGR

SEQ ID NO: 173808 - protein, 67 aa, Unknown
  Bacterial polypetide isolated from the Sargasso Sea
RFLSQPFFVAEVFTGSPGKLVDLDATIKGFDAICKGEYDHLPEAAFYMVGGIEEVIEKADKLAKETK

SEQ ID NO: 173809 - protein, 312 aa, Unknown
  Bacterial polypetide isolated from the Sargasso Sea
DGKGSLSAKNRKRVEVKAPGIIPRQSVNEPMQTGLKSIDSLIPIGRGQRELIIGDRQTGKTAVAIDAIINQKKINESSDESKKLYCVYVAIGQKRSTVAQITKTLEEAGALKYTTIVAATASDSAPLQFLAPYTGCTIGEYFRDNGMHALIVYDDLSKQAVAYRQMSLLLRRPPGREAYPGDVFYLHSRLLERAAKLSDKSGGGSLTALPIIETQAGDVSAYIPTNVISITDGQIFLETELFNQGIRPAVNVGLSVSRVGSAAQTKAMKKVAGSIKLELAQYREMAAFAQFGSDLDASTQQLLNRGSKLTEL

SEQ ID NO: 173810 - protein, 257 aa, Unknown
  Bacterial polypetide isolated from the Sargasso Sea
LIIYDDLSKQAVAYRQMSLLLRRPPGREAYPGDVFYLHSRLLERAARVNEEYVENYTNGEVKGKTGSLTALPIIETQAGDVSAFVPTNVISITDGQIFLESSLFSSGLKPAMDPGISVSRVGGAAQVPIIKKLGGGIKTALAQYRELEAFAQFASDLDEASKEQLEHGVRVTELTKQDQFSPMSVAEMGLMLYTANEGYLRQVEVEKIKDFEKSLIAYMNSEHKDLMDKVSETGEYGDDIQNAFKEALDKFMETQTW

SEQ ID NO: 173811 - protein, 143 aa, Unknown
  Bacterial polypetide isolated from the Sargasso Sea
MRKGKITQIIGAVVDVRFEGELPEILTALECNNSGNRLVLEVAQHLGESSVRTIAMDATEGLKRGDEVTDTGAPIKVPVGPETLGRIVNVIGEPIDEKGEVKTKESWPIHRSAPEFNDQSTETEILVTGIKVVDLLAPYAKGW

SEQ ID NO: 173812 - protein, 257 aa, Unknown
  Bacterial polypetide isolated from the Sargasso Sea
ALVYGQMNEPPGNRLRVALTGLTIAENFRDEGRDVLMFIDNIYRYTLAGTEVSALLGRMPSAVGYQPNLAEEMGVLQERITSTKTGSITSIQAVYVPADDLTDPSPATTFAHLDATVVLARSIAELGIYPAVDPLDSNSRQLDPGIVGQEHYDTARSVQQVLQRYKELQDIIAILGMDELSEEDKLTVQRARKIQRFLSQPFFVAEVFTGSPGQYVSLRDSIKAFQGIVAGDYDDLPEQAFYMVGTIEEAVEKAKSM

SEQ ID NO: 173813 - protein, 196 aa, Unknown
  Bacterial polypetide isolated from the Sargasso Sea
MPSLDDLKKRIKSVKSTQKITKAMKMVAAAKLKKAQENAEKGRPYSEKLQNIILNLTTSISDDSNAPRLLIGSGKDKVYLCVVITADRGLCGGFNSNICKLAKNHFKNILKEGKELKIITVGSKGHDQIKTEYGKHIIYKKSFKDKKQITFKEANEIGKKIIELFEQEQFDKCFIFYNNIKNVITQIPKAEQIIPT

SEQ ID NO: 173814 - protein, 313 aa, Unknown
  Bacterial polypetide isolated from the Sargasso Sea
GVVIFGDDRKIKEGDTIKRTNAIVDVPVGKELLGRVVDGLGNPIDGKGAISSKERKRVEVKAPGIIPRQSVSEPMQTGLKSIDSLIPVGRGQRELIIGDRQTGKTAVAIDAIINQKKINESSDEKKKLYCVYVAIGQKRSTVAQITKTLEEAGALKYTTIVAATASDSAPLQFLAPYTGCTIGEYFRDNGMHALIVYDDLSKQAVAYRQMSLLLRRPPGREAYPGDVFYLHSRLLERSAKLSDANGGGSLTALPIIETQAGDVSAYIPTNVISITDGQIFLETELFNQGIRPAVNVGLSVSRVGSAAQTKARK

SEQ ID NO: 173815 - protein, 104 aa, Unknown
  Bacterial polypetide isolated from the Sargasso Sea
KILQAYKSLQDIIAILGMDELSEEDKLTVARARKIQRFLSQPFFVAEVFTGSPGKLVDLEATIKGFDAICKGEYDQLPEAAFYMVGTIEEAVEKAEKMAKEAAA

SEQ ID NO: 173816 - protein, 84 aa, Unknown
  Bacterial polypetide isolated from the Sargasso Sea
MVSIRPDEISSILKQQITDYDQSVSVSNVGTVLQIGDGIARIYGLDQVMAGELLEFEDGTEGIALNLEDDNVGAVLMGEALGVQ

SEQ ID NO: 173817 - protein, 241 aa, Unknown
  Bacterial polypetide isolated from the Sargasso Sea
MVSIRPDEISSILKQQITDYDQAVSVSNVGTVLQIGDGIARIYGLDQVMAGELLEFEDGTEGIALNLEDDNVGAVLMGEALGVQEGSNVKSTGKIASVPVGEAMQGRVVNPLGQPIDGKGEIPTSDTRLIEEMAPGIIKRRSVHEPMQTGITSIDAMIPVGRGQRELIIGDRQTGKSAIAIDTIINQKGQDVVCVYVAIGQKSASVANIVEVLRERGALDYTVVVSAGASEPAALQYLAPY

SEQ ID NO: 173818 - protein, 238 aa, Unknown
  Bacterial polypetide isolated from the Sargasso Sea
KRGDVVQNTGAPISVPVGPETLGRIINVIGQPIDQKGEVKTKEKWPIHREAPKFTDQSTETEILETGIKVIDLLAPYSKGGKIGLFGGAGVGKTVIIMELINNIAKAHGGFSVFAGVGERTREGNDLYHEMIESGVIKPDGKDSKAALVYGQMNEPPGARARVGLTGLTVAEYFRDKEGQDVLFFVDNIFRFTQAGSEVSALLGRIPSAVGYQPTLATDMGNLQERITTTGKGSITSV

SEQ ID NO: 173819 - protein, 262 aa, Unknown
  Bacterial polypetide isolated from the Sargasso Sea
MASLDDLKKRIASVKSTQKITKAMKMVAAAKLRKAQESAEKGRPYSEKMNNVILNLSSGISDKENAPKLLSGTGNDKVNLCVVMTSDRGLCGGFNSNIIKKAKSYFSKILSEGKELKIITVGSKGNDQLKRMYGDKIIENISFKESKNANYFDADKVGKIVIDKFENSEFDICTIFYNQFKNVIAQIPQAQQIIPLNREDVEGNTSEENYEFEPDEDEILSNLLPKNISTQIFKAMLENSASEQGSRMSGMDKCTRNAGEMV

SEQ ID NO: 173820 - protein, 299 aa, Unknown
  Bacterial polypetide isolated from the Sargasso Sea
AVGQKNSSVANVLKKLEEEGALEHTIIVNAAASDSAAMQYIAPYSGCAMGEYFRDKGEDALIIFDDLTKQAWAYRQVSLLLKRPPGREAYPGDVFYLHSRLLERAARVNAEYVEKETGGKVKGQTGSLTALPIIETQAGDVSAFVPTNVISITDGQIYLESDLFNAGIRPAINAGLSVSRVGGAAQTKIIKKLGGGVRLALAQYRELAAFAQFASDLDEATRKQLERGQRVTELMKQKQYAPLTVAEMAVSLYAANEGYLDDVPADKIVDFESALHANFVDSASDLAQKINDTGDYNDE

SEQ ID NO: 173821 - protein, 313 aa, Unknown
  Bacterial polypetide isolated from the Sargasso Sea
PGTLGRIMNVVGEPVDERGDIGTSKSYPIHRPAPEFVDQSTETEVLVTGIKVVDLLAPYARGGKIGLFGGAGVGKTVLIMELINNIAKAHGGYSVFAGVGERTREGNDLYHEMIESGIIDLKGKDSKVALVYGQMNEPPGARARVALSGLTQAEYFRDEEGQDVLFFVDNIFRFTQAGSEVSALLGRIPSAVGYQPTLATDMGALQERITTTKKGSITSVQAIYVPADDLTDPAPATSFSHLDATTVLNRAISEKGIYPAVDPLDSTSRILDPQVVGDDHYRVAREVQRVLQTYKSLPDIIAILGMDELSEER

SEQ ID NO: 173822 - protein, 267 aa, Unknown
  Bacterial polypetide isolated from the Sargasso Sea
MKMVAAAKLRRAQESAEKGRPYSEKMNNVILNLSNGISDKENAPKLLSGTGQEKTHLCVVMTSDRGLCGGFNSNIIKKAKSYFAKILDEDKELKIITVGSKGNDQLKRVYGDKIIENISFKESKNANYFDADKVGKMVIEKFEAGEFDVCTIFYNQFKNVITQIPQAQQIIPLNNEGEENSSEESYEFEPDEDEILSNLLPKNISTQIFKAMLENSASEQGSRMSAMDNATRNAGEMVDKLTIEYNRSRQAAITKELIEIISGAESL

SEQ ID NO: 173823 - protein, 227 aa, Unknown
  Bacterial polypetide isolated from the Sargasso Sea
VIFGDDKSVKEGDTVKRTGAIVDTPVGKELLGRVVDGLGNPIDGKGALDKSLKRSRVEVKAPGIIPRKSVSEPMQTGLKSIDSLVPIGRGQRELIIGDRQTGKTAVAIDAIINQKKINESGDEKKKLYCIYVAVGQKRSTVRQIEKTLEEAGAMEYTTIVAATASDAAPLQFLAPYTGCTMGEYFRDNGMHALIIYDDLSKQAVAYRQMSLLLRRPPGREAYPGDVF

SEQ ID NO: 173824 - protein, 201 aa, Unknown
  Bacterial polypetide isolated from the Sargasso Sea
MRKGNITQIIGAVVDVKFDGELPEILTALECDNNGNRLVLEVAQHLGESSVRTIAMDATEGLKRGDEVKDTGSPIKVPVGPETLGRIINVIGEPIDEKGDVKTNESWPIHREAPEFNNQSTETEILVTGIKVIDLLAPYAKGGKIGLFGGAGVGKTVLIMELINNVAKAHGGFSVFAGVGERTREGNDLYHEMMESRCYKT

SEQ ID NO: 173825 - protein, 52 aa, Unknown
  Bacterial polypetide isolated from the Sargasso Sea
AEHGARMTAMHKATDNADELNKELKLSYNKARQAAITNEILEIVGGAEALNA

SEQ ID NO: 173826 - protein, 201 aa, Unknown
  Bacterial polypetide isolated from the Sargasso Sea
MVKTNLNKGYVSQIIGPVLDIKFPGGTLPPIYSAIKIELEDGTETIVEVQQLLGDNKVRAVSMRSTDGLKRGAEVIDLGTPISVPVGTPTLGRIFNVIGQPVDEQGDVSFDETLPIHRDAPAFTELETKPSIFETGIKVVDLLAPYRRGGKIGLFGGAGVGKTVLIMELINNIAKAHGGVSVFGGVGERTREGNDLYEEMK

SEQ ID NO: 173827 - protein, 256 aa, Unknown
  Bacterial polypetide isolated from the Sargasso Sea
NEPPGARSRVALTGLTLAEYFRDEEGQDVLFFVDNIFRFTQAGSEVSALLGRIPSAVGYQPTLATDMGNLQERITSTNKGSITSVQAIYVPADDLTDPAPATSFSHLDATTVLSRQIAELGIYPAVDPLDSTSRMLDPRIIGDEHYEVARQVQEVLQTYKSLQDIIAILGMDELSEEDRLTVARARKIQRFMSQPFFVAEIFTGTPGVLVPLEETIRGFKEIVEGKHDDLPEAAFYMVGTIDEAIEKGKELAAEAA

SEQ ID NO: 173828 - protein, 294 aa, Unknown
  Bacterial polypetide isolated from the Sargasso Sea
IARVYGLDNVQAGEMVEFSGGIKGMALNLESDNVGVVIFGDDRSIKEGDVVKRTGAIVDAPVGKSLLGRVVDALGNPIDGKGDLDKKVERKRVDVKAPGIIPRQSVNQPMQTGLKAIDSLIPVGRGQRELIIGDRQTGKTAVAIDTIINQKEINKSGDEKEKLYCIYVAIGQKRSTVAQIVKTLEDAGAMEYTTIVSATASDPAPLQFLAPYTGCTMGEYFRDNGMHALIIYDDLSKQAVAYRQMSLLLRRPPGREAYPGDVFYLHSRLLERAAKLNDDQGGGSLTALPIIETQ

SEQ ID NO: 173829 - protein, 204 aa, Unknown
  Bacterial polypetide isolated from the Sargasso Sea
ILLGALLVFISLGTKKMENDPKGLQNLLEFLWDYIRDLARTQIGEKVYRDWMPFIGTLFLFVFVSNWGGALIPWRLIKLPSGELGAPTADINTTIALALLVSLSYFYAGLSNKGWRYFEYYVHPTPIMLPFKILEDFTKPLSLSFRLFGNILADELVVGVLVFLVPLILPIPVMFLGLFTSAIQALIFATLAAYYIGEAVEEHH

SEQ ID NO: 173830 - protein, 208 aa, Unknown
  Bacterial polypetide isolated from the Sargasso Sea
MSSGRIVQVIGAVIDVEFGREEVPKVYDALKVTDTGLTLEVQQQLGDGVVRSIAMGISEGLSRGLEVTNTGAPISIPVGEETLGRIMDVLGTAIDEKGAINARETMPIHRKPPSYEDQKGGNELLETGIKVIDLICPFARGGKVGLFGGAGVGKTVTMLELIRNIAIEHSGLSVFAGVGERTREGNDFYYEMEEAGVLDKISLVFGQM

SEQ ID NO: 173831 - protein, 287 aa, Unknown
  Bacterial polypetide isolated from the Sargasso Sea
LKDLKNRIGSVKSTQKITSAMKMVAAAKLRKAQEQALASRPYATLMDNIVSKIATKASGNSIDLLAGKPENKTHLLVVFSADRGLCGGFNGSITRIVRSEVKKLKDDGIPVKLLMVGKKSADALNRDLGDLFVERIDGKSAKPNYSDAEVLAQKIINLFENGHFGVCKVIYNKFVSAITQEVTFKSLIPIEVKQNEIENDNSSSIYDFEPSEEEILNDLLPRNLATQLFSSQIESAASELAARMTAMDNATRNAGDMIDNLTLQYNRTRQAVITKELIEIISGAEAL

SEQ ID NO: 173832 - protein, 224 aa, Unknown
  Bacterial polypetide isolated from the Sargasso Sea
MEINPSEVTKILKEQIKNFGDKAEVTEVGQVLSVGDGIARIYGLDNVQAGEMVEFADGSKGMALNLESENVGVVIFGDDRNIKEGDTVKRTRNIVDTPVGKELLGRVVDGLGNPIDGKGPLDKSVKKSRVEVKAPGIIPRQSVSEPMQTGLKSIDSLVPIGRGQRELIIGDRQTGKTAVAIDAIINQKKINETGDEKQKLYCIYVAIGQKRSTVRQIQKTLEEA

SEQ ID NO: 173833 - protein, 242 aa, Unknown
  Bacterial polypetide isolated from the Sargasso Sea
MRKGQITQIIGAVVDVKFDGELPEILTALECDNGGNRLVLEVAQHLGESSVRTIAMDATEGLKRGDEVTDTAAPIKVPVGPETLGRIINVIGEPIDERGEVKSSDNWPIHRAAPEFNDQSTETEILVTGIKVIDLLAPYAKGGKIGLFGGAGVGKTVLIMELINNVAKAHGGFSVFAGVGERTREGNDLYHEMIDSGVIKTDGEGSKAALVYGQMNEPPGARARVALTGLTVAEYFRDQEGQ

SEQ ID NO: 173834 - protein, 293 aa, Unknown
  Bacterial polypetide isolated from the Sargasso Sea
MANNLTGKISQVLGAVVDVEFDGELPAIMNALEVDNNGTRLMLEVAQHLGENAVRTIAMDTTDGLVRGQTATDTGAPISMPVGPETLGRIMNVVGEPVDERGDIGTSKSYPIHRPAPEFVDQSTETEVLVTGIKVVDLLAPYARGGKIGLFGGAGVGKTVLIMELINNIAKAHGGYSVFAGVGERTREGNDLYHEMIESGIIDLKGKDSKVALVYGQMNEPPGARARVALSGLTQAEYFRDEEGQDVLFFVDNIFRFTQAGSEVSALLGRIPSAVGYQPTLATDMGALQERIT

SEQ ID NO: 173835 - protein, 320 aa, Unknown
  Bacterial polypetide isolated from the Sargasso Sea
MSKGIITQVIGAVVDVKFEGDLPEILTALECKNGNNRLVLEVAQHLGESTARTIAMDATEGLKRGDEVINTNAPIKVPVGPETLGRIINVVGEPIDERGEVKTKENWPIHRPAPEFNDQSTETEILVTGIKVIDLLAPYAKGGKIGLFGGAGVGKTVLIMELINNVAKAHGGFSVFAGVGERTREGNDLYHEMMESGVIKSEGPGSKAALVYGQMNEPPGARARVALTGLTVAEYFRDQEGQDVLFFVDNIFRFTQAGSEVSALLGRIPSAVGYQPTLATDMGNLQERITTTNKGSITSVQGIYVPADDLTDPPSATSFA

SEQ ID NO: 173836 - protein, 309 aa, Unknown
  Bacterial polypetide isolated from the Sargasso Sea
IGDRQTGKTAVALDAILNQKTYNDAAGSDESKKLYCVYVAIGQKRSSVAQLVKKLEETGAMDYSIVVAATASEPAPMQFLAPYSATAMAEYFRDNGKHALIIYDDLSKQAVAYRQMSLLLRRPPGREAYPGDVFYLHSRLLERSSKLNEDSGSGSLTALPIIETQGGDVSAFIPTNVISITDGQIFLETELFNAGIRPAVNTGLSVSRVGSSAQTSAMKSVAGSVKLELAQYREMAAFAQFGSDLDASTQALLNRGARLTELLKQAQYSPLTNAEQVIIIYAGTNGYLDTVEVKDVGSFEKGLVTHLRS

SEQ ID NO: 173837 - protein, 274 aa, Unknown
  Bacterial polypetide isolated from the Sargasso Sea
MPEILTALECKNGNNRLVLEVAQHLGETTVRTIAMDATEGLKRGDEVINTNAPIQVPVGPETLGRIINVIGEPIDERGVVKTKESWPIHRAAPEFNDQSTETEILVTGIKVIDLLAPYAKGGKIGLFGGAGVGKTVLIMELINNVAKAHGGFSVFAGVGERTREGNDLYHEMIESGVIKKEGAGSKAALVYGQMNEPPGARARVALTGLTVAEYFRDQEGQDVLFFVDNIFRFTQAGSEVSALLGRIPSAVGYQPTLATDMGNLQERITTTNKG

SEQ ID NO: 173838 - protein, 206 aa, Unknown
  Bacterial polypetide isolated from the Sargasso Sea
MERAAKMSDEHGGGSLTALPIIETQAGDLSAYIPTNVISITDGQIFLETNLFFAGIRPAINVGLSVSRVGSAAQTKAMKKIAGPVKLELAQYREMAAFAQFASDLDASTKQLLDRGARLVEILKQGQYSPLTVSEQVVSIYAGVRGYLDKVAVGDVVKFETEVLNEIRTKHSDLLDAIANEKELSKENDDKLKSILDDLVGKFASN

SEQ ID NO: 173839 - protein, 205 aa, Unknown
  Bacterial polypetide isolated from the Sargasso Sea
FDKDNIPKVYEALMVDESGTTLEVQQQLGDGVVRTIAMGATEGLKRGLSASRTNAPISVPVGPETLGRIVDVLGNPIDEKGPIGEKSKMPIHRKPPSYTDQSASNEVLETGIKVIDLMCPFAKGGKIGLFGGAGVGKTVNMMELINNIALQHSGLSVFAGVGERTREGNDFYYEMQESGVVNIDNLGESKVAMVYGQMNEPPGNR

SEQ ID NO: 173840 - protein, 262 aa, Unknown
  Bacterial polypetide isolated from the Sargasso Sea
TQVIGAVVDVQFEGQLPEILTALECDNSGNRLVLEVAQHLGETAVRTIAMDSTEGLKRGDKVSDTGSPIKVPVGPETLGRIINVIGEPIDQKGKVGTKESWPIHRPAPKFTDQSTETEILVTGIKVVDLLAPYSKGGKIGLFGGAGVGKTVIIMELINNIAKAHGGFSVFAGVGERTREGNDLYHEMIESGVIKPEGKGSKAALVYGQMNEPPGARARVGLTGLTVAEYFRDKEGQDVLFFVDNIFRFTQAGSEVSALWVEY

SEQ ID NO: 173841 - protein, 244 aa, Unknown
  Bacterial polypetide isolated from the Sargasso Sea
LNLESENVGVVIFGDDRNVKEGDVVKRTGNIVDTPVGKELLGRVVDGLGNPIDGKGPLDKGIKKSRVEVKAPGIIPRQSVSEPMQTGLKSIDSLVPIGRGQRELIIGDRQTGKTAVAVDAIINQKKINESGDEKQKLYCIYVAVGQKRSTVRQIQKTLEEAGAMEYTTIVAATASDSAPLQFLAPYTGCTMGEYFRDNGMHALIIYDDLSKQAVAYRQMSLLLRRPPGREAYPGDVFYLHSRLL

SEQ ID NO: 173842 - protein, 165 aa, Unknown
  Bacterial polypetide isolated from the Sargasso Sea
ADDLTDPAPATTFAHLDATTVLSRKIAELGIYPAVDPLDSTSRILTPEIVGQEHYNTAQRVKEILQRYKELQDIIAILGMDELSEEDKLVVHRARRVQRFLSQPFHVAEQFTGLRGVLVDIEDTIKGFNMIMDGEVDQYPEAAFNLKGTIEEAIEAGEKMLAENN

SEQ ID NO: 173843 - protein, 262 aa, Unknown
  Bacterial polypetide isolated from the Sargasso Sea
CMVFGQMNEPPGARLRVALSALTMAEFFRDTTGADTLLFVDNIFRFSQAGSEVSALLGRMPSAVGYQPTLATEMGALQERITSTSKGAITSVQAVYVPADDPTDPAPATAFGNLDAFLYLERSISEKGIYPAVDPLASSSRILDPQYVGDRHYAIARRVQRTLQRYRELQDIIAILGVDELAEEDKLIVHRARRMERFLSQPFLVAEVFTGKPGEITSLDDTIRSFEEIADGKWDHLPEQAFMYVGPIEQAEEQAKKMAAKA

SEQ ID NO: 173844 - protein, 283 aa, Unknown
  Bacterial polypetide isolated from the Sargasso Sea
TDGLVRGQEVTDTGEAITVPVGQETLGRILNVIGEPIDERGPIRTERKAPIHASAPPFVDQSTEAEILVTGIKVLDLLEPYPRGGKVGLFGGAGVGKTVLIQELINNIAKGHGGYSVFAGVGERTREGNDLYHEMVESGVIDLQGNESKVALVYGQMNEPPGARARVGLTGLTLAEYFRDEEGQDVLFFVDNIFRFTQAGSEVSALLGRIPSAVGYQPTLGTDMGALQERITSTNKGSITSVQAIYVPADDLTDPAPATSFAHLDATTVLSRQISELGIYPAV

SEQ ID NO: 173845 - protein, 297 aa, Unknown
  Bacterial polypetide isolated from the Sargasso Sea
FFGGAGVEKTVLIMELINNVAKAHGGFSVFAGVGERTREGNDLYHEMIESGVIKPEGSGSKAALVYGQMNEPPGARARVALSGLTVAEYFRDQEGQDVLFFVDNIFRFTQAGSEVSALLGRIPSAVGYQPTLATDMGNLQERITTTNKGSITSVQAIYVPADDLTDPAPATSFSHLDATTVLSRQIAEIGIYPAVDPLDSTSRILDPRIVGDEHYRVAREVQKVLQTYKSLQDIIAILGMDELSEEDKLIVARARKIQRFLSQPFFVAEVFTGSPGKLVELDSTIKGFDAICKGEYD

SEQ ID NO: 173846 - protein, 156 aa, Unknown
  Bacterial polypetide isolated from the Sargasso Sea
ELFNQGIRPAINVGLSVSRVGSSAQTKAMKKVSGSMKLELAQYREMAAFAQFGSDLDASTQKLLNRGSKLTELLKQKQYSPMTVAEQVISIFCGVKGYLDDIEQKNIADFENKIIEKCKSEKSEILDSISSSGKLEEDAEKSLTEVILELKKNFNS

SEQ ID NO: 173847 - protein, 172 aa, Unknown
  Bacterial polypetide isolated from the Sargasso Sea
SAIYVPADDLTDPAPATSFAHLDATTVLSRQIAEIGIYPAVDPLDSTSRILDPRVVGDEHYKVARDVQKILQSYKSLQDIIAILGMDELSEEDKLVVARARKIQRFLSQPFFVAEVFTGSPGKLVDLESTIKGFDAICKGEYDHLPEAAFYMVGTIEEAIEKAKKMEKEAAA

SEQ ID NO: 173848 - protein, 266 aa, Unknown
  Bacterial polypetide isolated from the Sargasso Sea
MEINPSEVTKILKEQIKNFGEKAEVAEVGQVLSVGDGIARIYGLDNVQAGEMVEFADGSKGMALNLESENVGVVIFGDDRNVKEGDVVKRTGNIVDTPVGKELLGRVVDGLGNPIDGKGPFDKNIKKTRVEVKAPGIIPRQSVNEPMQTGLKSIDSLVPIGRGQRELIIGDRQTGKTAVAVDAIINQKKINESGDEKQKLYCIYVAVGQKRSTVRQIQKTLEEAGAMDYTTIVAATASDSAPLQFLAPYTGCAMGEYFRDNGMHAL

SEQ ID NO: 173849 - protein, 246 aa, Unknown
  Bacterial polypetide isolated from the Sargasso Sea
VTKILKEQIKNFGDKAEVTEVGQVLSVGDGIARIYGLDNVQAGEMVEFADGSKGMALNLESENVGVVIFGDDRNIKEGDVVKRTGNIVDTPVGKELLGRVVDGLGNPIDGKGPLDKGIKKSRVEVKAPGIIPRQSVSEPMQTGLKSIDSLVPIGRGQRELIIGDRQTGKTAVAVDAIINQKKINESGDEKQKLYCIYVAVGQKRSTVRQIQKTLEEAGAMEYTTIVAATASDSAPLQFLAPYTGCA

SEQ ID NO: 173850 - protein, 220 aa, Unknown
  Bacterial polypetide isolated from the Sargasso Sea
MERAYPGDVFYLHSRLLERASKLNEKNGGGSLTALPIIETQAGDVSAYIPTNVISITDGQIFLETELFNQGIRPAVNVGLSVSRVGSAAQTKAMKKVAGSIKLELAQYREMAAFAQFGSDLDVSTQKLLNRGSKLTELLKQNQYSPLTVAEQVVSIFTGVSGYLDDIEINAIKQFEIDLLEKVKNDQPDILDSINSSGKLEDDVKEKLVNIIKDIKGAKK

SEQ ID NO: 173851 - protein, 105 aa, Unknown
  Bacterial polypetide isolated from the Sargasso Sea
SKILQSYKSLQDIIAILGMDELSEEDKLTVARARKIQRFLSQPFFVAEVFTGTPGKLVNLDSTIKGFDAICKGDYDHLPEAAFYMVGTIDEAIAKAEKMAKEAAA

SEQ ID NO: 173852 - protein, 272 aa, Unknown
  Bacterial polypetide isolated from the Sargasso Sea
PGIIPRKSVSEPMQTGFKSIDSLVPIGRGQRELIIGDRQTGKTAVAIDAIINQKKINESGDEKKKLYCIYVAVGQKRSTVRQIEKTLEEAGAMEYTTIVAATASDAAPLQFLAPYTGCTMGEYFRDNGMHALIIYDDLSKQAVAYRQMSLLLRRPPGREAYPGDVFYLHSRLLERAAKLGDEHGGGSLTALPIIETQGGDVSAFIPTNVISITDGQIFLETELFNQGIRPAINVGLSVSRVGSSAQTKAMKKVSGSMKLELAQYREMAAFAQ

SEQ ID NO: 173853 - protein, 278 aa, Unknown
  Bacterial polypetide isolated from the Sargasso Sea
TNRILEVPVGEGLLGRVVDSLGTPLDGKGAVSSDQTAPIEKVAPGVISRQSVDQPVQTGLKSIDAMVPIGRGQRELIIGDRQTGKTAVAVDTIINQKGTGIKCIYVAVGQKNSSVANVVKKLEEEGALEHTIIVNAAASDSAAMQYIAPYSGCAMGEYFRDKGEDALIIFDDLTKQAWAYRQVSLLLKRPPGREAYPGDVFYLHSRLLERAARVNAEYVEKETGGKVKGQTGSLTALPIIETQAGDVSAFVPTNVISITDGQIYLESDLFNAGIRPAI

SEQ ID NO: 173854 - protein, 169 aa, Unknown
  Bacterial polypetide isolated from the Sargasso Sea
MKIRAEEISNIIQQQIENFEKQTTKTEVGTVLEVGDGIARVYGLDNIVAGELVEFPNNLQGMALNLEEDNVGVVLFGDDRNIKEGDEARRTERIAEVPVGDAMLGRVVDPLGQPIDGKGPIETSESRRVEVIAPGIVTRKSVHEPLQTGLKAIDSMVPIGRGQRELIIG

SEQ ID NO: 173855 - protein, 111 aa, Unknown
  Bacterial polypetide isolated from the Sargasso Sea
RVAREVQKILQTYKSLQDIIAILGMDELSEEDKLTVARARKIQRFLSQPFFVAEVFTGSPGKLVELESTIKGFDAICKGEYDHLPEAAFYMVGTIEEAIEKAEKMAKEAAA

SEQ ID NO: 173856 - protein, 235 aa, Unknown
  Bacterial polypetide isolated from the Sargasso Sea
GQETLGRIMDVLGNPIDEKGDIGEKERQPIHKSPPSYTDQAGSNELLETGIKVIDLMCPFAKGGKVGLFGGAGVGKTVNMMELIRNIAIEHSGFSVFAGVGERTREGNDFYHEMTESNVLDKVSLVYGQMNEPPGNRLRVALTGLTIAEKFRDEGRDVLLFIDNIYRYTLAGVEVSALLGRMPSAVGYQPTLAGEMGALQERITSTKTGSITSIQAVYVPADDLTDPSPATTFAH

SEQ ID NO: 173857 - protein, 233 aa, Unknown
  Bacterial polypetide isolated from the Sargasso Sea
MQQLNPSEISDIIKQKIDKLDVKSEARNEGTVVSVTDGIIRIHGLAEAMYGEMIEFEGGIYGLALNLERDSVGAVILGDYKTVAEGQSCKCTGRILEVPVGPELQGRVVDALGSPIDGKGPIDAKATDAIEKVAPGVIARQSVDQPVQIGLKAIDAMVPIGRGQRELIIGDRQVGKTAIAVDAIINQKGTGIKCVYVAIGQKASSVNAVVRKLEEHGAMEHTIVVAATASDPA

SEQ ID NO: 173858 - protein, 265 aa, Unknown
  Bacterial polypetide isolated from the Sargasso Sea
MPQTVLVFGQMNEPPGIRARVAQTGLTMAEYFKEERGQDVLLFVDNIYRYILAGMEVSGLLGRMPSAVGYQPTLGTEMGALEERITSSKTGSITSVQAIYVPADDYTDPGIVTTFGHLDAVMTLERNLASQGLYPAVDPLTSFSNILEPSVVGQEHYDVAIAVTQVLQRYQSLQDIIAILGIEELSDDDKATVSRARKIQRFLTQPFNVAEQFTGTPGKYVSVKDTVEGFKQILDGVHDDVPEQAFYMVGTIDEALAKAQEMASA

SEQ ID NO: 173859 - protein, 212 aa, Unknown
  Bacterial polypetide isolated from the Sargasso Sea
FFISIQRLLERAAKLNSDNGSGSLTALPVIETQGGDVSAFIPTNVISITDGQIFLETELFYKGIRPAVNVGLSVSRVGSSAQIKAMKQVAGTIKLDLAQYREMAAFAQFASDLDASTRQLLARGERLTELLKQPQYSPLSVEEQVCVIYSGVKGYLDKISINQIGDFEKALLQTLNSKGSSIIISITKDKALTDKSEKDLQKIIEDLLSSFE

SEQ ID NO: 173860 - protein, 201 aa, Unknown
  Bacterial polypetide isolated from the Sargasso Sea
LSDAMGGGSMTALPIIETQSGDVSAYIPTNVISITDGQIFLSADLFNSGLRPAINVGISVSRVGGAAQTKAIKKIAGTLKLELAQFDELAAFSQFASDLDEATQQQLERGKRLRELLKQPQFSPLNLAEQVAVVYAGVKGLIDEVPVEDVTKFATELREYLKLNKAEFIEEILKEKKLNDGLEATLKEVINEVKSSMLATV

SEQ ID NO: 173861 - protein, 276 aa, Unknown
  Bacterial polypetide isolated from the Sargasso Sea
ISQVLGAVVDVEFDGELPAIMNALEVDNNGTRLMLEVAQHLGENAVRTIAMDTTDGLVRGQTATDTGAPISMPVGPETLGRIMNVVGEPVDERGDIGTSKSYPIHRPAPEFVDQSTETEVLVTGIKVVDLLAPYARGGKIGLFGGAGVGKTVLIMELINNIAKAHGGYSVFAGVGERTREGNDLYHEMIESGIIDLKGKDSKVALVYGQMNEPPGARARVALSGLTQAEYFRDEEGQDVLFFVDNIFRFTQAGSEVSALLGRIPSAVGYQPTLATD

SEQ ID NO: 173862 - protein, 263 aa, Unknown
  Bacterial polypetide isolated from the Sargasso Sea
MQTGLKAIDSLIPIGRGQRELIIGDRQTGKTAIAIDTIINQKDNNKSKDEKKKLYCIYVAIGQKRSTVAQIVKTLQDTGAMEYSIVVAATASDPAPLQFLAPYTGCTMGEFFRDNGMHSLIVYDDLSKQAVAYRQMSLLLRRPPGREAFPGDVFYLHSRLLERAAKLNDENGGGSLTALPIIETQASDVSAYIPTNVISITDGQIFLETELFFQGIRPAVNVGISVSRVGSAAQIKAMKKVAGSIKLELAQYREMAAFAQFGS

SEQ ID NO: 173863 - protein, 174 aa, Unknown
  Bacterial polypetide isolated from the Sargasso Sea
PTNVISITDGQIFLETELFNQGIRPAVNVGLSVSRVGSAAQTKAMKKVAGSIKLELAQYREMAAFAQFGSDLDASTQKLLNRGSKLTELLKQDQYSPMTVAEQVVSVYSGVKGYLDSINTNQIRSFEKGLLDLIKSEKPEILDSIQKSGKIEEDTEKVLSEVISDYKKSNFEKK

SEQ ID NO: 173864 - protein, 100 aa, Unknown
  Bacterial polypetide isolated from the Sargasso Sea
MPSLDDLRKRISSVKSTQKITKAMKMVAAAKLRRAQEMAEKGRPYSDKMDIIIQNLSKAINDPLNAPKLLVGTGEDKTYLCVVMTADRGLCGGFNSNICK

SEQ ID NO: 173865 - protein, 196 aa, Unknown
  Bacterial polypetide isolated from the Sargasso Sea
IVNVSDGIIRIHGMGDVMYGELVEFENGVFGLALNLEQDSVGVVVLGDYLGLSEGQKVTCTGKILEVPVGEEMLGRVVDALGNPIDGKGELKTKQTAPIEVVAPGVIARQSVDQPVQIGLKSIDAMVPIGRGQRELIIGDRQTGKTAVAIDAIINQKGTGIKCIYVAIGQKQSTIANVVAKLEEYGAMEHTIVVSA

SEQ ID NO: 173866 - protein, 203 aa, Unknown
  Bacterial polypetide isolated from the Sargasso Sea
AKLNDENGGGSLTALPIIETQAGDVSAYIPTNVISITDGQIFLGTELFNQGIRPAVNVGLSVSRVGSAAQTKAMKKVAGSIKLELAQYREMAAFAQFGSDLDASTQKLLNRGSKLTELLKQNQYSPMTVAEQVVVIYAGVKGYLDSINISEIGSFEKGLLELVKSEKPEILESIQKSGKIEDEIDKTLSEIITNYKKTNFEKK

SEQ ID NO: 173867 - protein, 98 aa, Unknown
  Bacterial polypetide isolated from the Sargasso Sea
MPSLDDLRKRITSVKSTQKITKAMKMVAAAKLRKAQEMAEKGRPYSDKMDVIVQNLSKAISDLSNAPKLLVGTGQDKTHLCIVMTADRGLCGGFNTNI

SEQ ID NO: 173868 - protein, 229 aa, Unknown
  Bacterial polypetide isolated from the Sargasso Sea
QSVDQPVQIGLISIDAMVPIGRGQRELIIGDRQTGKTAVAIDAIINQKGTGIKCIYVAIGQKQSTIANVVAKLEEYGAMEHTIVVSAAAADPAAMQYLSAYSGCAMGEYFRDTGQDALIVYDDLSKQAVAYREISLLLRRPPGREAFPGDVFYLHSRLLERAARVNAEYVEKITEGKVKGKTGSLTALPIIETQAGDVSAFVPTNVISITDGQIFLETDLFNSGVRPAI

SEQ ID NO: 173869 - protein, 134 aa, Unknown
  Bacterial polypetide isolated from the Sargasso Sea
SELGIYPAVDPLDSTSRQLDPFVVGDDHYEVAQGVQKILQRYNELKDIIAILGMDELSEEDKGLVARARKAQRFLSQPFFVAEIFTGTPGKYVSLEDTIKAFKGILNGDYDHLPEQAFYMVGTIEEAVEKAKTL

SEQ ID NO: 173870 - protein, 263 aa, Unknown
  Bacterial polypetide isolated from the Sargasso Sea
MRKGKITQIIGAVVDVKFEGELPEILTALECNNGGVRLVLEVAQHLGESSVRTIAMDATEGLKRGDEVTDTGAPIKVPVGPETLGRIINVIGEPIDEKGEVKTKEKWPIHRSAPEFNEQSTETEILVTGIKVVDLLAPYAKGGKIGLFGGAGVGKTVLIMELINNVAKAHGGFSVFAGVGERTREGNDLYHEMIESGVIKTEGAGSKAALVYGQMNEPPGARARVALSGLTVAEYFRDQEGQDVLFFVDNIFRFTQAGSEVSA

SEQ ID NO: 173871 - protein, 219 aa, Unknown
  Bacterial polypetide isolated from the Sargasso Sea
MRKGQITQIIGAVVDVKFDGELPEILTALECNNAGNRLVLEVAQHLGESSVRTIAMDATEGLKRGDEVIDTGSPIKVPVGPETLGRIINVVGEPIDEKGEVKTKENWPIHRSAPEFNDQSTETEILVTGIKVVDLLAPYAKGGKIGLFGGAGVGKTVLIMELINNVAKAHGGFSVFAGVGERTREGNDLYHEMIESGVIKPEGDGSKAALVYGQMNEPP

SEQ ID NO: 173872 - protein, 204 aa, Unknown
  Bacterial polypetide isolated from the Sargasso Sea
MTGKTSQIMGAVVDVAFEDGHLPEIMNALNVDRGDEGTLVLEVAQHLGDNMVRTVAMDSTDGLTRGVEVLDTGTPISVPVGQETLGRLFDVLGNTIDGKGDVGTDKKYPIHRSAPKHEDLSTSTEILITGIKVVDLMEPYTKGGKTGLFGGAGVGKTVLIQELIRNIATEHGGFSVFAGVGERTREGNDLYNEMTESGVIDKTT

SEQ ID NO: 173873 - protein, 288 aa, Unknown
  Bacterial polypetide isolated from the Sargasso Sea
PREGNDLYHEMMESGVIVPDGESKAALVYGQMNEPPGARARVALTGLTQAEYFRDEEGQDVLFFVDNIFRFTQAGSEVSALLGRIPSAVGYQPTLGTELGNLQERITSTNKGSITSVQAIYVPADDLTDPAPATTFSHLDATTTLSRQIAELGIYPAVDPLDSTSRILDARVIGEEHYDVARSVQETLQSYKGLQEIIAILGMDELSEEDKLTVARARKIQRFLSQPFHVAEVFTGSPGKFVNLEDTIKGFQQIVAGEHDDLPEAAFYMVGTIDEAVEKAQTMAAEAA

SEQ ID NO: 173874 - protein, 293 aa, Unknown
  Bacterial polypetide isolated from the Sargasso Sea
GEMVEFPGSIAGMALNLERDNVGVVIFGSDKTIREGDIVKRTGSIVDVPIGKGLLGRVVDALGNPIDGKGALKNVKRSRVETKAPGIMPRESVSEPMQTGLKAIDSLIPVGRGQRELIIGDRQTGKTAIAIDTFLNQKSTNDKAGKDDTKKLFCIYVAVGQKRSTVAQIVKTLEERGALEYSIVVAATASDPAPMQFLAPYSAAAMGEFFRDNGMHAVVVYDDLSKQAVAYRQMSLLLRRPPGREAYPGDVFYLHSRLLERAAKLNGENGSGSLTALPIIETQGGDVSAFIPT

SEQ ID NO: 173875 - protein, 229 aa, Unknown
  Bacterial polypetide isolated from the Sargasso Sea
MFFNSLLTNFAALEVGQHLYWQIGNIRLHGQVFLTSWILLGALLVFISLGTKKMENDPKGLQNLLEFLWDYIRDLSRTQIGEKVYRDWMPFIGTLFLFVFVSNWGGALIPWRLIKLPSGELGAPTADINTTIALALLVSLSYFYAGLSNKGWRYFEYYVHPTPIMLPFKILEDFTKPLSLSFRLFGNILADELVVGVLVFLVPLILPIPVMFLGLFTSAIQALIFATLA

SEQ ID NO: 173876 - protein, 265 aa, Unknown
  Bacterial polypetide isolated from the Sargasso Sea
MEINPSEVTKILKEQIKKFGDKAEVTEVGQVLSVGDGIARIYGLDNVQAGEMVEFSDGSKGMALNLESENVGVVIFGDDRAVKEGDTVKRTGAIVDTPVGKELLGRVVDGLGNPIDGKGTLDKSLKRSRVEVKAPGIIPRKSVSEPMQTGLKSIDSLVPIGRGQRELIIGDRQTGKTAVAIDAIINQKKINESGDEKKKLYCIYVAVGQKRSTVRQIEKTLEEAGAMEYTTIVAATASDAAPLQFLAPYTGCTMGEYFRDNGMHA

SEQ ID NO: 173877 - protein, 305 aa, Unknown
  Bacterial polypetide isolated from the Sargasso Sea
KAIDSLIPIGRGQRELIIGDRQTGKTAVAVDTIINQKAINESNDEKKKLYCVYVAIGQKRSTVAQIVKTLEDAGAMKYTTVVSATASDSAPLQFLAPYTGCTIGEYFRDNGMHALIIYDDLSKQAVAYRQMSLLLRRPPGREAYPGDVFYLHSRLLERAAKLNEKNGGGSLTALPIIETQAGDVSAYIPTNVISITDGQIFLETELFNQGIRPAVNVGLSVSRVGSAAQTKAMKKVAGSIKLELAQYREMAAFAQFGSDLDVSTQKLLNRGSKLTELLKQNQYSPLTVAEQVISIFTGVSGYLDN

SEQ ID NO: 173878 - protein, 298 aa, Unknown
  Bacterial polypetide isolated from the Sargasso Sea
AVVDVKFDGELPEILTAWECKNGDNRLVLEVAQHLGETTVRTIAMDATEGLKRGDEVTNTNAPIQVPVGPETLGRIINVIGEPIDERGEVKTKESWPIHRAAPEFNDQSTETEILVTGIKVIDLLAPYAKGGKIGLFGGAGVGKTVLIMELINNVAKAHGGFSVFAGVGERTREGNDLYHEMIESGVIKKEGAGSKAALVYGQMNEPPGARARVALTGLTVAEYFRDQEGQDVLFFVDNIFRFTQAGSEVSALLGRIPSAVGYQPTLATDMGNLQERITTTNKGSITSVQAIYVPADD

SEQ ID NO: 173879 - protein, 274 aa, Unknown
  Bacterial polypetide isolated from the Sargasso Sea
YGLDNVQAGEMVEFTDGSKGMALNLESENVGVVIFGDDRAIKEGDTVKRTGAIVDTPVGKELLGRVVDGLGNPIDGKGVLDKKVKRSRVEVKAPGIIPRKSVSEPMQTGLKSIDSLVPIGRGQRELIIGDRQTGKTAVAIDAIINQKKINESNDEKQKLYCVYVAIGQKRSTVRQIEKTLEEAGAMEYTTIVAATASDAAPLQFLAPYTGCAMGEYFRDNGMHALIIYDDLSKQAVAYRQMSLLLRRPPGREAYPGDVFYLHSRLLERAAKLSD

SEQ ID NO: 173880 - protein, 283 aa, Unknown
  Bacterial polypetide isolated from the Sargasso Sea
DASEGLVRGQEVVDTDGPISVPVGNATLGRILNVVGEPVDEQGPVKAKESRAIHQPAPEFSEQSTESEVLVTGIKVIDLLAPYSKGGKIGLFGGAGVGKTVLIMELINNIAKVHSGFSVFAGVGERTREGNDLYHEMIESNVIKPDNLEESQVALVYGQMNEPPGARARVALTGLTLAEQFRDQSGTDVLFFVDNIFRFTQAGSEVSALLGRIPSAVGYQPTLATDMGSMQERITSTKNGSITSIQAVYVPADDLTDPAPATTFAHLDATTVLSRAISELGIY

SEQ ID NO: 173881 - protein, 192 aa, Unknown
  Bacterial polypetide isolated from the Sargasso Sea
MSKGIITQVIGAVVDVKFEGELPEILTALECKNGNNRLVLEVAQHLGESTARTIAMDATEGLKRGDEVINTKAPIKVPVGPETLGRIINVIGEPIDERGEVKTKESWPIHRAAPEFNDQSTETEILVTGIKVIDLLAPYAKGGKIGLFGGAGVGKTVLIMELINNVAKAHGGFSIFAGVGERTREGNDLYHE

SEQ ID NO: 173882 - protein, 290 aa, Unknown
  Bacterial polypetide isolated from the Sargasso Sea
KNFKRANKKIGEKAEVSEVGQVLSVGDGIARVYGLDNVQAGEMVEFTGGLKGMALNLENDNVGVVIFGDDRTIKEGDVVKRTGAIVDAPVGKTLLGRVVDALGNPIDGKGELDKKIERKRVDVKAPGIIPRQSVNQPMQTGLKAIDSLIPIGRGQRELIIGDRQTGKTAVAIDTIINQKEINKSAEEKDKLYCIYVAIGQKRSTVAQILKSLEDAGAMEYTTIVSATASDPAPLQFLAPYTGCTMGEYFRDNGMHALIIYDDLSKQAVAYRQMSLLLRRPPGREAYPGDV

SEQ ID NO: 173883 - protein, 153 aa, Unknown
  Bacterial polypetide isolated from the Sargasso Sea
MNNNGKITQIIGAVVDVNFSANLPEIYTALEVNNSGNKLILEVAQHLGENDVRTIAMDATEGLKRGDIVTNTGAPISVPVGPETLGRIINVVGDSIDEKGEVKTKEKWPIHRAAPKFTDQATETEQLVTGIKVIDLLAPYAKGGKIGLLEVQE

SEQ ID NO: 173884 - protein, 293 aa, Unknown
  Bacterial polypetide isolated from the Sargasso Sea
VFAGVGERTREGNDLYHEMMDSGVIKKDGPGSKAALVYGQMNEPPGARARVALTGLTVAEYFRDQEGQDVLFFVDNIFRFTQAGSEVSALLGRIPSAVGYQPTLATDMGNLQERITTTNKGSITSVQAIYVPADDLTDPAPATSFAHLDATTVLSRQIAEIGIYPAVDPLDSTSRILDPRVVGDEHYKVARDVQKILQSYKSLQDIIAILGMDELSEEDKLVVARARKIQRFLSQPFFVAEVFTGSPGKLVDLESTIKGFDAICKGEYDHLPEAAFYMVGTIEESIDKAKKME

SEQ ID NO: 173885 - protein, 302 aa, Unknown
  Bacterial polypetide isolated from the Sargasso Sea
STWRIFSICWCGERTREGNDLYHEMIESGVIKPEGSGSKAALVYGQMNEPPGARARVALSGLTVAEYFRDQEGQDVLFFVDNIFRFTQAGSEVSALLGRIPSAVGYQPTLATDMGNLQERITTTNKGSITSVQAIYVPADDLTDPAPATSFSHLDATTVLSRQIAEIGIYPAVDPLDSTSRILDPRIVGDEHYRVAREVQKVLQTYKSLQDIIAILGMDELSEEDKLIVARARKIQRFLSQPFFVAEVFTGSPGKLVDLESTIKGFDAICKGEYDHLPEAAFYMVGTIEEAIEKAEKMAKDA

SEQ ID NO: 173886 - protein, 239 aa, Unknown
  Bacterial polypetide isolated from the Sargasso Sea
AEYFRDEEGQDVLFFVDNIFRFTQAGSEVSALLGRIPSAVGYQPTLATDMGALQERITSTNKGSITSVQAIYVPADDLTDPAPATSFSHLDATTVLSRQIAELGIYPAVDPLDSTSRILDPRVLGEEHYDVAREVQKILQTYKSLQDIIAILGMDELSEEDKLTVSRARKIQRFLSQPFHVAEVFTGFPGKFVEIADTIKGFKDLCSGKYDDIPEAAFYMVGTMDEALEKAKKMAKENV

SEQ ID NO: 173887 - protein, 304 aa, Unknown
  Bacterial polypetide isolated from the Sargasso Sea
KSTRWLFRFCWCCERTREGNDLYHEMIESGIIDLKGKDSKVALVYGQMNEPPGARARVALSGLTQAEYFRDEEGQDVLFFVDNIFRFTQAGSEVSALLGRIPSAVGYQPTLATDMGALQERITTTKKGSITSVQAIYVPADDLTDPAPATSFSHLDATTVLNRAISEKGIYPAVDPLDSTSRILDPQVVGDDHYRVAREVQRVLQTYKSLQDIIAILGMDELSEEDKLTVARARKIEKFLSQPFFVAEVFTGSPGKYVDLEDTIKSFDGLVKGEYDHMPEAAFYMVGGIDEAIEKAKKLEAEAA

SEQ ID NO: 173888 - protein, 318 aa, Unknown
  Bacterial polypetide isolated from the Sargasso Sea
APYARGGKIGLFGGAGVGKTVLIMELINNIAKAHGGYSVFAGVGERTREGNDLYHEMIESGIIDLKGKDSKVALVYGQMNEPPGARARVALSGLTQAEYFRDEEGQDVLFFVDNIFRFTQAGSEVSALLGRIPSAVGYQPTLATDMGALQERITTTKKGSITSVQAIYVPADDLTDPAPATSFSHLDATTVLNRAISEKGIYPAVDPLDSTSRILDPQVVGDDHYRVAREVQRVLQTYKSLQDIIAILGMDELSEEDKLTVARARKIEKFLSQPFFVAEVFTGSPGKYVDLEDTIKSFDGLVKGEYDHMPEAAFYMVG

SEQ ID NO: 173889 - protein, 193 aa, Unknown
  Bacterial polypetide isolated from the Sargasso Sea
GGSLTALPIIETQEGDVSAYIPTNVISITDGQIYLETNLFNSGIRPAIDVGLSVSRVGGNAQIKAMKSVAGTLRLDLAQYRELEAFAKFGSDLDKATLSQLTRGERMVEILKQNQYVPMDVEKQIAIIFAASKGQLDDLDIEEISDFETGLFEYLDANASESLASIVNEGTISENTGEKLEKAISDFKAGFKA

SEQ ID NO: 173890 - protein, 178 aa, Unknown
  Bacterial polypetide isolated from the Sargasso Sea
DVSAFVPTNVISITDGQIFLETDLFNSGVRPAIDPGLSVSRVGGAAQTKIIKKLSGGIRTDLAQYRELAAFSQFASDLDDATKEQLEHGKRITELLKQKQYSPMSVADQAMSLYAADKGYMKDVDIDKVGDFESALLAYFESEKSDLKKQINDTGDWDDDIENQFKELVEDFKKTQTY

SEQ ID NO: 173891 - protein, 290 aa, Unknown
  Bacterial polypetide isolated from the Sargasso Sea
VRGQKLPIFSAAGLPHNDIALQIARQAKLVGSDDDFVVVFCAMGITAEEYNFFVHDLERTGALENSALFVNLADDPAVERLITPRLALTAAEYLAFEHDYHVLVIYTDMTNYCESLRQIGAAREEVPGRRGYPGYMYTDLAMLYERAGLVKGKKGSITQFPILTMPGDDITHPIPDLSGYITEGQIVISRELHQKGIYPPINVLPSLSRLMNAGIGDGKTREDHKSVSDQLYAAYAQGRELRGLVAIVGEDALNERDLQLLKFADIFENEFLRQSRDEDRSIGEGTLDLA

SEQ ID NO: 173892 - protein, 150 aa, Unknown
  Bacterial polypetide isolated from the Sargasso Sea
MVATPSTSSQTKGVVRQVIGPVLDVEFPAGKLPKILNALRIEAKNPAGQDIALTAEVQQLLGDHRVRAVAMSGTDGLVRGMEAIDTGAPISVPVGEATLGRIFNVLGEPVDEQGPVNTKDTAPIHRSAPKLTDLETKPKVFETGIKSIDP

SEQ ID NO: 173893 - protein, 216 aa, Unknown
  Bacterial polypetide isolated from the Sargasso Sea
YPGDVFYLHSRLLERAAKLSDEHGGGSLTALPIIETQGGDVSAYIPTNVISITDGQIFLETELFNQGIRPAINVGLSVSRVGSAAQTKAMKKVSGSMKLELAQYREMAAFAQFGSDLDASTQQLLNRGSKLTELLKQKQYSPMTVAEQVISVFCGVKGYLDDIDLKNIAEFENKIIERCKSDKPEIIESILGSGKLEEESEKNLIDVITNLKKTIK

SEQ ID NO: 173894 - protein, 286 aa, Unknown
  Bacterial polypetide isolated from the Sargasso Sea
APPSYEDQAESSEILETGIKVIDLMCPFAKGGKVGLFGGAGVGKTVNMMELIRNIAYETSGYSVFAGVGERTREGNDFYLEMTESQVLDKVALVYGQMNEPPGCRMRVALSGLTIAEKFRDEGKDVLLFVDNIYRYTLAGVECSSLLGRMPSAVGYQPTLAEEMGVLQERITSTKTGSITSVQAIYVPADDLTDPSPATTFAHLDATVVLSRQIASLGIYPAVDPLDSTSRQLDPAIVGQEHYDVAKGVQQVLQRYLELKDIIAILGMDELSDEDKQTVNRARRIE

SEQ ID NO: 173895 - protein, 296 aa, Unknown
  Bacterial polypetide isolated from the Sargasso Sea
MELINNIAKAHGGFSVFAGVGERTREGNDLYHEMIESGVIKTEGKGSKAALVYGQMNEPPGARARVALTGLTVAEYFRDKEGQDVLFFVDNIFRFTQAGSEVSALLGRIPSAVGYQPTLATDMGNLQERITSTDKGSITSVQAIYVPADDLTDPAPATSFSHLDATTVLSRQIAEIGIYPAVDPLDSTSRILDPRIVGEEHYRVARDVQRILQAYKSLQDIIAILGMDELSEEDKLTVARARKIQRFLSQPFFVAEVFTGSPGKLVDLDSTIKGFDAICKSEYDHLPEAAFYMVGG

SEQ ID NO: 173896 - protein, 245 aa, Unknown
  Bacterial polypetide isolated from the Sargasso Sea
MDISAAEISKILKEQISDYGSKASVSEVGKVLSIGDGIARVYGLDEVQLGEMVEFDGGVKGMALNLESDNVGVVIFGDDRSIKEGDTVKRTKSIVDVQVGKELLGRVVDGLGNPIDGKGPIPKSAKRTRVEVKAPGIMPRKSVHEPMMTGLKAIDTLVPVGRGQRELIIGDRQIGKTAIALDTFINQKETNEAAGKDDSKKLFCIYVAIGQKRSSVAQIVKTLEEYGAMDYTIVVAATASESAPM

SEQ ID NO: 173897 - protein, 69 aa, Unknown
  Bacterial polypetide isolated from the Sargasso Sea
KGTKAALVYGQMNEPPGARARVGLTGLTVAEYFRDKEGQDVLFFVDNIFRFTQAGSEVSALLGRIPSAV

SEQ ID NO: 173898 - protein, 134 aa, Unknown
  Bacterial polypetide isolated from the Sargasso Sea
MAAAATAGTKGVVRQVIGPVLDVEFPAGKLPKILNAIRIEGKNTAGEQVALTAEVQQLLGDHRVRAVAMSGTDGLVRGMDAIDTGAAISVPVGEATLGRIFNVLGEPVDEQGPVNTTTTAPIHRDAPKLTELET

SEQ ID NO: 173899 - protein, 255 aa, Unknown
  Bacterial polypetide isolated from the Sargasso Sea
VFAGVGERTREGNDLYHEMMDSGVIKKDGPGSKAALVYGQMNEPPGARARVALTGLTVAEYFRDQEGQDVLFFVDNIFRFTQAGSEVSALLGRIPSAVGYQPTLATDMGNLQERITTTNKGSITSVQAIYVPADDLTDPAPATSFAHLDATTVLSRQIAEIGIYPAVDPLDSTSRILDPRVVGDEHYKVARDVQKILQSYKSLQDIIAILGMDELSEEDKLVVARARKIQRFLSQPFFVAEVFTGSPGKLVDLES

SEQ ID NO: 173900 - protein, 150 aa, Unknown
  Bacterial polypetide isolated from the Sargasso Sea
MNKKGKITQIIGAVVDVNFDTDLPEIYTALEANNSGNKLILEVAQHLGENDVRTIAMDATEGLKRGDEVINTGSPISVPVGPETLGRIINVVGESIDEKGDVKTKEKWPIHRSAPKFTDQATETEQLVTGIKVVDLLAPYAKGGKNWIIW

SEQ ID NO: 173901 - protein, 259 aa, Unknown
  Bacterial polypetide isolated from the Sargasso Sea
QMNEPPGARARVALTGLTVAEYFRDQEGQDVLFFVDNIFRFTQAGSEVSALLGRIPSAVGYQPTLATDMGNLQERITTTNKGSITSVQAIYVPADDLTDPAPATSFAHLDATTVLSRQIAEIGIYPAVDPLDSTSRILDPRIVGDEHYRVAREVQKILQTYKSLQDIIAILGMDELSEEDKLVVARARKIQRFLSQPFFVAEVFTGSPGKLVDLESTIKGFDAICKGEYDHLPEAAFYMVGTIEEAIEKGEKIAKDAAA

SEQ ID NO: 173902 - protein, 298 aa, Unknown
  Bacterial polypetide isolated from the Sargasso Sea
GLFGGAGVGKTVTIMELINNIAKAHGGFSVFAGVGERTREGNDLYHEMIESGVIKTDGKGSKAALVYGQMNEPPGARARVALTGLTVAEYFRDKEGQDVLFFVDNIFRFTQAGSEVSALLGRIPSAVGYQPTLATDMGNLQERITSTDKGSITSVQAIYVPADDLTDPAPATSFSHLDATTVLSRQIAEIGIYPAVDPLDSTSRILDPRVVGEEHYRVARDVQKILQAYKSLQDIIAILGMDELSEEDKLTVARARKIQRFLSQPFFVAEVFTGSPGKLVDLNDTIKGFDAICKGEYD

SEQ ID NO: 173903 - protein, 176 aa, Unknown
  Bacterial polypetide isolated from the Sargasso Sea
MSGLNPSEISSVLKDKISGLDLKAETKNEGTIVNVSDGIIRIHGMGDVMYGELVEFENGVFGLALNLEQDSVGVVVLGDYLGISEGQKVTCTGKILEVPVGEEMLGRVVDALGSPIDGKGELKTKQTAPIEVVAPGVIARQSVDQPVQIGLKSIDAMVPIGRGQRELIIGDRQTGK

SEQ ID NO: 173904 - protein, 248 aa, Unknown
  Bacterial polypetide isolated from the Sargasso Sea
QAVAYREISLLLRRPPGREAFPGDVFYLHSRLLERAARVNAEYVEKITEGKVKGKTGSLTALPIIETQAGDVSAFVPTNVISITDGQIFLETDLFNSGVRPAIDPGLSVSRVGGAAQTKIIKKLSGGIRTDLAQYRELAAFSQFASDLDDATKEQLEHGKRITELLKQKQYSPMSVADQAMSLYAADKGYMKDVDIDKVGDFESALLAYFESEKSDLKKQINDTGDWDDDIENQFKELVEDFKKTQTY

SEQ ID NO: 173905 - protein, 243 aa, Unknown
  Bacterial polypetide isolated from the Sargasso Sea
MSVAARQFSTSQKVDAAKAGAGEISSILEERVLGAAPAVNLEETGRVLSIGDGIARVYGLKNIQAEEMVEFSSGLKGMALNLEPDNVGVVVFGNDKLIKEGDIVKRTGAIVDVPVGNEILGRVVDALGNPIDGKGPIGCKERYRVGLKAPGIIPRQSVKEPMQTGIKAVDSLVPIGRGQRELIIGDRQTGKTAVAIDTIINQKRFNDAGDAKKKLYCIYVAVGQKRSTVAQIVKRLTDADAMK

SEQ ID NO: 173906 - protein, 138 aa, Unknown
  Bacterial polypetide isolated from the Sargasso Sea
MRKGQITQIIGAVVDVKFEGELPEILTALECDNGGNRLVLEVAQHLGESSVRTIAMDATEGLKRGDEVIDTAAPIKVPVGPETLGRIINVIGEPIDERGEVKSSDNWPIHRAAPEFNDQSTETEILVTGIKVIDLLAP

SEQ ID NO: 173907 - protein, 222 aa, Unknown
  Bacterial polypetide isolated from the Sargasso Sea
MEINPSEVTKILKEQINKFGDKAEISEVGQVLSVGDGIARIYGLDNVQAGEMVEFSDGSKGMALNLESDNVGVVIFGEDRSIKEGDTVKRTGAIVDTPVGKELLGRVVDGLGNPIDGKGALDKGVKRSRVEVKAPGIIPRKSVSEPMQTGLKSIDSLVPIGRGQRELIIGDRQTGKTAVAIDAIINQKKINESGDEKQKLYCVYVAIGQKRSTVRQIEKTLE

SEQ ID NO: 173908 - protein, 129 aa, Unknown
  Bacterial polypetide isolated from the Sargasso Sea
YPAVDPLDSTSRQLDPLVVGEEHYNVAQGVQGVLQKYKELKDIIAILGMDELSEEDKLAVARARKVERFLSQPFTVAEVFTGSPGKYVKLEDTIKSFKGILAGDYDDLPEQAFYMVGTIEEAVEKAKTL

SEQ ID NO: 173909 - protein, 196 aa, Unknown
  Bacterial polypetide isolated from the Sargasso Sea
LTALPVIETQAGDVSAYIPTNVISITDGQIFLETELFFKGIRPAVNVGLSVSRVGSAAQIKAMKQVSGSIKLDLAQFREMESFSQFASDLDQSTRNLLDRGRRLTEILKQPQYYPLKVEEQVVIIFAGVKGHLDNIEIKNVTSFEEVLLKEIRSSGKNILQKISTEQSISEELEKEINLFIENLKKKFLGENDAKS

SEQ ID NO: 173910 - protein, 275 aa, Unknown
  Bacterial polypetide isolated from the Sargasso Sea
VEFDKAQIPNIYDALVVNENNLVLETQQQLGDGVVRTVAMGTTEGLKRGLDVENTKAPISVPVGEATLGRIMNVLGDPIDMKGEVKTKERMPIHRKPPEYVDLSDSNEILETGIKVIDLVCPFAKGGKVGLFGGAGVGKTVNMMELIRNIAIEHSGYSVFAGVGERTREGNDFYHEMTDSNVLDKVSLVYGQMNEPPGNRLRVALTGLTMAEKFRDEGRDVLLFVDNIYRYTLAGVEVSALLGRMPSAVGYQPTLAEEMGVLQERITSTKTGSIT

SEQ ID NO: 173911 - protein, 234 aa, Unknown
  Bacterial polypetide isolated from the Sargasso Sea
MKKGKITQIIGAVVDVKFDGELPEILTALECKNGENRLVLEVAQHLGETSVRTIAMDATEGLKRGDDVTDTGAPIKVPVGPETLGRIVNVIGEPIDEKGEVKTKESWPIHRAAPEFNDQSTETEILVTGIKVVDLLAPYAKGGKIGLFGGAGVGKTVLIMELINNVAKAHGGFSVFAGVGERTREGNDLYHEMIESGVIKPDGEGSKAALVYGQMNEPPGARARVALSGLTVAE

SEQ ID NO: 173912 - protein, 309 aa, Unknown
  Bacterial polypetide isolated from the Sargasso Sea
MVQFSDGSKGMALNLESDNVGVVIFGDDRQIKEGDEVKRTKSIVDVPVGKELLGRVVDGLGNPIDGKGNLPKNIKRNRVEVKAPGIIPRQSVNEPMQTGLKAIDSLIPIGRGQRELIIGDRQTGKTAVAVDTIINQKEVNNTDDEKKKLYCVYVAIGQKRSTVAQIVKTLEDAGAMKYTTVVSATASDSAPLQFLAPYTGCTIGEYFRDNGMHALIIYDDLSKQAVAYRQMSLLLRRPPGREAYPGDVFYLHSRLLERAAKLNENNGGGSLTALPIIETQAGDVSAYIPTNVISITDGQIFLETELFNQ

SEQ ID NO: 173913 - protein, 179 aa, Unknown
  Bacterial polypetide isolated from the Sargasso Sea
TLEGSITSIQAVYVPADDLTDPAPATTFAHLDATTVLARALAAKGIYPAVDPLDSTSTMLQPSVVGDEHYKTARAVQSTLQRYKELQDIIAILGLDELSEEDRLTVDRARKIEKFLSQPFFVAEIFTGMSGKYVKLEDTIAGFNMILSGELDDLPEQAFYLVGNIDEVKAKAEKIKSEK

SEQ ID NO: 173914 - protein, 212 aa, Unknown
  Bacterial polypetide isolated from the Sargasso Sea
MFFNSLLTNFAALEVGQHLYWQIGNIRLHGQVFLTSWILLGALLVFISLGTKKMENDPKGLQNLLEFLWDYIRDLARTQIGEKVYRDWMPFIGTLFLFVFVSNWGGALIPWRLIKLPSGELGAPTADINTTIALALLVSLSYFYAGLSNKGWRYFEYYVHPTPIMLPFKILEDFTKPLSLSFRLFGNILADELVVGVLVFLVPLIIPIPVSS

SEQ ID NO: 173915 - protein, 167 aa, Unknown
  Bacterial polypetide isolated from the Sargasso Sea
YVPADDLTDPAPATSFSHLDATTVLSRQIAELGIYPAVDPLDSTSRILDPRVVGDEHYRVAREVQRILQAYKSLQDIIAILGMDELSEEDKLTVARARKIQRFLSQPFFVAEVFTGSPGKLVDLDSTIKGFDAICKGEYDHLPEAAFYMVGSIEEVVEKAEKLKKDS

SEQ ID NO: 173916 - protein, 175 aa, Unknown
  Bacterial polypetide isolated from the Sargasso Sea
ALGSITSFQAVYVPADDLTDPSPATTFAHLDATLVLSRQVAELGIYPAVDPLDSTSRQLDPLVVGQEHYDTARAVQGTLQRYKELRDIIAILGMDELSEEDKQVVNRARKIQRFLSQPFFVAETFTGSPGKFVSLKDTIRSFQGIIDGQYDDIPEQAFYMVGGIEEAVEKAKTVT

SEQ ID NO: 173917 - protein, 287 aa, Unknown
  Bacterial polypetide isolated from the Sargasso Sea
DTIINQKEKNKSKNDKDKLFCIYVSVGQKRSTVAQIVKTLEEQGALEYTVVVAATASDPAPLQYLAPYTGCTIGEWFRDNGMHALIIYDDLSKQAVAYRQMSLLLRRPPGREAYPGDVFYLHSRLLERAAKLNKDNGSGSLTALPIIETQAGDVSAYIPTNVISITDGQIFLETDLFYQGIRPAINVGLSVSRVGSAAQVKGMKQVAGSIKLELAQYREMAAFAQFGSDLDVSTQKLLNRGERLTELLKQGQYSPLAVEEQIVIIFAGVNGYLDDLNVNVVGDFENF

SEQ ID NO: 173918 - protein, 224 aa, Unknown
  Bacterial polypetide isolated from the Sargasso Sea
MEELNPSEISQVIKQKIDALDTTSTPSNEGTIVFLADGIARIHGLGEVMNGELIEFDHGIMGMALNLEVDSVGAVILGDYKLLAEGGSAKCTGRILEVPVGEALMGRVVDALGNPIDGKGEVQASETSPVEKVAPGVISRKSVDQPVQLGIKAVDSMVPIGRGQRELIIGDRQTGKTAIAIDAIINQKDTGVKCIYVAIGQKQSSIAQVVRTLEQYGAMENTIV

SEQ ID NO: 173919 - protein, 204 aa, Unknown
  Bacterial polypetide isolated from the Sargasso Sea
MVNIRPDEISSIIRQQIEGYDKEVQVNNVGTVLQVGDGIARVYGLDQVMSGELLEFEDGSIGIALNLENDNVGVVLMGTGLDVLEGSTVTATGKIAQVEVGPSILGRIVNPLAAPIDGLGDIATEESNLIEAMAPGIISRKSVCEPMQTGITAIDTMIPVGRGQRELIIGDRQTGKTSIAVDTIINQKTEDVICVYVAVGQKAS

SEQ ID NO: 173920 - protein, 93 aa, Unknown
  Bacterial polypetide isolated from the Sargasso Sea
QDIIAILGMDELTEEDKIIVGRARRIARFLSQPFFVAEQFTGISGKYVKLEETVESFERVANGEFDHLPEQAFYMQGGIDEVVAEAEKLAAEG

SEQ ID NO: 173921 - protein, 154 aa, Unknown
  Bacterial polypetide isolated from the Sargasso Sea
MPSLDDLRKRITSVKSTQKITKAMKMVAAAKLRKAQENAEKGRPYSEKMNNVILNLSKSITDKENAPKLLVGTGEEKVHLCIVLTADRGLCGGFNTNIIKKAKSYFEKIISENKTLKIITVGSKGYDQLKRQYKSYIVENISFKESKNINYFDA

SEQ ID NO: 173922 - protein, 172 aa, Unknown
  Bacterial polypetide isolated from the Sargasso Sea
VQAVYVPADDLTDPAPATTFSHLDATTVLSRKIAELGIYPAVDPLDSTSRILTPEILGDDHYNCAQRVKEMLQKYKELQDIIAILGMEELSEEDKLVVSRARRVQRFLSQPFHVAEQFTGIPGVLVDIKDTIKGFNMIMDGELDHLPEAAFNLKGTIEEAIEAGEKMIAEAK

SEQ ID NO: 173923 - protein, 178 aa, Unknown
  Bacterial polypetide isolated from the Sargasso Sea
DVSAFVPTNVISITDGQIFLESSLFSSGLKPAMDPGISVSRVGGAAQVPIIKKLGGGIKTALAQYRELEAFAQFASDLDEASKEQLEHGERVTELTKQDQFSPMSVAEMGLMLFTANEGFLREVEVEKIKDFEKALISYMNSEHKELMDRVSETGEYNDEIEGAFKEALDKFMSTQTW

SEQ ID NO: 173924 - protein, 196 aa, Unknown
  Bacterial polypetide isolated from the Sargasso Sea
PYSACAMGEYFMDKGKHVLVVYDDLSKHAVAYRQLSLLLKRPPGREAFPGDVFYLHSRLLERALKYSDEKGAGSLTALPIIETQAGDVSAYIPTNVISITDGQIYLETDLFNSGIKPAVNPGISVSRVGGNAQIKATKQVAGSLRLDLSQYWEMEAFAQFGSDLDKNTLAQLERGKRLIEILKQDQYKPLRISQQI

SEQ ID NO: 173925 - protein, 280 aa, Unknown
  Bacterial polypetide isolated from the Sargasso Sea
VVDVKFQDDLPEIYTALETNNGGNKLILEVAQHLGENSVRTIAMDSTEGLKRGDKVLNTNAPISVPVGPETLGRIINVIGQPIDEKGDVKTKEKWPIHRPSPKFTDQSTETEILVTGIKVIDLLAPYAKGGKIGLFGGAGVGKTVTIMELINNIAKAHGGFSVFAGVGERTREGNDLYHEMIESGVIKKDGKGSKAALVYGQMNEPPGARARVALTGLTVAEYFRDQEGQDVLFFVDNIFRFTQAGSEVSALLGRIPSAVGYQPTLATDMGNLQERITST

SEQ ID NO: 173926 - protein, 311 aa, Unknown
  Bacterial polypetide isolated from the Sargasso Sea
KTVLIMELINNIAKAHGGYSVFAGVGERTREGNDLYHEMIESGIIDLEGDKSKVALVYGQMNEPPGARARVALSGLTQAEYFRDEEGQDVLFFVDNIFRFTQAGSEVSALLGRIPSAVGYQPTLATDMGALQERITTTNKGSITSVQAIYVPADDLTDPAPATSFSHLDATTVLNRAISEKGIYPAVDPLDSTSRILDPQVVGEDHYRVAREVQKVLQTYKSLQDIIAILGMDELSEEDKLTVTRARKIEKFLSQPFFVAEVFTGSPGKYVELEDTIKSFDGLVKGEYDHMPESAFYMVGGIEEAMKKLKN

SEQ ID NO: 173927 - protein, 275 aa, Unknown
  Bacterial polypetide isolated from the Sargasso Sea
MPSLDDLKKRISSIKSTQKITKAMKMVAAAKLRKAQESAEKGRPFSEKMNNIILNLSKSISDKNNASKFLVGTGKNNVHLCVVITADRGLCGGFNTNICRKAKSYFDKTIKEGKTLKIFTVGSKGHDQIKRAYGSYIIEKINFKGMKKITYREAEKIGNKIIDLFKGDQFDVCKIFYNKFKNVITQIPQAQQIIPVESSENKEEEKKLENFYEFEPEENEILNDLLPRNISYQIFKAFLENAASEQGSRMTAMDNASRNAGDLVNKLTITYNRSR

SEQ ID NO: 173928 - protein, 185 aa, Unknown
  Bacterial polypetide isolated from the Sargasso Sea
MGVLQERITSTKTGSITSIQAVYVPADDLTDPSPATTFAHLDATVVLARSIAELGIYPAVDPLDSNSRQLDPGIVGQEHYDTARAVQQVLQRYKELQDIIAILGMDELSEEDKLTVQRARKIQRFLSQPFFVAEVFTGSPGQYVSLRDSIKAFQGIVAGDYDDLPEQAFYMVGTIEEAVEKAKSM

SEQ ID NO: 173929 - protein, 83 aa, Unknown
  Bacterial polypetide isolated from the Sargasso Sea
MENIGKITQLIGAVVDVSFEKELPEIYTALEVNNKGNKLVLEVAQHLGENSVRTIAMDSTEGLKRGDKVINTGAPISVPVGPE

SEQ ID NO: 173930 - protein, 242 aa, Unknown
  Bacterial polypetide isolated from the Sargasso Sea
MDSSEGLKRGDEVTDTGEPIQVPVGPETLGRIINVIGEPIDEKGEIKTKENWPIHRQAPSFNDQSTETEILVTGIKVIDLLAPYAKGGKIGLFGGAGVGKTVIIMELINNIAKAHGGFSVFAGVGERTREGNDLYHEMIESGVIKPEGTGSKAALVYGQMNEPPGARARVALTGLTVAEYFRDQEGQDVLFFVDNIFRFTQAGSEVSALLGRIPSAVGYQPTLATDMGNLQERITTTNKGSI

SEQ ID NO: 173931 - protein, 191 aa, Unknown
  Bacterial polypetide isolated from the Sargasso Sea
MPSLDDLRKRISSVKSTQKITKAMKMVAAAKLRKAQEMAEKGRPYSDKMDLIIQNLSKAINDPSNAPKLLVGTGEDKTHLCVVMTADRGLCGGFNTNICKLAKKYFDEAIKSSKNLKIITVGTKGLDQLKRDYGQYIIKRINLKDRKKLSFLDAEEIGKQIVELFKNNEFDKCFIFYNKFKNVISQIPQQQ

SEQ ID NO: 173932 - protein, 291 aa, Unknown
  Bacterial polypetide isolated from the Sargasso Sea
TVTIMELINNVAKAHGGYSVFAGVGERTREGNDLYHEMVESGVIKTDGPGSKAALVYGQMNEPPGARSRVGLTGLTLAEYFRDEEGQDVLFFVDNIFRFTQAGSEVSALLGRIPSAVGYQPTLATDMGALQERITSTNKGSITSVQAIYVPADDLTDPAPATSFAHLDATTVLSRQISEMGIYPAVDPLDSTSRVLDPRIVGDEHYNTAREVQEILQQYKSLQDIIAILGMDELSEEDKLVVARARKIQKFLSQPFHVAEVFTGSPGAFVSLEDNIKGFKGIVSGEYDNLP

SEQ ID NO: 173933 - protein, 98 aa, Unknown
  Bacterial polypetide isolated from the Sargasso Sea
MANNLTGKISQVLGAVVDVEFDGELPAIMNALEVDNNGTRLMLEVAQHLGENAVRTIAMDTTDGLVRGQTATDTGAPISMPVGPETLGRIMNVVGEPV

SEQ ID NO: 173934 - protein, 121 aa, Unknown
  Bacterial polypetide isolated from the Sargasso Sea
DPRIVGEEHYTVAREVQRILQTYKSLQDIIAILGMDELSEEDKLTVARARKIQRFLSQPFFVAEVFTGTPGKLVDLEATIKGFDAICKGEYDHLPESAFYMVGTIEEAVEKAEKMAKDAAA

SEQ ID NO: 173935 - protein, 283 aa, Unknown
  Bacterial polypetide isolated from the Sargasso Sea
KKRIASVKSTQKITKAMKMVAAAKLRRAQESAEKGRPYSEKMNNVILNLSNGISDKENAPKLLSGTGQEKTHLCVVMTSDRGLCGGFNSNIIKKAKSYFAKILDEGKELKIITVGSKGNDQLKRVYGDKIIENISFKESKNANYFDADKVGKMVIEKFEAGEFDVCTIFFNQFKNVITQIPQAQQIIPLNNEGEESTSEESYEFEPDEDEILSNLLPKNISTQIFKAMLENSASEQGSRMSAMDNATRNAGEMVDKLTIEYNRSRQAAITKELIEIISGAESL

SEQ ID NO: 173936 - protein, 135 aa, Unknown
  Bacterial polypetide isolated from the Sargasso Sea
NYPAVDPLDSTSRVLDPAIVGDEHYTVAREVQRILQTYKNLQDIIAILGMDELSEEDKLTVARARKIQRFLSQPFHVAEVFTGSPGVFVNLEDTIKGFKGICAGEYDHLPEAAFYMVGTIEEATEKAQKMAVEAA

SEQ ID NO: 173937 - protein, 265 aa, Unknown
  Bacterial polypetide isolated from the Sargasso Sea
ESGVIDKTALVFGQMNEPPGARLRVGLSALTMAEYFRDDEGRDVLLFVDNIFRFTQAGSEVSALLGRMPSAVGYQPTLSTEMGDLQERITSTKKGSITSVQAIYVPADDLTDPAPATAFAHLDATSVLERKIAELGIYPAIDPLTSTSRILDPRVIGDRHYNVARSVQATLQQYKDLQDIIAILGMDELSDEDKMVVSRARKMQKFMSQPFFVAEQFTGIEGRYVKLEDSIAGFEAILNGEVDDLPENAFSYVGSIDEAIEKGKK

SEQ ID NO: 173938 - protein, 168 aa, Unknown
  Bacterial polypetide isolated from the Sargasso Sea
ITDGQIFLSADLFNSGLRPAINVGISVSRVGGAAQTKAIKKIAGTLKLELAQFDELAAFSQFASDLDEATQQQLERGKRLRELLKQPQFSPLNLAEQVAVVYAGVKGLIDEVPVEDVTKFATELREYLKLNKAEFIEEILKEKKLNDGLEATLKEVINEVKSSMLATV

SEQ ID NO: 173939 - protein, 127 aa, Unknown
  Bacterial polypetide isolated from the Sargasso Sea
KQVAGTLRLDLAQYREKEAFAQFGSDLDQATQKQLARGQRLVEVLKQQQYQPMPWVDQVVSIFAATNGYLDDLPIDAVSKFEKDFLNYMNSSMSDLKKSIEKEVQLNDQSEKQLKSALDEFVKTFSQ

SEQ ID NO: 173940 - protein, 293 aa, Unknown
  Bacterial polypetide isolated from the Sargasso Sea
DGKGEVQTDQTAPVEKVAPGVISRKSVDQPVQLGIKAVDSMVPIGRGQRELIIGDRQTGKTAIAIDAIINQKDTGVKCIYVAIGQKQSSIAQVVRTLEQYGAMENTIVVVAAAADPAPMQYIAPFAACSMGEYFRDRGEDALIIYDDLSKQAVAYRQMSLLLRRPPGREAYPGDVFYLHSRLLERAARVNEEYVENYTNGEVKGKTGSLTALPIIETQAGDVSAFVPTNVISITDGQIFLESSLFSSGLKPAMDPGISVSRVGGAAQVPIIKKLGGGIKTALAQYRELEALPN

SEQ ID NO: 173941 - protein, 197 aa, Unknown
  Bacterial polypetide isolated from the Sargasso Sea
TQPTLADEMGFLQERITSLKGRSITSLQAVYVPADDITDPAPHTAFAHLDARTVLSRSIADLGIYPAVDPLDSSSRILDPGVVGDEHYETAREVQRVLQRYNDLQDIIAILGIDELSEEDKQIVGRARRIQRFLSQPMFVAEQFTGIEGKFVSIKDSVEAFKTILSGELDSVPEQAFYMTGGLDEVMSKAKELEENL

SEQ ID NO: 173942 - protein, 305 aa, Unknown
  Bacterial polypetide isolated from the Sargasso Sea
IGDRQTGKTAVAIDAIINQKYTHETDDPVYCVYVAIGQKASTVASLVSELEAQGAMEYTVVVAANASDPAPMQYIAPYAGCAMGEFFRDNGQHSLIVYDDLSKQAVAYRQMSLVLRRPPGREAFPGDVFYLHSRLLERASKLSKDHGGGSLTALPVIETQEGDVSAYIPTNVISITDGQIYLETNLFNSGIRPAIDVGLSVSRVGGNAQIKAMKKVAGTLRLDLAQYRELEAFAKFGSDLDKSTLAQLTRGERMVEILKQNQYVPMNVEKQVAIIFAASEGYLDDIAADKVDEFESGLFEYLDAN

SEQ ID NO: 173943 - protein, 69 aa, Unknown
  Bacterial polypetide isolated from the Sargasso Sea
QRFLSQPFFVAEVFTGSPGKLVDLDSTIKGFDAICKGEYDNLPEAAFYMVGTIEEAIEKAKKMEQEAAA

SEQ ID NO: 173944 - protein, 285 aa, Unknown
  Bacterial polypetide isolated from the Sargasso Sea
MSKGTVIQIIGAVIDVEFPKENLPKIYDALTVDENGLVLEVQQQLGDGVVRTIAMGASEGLKRGVEVTNTEGPISVPVGEETLGRIMNVLGEPIDEKGDVAAKKTMPIHRNPPSYEDQAETTELLETGIKVIDLICPFAKGGKVGLFGGAGVGKTVNIQELIRNIAYEHSGYSVFAGVGERTREGNDMYHEMIEGGVLDKVALVYGQMNEPPGNRLRVALSGLTMAENFRDEGRDVLLFVDNIYRYTLAGTECSALLGRMPSAVGYQPTLAEEMGVCKKELHPPK

SEQ ID NO: 173945 - protein, 217 aa, Unknown
  Bacterial polypetide isolated from the Sargasso Sea
ILGDVFYLHSRLLERAAKLSDEHGGGSLTALPIIETQGGDVSAFIPTNVISITDGQIFLETELFNQGIRPAINVGLSVSRVGSSAQTKAMKKVSGSMKLELAQYREMAAFAQFGSDLDASTQQLLNRGSKLTELLKQKQYSPMTVAEQVISVFCGVKGYLDDIELKDIAEFENKIIEKCKSDKPEIIDSIQSSGKLEDDKEKLLIEVITQLKENFKS

SEQ ID NO: 173946 - protein, 254 aa, Unknown
  Bacterial polypetide isolated from the Sargasso Sea
PGARARVALTGLTVAEYFRDQEGQDVLFFVDNIFRFTQAGSEVSALLGRIPSAVGYQPTLATDMGNLQERITTTNKGSITSVQAIYVPADDLTDPAPATSFSHLDATTVLSRQIAELGIYPAVDPLDSTSRILDPRIVGDEHYRVAREVQKILQTYKSLQDIIAILGMDELSEEDKLTVARARKIQRFLSQPFFVAEVFTGSPGKLVELDSTIKGFDAICKGEYDHLPEAAFYMVGTIDEAIEKAEKMAKDAAA

SEQ ID NO: 173947 - protein, 226 aa, Unknown
  Bacterial polypetide isolated from the Sargasso Sea
FKFLVGSGKESIHLCVVMTSDRGLCGGFNTNICRKAKNYFEKILKEGKTLKIFTVGTKGYDQLKRTYAKYIVEKIDFKGHKKITYKEAEEIGNKIIKLFEEEQFDICKIFYNKFKNVITQIPQSQQIIPIEDEKKEEEKNLNSYYEFEPEENEILESLLPRNISTQIFKAFLENAASEQGSRMTAMDNATRNAGELVEKLTITYNRTRQAAITKELIEIISGAESL

SEQ ID NO: 173948 - protein, 186 aa, Unknown
  Bacterial polypetide isolated from the Sargasso Sea
QERITSTDKGSITSVQAIYVPADDLTDPAPATSFSHLDATTVLSRQIAEIGIYPAVDPLDSTSRILDPRIVGEEHYRVARDVQRILQAYKSLQDIIAILGMDELSEEDKLTVARARKIQRFLSQPFFVAEVFTGSPGKLVNLDTTIKGFDAICKGEYDHLPEAAFYMVGGIEEVIEKAEKLAKDNK

SEQ ID NO: 173949 - protein, 312 aa, Unknown
  Bacterial polypetide isolated from the Sargasso Sea
LPSILNALRIEGKNPAGQDVALTAEVQQLLGDHRVRAVAMSGTDGLVRGMEALDTGAPISVPVGEATLGRIFNVLGEPVDEQGDLKNVTTSPIHRSAPSLTDLETKPKVFETGIKVIDLLAPYRQGGKVGLFGGAGVGKTVLIQELINNIAKEHGGVSVFGGVGERTREGNDLYEEFKESGVINSEDLTKSKVALCFGQMNEPPGARMRVGLSALTMAEHFRDVNKQDVLLFIDNIFRFVQAGSEVSALLGRMPSAVGYQPTLGTDVGELQERITSTLEGSITSIQAVYVPADDLTDPAPATTFAHLDATTV

SEQ ID NO: 173950 - protein, 178 aa, Unknown
  Bacterial polypetide isolated from the Sargasso Sea
DVSAFIPTNVISITDGQIFLETELFNQGIRPAINVGLSVSRVGSSAQTKAMKKVSGSMKLELAQYREMAAFAQFGSDLDASTQKLLNRGAKLTELLKQKQYSPMTVAEQVISVFCGVRGHLDDVDQKNIVNFETKIIEKCKSEKPEILNSIISSGKLEEDSEKLLTDLINDLKKNLNS

SEQ ID NO: 173951 - protein, 265 aa, Unknown
  Bacterial polypetide isolated from the Sargasso Sea
RAAPDFVDQSTETEVLVTGIKVIDLLAPYSKGGKIGLFGGAGVGKTVLIMELINNVAKAHGGYSVFAGVGERTREGNDLYHEMIESGVINLDGDTSKVSLVYGQMNEPPGARSRVALSGLTQAEYFRDEENQDVLFFVDNIFRFTQAGSEVSALLGRIPSAVGYQPTLATDMGALQERITTTNKGSITSVQAIYVPADDLTDPAPATSFSHLDATTVLNRSIAELGIYPAVDPLDSTSRILEPRTLGDKHYQVARDVQKTLQTYK

SEQ ID NO: 173952 - protein, 243 aa, Unknown
  Bacterial polypetide isolated from the Sargasso Sea
QNIILNLTKSINDPQNAPKLLVGTGQDKTYLCVVLTADRGLCGGFNSNICKLAKTNFKKILSEGKELKIITVGTKGLDQIKREYGKYVTKKFSFKNKKQITFSEAEIIGNEIISLFNDNQFDKCILFYNNFKNVITQIPQAQQIIPADNNSSKEKEEDPTSYEFEPEEDEILEDLLPKNISTQVFKAFLENAASEQGSRMTAMDNATRNAGELVDKLTINYNRSRQASITKELIEIISGAESL

SEQ ID NO: 173953 - protein, 186 aa, Unknown
  Bacterial polypetide isolated from the Sargasso Sea
MPSLDDLKKRIKSVKSTQKITKAMKMVAAAKLKKAQENAEKGRPYSEKLHNIILNLTKSISDETNAPKLLIGSGKDEVYLCLVMTADRGLCGGFNSNICKLAKNHFKKIIKDGKKLKIITVGSKGHDQIKSEYNSYIIDKLNFKEKKQISFKEAEVVGKKIIDLFNQEQFDKCFIFYNNFKNVITQ

SEQ ID NO: 173954 - protein, 127 aa, Unknown
  Bacterial polypetide isolated from the Sargasso Sea
AGSIKLELAQYREMAAFAQFGSDLDVSTQKLLNRGSKLTELLKQNQYSPFTVAEQVISIFTGVNGYLDDIKLNMIKDFEKNLIEKVKNENSEILETINKTGKLEDDVKNKLIEIIVKQKKGEKIAQS

SEQ ID NO: 173955 - protein, 297 aa, Unknown
  Bacterial polypetide isolated from the Sargasso Sea
ICWSGERTREGNDLYHEMIESGVIKPEGPGSKAALVYGQMNEPPGARSRVALTGLTVAEYFRDQEGQDVLFFVDNIFRFTQAGSEVSALLGRIPSAVGYQPTLATDMGNLQERITTTNKGSITSVQAIYVPADDLTDPAPATSFAHLDATTVLSRQIAELGIYPAVDPLDSTSRILDPRIVGDEHYRVAREVQKILQTYKSLQDIIAILGMDELSEEDKLIVARARKIQRFLSQPFFVAEVFTGSSGKLVDLESTIKGFDAICKGEYDHLPEAAFYMVGTIEEAVKKQRRWQKKLHN

SEQ ID NO: 173956 - protein, 94 aa, Unknown
  Bacterial polypetide isolated from the Sargasso Sea
DIIAILGMDELSEEDKLTVARARKIQRFLSQPFFVAEVFTGSPGKLVDLESTIKGFDAICKGEYDHLPEAAFYMVGTIEEAVEKAEKMAKEAAA

SEQ ID NO: 173957 - protein, 290 aa, Unknown
  Bacterial polypetide isolated from the Sargasso Sea
QVQAGEMVEFPGGIKGMALNLEMDNVGISIFGDDTGIKEGDTVKRTGEIVDVPVGKELLGRVVDGLGNPIDGKGPINSTNKRRIELKAPGIIPRQSVKEPMQTGIKALDALVPVGRGQRELIIGDRQTGKTAVAIDTILNQKNINQSNNEKEKLYCIYVAIGQKRSTVAQIVKTLEDNGALEYTVVVSATASEPAPLQFLSAYTGCTMGEYFRDNGMHALIIYDDLSKQAVAYRQMSLLLRRPPGREAYPGDVFYIHSRLLERAAKMSEEHGGGSLTALPIIETQAGDLS

SEQ ID NO: 173958 - protein, 228 aa, Unknown
  Bacterial polypetide isolated from the Sargasso Sea
FPGDVFYLHSRLLERAARVNAEYVEKITEGKVKGKTGSLTALPIIETQAGDVSAFVPTNVISITDGQIFLETDLFNSGVRPAIDPGLSVSRVGGAAQTKIIKKLSGGIRTDLAQYRELAAFSQFASDLDDATKEQLEHGKRITELLKQKQYSPMSVADQAMSLYAADKGYMKDVDIDKVGDFESALLAYFESEKSDLKKQINDTGDWDDDIENQFKELVEDFKKTQTY

SEQ ID NO: 173959 - protein, 224 aa, Unknown
  Bacterial polypetide isolated from the Sargasso Sea
LAALVYGQMNEPPGARARVALSGLTVAEYFRDQEGQDVLFFVDNIFRFTQAGSEVSALLGRIPSAVGYQPTLATDMGNLQERITTTNKGSITSVQAIYVPADDLTDPAPATSFSHLDATTVLSRQIAEIGIYPAVDPLDSTSRILDPRIVGDEHYRVAREVQKILQTYKSLQDIIAILGMDELSEEDKLVVARARKIQRFLSQPFFVAEVFTGSPGKLVDLEST

SEQ ID NO: 173960 - protein, 306 aa, Unknown
  Bacterial polypetide isolated from the Sargasso Sea
SVRTIAMDATEGLKRGDEVTDTGAPIKVPVGPETLGRIINVIGEPIDEKGKVQTKESWPIHRSAPEFNDQSTETEILVTGIKVVDLLAPYAKGGKIGLFGGAGVGKTVLIMELINNVAKAHGGFSVFAGVGERTREGNDLYHEMIESGVIKTEGTGSKAALVYGQMNEPPGARARVALSGLTVAEYFRDQEGQDVLFFVDNIFRFTQAGSEVSALLGRIPSAVGYQPTLATDMGNLQERITTTNKGSITSVQAIYVPADDLTDPAPATSFSHLDATTVLSRQIAEIGIYPAVDPLDSTSRILDPRM

SEQ ID NO: 173961 - protein, 275 aa, Unknown
  Bacterial polypetide isolated from the Sargasso Sea
AYSGCSMGEYFRDRGEDALIIYDDLTKQAWAYRQISLLLRRPPGREAYPGDVFYLHSRLLERAARVNADYVESATNGEVKGKTGSLTALPIIETQAGDVSAFVPTNVISITDGQIFLETDMFNAGNRPAMNPGISVSRVGGDAQVKFMSKISGGIKLALAQFRELAAFSQFASDLDEATRRQLEHGERISELMKQKQYSPMSVAEMGVVLFAANEGYLEDVDTEKVLDFEAALLSYMNSEHSDFMAEVNEKGEYTDAVVEAMTKALDTFKSTQTW

SEQ ID NO: 173962 - protein, 158 aa, Unknown
  Bacterial polypetide isolated from the Sargasso Sea
MSKKGKITQIIGAVVDVNFETDLPEIYTALEVINSGNKLILEVAQHLGENDVRTIAMDATEGLKRGDEVLNTGAPISVPVGPETLGRIINVVGESIDEKGEVKTKERWPIHRTAPKFTDQATETEQLVTGIKVIDLLAPYAKGGKIGLFGGAGVGKTV

SEQ ID NO: 173963 - protein, 301 aa, Unknown
  Bacterial polypetide isolated from the Sargasso Sea
RVVDGLGNPIDGKGALNKGVKKSRVEVKAPGIIPRQSVNEPMQTGLKSIDSLVPIGRGQRELIIGDRQTGKTAVAIDAIINQKKINESGDEKQKLYCIYVAVGQKRSTVRQIQKTLEEAGAMEYTTIVAATASDSAPLQFLAPYTGCAMGEFFRDNGMHALIIYDDLSKQAVAYRQMSLILRRPPGREAYPGDVFYLHSRLLERAAKLSDEHGGGSLTALPIIETQGGDVSAYIPTNVISITDGQIFLETELFNQGIRPAINVGLSVSRVGSAAQTKAMKKVSGSMKLELAQYREMAAFAQ

SEQ ID NO: 173964 - protein, 235 aa, Unknown
  Bacterial polypetide isolated from the Sargasso Sea
MSNDNFGQVIQVLGPVVDVEFSSDELPPINSALRLSNQLINDQEWNLVIEVAQQVGSKRVRCIAMDTTDGIQRGEKVLDTGKPISIPVGKSALGRMMNVVGESIDGGGPIESDKLSPIHKPAPTFQEQSTKTEVFETGIKVIDLLAPFLKGGKIGLFGGAGVGKTVLLMELINNVAKEYGGYSFFAGVGERTREGNDLYMEMKESGVLGNTGLVFGQMNEPPGARARVALTGLTL

SEQ ID NO: 173965 - protein, 227 aa, Unknown
  Bacterial polypetide isolated from the Sargasso Sea
LFFVDNIFRFTQAGSEVSALLGRIPSAVGYQPTLATDMGNLQERITSTDKGSITSVQAIYVPADDLTDPAPATSFSHLDATTVLSRQIAEIGIYPAVDPLDSTSRILDPRVVGEEHYRVARDVQRILQAYKSLQDIIAILGMDELSEEDKLTVARARKIQRFLSQPFFVAEVFTGSPGKLVDLDSTIKGFDAICKGEYDHLPEAAFYMVGGIEEVVEKAEKLAKDNK

SEQ ID NO: 173966 - protein, 197 aa, Unknown
  Bacterial polypetide isolated from the Sargasso Sea
MNTVGGSLTALPIIETQGGDVSAFIPTNVISITDGQIFLETELFNQGIRPAINVGLSVSRVGSSAQTKAMKKVSGSMKLELAQYREMAAFAQFGSDLDASTQQLLNRGSKLTELLKQKQYSPMTVAEQVISVFCGVKGYLDDIDLKDVAEFESKIIEKCKSDKPEIIESILTSGKLEEDKEKLLVEVITQLKGNFKS

SEQ ID NO: 173967 - protein, 260 aa, Unknown
  Bacterial polypetide isolated from the Sargasso Sea
MVSIRPDEISSILKQQITDYDQSVSVSNVGTVLQIGDGIARIYGLDQVMAGELLEFEDGTEGIALNLEDDNVGAVLMGEALGVQEGSNVKSTGKIASVPVGEAMQGRVVNPLGQPIDGKGEIPTSDTRLIEEMAPGIIKRRSVHEPMQTGITSIDAMIPVGRGQRELIIGDRQTGKSAIAIDTIINQKGQDVVCVYVAIGQKSASVANIVEVLRERGALDYTVVVSAGASEPAALQYLAPYTGAAIAEHFMYQGKATLVI

SEQ ID NO: 173968 - protein, 240 aa, Unknown
  Bacterial polypetide isolated from the Sargasso Sea
AEYFRDEENQDVLFFVDNIFRFTQAGSEVSALLGRIPSAVGYQPTLATDMGALQERITTTNKGSITSVQAIYVPADDLTDPAPATSFSHLDATTVLNRSIAELGIYPAVDPLDSTSRILEPRTLGDKHYQVARDVQKTLQTYKSLQDIIAILGMDELSEEDKLVVSRARKIQRFLSQPFFVAEVFTGSPGKFVSLEDTIKGFDGLVKGDYDHIPEAAFYLVGTIEEALEKAKKMAEEATK

SEQ ID NO: 173969 - protein, 164 aa, Unknown
  Bacterial polypetide isolated from the Sargasso Sea
DDLTDPAPATSFSHLDATTVLSRQIAEIGIYPAVDPLDSTSRILDPRVVGDEHYRVARDVQKILQAYKSLQDIIAILGMDELSEEDKLTVARARKIQRFLSQPFFVAEVFTGSPGKLVDLDDTIKGFDAICKGEYDHLPEAAFYMVGGIEEVIEKAEKLSKDSK

SEQ ID NO: 173970 - protein, 294 aa, Unknown
  Bacterial polypetide isolated from the Sargasso Sea
RPAPVFNDQSTETEILVTGIKVVDLLAPYAKGGKIGLFGGAGVGKTVIIMELINNIAKAHGGFSVFAGVGERTREGNDLYHEMIESGVIKPEGPGSKAALVYGQMNEPPGARSRVALTGLTVAEYFRDQEGQDVLFFVDNIFRFTQAGSEVSALLGRIPSAVGYQPTLATDMGNLQERITTTNKGSITSVQAIYVPADDLTDPAPATSFSHLDATTVLSRQIAELGIYPAVDPLDSTSRILDPRIVGDEHYRVAREVQKILQTYKSLQDIIAILGMDELSEEDKLTVARARKSK

SEQ ID NO: 173971 - protein, 268 aa, Unknown
  Bacterial polypetide isolated from the Sargasso Sea
MEKKFGKITQVIGAVVDVQFQGMLPEILTALECDNSGNRLVLEVAQHLGETTVRTIAMDSTEGLKRGDKVTDTGSPIKVPVGPETLGRIINVIGEPIDQKGKVSTKENWPIHRPAPKFTDQSTETEILVTGIKVVDLLAPYSKGGKIGLFGGAGVGKTVIIMELINNIAKAHGGFSVFAGVGERTREGNDLYHEMIESGVIKPNGKGSKAALVYGQMNEPPGARARVGLTGLTVAEYFRDKEGQDVLFFVDNIFRFTQAGSEVSALLG

SEQ ID NO: 173972 - protein, 258 aa, Unknown
  Bacterial polypetide isolated from the Sargasso Sea
MGEYFRDNGMHALIIYDDLSKQAVAYRQMSLLLRRPPGREAYPGDVFYLHSRLLERAAKLSDEHGGGSLTALPIIETQGGDVSAFIPTNVISITDGQIFLETELFNQGIRPAINVGLSVSRVGSSAQTKAMKKVSGSMKLELAQYREMAAFAQFGSDLDASTQKLLNRGSKLTELLKQNQYSPMTVAEQVISIFCGVKGHLDDIEQKDISSFENKIIEKCKAEKPEIIEAITTSGKLDDEHEKILNEIILQLKKDFSA

SEQ ID NO: 173973 - protein, 259 aa, Unknown
  Bacterial polypetide isolated from the Sargasso Sea
MASLDDLKKRIASVKSTQKITKAMKMVAAAKLRRAQESAERGRPYSEKMNNIILNLSNGVSDKENAPKLLSGTGENKIHLCVVMTSDRGLCGGFNSNIIKKAKSYFSKILDEGKQLKIITVGSKGNDQLKRVYGGKIIENISFKESKNANYFDADKVGRIIIEKFEAGEFDICTIFYNQFKNVITQIPQAQQIIPLNNEEDHNNSDESYEFEPDEDEILSNLLPKNISTQIFKAMLENSASEQGSRMSAMDNATRNAGE

SEQ ID NO: 173974 - protein, 271 aa, Unknown
  Bacterial polypetide isolated from the Sargasso Sea
GDGIARIYGLDQVMAGELLEFEDGTEGIALNLEDDNVGAVLMGEALGVQEGSNVKSTGKIASVPVGEAMQGRVVNPLGQPIDGKGEIPTSDTRLIEEMAPGIIKRRSVHEPMQTGITSIDAMIPVGRGQRELIIGDRQTGKSAIAIDTIINQKGQDVVCVYVAIGQKSASVANIVEVLRERGALDYTVVVSAGASEPAALQYLAPYTGAAIAEHFMYQGKATLVIYDDLTKQAQAYRQMSLLLKRPPGREAYPGDVFYLHSRLLERAAKLS

SEQ ID NO: 173975 - protein, 300 aa, Unknown
  Bacterial polypetide isolated from the Sargasso Sea
TKKVGDLICIYVAIGQKAGKVAQIVGQLEENGAMEHTIVVSASASESAALQYLAPYAGCAMGEEIMESGRDALIVYDDLSKHAWAYRQISLLLRRPPGREAYPGDVFYLHSRLLERAAKLAAGGSLTALPIIETQANDVSAYIPTNVISITDGQIYLEPDLFNAGIRPALNVGISVSRVGSAAQTKIMKDVAGRLKLDHALFRELQAFAQFGTSDLDAVTRRQLERGLRANEVLKQGQFVPMSLAEEVAILFGLTEGLIDDVEVEKVQSFEGALCSYLQSNKPELLSTIEDQKELTEKPG

SEQ ID NO: 173976 - protein, 224 aa, Unknown
  Bacterial polypetide isolated from the Sargasso Sea
VDNIFRFTQAGSEVSALLGRMPSAVGYQPTLATEMGTMQERITSTKKGSITSVQAVYVPADDLTDPAPATTFAHLDATTVLSRKISELGIYPAVDPLDSTSRILTPEILGDEHYNCAQRVKELLQKYNELQDIIAILGMEELSEEDKLAVARARRVQRFLSQPFHVAEQFTGIPGALVDIKDTIKGFNMIMDGELDHLPEAAFNLKGNIEEAIEAGEKMLSEAK

SEQ ID NO: 173977 - protein, 268 aa, Unknown
  Bacterial polypetide isolated from the Sargasso Sea
MKMVAASKLRRAQESAEKGRPYSDKMNNIILNLSSSVTDKENSPKLLIGSGEDKVHLCVVMTSDRGLCGGFNTNIIKKAKSFFQKISKNGKTLKIITVGSKGYDQLKRSFKDNIIEKISFKDSKYANYFDADKVGKIIIDKFEKNEFDVCTIFYNQFKNVITQVPQEQQIIPLKTNNIDKNSSEDNYEFEPEEDEILNNLLPKNISTQIFRAMLENSASEQGSRMSAMDNATRNAGEMVDKLTIQYNRSRQAAITKELIEIISGAESL

SEQ ID NO: 173978 - protein, 188 aa, Unknown
  Bacterial polypetide isolated from the Sargasso Sea
ALPIIETQAGDVSAYIPTNVISITDGQIFLETELFNQGIRPAVNVGLSVSRVGSAAQTKAMKKVAGSIKLELAQYREMAAFAQFGSDLDASTQKLLNRGSKLTELLKQNQYSPMTVAQQVIAIFSGVRGFLDDVDLPKIKSLEKDIYEEVKSSNPDIIDSINSTGKLNEDIEKRLTAVIEEFKKKKIK

SEQ ID NO: 173979 - protein, 260 aa, Unknown
  Bacterial polypetide isolated from the Sargasso Sea
EVEQLGVGNNWARCLALGSTDGLARGQEVIDTGAAVQVPVGDPSLGRLFNVKGEAIDDGDPIPSDAERWPIHRPAPSFDQQRSTTEILETGIKVIDLMTPFAKGGKVGAYGGAGVGKTVIITELIRNIAQEHSGVSVFAGVGERSREGNDLWNEMKEYGVLDSTALVFGQMNEPPGTRARIALTGLTMAEYFRDVRKQDVLLFVDNVYRYILAGMEVSALLGRMPSAVGYQPTLSTEIGDLEERITSTNDGSITSFQAVY

SEQ ID NO: 173980 - protein, 219 aa, Unknown
  Bacterial polypetide isolated from the Sargasso Sea
MEIKTDQLTQLLREQIEKFDGSVDISEVGEVIQVGDGVARVSGLENVMSSELVELPNGVFGMALNLEEDNVGLVLFGESRLVKEGDLAKRTGRVVEVPVGDSMLGRVVNPLGQPIDGKGTINTEHSLPIERKALGVMARHPVKEPLQTGIKAIDSMIPIGRGQRELIIGDRQTGKTAVAIDAIINQKYTHETDNPVYCIYVAIGQKASTVAALVTELEN

SEQ ID NO: 173981 - protein, 297 aa, Unknown
  Bacterial polypetide isolated from the Sargasso Sea
MLVTGVKVMDLLCPFLKGGKIGLFGGAGVGKTVVIMELIRNIAAEHGGFSVFAGVGERTREGNDLWNEMKESGVLDKTSLVYGQMNEPPGARARVALTGLTVAEYFRDEEAADVLMFIDNIFRFTQAGSEVSALLGRIPSAVGYQPTLSTEMGNLQERITSTNKGSITSVQAIYVPADDLTDPAPATTFSHLDATVVLSRAITELGIYPAVDPLDSTSRILSADVLGEDHYSVAHEVQILLQRYKDLQDIIAILGMDELSEEDKVVVSRARKVQRFLSQPFFVAETFTGTSSEYVDI

SEQ ID NO: 173982 - protein, 182 aa, Unknown
  Bacterial polypetide isolated from the Sargasso Sea
MASLDDLKKRISSVKSTQKITKAMKMVAASKLRRAQESAEKGRPYSDKMNNIILNLSSSISDKENSPKLLSGSGDDKVHLCVVMTSDRGLCGGFNTNIIKKAKSYFQKILDEGKNLKIITVGSKGYDQLKRVYKDKIIEKISFKESKYVNYFDADKVGKIIIEKFEKKEFDVCTIFYNQFKN

SEQ ID NO: 173983 - protein, 216 aa, Unknown
  Bacterial polypetide isolated from the Sargasso Sea
TQAGSEVSALLGRIPSAVGYQPTLSTDMGALQERITTTKKGSITSVQAIYVPADDLTDPAPATSFAHLDATTVLSRSLAELGIYPAVDPLDSTSRILDPTIVGDEHYQVARKIQEVLQSYKSLQDIIAILGMDELSEEDKLTVSRARKIQRFLSQPFFVAEVFTGTPGKFVKLEDTIKGFKSIVDGEHDNIPESAFYMVGTIEEALEKSKKISKEE

SEQ ID NO: 173984 - protein, 299 aa, Unknown
  Bacterial polypetide isolated from the Sargasso Sea
NWPIHRSAPKFTDQSTETEILVTGIKVVDLLAPYSKGGKIGLFGGAGVGKTVIIMELINNIAKAHGGFSVFAGVGERTREGNDLYHEMIESGVIKPDGKGSKAALVYGQMNEPPGARARVGLTGLTVAEYFRDKEGQDVLFFVDNIFRFTQAGSEVSALLGRIPSAVGYQPTLATDMGNLQERITTTNKGSITSVQAIYVPADDLTDPAPATSFAHLDATTVLSRQIAELGIYPAVDPLDSTSRILDPRIVGEEHYKVAREVQKILQTYKSLQDIIAILGMDELSEEDKLTVARARKIK

SEQ ID NO: 173985 - protein, 276 aa, Unknown
  Bacterial polypetide isolated from the Sargasso Sea
ALECKNNGNRLVLEVAQHLGESTARTIAMDATEGLKRGDEVVNTNAPIKVPVGPETLGRIINVVGEPIDERGEVKTKESWPIHRPAPEFNDQSTETEILVTGIKVIDLLAPYAKGGKIGLFGGAGVGKTVLIMELINNVAKAHGGFSVFAGVGERTREGNDLYHEMMESGVIKPEGPGSKAALVYGQMNEPPGARARVALTGLTVAEYFRDQEGQDVLFFVDNIFRFTQAGSEVSALLGRIPSAVGYQPTLATDMGNLQERITTTNKGSITSVQAI

SEQ ID NO: 173986 - protein, 305 aa, Unknown
  Bacterial polypetide isolated from the Sargasso Sea
IEVVAPGVIARQSVDQPVQIGLKSIDAMVPIGRGQRELIIGDRQTGKTAVAIDAIINQKGTGIKCIYVAIGQKQSTIANVVAKLEEYGAMEHTIVVSAAAADPAAMQYLSAYSGCAMGEYFRDTGQDALIVYDDLSKQAVAYREISLLLRRPPGREAFPGDVFYLHSRLLERAARVNAEYVEKITEGKVKGKTGSLTALPIIETQAGDVSAFVPTNVISITDGQIFLETDLFNSGVRPAIDPGLSVSRVGGAAQTKIIKKLSGGIRTDLAQYRELAAFSQFASDLDDATKEQLEHGKRITELLNK

SEQ ID NO: 173987 - protein, 195 aa, Unknown
  Bacterial polypetide isolated from the Sargasso Sea
LATDMGNLQERITTTNKGSITSVQAIYVPADDLTDPAPATSFAHLDATTVLSRQIAEIGIYPAVDPLDSTSRILDPRIVGDEHYRVARDVQRILQSYKSLQDIIAILGMDELSEEDKLVVARARKIQRFLSQPFFVAEVFTGSPGKLVDLDSTIKGFDAICKGEYDHLPEAAFYMVGTIEEAIEKAKKMEQEAAA

SEQ ID NO: 173988 - protein, 256 aa, Unknown
  Bacterial polypetide isolated from the Sargasso Sea
YFRDNGMHALIIYDDLSKQAVAYRQMSLLLRRPPGREAYPGDVFYIHSRLLERAAKMSDEHGGGSLTALPIIETQAGDLSAYIPTNVISITDGQIFLETNLFFAGIRPAINVGLSVSRVGSAAQTKAMKKIAGPVKLELAQYREMAAFAQFASDLDASTKQLLDRGARLVEILKQGQYSPLTVSEQVVSIYAGVRGYLDKVAVNDVVRFELEVLNEIRNNHSDLLDSIANEKELSKDSDDKLKSILDSLVEKFASN

SEQ ID NO: 173989 - protein, 183 aa, Unknown
  Bacterial polypetide isolated from the Sargasso Sea
MPSLDDLRKRISSVKSTQKITKAMKMVAAAKLRKAQEMAEKGRPYSDKMDVIIQNLSKAINDPSNAPKLLVGTGEDKTHLCVVMTADRGLCGGFNTNICKLAKKYFDEAIKTSKNLKIITVGTKGLDQLKRDYGKYIIKKINIKDKKKLTFSDAEEIGKQIVELFRNKEFDKCFIFYNKFKNV

SEQ ID NO: 173990 - protein, 141 aa, Unknown
  Bacterial polypetide isolated from the Sargasso Sea
MPSLDDLKKRIKSVKSTQKITKAMKMVAAAKLRKAQENAEKGRPYSQKMQNIILNLTKSLNDPQNAPKLLVGTGKDKIYLCVVLTADRGLCGGFNSNICKLAKTKFQEILKDGKDLKIITVGSKGLDSIKREYGKFVIKKF

SEQ ID NO: 173991 - protein, 262 aa, Unknown
  Bacterial polypetide isolated from the Sargasso Sea
KEKIAGLDLSAERKNEGIVVSVSDGIVRIHGMGDVMYGEVIEFENGTKGMALNLEQDSVGAVVLGDYLEIIEGQKAVCTGKVLEVPVGEAMLGRVVNTLGAPIDGKGEINAEHSSPVEVVAPGVIARQSVDQPVQIGLKAVDAMVPIGRGQRELIIGDRQTGKTAVAIDAIINQKGTGIKCIYVAIGQKQSTVANVVRKLEEYGAMEHTIVVSATAADPAPMQYLSAYAGCTMGEYFRDKGEDALIVYDDLSKQAVAYRQVS

SEQ ID NO: 173992 - protein, 205 aa, Unknown
  Bacterial polypetide isolated from the Sargasso Sea
MSKGIITQVIGAVVDVKFDGELPEILTALECKNGNNRLVLEVAQHLGETTVRTIAMDATEGLKRGDEVINTNAPIQVPVGPETLGRIINVIGEPIDERGEVKTKESWPIHRGAPEFNDQSTETEILVTGIKVIDLLAPYAKGGKIGLFGGAGVGKTVLIMELINNVAKAHGGFSVFAGVGERTREGNDLYHEMIESGVIKQDGPG

SEQ ID NO: 173993 - protein, 271 aa, Unknown
  Bacterial polypetide isolated from the Sargasso Sea
KIAGLDLSAERKNEGIIVSVSDGIVRIHGMGDVMYGELIEFENGVLGLALNLEQDSVGAVVLGDYLGLIEGQKAVCTGRILEVPVGEGLLGRVVDALGNPIDGKGEIKTEMTAPVEVVAPGVIARQSVDQPVQIGLKAVDAMVPIGRGQRELIIGDRQTGKTAVAVDAIINQKGTGIKCIYVAIGQKQSTVVNVVKKLEEHGALEHTIIVSASASDPAPMQYLSAYSGCSMGEYFRDKGEDALIVYDDLSKQAVAYRQVSLLLKRPPGREA

SEQ ID NO: 173994 - protein, 228 aa, Unknown
  Bacterial polypetide isolated from the Sargasso Sea
MTINPTEISDIIKDKIKNLDIKTQSHNEGTVVSLTDGIARIYGITDALQGEMLEFPNNIYGLALNLERDSVGAVILGDYKSISEGDIVKCTGNILEVPVGDELLGRVVNSLGEPLDNSGPISSANKSPIEKIAPGVIERKSVDQPVQTGLKSIDAMVPIGRGQRELIIGDRQTGKTAVAIDAIINQKDTGVKCIYVAIGQKASSIAAVVRKLEEHDALKHTIIVAASA

SEQ ID NO: 173995 - protein, 176 aa, Unknown
  Bacterial polypetide isolated from the Sargasso Sea
STKDGSITSIQAVYVPADDLTDPSPATTFAHLDATVVLSRQIAELGIYPAVDPLDSTSRQLDPLVVGEEHYNVAQGVQGVLQKYKELKDIIAILGMDELSEEDKLAVARARKVERFLSQPFTVAEVFTGSPGKYVKLEDTIKSFKGILAGDYDDLPEQAFYMVGTIEEAVEKAKTL

SEQ ID NO: 173996 - protein, 209 aa, Unknown
  Bacterial polypetide isolated from the Sargasso Sea
RLLERAAKLNDDNGGGSLTALPIIETQAGDVSAYIPTNVISITDGQIFLGTELFNQGIRPAVNVGLSVSRVGSAAQTKAMKKVAGSIKLELAQYREMAAFAQFGSDLDASTQKLLNRGSKLTELLKQDQYSPMTVAEQVVTIYAGVKGYLDSIDISQIRSFEKGLLELVKSEKPEILESIQKSGKIEEDIDKILSEVITNYKKTNFEKK

SEQ ID NO: 173997 - protein, 164 aa, Unknown
  Bacterial polypetide isolated from the Sargasso Sea
MEIKAAEISSVIKDQIANFETKADVAEVGTVLSVGDGIARVYGLDQVQAGEMVEFPGGIKGMALNLEMDNVGVSIFGDDTGIKEGDTVKRTGEIVDVPVGKGLLGRVVDGLGNPIDGKGPIQSSEKRRIELKAPGIIPRQSVSEPMQTGIKALDALVPVGRGQR

SEQ ID NO: 173998 - protein, 166 aa, Unknown
  Bacterial polypetide isolated from the Sargasso Sea
ITDGQIFLETDLFNSGVRPAIDPGLSVSRVGGAAQTKIIKKLSGGIRTDLAQYRELAAFSQFASDLDDATKEQLEHGKRITELLKQKQYSPMSVADQAMSLYAADKGYMKDVDIDKVGDFESALLAYFESEKSDLKKQINDTGDWDDDIENQFKELVEDFKKTQTY

SEQ ID NO: 173999 - protein, 261 aa, Unknown
  Bacterial polypetide isolated from the Sargasso Sea
MEINPSEVTKILKEQIKKYGDKAEVTEVGQVLSVGDGIARIYGLDNVQAGEMVEFSDGSKGMALNLESENVGVVIFGDDKAIKEGDTVKRTGAIVDTPVGKELLGRVVDGLGNPIDGKGALDKGIKRSRVEVKAPGIIPRKSVSEPMQTGLKSIDSLVPIGRGQRELIIGDRQTGKTAVAIDAIINQKKINESDNEKQKLYCVYVAIGQKRSTVRQIEKTLEEAGAMEYTTIVAATASDAAPLPFLAPYTGCAMGEYFRDN

SEQ ID NO: 174000 - protein, 280 aa, Unknown
  Bacterial polypetide isolated from the Sargasso Sea
TTIVAATASDSAPLQFLAPYTGCTIGEYFRDNGMHALIVYDDLSKQAVAYRQMSLLLRRPPGREAYPGDVFYLHSRLLERAAKLNNKSGGGSLTALPIIETQAGDVSAYIPTNVISITDGQIFLETELFNQGIRPAVNVGLSVSRVGSAAQTKAMKKVAGSIKLELAQYREMAAFAQFGSDLDSSTQQLLNRGAKLTELLKQDQYSPMTVAEQVISVFSGVKGYLDDVELTEIKKFELDLIEKVKSEKPEILENVQSTGKLDENTEKLLSQLIEEYKKGN

SEQ ID NO: 174001 - protein, 266 aa, Unknown
  Bacterial polypetide isolated from the Sargasso Sea
MQQLNPSEISDLIKQRIDQLEVTSQATNEGTIVSVTDGIIRIHGLTEVQYGEMIEFDGGVYGLALNLERDSVGAVVLGDYKQLAEGQTCRCTGRILEVPVGPALQGRVVDSLGNPIDGKGAIETTETDAIEKIAPGVIARQSVDQPVQIGLKAIDAMVPIGRGQRELIIGDRQVGKTAIAVDAIINQKGTGIKCIYVAVGQKASSVASVVRKLEEHGAMEHTIVVAANASDPAAMQYLAPFAGCTMGEYYRDRGEDALIIYDDLSK

SEQ ID NO: 174002 - protein, 202 aa, Unknown
  Bacterial polypetide isolated from the Sargasso Sea
LGRMPSAVGYQPNLAEEMGTLQERITTTKTGSVTSIQAVYVPADDLTDPSPATTFAHLDSTVTLSRAITDLGIYPAVDPLDSTSQQLDPLIVGEEHYNVAQEVMQVLQRLNELKDIIAILGMDELSEEDKQLVYRARKIQKFFSQPFFVAEQFSGSPGTYVSRDDTVRSFKAILNGEHDDLPEDAFMMVGSIEDAIEKAKTL

SEQ ID NO: 174003 - protein, 230 aa, Unknown
  Bacterial polypetide isolated from the Sargasso Sea
MSLLLRRPPGREAYPGDVFYLHSRLLERAAKLSDEHGGGSLTALPIIETQGGDVSAFIPTNVISITDGQIFLETELFNQGIRPAINVGLSVSRVGSSAQTKAMKKVSGSMKLELAQYREMAAFAQFGSDLDASTQQLLNRGSKLTELLKQKQYSPMTVAEQVISVFCGVKGYLDDIDLKDVAEFESKIIEKCKSDKPEIIESILSSGKLEEDKEKLLVDVITQLKGNFKS

SEQ ID NO: 174004 - protein, 156 aa, Unknown
  Bacterial polypetide isolated from the Sargasso Sea
MEIKAAEISSVIKDQIANFETKADVAEVGTVLSVGDGIARVYGLDQVQAGEMVEFPGGIKGMALNLEMDNVGVSIFGDDTGIKEGDTVKRTGEIVDVPVGKELLGRVVDGLGNPIDGKGPIQSSEKRRIELKAPGIIPRQSVSEPMQTGIKALDAL

SEQ ID NO: 174005 - protein, 275 aa, Unknown
  Bacterial polypetide isolated from the Sargasso Sea
QAGLGVKCIYVAVGQKGSTVAQVVNTLEERGAMEYTVVVSAPAADAAPFKYLAPYAGCAMGQHWMENGEHALIVYDDLSKQAEAYRQLSLLLRRPPGREAYPGDVFYLHSRLLERAAKLSDEQGAGSLTALPVIETKAGDVSAYIPTNVISITDGQIYLQDDLFKSGVRPAVDVGVSVSRVGGDAQTKAMKSVAGTLKIDLAQFRDLEAFATFGSELDAASAAQLGRGYRLVELLKQGLNSPMPVEEQVVSIYTGTNGHLDDLPVEDVQRFEAEL

SEQ ID NO: 174006 - protein, 132 aa, Unknown
  Bacterial polypetide isolated from the Sargasso Sea
VDPLDSTSRILDPRIVGDEHYRVAREVQKILQTYKSLQDIIAILGMDELSEEDKLVVARARKIQRFLSQPFFVAEVFTGSPGKLVDLDSTIKGFSAICKGDYDHLPEAAFYMVGTIEEAIEKAEKMAKDAAA

SEQ ID NO: 174007 - protein, 247 aa, Unknown
  Bacterial polypetide isolated from the Sargasso Sea
RLRVALTGLTMAEKFRDEGRDVLLFVDNIYRYTLAGVEVSALLGRMPSAVGYQPTLAEEMGVLQERITSTKTGSITSIQAVYVPADDLTDPSPATTFAHLDATVVLSRRIAELGIYPAVDPLDSTSRQLDPNVVSQEHYDVAQRVQGVLQRYKELKDIIAILGMDELSDDDKNTVSRARKVEKFLSQPFFVAEVFTGSPGKYVSIKDTIQGFKEILDGVHDDVPEQAFYMVGSMDEVLEKAKTIKSD

SEQ ID NO: 174008 - protein, 193 aa, Unknown
  Bacterial polypetide isolated from the Sargasso Sea
MEINPSEVTKILKEQIKKFGDKAEVSEVGQVLSVGDGIARIYGLDNVQAGEMVEFSDGSKGMALNLENDNVGVVIFGDDRAVKEGDTVKRTGAIVDTPVGKELLGRVVDGLGNPIDGKGTLDKDVKRSRVEVKAPGIIPRKSVSEPMQTGLKSIDSLVPIGRGQRELIIGDRQTGKTAVAIDAIINQKKINES

SEQ ID NO: 174009 - protein, 210 aa, Unknown
  Bacterial polypetide isolated from the Sargasso Sea
VVLTSDRGLCGGFNSNIIKKAKAYFSKIVSEGKNFKIITVGSKGDDQLKRQYNDKIVERISFKDSKNVNFFDAEKVSKIIIESFQKNEFDVCTIFYNRFKNVITQIPQAQQIIPLENSDTKKEDEKDNYEFEPEEDEILGNLLPKNISTQIFKAMLENSASEQGSRMSAMDNATRNAGEMVDKLTIQYNRSRQAAITKELIEIISGAESL

SEQ ID NO: 174010 - protein, 101 aa, Unknown
  Bacterial polypetide isolated from the Sargasso Sea
MRKGKITQIIGAVVDVKFDGELPEILTALECKNGDNRLVLEVAQHLGETSVRTIAMDATEGLKRGDEVIDTGAPIKVPVGPETLGRIVNVIGEPIDEKGEI

SEQ ID NO: 174011 - protein, 81 aa, Unknown
  Bacterial polypetide isolated from the Sargasso Sea
EEDKLTVARARKIQRFLSQPFFVAEVFTGSPGKLVDLDDTIKGFDAICKGEYDHLPEAAFYMVGGIEEAIEKAEKLSKDSK

SEQ ID NO: 174012 - protein, 282 aa, Unknown
  Bacterial polypetide isolated from the Sargasso Sea
MGDKAEVSEIGKVLSVGDGIARVYGLDNVQAGEMVVFQDNSKGMALNLENDNVGIVIFGDDRSIKEGDTVKRTGAIVDVPVGKELLGRVVDALGNPIDGKENLDKNIKRKRVEVKAPGIIPRKSVGEPMQTGLKAIDSLIPVGRGQRELIIGDRQTGKTAVAVDTIINQKKINVSDDEKKKLYCIYVAIGQKRSTVAQIVKTLQDAGAMDYTIVVSATASDPAPLQFLAPYTGCTFGEFFRDNGMHALIIYDDLSKQAVAYRQMSLLLRRPPGREAYPGDVF

SEQ ID NO: 174013 - protein, 251 aa, Unknown
  Bacterial polypetide isolated from the Sargasso Sea
ARSRVALTGLTVAEYFRDQEGQDVLFFVDNIFRFTQAGSEVSALLGRIPSAVGYQPTLATDMGNLQERITTTNKGSITSVQAIYVPADDLTDPAPATSFAHLDATTVLSRQIAELGIYPAVDPLDSTSRILDPRIVGDEHYRVAREVQKILQTYKSLQDIIAILGMDELSEEDKLIVARARKIQRFLSQPFFVAEVFTGSPGKLVDLESTIKGFDAICKGEYDHLPEAAFYMVGTIEEAIEKAEKMAKEVA

SEQ ID NO: 174014 - protein, 200 aa, Unknown
  Bacterial polypetide isolated from the Sargasso Sea
MLAPYAKGGKIGLFGGAGVGKTVLIMELINNVAKAHGGFSVFAGVGERTREGNDLYHEMIESGVIKKEGDGSKAALVYGQMNEPPGARARVALTGLTVAEYFRDQEGQDVLFFVDNIFRFTQAGSEVSALLGRIPSAVGYQPTLATDMGNLQERITTTNKGSITSVQAIYVPADDLTDPAPATSFAHLDATTVLSRQMQK

SEQ ID NO: 174015 - protein, 302 aa, Unknown
  Bacterial polypetide isolated from the Sargasso Sea
GAVLLGSSNEIKEGDTVKRTSRIASVNVGENLLGRVVDTLGNPIDGKGPIKGELFQMPIERKAPGVIYRQPVNEPLQTGIKAIDAMIPIGRGQRELVIGDRQTGKTTVCIDTIINQKEFYDRGEPVYCIYVAIGQKGSTIAGIVNKLEQSGAMKYTVIVAANASDSAPMQFYAPFTGAAIGEYFRDTGRPALIIFDDLSKQAVAYREVSLLLRRPPGREAYPGDVFYLHSRLLERAAKITNSNEIAKRMNDLPDSIKNKVKGGGSLTALPIIETQAGDVSAYIPTNVISITDGQIFLEAQFI

SEQ ID NO: 174016 - protein, 288 aa, Unknown
  Bacterial polypetide isolated from the Sargasso Sea
KINEFGDEKQKLYCIYVAVGQKRSTVRQIQKTLEEAGAMEYTTIVAATASDSAPLQFLAPYTGCAMGEYFRDNGMHALIIYDDLSKQAVAYRQMSLLLRRPPGREAYPGDVFYLHSRLLERAAKLSDEHGGGSLTALPIIETQGGDVSAFIPTNVISITDGQIFLETELFNQGIRPAINVGLSVSRVGSSAQTKAMKKVSGSMKLELAQYREMAAFAQFGSDLDASTQQLLNRGSKLTELLKQKQYSPMTVAEQVISVFCGVKGYLDNIELKDVAEFESKIIERCKSE

SEQ ID NO: 174017 - protein, 153 aa, Unknown
  Bacterial polypetide isolated from the Sargasso Sea
SHLDATTVLSRQIAEIGIYPAVDPLDSTSRILDPRIVGDEHYRVAREVQKILQTYKSLQDIIAILGMDELSEEDKLIVARARKIQRFLSQPFFVAEVFTGSPGKLVDLESTIKGFDAICKGEYDHLPEAAFYMVGTIEEAIEKAEKMAKDAAA

SEQ ID NO: 174018 - protein, 286 aa, Unknown
  Bacterial polypetide isolated from the Sargasso Sea
NDLYHEMMESGVIKQDGPGSKAALVYGQMNEPPGARARVALTGLTVAEYFRDQEGQDVLFFVDNIFRFTQAGSEVSALLGRIPSAVGYQPTLATDMGNLQERITTTNKGSITSVQAIYVPADDLTDPAPATSFAHLDATTVLSRQIAEIGIYPAVDPLDSTSRILDPRIVGDEHYRVARDVQRILQSYKSLQDIIAILGMDELSEEDKLVVARARKIQRFLSQPFFVAEVFTGSPGKLVDLDSTIKGFDAICKGEYDHLPEAAFYMVGTIEEAIEKAKKMEQEAAA

SEQ ID NO: 174019 - protein, 269 aa, Unknown
  Bacterial polypetide isolated from the Sargasso Sea
MVEFSDGSKGMALNLESDNVGVVIFGDDRAVKEGDTVKRTGAIVDTPVGKELLGRVVDGLGNPIDGKGALDKSIKRSRVEVKAPGIIPRKSVNEPMQSGLKSVDSLVPIGRGQRELIIGDRQTGKTAVAIDTIINQKKINESNDEKQKLYCIYVAIGQKRSTVRQIEKSLEEAGAMEYTTIVAATASDAAPLQFLAPYTGCAMGEYFRDNGMHALIIYDDLSKQAVAYRQMSLLLRRPPGREAYPGDVFYLHSRLLERAAKLSDEHGGG

SEQ ID NO: 174020 - protein, 188 aa, Unknown
  Bacterial polypetide isolated from the Sargasso Sea
MPSLDDLKKRIKSVKSTQKITKAMKMVAAAKLRKAQESAEKGRPYSKKMQNIIFNLTKSINNSENAPKLLVGTGKDDVYLCLVLTADRGLCGGFNSNISKLAKNHFKKLLSERKEIKIITVGSKGLDQIKREYGKYIVKKFSFKEKKQISFKEAELIGGEIIKLFNNNEFDKCIMFYNNFKNVITQIP

SEQ ID NO: 174021 - protein, 157 aa, Unknown
  Bacterial polypetide isolated from the Sargasso Sea
PATSFAHLDATTVLSRQIAELGIYPAVDPLDSTSRMLDPRVVGEEHYNVARNVQEVLQQYKSLQDIIAILGMDELSEEDKLVVARARKIQRFLSQPFHVAEVFTGSPGKLVSLEDTIKGFKGIIEGNYDELPEAAFYMVGTIEEAVEKGKKLSKDAA

SEQ ID NO: 174022 - protein, 281 aa, Unknown
  Bacterial polypetide isolated from the Sargasso Sea
ALTLKDGELVFEVQQQLGDGIVRTIAMGASEGLKRGLEVENTGAPISVPVGQETLGRVLDVLGNPIDEKGPVGAKTNRPIHAKAPTFEEQSTEADVLETGIKVIDLLCPFAKGGKVGLFGGAGVGKTVTVMELIRNIAAEHDGFSVFAGVGERTREGNDFYHEMMESNVLDKVALVYGQMNEPPGNRLRVALTGLTIAENFRDEGRDVLMFIDNIYRYTLAGTEVSALLGRMPSAVGYQPNLAEEMGVLQERITSTKTGSITSIQAVYVPADDLTEPSPAT

SEQ ID NO: 174023 - protein, 273 aa, Unknown
  Bacterial polypetide isolated from the Sargasso Sea
MSNGTVTQIIGAVIDVEFDKDNIPKVYEALMVDESGTTLEVQQQLGDGVVRTIAMGATEGLKRGLTASRTNAPISVPVGPETLGRIVDVLGNPIDEKGPIGEKSKMPIHRKPPSYTDQSASNEVLETGIKVIDLMCPFAKGGKIGLFGGAGVGKTVNMMELINNIALQHSGLSVFAGVGERTREGNDFYYEMQESGVVNIDNLGESKVAMVYGQMNEPPGNRLRVALTGLTMAESFRDEGKDVLLFIDNIYRYTLAGVEVSALLGRMPSAVGY

SEQ ID NO: 174024 - protein, 85 aa, Unknown
  Bacterial polypetide isolated from the Sargasso Sea
MDELSEEDKLTVARARKIQRFLSQPFFVAEVFTGSPGKLVDLESTIKGFDAICKGDYDHLPEAAFYMVGSIEEVVEKAEKLEKDS

SEQ ID NO: 174025 - protein, 147 aa, Unknown
  Bacterial polypetide isolated from the Sargasso Sea
AINAGLSVSRVGGAAQTKIIKKLGGGVRLALAQYRELAAFAQFASDLDEATRKQLERGQRVTELMKQKQYAPLTVAEMAVSLYAANEGYLDDVPADKIVDFEAALHANFVESASDLAQKINDTGDYNDEIEAELKKFVEDFKATGTY

SEQ ID NO: 174026 - protein, 113 aa, Unknown
  Bacterial polypetide isolated from the Sargasso Sea
MANEKEIRTKIGSVKNTQKITKAMEMVAASKMRRTQETMKKALPYADKIRAVIGHIYKANPDYKHPFLEKREVKTAGYIVVSSDRGLCGGLNVNMFRGLIAELKENKSKQIDS

SEQ ID NO: 174027 - protein, 157 aa, Unknown
  Bacterial polypetide isolated from the Sargasso Sea
MSNGVVTQIIGAVIDVEFDRENIPSVYEALNIVGLETVLEVQQQLGDGIVRTIAMGSTEGLKRGLEVVRTNAPISVPVGQETLGRIMDVLGNPIDEKGDIGEKERQPIHKSPPSYTDQAGSNELLETGIKVIDLMCPFAKGGKVGLFGGAGVGKTVN

SEQ ID NO: 174028 - protein, 246 aa, Unknown
  Bacterial polypetide isolated from the Sargasso Sea
SNKMSIIIKNLSSAINDPENAPKLLIGTGEDKIHLCVVMTADRGLCGGFNTNIVKQAKKYFNKILKENKNLKIITVGSKGLDQLKRDYGKYIIKKINFKNKKNILFDDAESIGNEVVKLFKDKQFDICVIFFNKFKNVMTQIPQAEQVIPAKTDDKSKEENSFSYEFEPEEDEILEDLLPKNISTQIYKGFLENSASEQGSRMTAMDNATRNAGDLVEKLTINYNRSRQAAITKELIEIISGAESL

SEQ ID NO: 174029 - protein, 292 aa, Unknown
  Bacterial polypetide isolated from the Sargasso Sea
IESKNPAGQDVALTAEVQQLLGDHRVRAVAMSGTDGLVRGMEAIDTGAPISVPVGEATLGRIFNVLGEPVDEQGDLKNVTTSPIHRSAPSLTDLETKPKVFETGIKVIDLLAPYRQGGKVGLFGGAGVGKTVLIQELINNIAKEHGGVSVFGGVGERTREGNDLYEEFKESGVINSEDLTKSKVALCFGQMNEPPGARMRVGLSALTMAEHFRDVNKQDVLLFIDNIFRFVQAGSEVSALLGRMPSAVGYQPTLGTDVGELQERITSTLEGSITSIQAVYVPADDLTDPAPA

SEQ ID NO: 174030 - protein, 241 aa, Unknown
  Bacterial polypetide isolated from the Sargasso Sea
MTVQAAEISAILKQEIKNFGEESTISEVGQVLSVGDGIARVYGLDNVQAGEMVEFPGEIRGMALNLESDNVGVVIFGSDRDIKEGDSVKRTKSIVDVPVGEELLGRVVDGLGNPIDGKGPIKTKTRSIADVKAPGIIPRKSVHEPMATGLKSVDSLIPIGRGQRELIIGDRQTGKTAVALDAILNQKSYNDAAGSDESKKLYCVYVAIGQKRSSVAQLVKKLEETGAMEYSIVVAATASNQ

SEQ ID NO: 174031 - protein, 270 aa, Unknown
  Bacterial polypetide isolated from the Sargasso Sea
GVGKTVLIMELINNVAKAHGGFSVFAGVGERTREGNDLYHEMIESGVIKPEGTGSKAALVYGQMNEPPGARARVALSGLTVAEYFRDQEGQDVLFFVDNIFRFTQAGSEVSALLGRIPSAVGYQPTLATDMGNLQERITTTNKGSITSVQAIYVPADDLTDPAPATSFSHLDATTVLSRQIAEIGIYPAVDPLDSTSRILDPRIVGDEHYRVAREVQKVLQTYKSLQDIIAILGMDELSEEDKLTVARARKIQRFLSQPFFVAEVFTGSP

SEQ ID NO: 174032 - protein, 188 aa, Unknown
  Bacterial polypetide isolated from the Sargasso Sea
DPAPMQYIAPYAGCAMGEFFRDNGQHSLIVYDDLSKQAVAYRQMSLVLRRPPGREAFPGDVFYLHSRLLERASKLSKDHGGGSLTALPVIETQEGDVSAYIPTNVISITDGQIYLETNLFNSGIRPAIDVGLSVSRVGGNAQIKAMKKVAGTLRLDLAQYRELEAFAKFGSDLDKATLTQLTRGERMV

SEQ ID NO: 174033 - protein, 233 aa, Unknown
  Bacterial polypetide isolated from the Sargasso Sea
MSKGIITQVIGAVVDVKFDGELPEILTALECKNGDNRLVLEVAQHLGETTVRTIAMDATEGLKRGDEVINTNAPIQVPVGPETLGRIINVIGEPIDERGEVKTKESWPIHRAAPEFNDQSTETEILVTGIKVIDLLAPYAKGGKIGLFGGAGVGKTVLIMELINNVAKAHGGFSVFAGVGERTREGNDLYHEMIESGVIKKEGTGSKAALVYGQMNEPPGARARVALTGLTVA

SEQ ID NO: 174034 - protein, 291 aa, Unknown
  Bacterial polypetide isolated from the Sargasso Sea
LAPYRQGGKVGLFGGAGVGKTVLIQELINNIAKEHGGVSVFGGVGERTREGNDLYEEFKESGVINADDLTQSKVALCFGQMNEPPGARMRVGLSALTMAEHFRDVNKQDVLLFVDNIFRFVQAGSEVSALLGRMPSAVGYQPTLGTDVGELQERITSTLEGSITSIQAVYVPADDLTDPAPATTFAHLDATTVLARALAAKGIYPAVDPLDSTSTMLQPSVVGDEHYKTARAVQSTLQRYKELQDIIAILGLDELSEEDRLTVDRARKIEKFLSQPFFVAEIFTGMSGKYV

SEQ ID NO: 174035 - protein, 146 aa, Unknown
  Bacterial polypetide isolated from the Sargasso Sea
FLFVFVSNWGGALIPWRLIKLPSGELGAPTADINTTIALALLVSLSYFYAGLSNKGWRYFEYYVHPTPIMLPFKILEDFTKPLSLSFRLFGNILADELVVGVLVFLVPLILPIPVMFLGLFTSAIQALIFATLAAYYIGEAVEEHH

SEQ ID NO: 174036 - protein, 292 aa, Unknown
  Bacterial polypetide isolated from the Sargasso Sea
MEKKFGKITQVIGAVVDVQFEGQLPEILTALECDNSGNRLVLEVAQHLGETAVRTIAMDSTEGLKRGDKVADTGSPIKVPVGPETLGRIINVIGEPIDQKGKVSTKESWPIHRPAPKFTDQSTETEILVTGIKVVDLLAPYSKGGKIGLFGGAGVGKTVIIMELINNIAKAHGGFSVFAGVGERTREGNDLYHEMIESGVIKPDGKGSKAALVYGQMNEPPGARARVGLTGLTVAEYFRDKEGQDVLFFVDNIFRFTQAGSEVSALLGRIPSAVGYQPTLATDMGNLQERIT

SEQ ID NO: 174037 - protein, 220 aa, Unknown
  Bacterial polypetide isolated from the Sargasso Sea
GREAYPGDVFYLHSRLLERSAKLSDANGGGSLTALPIIETQAGDVSAYIPTNVISITDGQIFLETELFNQGIRPAVNVGLSVSRVGSAAQTKAMKKVAGSIKLELAQYREMAAFAQFGSDLDASTQQLLNRGAKLTELLKQDQYSPMTVAEQVISVFAGVKGYLDDVDLGKIKGFEKDIIEKIKSSKPEIIEAIQSSGKLDEDIENQLKQVIEEYKKNNA

SEQ ID NO: 174038 - protein, 314 aa, Unknown
  Bacterial polypetide isolated from the Sargasso Sea
MATGLKSVDAMIPIGRGQRELIIGDRQTGKTAVALDTILNQKTYNEAAGDDEGKKLYCVYVAVGQKRSTVAQLVKKLEESGAMEYSIVVAATASDPAPMQFLAPYSATAMAEHFRDNGRHALIVYDDLSKQAVAYRQMSLLLRRPPGREAYPGDVFYLHSRLLERSAKLNEENGAGSLTALPIIETQGGDVSAFIPTNVISITDGQIFLETELFYQGIRPAVNTGLSVSRVGSSAQTNAMKSVAGPVKLSLAQYREMAAFAQFGSDLDAATQQLLNRGARLTELMKQPQYSPLTNAEIVCIIYAGTNGYLDKID

SEQ ID NO: 174039 - protein, 114 aa, Unknown
  Bacterial polypetide isolated from the Sargasso Sea
EHYRVAREVQKILQTYKSLQDIIAILGMDELSEEDKLTVSRARKIQRFLSQPFFVAEVFTGSPGKLVDLQATIKGFDAICKGEYDHLPEAAFYMVGTIEEAVEKAEKMAKDAAA

SEQ ID NO: 174040 - protein, 207 aa, Unknown
  Bacterial polypetide isolated from the Sargasso Sea
GRIPSAVGYQPTLATDMGNLQERITTTNKGSITSVQAIYVPADDLTDPAPATSFAHLDATTVLSRQIAELGIYPAVDPLDSTSRILDPRIVGEEHYRVAREVQRILQTYKSLQDIIAILGMDELSEEDKLTVARARKIQKFLSQPFFVAEVFTGTPGKLVDLEATIKGFDAICKGEYDHLPEAAFYMVGTIEEVIEKAEKMAKEAAA

SEQ ID NO: 174041 - protein, 237 aa, Unknown
  Bacterial polypetide isolated from the Sargasso Sea
RRLQLLAGTGAEDTHLIVVVTSDRGLCGGFNSSISREARNRIRDLQAGGKTVKLLCVGRKGRDQLKSEFNDNILETYEGIGRSGVTFDEADKVANQIIGMFDGGEFDVCTLVYNKFVSAITQVVTPQQIIPVEINVAEETAKDDAAPANGGPVATYEYEPSEQEILSEILPGNLKIQVFRALLESSASEHGARMSAMDNATRNAGDMIDGLTQTFNRTRQAKITSELIEIISGAEAL

SEQ ID NO: 174042 - protein, 232 aa, Unknown
  Bacterial polypetide isolated from the Sargasso Sea
GQKRSTVRQIQKTLEEAGAMEYTTIVAATASDSAPLQFLAPYTGCAMGEYFRDNGMHALIIYDDLSKQAVAYRQMSLLLRRPPGREAYPGDVFYLHSRLLERAAKLSDEHGGGSLTALPIIETQGGDVSAFIPTNVISITDGQIFLETELFNQGIRPAINVGLSVSRVGSSAQTKAMKKVSGSMKLELAQYREMAAFAQFGSDLDASTQQLLNRGSKLTELLKQKQYSPMTV

SEQ ID NO: 174043 - protein, 227 aa, Unknown
  Bacterial polypetide isolated from the Sargasso Sea
MSKEGVITQLIGAVVDVKFKDELPEIYTALETNNSGNKLILEVAQHLGENSVRTIAMDSTEGLKRGDKVLNTNAPISVPVGPETLGRIINVIGQPIDEKGDVKTKEKWPIHRPAPKFTDQSTETEILVTGIKVIDLLAPYAKGGKIGLFGGAGVGKTVTIMELINNIAKAHGGFSVFAGVGERTREGNDLYHEMIESGVIKKDGKGSKAALVYGQMNEPPGARARVA

SEQ ID NO: 174044 - protein, 259 aa, Unknown
  Bacterial polypetide isolated from the Sargasso Sea
QMNEPPGARARVALTGLTVAEYFRDQEGQDVLFFVDNIFRFTQAGSEVSALLGRIPSAVGYQPTLATDMGNLQERITTTNKGSITSVQAIYVPADDLTDPAPATSFSHLDATTVLSRQIAELGIYPAVDPLDSTSRILDPRVVGDEHYRVAREVQKILQTYKSLQDIIAILGMDELSEEDKLTVARARKIQRFLSQPFFVAEVFTGSPGKLVDLESTIKGFDAICKGEYDHLPEAAFYMVGTIEEAVEKAEKMAKEAAA

SEQ ID NO: 174045 - protein, 249 aa, Unknown
  Bacterial polypetide isolated from the Sargasso Sea
VVDLLAPYSKGGKIGLFGGAGVGKTVIIMELINNIAKAHGGFSVFAGVGERTREGNDLYHEMIESGVIKPDGKGSKAALVYGQMNEPPGARARVGLTGLTVAEYFRDKEGQDVLFFVDNIFRFTQAGSEVSALLGRIPSAVGYQPTLATDMGNLQERITTTNKGSITSVQAIYVPADDLTDPAPATSFAHLDATTVLSRQIAELGIYPAVDPLDSTSRILDPRIVGEEHYRVAREVQKILQTYKSLQDI

SEQ ID NO: 174046 - protein, 194 aa, Unknown
  Bacterial polypetide isolated from the Sargasso Sea
KPGSLTALPIIETQAGDVSAFVPTNVISITDGQIYLETDLFNSGFRPAINAGLSVSRVGGAAQTSIIKKLGGGVRLALAQYRELAAFSQFASDLDEATRKQLERGQRVMELMKQKQYTPLSVAHMAVSLYAVEHGYLDDIDLEKIIDFEAALHSFFDSSHSDLIDNINSSGEYGDDTQAALKAAIDDFKANHSW

SEQ ID NO: 174047 - protein, 174 aa, Unknown
  Bacterial polypetide isolated from the Sargasso Sea
MANEKEIRTKIGSVKNTQKITKAMEMVAASKMRRTQETMKKALPYADKIRAVIGHIYKANPDYKHPFLEKREVKTAGYIVVSSDRGLCGGLNVNMFRGLIAELKENKSNQIDSKLCLVGAKAVQFFRSVDVDVIAAASHLGEEPQVEDLVGAIKTMLDEYNEGKIDQLFIVHND

SEQ ID NO: 174048 - protein, 238 aa, Unknown
  Bacterial polypetide isolated from the Sargasso Sea
DLSKQAVAYRQMSLLLRRPPGREAYPGDVFYLHSRLLERAAKLNKKSGGGSLTALPIIETQAGDVSAYIPTNVISITDGQIFLETELFNQGIRPAVNVGLSVSRVGSAAQTKAMKKVAGSIKLELAQYREMAAFAQFGSDLDASTQQLLNRGAKLTELLKQDQYSPMTVAEQVISVFTGVKGYLDDIDLNNIKKFEQDIIEKIKNEKPEIIDEIQSSGKLEESIEKSLSQIILEYKKG

SEQ ID NO: 174049 - protein, 206 aa, Unknown
  Bacterial polypetide isolated from the Sargasso Sea
MSKGIITQVIGAVVDVKFDGELPEILTALECKNSGNRLVLEVAQHLGESTARTIAMDATEGLKRGDEVINTKAPIKVPVGPETLGRIINVVGEPIDERGVVKTKESWPIHRPAPEFNDQSTETEILVTGIKVIDLLAPYAKGGKIGLFGGAGVGKTVLIMELINNVAKAHGGFSVFAGVGERTREGNDLYHEMMESGVIKSEGPGS

SEQ ID NO: 174050 - protein, 286 aa, Unknown
  Bacterial polypetide isolated from the Sargasso Sea
YGERHLGVQEGSNVKSTGKIASVPVGEAMQGRVVNPLGQPIDGKGEIPTSDTRLIEEMAPGIIKRRSVHEPMQTGITSIDAMIPVGRGQRELIIGDRQTGKSAIAIDTIINQKGQDVVCVYVAIGQKSASVANIVEVLRERGALDYTVVVSAGASEPAALQYLAPYTGAAIAEHFMYQGKATLVIYDDLTKQAQAYRQMSLLLKRPPGREAYPGDVFYLHSRLLERAAKLSDAMGGGSMTALPIIETQAGDVSAYIPTNVISITDGQIFLSADLFNSGLRPAINVG

SEQ ID NO: 174051 - protein, 127 aa, Unknown
  Bacterial polypetide isolated from the Sargasso Sea
KKVAGSIKLELAQYREMAAFAQFGSDLDVSTQKLLNRGSKLTELLKQNQYSPMTVAEQVISIFAGVNGFLDDTELGNIKKFEINLLDEINNNNSDIIDEINSTGKLEENTKNKLISVIEKIKKGKNI

SEQ ID NO: 174052 - protein, 134 aa, Unknown
  Bacterial polypetide isolated from the Sargasso Sea
MPSLDDLKKRIKSVKSTQKITKAMKMVAAAKLKKAQESAENGRPYSEKVQNIILNLTKSINDPNNAPKLLIGTGKDEVHLCVVMTADRGLCGGFNTNICKLAKKHFRKILQEGKELKIITIGTKGYDQIKNEYG

SEQ ID NO: 174053 - protein, 194 aa, Unknown
  Bacterial polypetide isolated from the Sargasso Sea
SLGTKKMENDPKGLQNLLEFLWDYIRDLARTQIGEKVYRDWMPFIGTLFLFVFVSNWGGALIPWRLIKLPSGELGAPTADINTTIALALLVSLSYFYAGLSNKGWRYFEYYVHPTPIMLPFKILEDFTKPLSLSFRLFGNILADELVVGVLVFLVPLILPIPVMFLGLFTSAIQALIFATLAAYYIGEAVEEHH

SEQ ID NO: 174054 - protein, 290 aa, Unknown
  Bacterial polypetide isolated from the Sargasso Sea
IGAVVDVEFDGELPAIQNALEANNNGQRLVLEVAQHLGESAVRTIAMDATEGLVRGADAVDTGAPITVPVGPETLGRIMNVIGEPVDEGKPVKSKKHYPIHRPAPDYVDQSTEAEILVTGIKVVDLLAPYAKGGKIGLFGGAGVGKTVLIMELINNVAKAHGGYSVFAGVGERTREGNDLYHEMVESGVIKTDGPGSKAALVYGQMNEPPGARARVALTGLTLAEYFRDEEGQDVLFFVDNIFRFTQAGSEVSALLGRIPSAVGYQPTLATDMGALQERITTTNKGSITS

SEQ ID NO: 174055 - protein, 316 aa, Unknown
  Bacterial polypetide isolated from the Sargasso Sea
VIKQIIGAVIDVEFDKDQIPNIYDALVVSDNNLVMETQQQLGDGLVRTVAMGSTEGLKRGLEVTNTKAPISVPVGEATLGRIMNVLGDPIDMKGDVKTKDRMPIHRKPPAYVDLADSNEILETGIKVIDLVCPFAKGGKVGLFGGAGVGKTVNMMELIRNIAIEHSGYSVFAGVGERTREGNDFYHEMTDSNVLDKVSLVYGQMNEPPGNRLRVALTGLTMAEKFRDEGRDVLLFVDNIYRYTLAGVEVSALLGRMPSAVGYQPTLAEEMGVLQERITSTKTGSITSIQAVYVPADDLTDPSPATTFAHLDATVVL

SEQ ID NO: 174056 - protein, 273 aa, Unknown
  Bacterial polypetide isolated from the Sargasso Sea
DGKGSLDKGIKRSRVEVKAPGIIPRKSVNEPMQSGLKSVDSLVPIGRGQRELIIGDRQTGKTAVAIDTIINQKKINESNDEKQKLYCIYVAIGQKRSTVRQIEKSLEEAGAMEYTTIVAATASDAAPLQFLAPYTGCAMGEYFRDNGMHALIIYDDLSKQAVAYRQMSLLLRRPPGREAYPGDVFYLHSRLLERAAKLSDEHGGGSLTALPIIETQGGDVSAFIPTNVISITDGQIFLETNLFNQGIRPAINVGLSVSRVGSSAQTKAMKKVS

SEQ ID NO: 174057 - protein, 305 aa, Unknown
  Bacterial polypetide isolated from the Sargasso Sea
IIKYGDDFMRSMEEGGWDLKRVDKSAMKKSKATFVFGQMNEPPGARARVALSGLTIAEYFRDGAGDSQGKDVLFFVDNIFRFTQAGSEVSALLGRMPSAVGYQPTLATEMGAMQERITSTNKGSITSVQAVYVPADDLTDPAPATTFAHLDATTVLSRKISELGIYPAVDPLDSTSRILTPEILGDEHYNCAQRVKELLQRYKELQDIIAILGMEELSEEDKLAVGRARKVQRFLSQPFHVAEQFTGIPGVLVDIKDTIKGFNMIMDGELDNLPEAAFNLKGTIEDAIEAGEKCYQNPNAFRIIS

SEQ ID NO: 174058 - protein, 273 aa, Unknown
  Bacterial polypetide isolated from the Sargasso Sea
MEKEDFSAKNRKRVEVKAPGIIPRQSVSEPMQTGLKSIDSLIPIGRGQRELIIGDRQTGKTAVAIDAIINQKKINESSDEKKKLYCVYVAIGQKRSTVAQITKTLEEAGALKYTTIVAATASDSAPLQFLAPYTGCTIGEYFRDNGMHALIVYDDLSKQAVAYRQMSLLLRRPPGREAYPGDVFYLHSRLLERASKLNDKSGGGSLTALPIIETQAGDVSAYIPTNVISITDGQIFLETELFNQGIRPAVNVGLSVSRVGSAAQTKAMKKVAG

SEQ ID NO: 174059 - protein, 108 aa, Unknown
  Bacterial polypetide isolated from the Sargasso Sea
AREVQRVLQTYKSLQDIIAILGMDELSEEDKLTVARARKIEKFLSQPFFVAEVFTGSPGKYVDLEDTIKSFDGLVKGEYDHMPEAAFYMVGGIDEAIEKAKKLEAEAA

SEQ ID NO: 174060 - protein, 263 aa, Unknown
  Bacterial polypetide isolated from the Sargasso Sea
GIKVIDLLAPYAKGGKIGLFGGAGVGKTVLIMELINNVAKAHGGFSVFAGVGERTREGNDLYHEMIDSGVIKTDGEGSKAALVYGQMNEPPGARARVALTGLTVAEYFRDQEGQDVLFFVDNIFRFTQAGSEVSALLGRIPSAVGYQPTLATDMGNLQERITTTNKGSITSVQAIYVPADDLTDPAPATSFAHLDATTVLSRQIAEIGIYPAVDPLDSTSRILDPRIVGDEHYRVAREVQKVLQTYKSLQDIIAILGMDECQK

SEQ ID NO: 174061 - protein, 323 aa, Unknown
  Bacterial polypetide isolated from the Sargasso Sea
GSRRKIFDGELPEILTALECDNGGNRLVLEVAQHLGESSVRTIAMDATEGLKRGDEVTDTAAPIKVPVGPETLGRIINVIGEPIDERGEVKSSDNWPIHRAAPEFNDQSTETEILVTGIKVIDLLAPYAKGGKIGLFGGAGVGKTVLIMELINNVAKAHGGFSVFAGVGERTREGNDLYHEMIDSGVIKTDGEGSKAALVYGQMNEPPGARARVALTGLTVAEYFRDQEGQDVLFFVDNIFRFTQAGSEVSALLGRIPSAVGYQPTLATDMGNLQERITTTNKGSITSVQAIYVPADDLTDPAPATSFAHFRCTTVLSRQLLK

SEQ ID NO: 174062 - protein, 253 aa, Unknown
  Bacterial polypetide isolated from the Sargasso Sea
MRRGQLSEKSKMPIHRKPPSYTDQSASNEVLETGIKVIDLMCPFAKGGKIGLFGGAGVGKTVNMMELINNIALQHSGLSVFAGVGERTREGNDFYYEMQESGVVNIDNLGESKVAMVYGQMNEPPGNRLRVALTGLTMAESFRDEGKDVLLFIDNIYRYTLAGVEVSALLGRMPSAVGYQPTLAEEMGALQERITSTKTGSITSIQAVYVPADDLTDPSPATTFAHLDATVVLSRQISELGIYPAVDPLDSTS

SEQ ID NO: 174063 - protein, 316 aa, Unknown
  Bacterial polypetide isolated from the Sargasso Sea
YIGVYVAIGQKRSTVAQITKTLEEAGALKYTTIVAATASDSAPLQFLAPYTGCTIGEYFRDNGMHALIVYDDLSKQAVAYRQMSLLLRRPPGREAYPGDVFYLHSRLLERASKLNEKSGGGSLTALPIIETQAGDVSAYIPTNVISITDGQIFLETELFNQGIRPAVNVGLSVSRVGSAAQTKAMKKVAGSIKLELAQYREMAAFAQFGSDLDASTQQLLNRGAKLTELLKQDQYSPMTVAEQVISVFTGVKGYLDDVELNDIKKFEKDIIEMIKTEKPEIIESIELTGKLEEILKHYFLKSLTNTKKVTNKCKFR

SEQ ID NO: 174064 - protein, 220 aa, Unknown
  Bacterial polypetide isolated from the Sargasso Sea
MQIKPSEITKLLKDQIKNFGEKAEISEVGKVLSVGDGIARVYGLDNVEAGEMVEFEDGSKGMALNLESDNVGVVIFGDDKKIKEGSTVKRTGSIVDAPVGKELLGRVVDGLGNPIDGKGNLSEKIKRQRVELKAPGIIPRQSVNEPMQTGLKAIDTLIPIGRGQRELIIGDRQTGKTAVAIDAIINQKSINESKDEKKKLYCIYVAIGQKRSTVAQIVKT

SEQ ID NO: 174065 - protein, 151 aa, Unknown
  Bacterial polypetide isolated from the Sargasso Sea
GIRPAINVGLSVSRVGSSAQTKAMKKVSGSMKLELAQYREMAAFAQFGSDLDAATQKLLNRGSKLTELLKQKQYSPMTVAEQVISVFCGVKGHLDEIEQKDIATFETKIIEKCRSEKPEIIDSINSSGKLDEDNEKILTELISDLKKTFNS

SEQ ID NO: 174066 - protein, 126 aa, Unknown
  Bacterial polypetide isolated from the Sargasso Sea
MASLDDLKKRISSVKSTQKITKAMKMVAAAKLRRAQESAERGRPYSEKMNNIILNLSSGVSDKENAPKLLSGTGDDKVHLCVVLTADRGLCGGFNSNIIKKAKSYFQKISDTGKTLKIITVWLKRI

SEQ ID NO: 174067 - protein, 122 aa, Unknown
  Bacterial polypetide isolated from the Sargasso Sea
LTDPAPATSFSHLDATTVLSRQIAELGIYPAVDPLDSTSRILDPRVVGDEHYRVAREVQRILQAYKSLQDIIAILGMDELSKEDKLTVARARKIQRFLSQPFFVAEVFTGSPGKLVDLESTI

SEQ ID NO: 174068 - protein, 325 aa, Unknown
  Bacterial polypetide isolated from the Sargasso Sea
RGQTATDTGAPISMPVGPETLGRIMNVVGEPVDERGEIGTTKTYPIHRPAPEFVDQSTETEVLVTGIKVVDLLAPYARGGKIGLFGGAGVGKTVLIMELINNIAKAHGGYSVFAGVGERTREGNDLYHEMIESGIIDLKGKESKVALVYGQMNEPPGARARVALSGLTQAEYFRDEEGQDVLFFVDNIFRFTQAGSEVSALLGRIPSAVGYQPTLATDMGALQERITTTKKGSITSVQAIYVPADDLTDPAPATSFSHLDATTVLNRAISEKGIYPAVDPLDSTSRILDPQVVGNDHYRVAREVQRVIQTYKSLQDIIAILVWMS

SEQ ID NO: 174069 - protein, 274 aa, Unknown
  Bacterial polypetide isolated from the Sargasso Sea
MSLDNVQAGEMVEFSDGSKGMALNLESENVGVVIFGDDKAIKEGDTVKRTGAIVDTPVGKELLGRVVDGLGNPIDGKGALDKGVKRSRVEVKAPGIIPRKSVSEPMQTGLKSIDSLVPIGRGQRELIIGDRQTGKTAVAIDAIINQKKINESNDEKQKLYCVYVAIGQKRSTVRQIEKTLEEAGAMEYTTIVAATASDAAPLQFLAPYTGCTMGEYFRDNGMHALIIYDDLSKQAVAYRQMSLLLRRPPGREAYPGDVFYLHSRLLERAAKLGD

SEQ ID NO: 174070 - protein, 221 aa, Unknown
  Bacterial polypetide isolated from the Sargasso Sea
SFFVDNIFRFTQAGSEVSALLGRMPSAVGYQPTLSTEMGDLQERITSTKKGSITSVQAIYVPADDLTDPAPATAFAHLDATSVLERKIAELGIYPAIDPLTSTSRILDPRVIGDRHYNVARSVQATLQQYKDLQDIIAILGMDELSDEDKMVVSRARKMQKFMSQPFFVAEQFTGIEGRYVKLEDSIAGFEAILNGEVDDLPENAFSYVGSIDEAIEKGKK

SEQ ID NO: 174071 - protein, 305 aa, Unknown
  Bacterial polypetide isolated from the Sargasso Sea
PIDEKGDVKSSEKWPIHRAAPEFNDQSTETEVLVTGIKVIDLLAPYAKGGKIGLFGGAGVGKTVLIMELINNVAKAHGGFSVFAGVGERTREGNDLYHEMIESGVIKPNEAGSKAALVYGQMNEPPGARARVALTGLTVAEYFRDQEGQDVLFFVDNIFRFTQAGSEVSALLGRIPSAVGYQPTLATDMGNLQERITTTNKGSITSVQAIYVPADDLTDPAPATSFAHLDATTVLSRQIAEIGIYPAVDPLDSTSRILDPRIVGDEHYRVAREVQKVLQTYKSLQDIIAILGMDELSEEDKLTVQ

SEQ ID NO: 174072 - protein, 171 aa, Unknown
  Bacterial polypetide isolated from the Sargasso Sea
TNVISITDGQIYLESDLFNAGIRPAINAGLSVSRVGGAAQTKIIKKLGGGVRLALAQYRELAAFAQFASDLDEATRKQLERGQRVTELMKQKQYAPLTVAEMAVSLYAANEGYLDDVPADKIVDFETALHANFVDSACDLAQKINDTGDYNDEIEAELKKFVEDFKATGTY

SEQ ID NO: 174073 - protein, 293 aa, Unknown
  Bacterial polypetide isolated from the Sargasso Sea
TGAPISMPVGPETLGRIMNVVGEPVDERGDIGTSKSYPIHRPAPEFVDQSTETEVLVTGIKVVDLLAPYARGGKIGLFGGAGVGKTVLIMELINNIAKAHGGYSVFAGVGERTREGNDLYHEMIESGIIDLKGKDSKVALVYGQMNEPPGARARVALSGLTQAEYFRDEEGQDVLFFVDNIFRFTQAGSEVSALLGRIPSAVGYQPTLATDMGALQERITTTKKGSITSVQAIYVPADDLTDPAPATSFSHLDATTVLNRAISEKGIYPAVDPLDSTSRILDPQVVGDDHTEC

SEQ ID NO: 174074 - protein, 279 aa, Unknown
  Bacterial polypetide isolated from the Sargasso Sea
GLKRGDEVIDTGAPIKVPVGPETLGRIINVIGEPIDEKGKVETKENWPIHRAAPEFNDQSTETEILVTGIKVVDLLAPYAKGGKIGLFGGAGVGKTVLIMELINNVAKAHGGFSVFAGVGERTREGNDLYHEMIESGVIKPEGTGSKAALVYGQMNEPPGARARVALSGLTVAEYFRDQEGQDVLFFVDNIFRFTQAGSEVSALLGRIPSAVGYQPTLATDMGNLQERITTTNKGSITSVQAIYVPADDLTDPAPATSFSHLDATTVLSRQIAEIGIYP

SEQ ID NO: 174075 - protein, 178 aa, Unknown
  Bacterial polypetide isolated from the Sargasso Sea
MEIKAAEISSVIKDQIANFETKADVAEVGTVLSVGDGIARVYGLDQVQAGEMVEFPGGIKGMALNLEMDNVGVSIFGDDTGIKEGDTVKRTGEIVDVPVGKELLGRVVDGLGNPIDGKGPIQSSEKRRIELKAPGIIPRQSVSEPMQTGIKALDALVPVGRGQRELIIGDRQTGKTAV

SEQ ID NO: 174076 - protein, 308 aa, Unknown
  Bacterial polypetide isolated from the Sargasso Sea
NDEKQKLYCVYVAIGQKRSTVRQIEKTLEEAGAMEYTTIVAATASDAAPLQFLAPYTGCAMGEYFRDNGMHALIIYDDLSKQAVAYRQMSLLLRRPPGREAYPGDVFYLHSRLLERAAKLSEEHGGGSLTALPIIETQGGDVSAFIPTNVISITDGQIFLETELFNQGIRPAINVGLSVSRVGSSAQTKAMKKVSGSMKLELAQYREMAAFAQFGSDLDASTQKLLNRGSKLTELLKQKQYSPMTVAEQVISVYCGVKGYLDDIEQKNIAKFENKIIEKCKSEKSEILESIKSSGKLEEDIEKSLAEV

SEQ ID NO: 174077 - protein, 285 aa, Unknown
  Bacterial polypetide isolated from the Sargasso Sea
NDVRTIAMDATEGLKRGDEVANTGSPISVPVGPETLGRIINVVGESIDEKGDVKTKEKWPIHRSAPKFTDQATETEQLVTGIKVIDLLAPYAKGGKIGLFGGAGVGKTVTIMELINNIAKAHGGFSVFAGVGERTREGNDLYHEMIESGVIKTDGKGSKAALVYGQMNEPPGARARVALTGLTVAEYFRDKEGQDVLFFVDNIFRFTQAGSEVSALLGRIPSAVGYQPTLATDMGNLQERITSTDKGSITSVQAIYVPADDLTDPAPATSFSHLDATTVLSRQLQ

SEQ ID NO: 174078 - protein, 122 aa, Unknown
  Bacterial polypetide isolated from the Sargasso Sea
MVSIRPDEISSILKQQITDYDQSVSVSNVGTVLQIGDGIARIYGLDQVMAGELLEFEDGTEGIALNLEDDNVGAVLMGEALGVQEGSNVKSTGKIASVPVGEAMQGRVVNPLGQPIDGKGEI

SEQ ID NO: 174079 - protein, 295 aa, Unknown
  Bacterial polypetide isolated from the Sargasso Sea
VYVAIGQKRSTVRQIEKTLEEAGAMEYTTIVAATASDAAPLQFLAPYTGCTMGEYFRDNGMHALIIYDDLSKQAVAYRQMSLLLRRPPGREAYPGDVFYLHSRLLERAAKLSDEHGGGSLTALPIIETQGGDVSAFIPTNVISITDGQIFLETELFNQGIRPAINVGLSVSRVGSSAQTKAMKKVSGSMKLELAQYREMAAFAQFGSDLDAATQKLLNRGSKLTELLKQRQYSPMTVAEQVISVFCGVKGHLDDIELKDISNFEAKIIEKCKSEKPEIIESIISSGKLEDESEKI

SEQ ID NO: 174080 - protein, 121 aa, Unknown
  Bacterial polypetide isolated from the Sargasso Sea
MEINPSEITKLLKEQIKNFGEKAEVSEVGKVLTVGDGIARVYGLDNVQAGEMVEFNDGSKGMALNLESDNVGVVIFGDDRQIKEGDTVKRTNSIVDVPVGKELLGRVVDGLGNPIDGKGNL

SEQ ID NO: 174081 - protein, 254 aa, Unknown
  Bacterial polypetide isolated from the Sargasso Sea
GDGIARVYGLDNVQAGEMVEFADGSKGMALNLESENVGVVIFGDDKAIKEGDTVKRTGEIVDTPIGKELLGRVVDGLGNPIDGKGALDKNVKKSRVEVKAPGIIPRKSVGEPMQSGLKAIDSLVPIGRGQRELIIGDRQTGKTAVAVDTIINQKKINESGDEKLKLYCIYVAIGQKRSTVRQIQKTLEEAGAMEYTTIVAATASDAAPLQFLAPYTGCAMGEFFRDNGMHALIIYDDLSKQAVAYRQMSLLLRR

SEQ ID NO: 174082 - protein, 182 aa, Unknown
  Bacterial polypetide isolated from the Sargasso Sea
LQTKVQLTSVQAIYVPADDLTDPAPATSFSHLDATTVLSRQIAEIGIYPAVDPLDSTSRILDPRIVGDEHYRVAREVQKVLQTYKSLQDIIAILGMDELSEEDKLTVARARKIQRFLSQPFFVAEVFTGSPGKLVDLESTIKGFDAICKGEYDHLPEAAFYMVGTIEEAVEKAEKMAKEAAA

SEQ ID NO: 174083 - protein, 209 aa, Unknown
  Bacterial polypetide isolated from the Sargasso Sea
MEIRAAEISAILKKQIADFGSEAEVAEVGQVLSVGDGIARIHGLDKVQAGEMVEFPGGIKGMALNLETDNVGVVIFGDDRNIREGDTVKRTGAIVDVPVGKGLLGRVVDGLGNPIDGKGAIEDAERMRVEVKAPGIIPRKSVHEPVQTGLKAIDSLIPVGRGQRELIIGDRQTGKTAVIIDTILNQRAANEGDNESEKLYCVYVAIGQK

SEQ ID NO: 174084 - protein, 226 aa, Unknown
  Bacterial polypetide isolated from the Sargasso Sea
APKLLSGTGSEKIHLCVVMTSDRGLCGGFNANIIKKAKSYFSKLNEEGKELKIITVGSKGNDQLKRVYGNKIIENISFKESKNASYFDAEKVGKTIIERFEKEEFDICTIFYNQFKNVITQIPQAQQIIPLNTENNTENNSEESYEFEPDEDEILSNLLPKNISTQIFKAMLENSASEQGARMSAMDNATRNAGEMVDKLTIEYNRSRQAAITKELIEIISGAESL

SEQ ID NO: 174085 - protein, 167 aa, Unknown
  Bacterial polypetide isolated from the Sargasso Sea
ARIYGLDNVQAGEMVEFSDGSKGMALNLESENVGVVIFGDDRAVKEGDTVKRTGAIVDTPVGKELLGRVVDGLGNPIDGKGALDKGIKKSRVEVKAPGIIPRKSVSEPMQTGLKSIDSLVPIGRGQRELIIGDRQTGKTAVAIDAIINQKKINESGDEKQKLYCIYE

SEQ ID NO: 174086 - protein, 299 aa, Unknown
  Bacterial polypetide isolated from the Sargasso Sea
GTIVGVSDGIIRIHGLAEAQYGEMIEFDGGLFGMALNLERDSVGVVVLGDYSGLKEGQNARCTGRILEVPVGKELLGRVVDALGNPIDGKGPIGAESSSPIEKVAPGVIARQSVDQPVQIGFKCIDAMVPIGRGQRELIIGDRQIGKTAIAVDAIINQKNSGIKCIYVAIGQKMSTISNIVSSLEEHGAMEYTTVVAAGASDPASMQFISAYSGCAMGEYFRDTGEDALIIYDDLTKQAWAYRQISLLLKRPPGREAYPGDVFYLHSRLLERAARVNADYVEQQTNGAVKSKTGSLTAL

SEQ ID NO: 174087 - protein, 271 aa, Unknown
  Bacterial polypetide isolated from the Sargasso Sea
MDNLNPSEISEIIKGRIDSLETSTTESNEGTIVFLSDGIARVHGLSDAMYGELIEFEGGVSGMALNLERDSVGVVIFGDYKQLAEGGVAKCTGKILEVPVGPELVGRVVDALGNPIDGKGPIKSKLTSPVEKVAPGVMTRKPVDEPVQIGLKAVDSMVPIGRGQRELIIGDRQTGKTAIALDAIINQKGTGVTCVYVAVGQKQSSIAAVVRKLEEYGAMEHTIIVAAAAADPAPMQFLAPYSGCSMGEYFRDKGEDALIIYDDLSKQAVAY

SEQ ID NO: 174088 - protein, 273 aa, Unknown
  Bacterial polypetide isolated from the Sargasso Sea
MWTTKTYPIHRPAPDFVNQSTETEVLVTGIKVVDLLAPYARGGKIGLFGGAGVGKTVLIMELINNIAKAHGGYSVFAGVGERTREGNDLYHEMIESGIIDLKGKNSKVALVYGQMNEPPGARARVALSGLTQAEYFRDEEGQDVLFFVDNIFRFTQAGSEVSALLGRIPSAVGYQPTLATDMGALQERITTTKKGSITSVQAIYVPADDLTDPAPATSFSHLDATTVLNRAISEKGIYPAVDPLDSTSRILDPQVVGDDHYRVAREVQRVLQT

SEQ ID NO: 174089 - protein, 307 aa, Unknown
  Bacterial polypetide isolated from the Sargasso Sea
SELVELPNGVFGMALNLEEDNVGIVLFGESRLVKEGDLAKRTGRVVEVPVGDTMLGRVVNPLGQPIDGKGPINTEHSLPIERKALGVMARSPVNEPLQTGIKAVDSMIPIGRGQRELIIGDRQTGKTAVAIDAIINQKYTHNTDSPVYCIYVAIGQKASTVAALVKELESNGAMEYTTVVAANASDPAPMQYIAPYAGAAMGEFFRDNGKHGLIVYDDLSKQAVAYRQMSLVLRRPPGREAFPGDVFYLHSRLLERASKLSEELGGGSLTALPIIETQEGDVSAYIPTNVISITDGQIYLETNLLIQ

SEQ ID NO: 174090 - protein, 198 aa, Unknown
  Bacterial polypetide isolated from the Sargasso Sea
MEINPSEVTKILKEQIKNFGDKAEVTEVGQVLSVGDGIARIYGLDNVQAGEMVEFADGSKGMALNLESENVGVVIFGDDRNVKEGDVVKRTGNIVDTPVGKELLGRVVDGLGNPIDGKGPLDKGIKKSRVEVKAPGIIPRQSVSEPMQTGLKSIDSLVPIGRGQRELIIGDRQTGKTAVAVDAIINQKKINESGMKNK

SEQ ID NO: 174091 - protein, 272 aa, Unknown
  Bacterial polypetide isolated from the Sargasso Sea
AGEMVEFADGSKGMALNLESENVGVVIFGDDRNVKEGDVVKRTGNIVDTPVGKELLGRVVDGLGNPIDGKGPLDKGIKKSRVEVKAPGIIPRQSVSEPMQTGLKSIDSLVPIGRGQRELIIGDRQTGKTAVAVDAIINQKKINESGDEKQKLYCIYVAVGQKRSTVRQIQKTLEEAGAMEYTTIVAATASDSAPLQFLAPYTGCAMGEYFRDNGMHALIIYDDLSKQAVAYRQMSLLLRRPPGREAYPGDVFYLHSRLLERAAKLSDEHGGG

SEQ ID NO: 174092 - protein, 256 aa, Unknown
  Bacterial polypetide isolated from the Sargasso Sea
GLFGGAGVGKTVIIMELINNIAKAHGGFSVFAGVGERTREGNDLYHEMIESGVIKPEGPGSKAALVYGQMNEPPGARARVALTGLTVAEYFRDQEGQDVLFFVDNIFRFTQAGSEVSALLGRIPSAVGYQPTLATDMGNLQERITTTNKGSITSVQAIYVPADDLTDPAPATSFSHLDATTVLSRQIAELGIYPAVDPLDSTSRILDPRIVGDEHYRVAREVQKILQTYKSLQDIIAILGMDELSEEDKLTVARAR

SEQ ID NO: 174093 - protein, 133 aa, Unknown
  Bacterial polypetide isolated from the Sargasso Sea
MAEVKPAEVSAILREQLAGLKTEAELQEVGTVLQIGDGIARVYGLSNVQYGELVEFENGLQSMALNLEEDNVGLVLLGSGKGIKEGATVKRTGKIASVKIGEGIVGRVVNTIGDPIDGKGPIQGELYDMPIER

SEQ ID NO: 174094 - protein, 292 aa, Unknown
  Bacterial polypetide isolated from the Sargasso Sea
RQSVDQPVQTGLKSIDVMFPIGRGQRELIIGDRQTGKTAIAVDTIIHQKDSDITCVYVAIGQKQSTVATVVRQLEEADALKNTIVVSATAAESASLQFLAPYAGCTMGEYFRDIGEDALIIYDDLSKHAVAYRQISLLLKRPPGREAFPGDIFYLHSRLLERASRVNADYVERVTNGKVKGKTGSLTALPIIETQASDVSAFIPTNVISITDGQIFLETDLFNSGIRPAINPGISVSRVGGAAQTKIIKKLGGGVKLALAQFRELESFSQFASDLDDATREQLENGQRITEL

SEQ ID NO: 174095 - protein, 287 aa, Unknown
  Bacterial polypetide isolated from the Sargasso Sea
DLLAPYAKGGKIGLFGGAGVGKTVLIMELINNVAKAHGGFSVFAGVGERTREGNDLYHEMIDSGVIKTDGEGSKAALVYGQMNEPPGARARVALTGLTVAEYFRDQEGQDVLFFVDNIFRFTQAGSEVSALLGRIPSAVGYQPTLATDMGNLQERITTTNKGSITSVQAIYVPADDLTDPAPATSFAHLDATTVLSRQIAEIGIYPAVDPLDSTSRILDPRIVGDEHYRVAREVQKVLQTYKSLQDIIAILGMDELSEEDKLVVARARKIQRFLSQPFFVAEVFTGS

SEQ ID NO: 174096 - protein, 270 aa, Unknown
  Bacterial polypetide isolated from the Sargasso Sea
MANAKGKITQVIGAVVDVQFEDHLPEILNALTTDNNGKKLVLEVAQHLGENTVRTIAMDASEGLVRGQEVIDTAGPISVPVGNATLGRILNVVGEPVDEQGPVKAKESRAIHQPAPEFNEQSTESEVLVTGIKVIDLLAPYSKGGKIGLFGGAGVGKTVLIMELINNIAKVHSGFSVFAGVGERTREGNDLYHEMIESNVIKPGNLEESQVALVYGQMNEPPGARARVALTGLTLAEQFRDQSGTDVLFFVDNIFRFTQAGSEVSALLGR

SEQ ID NO: 174097 - protein, 290 aa, Unknown
  Bacterial polypetide isolated from the Sargasso Sea
SLNPSEISSVLKEKIAGLDLSAERKNEGIVVSVSDGIVRIHGMGDVMYGEVIEFENGTKGMALNLEQDSVGAVVLGDYLEIIEGQKAVCTGKVLEVPVGEGLLGRVVNTLGIPIDGKGEIKADSSSPVEVVAPGVIARQSVDQPVQIGLKAVDAMVPIGRGQRELIIGDRQTGKTAVAIDAIINQKGTGIKCIYVAIGQKQSTVANVVRKLEEYGAMEHTIVVSATAADPAPMQYLSAYSGCTMGEYFRDKGEDALIVYDDLSKQAVAYRQVSLLLKRPPGREAYPGDVF

SEQ ID NO: 174098 - protein, 320 aa, Unknown
  Bacterial polypetide isolated from the Sargasso Sea
QKTEDVICVYVAIGQKASSVAAAVNILEEKGALPYTIVVAANADEPATLQYIAPYTGAALAEYFMYSGKATLIIYDDLTKQASAYRQMSLLLRRPPGREAYPGDVFYLHSRLLERAAKLSDDLGGGSMTALPIIETQAGDVSAYIPTNVISITDGQIFLSGDLFNSGIRPAINVGISVSRVGSAAQIKAMKQVAGKLKLELAQFAELEAFSQFASDLDQATQNQLAQGVRLREMLKQAANSPIPVEEQVAIIYAGINGFLDDLEVSSVLPFIGKLRPYLRNSMPQFISGIKESKKMSPEAEELLKKAIAEVKARYVVLLT

SEQ ID NO: 174099 - protein, 147 aa, Unknown
  Bacterial polypetide isolated from the Sargasso Sea
MSVNGKIIQVIGAVVDVQFDGALPEILTALEVDNSGNKLVLEVAQHLGENSVRTIAMDSTEGLKRGDNVQNTGAPISVPVGPETLGRIINVIGQPIDQKGEVKTKEKWPIHREAPKFTDQSTETEILETGIKVIDLLAPYSKGGKIG

SEQ ID NO: 174100 - protein, 109 aa, Unknown
  Bacterial polypetide isolated from the Sargasso Sea
QEHYDTTRAVQGVLQKYKELKDIIAILGMDELSDEDKLSVNRARKIQRYLSQPFFVAETFTGTPGKYVSLKDTIQGFQAIVNGDYDDLPEQAFYMIGEIEEAKKKADEI

SEQ ID NO: 174101 - protein, 220 aa, Unknown
  Bacterial polypetide isolated from the Sargasso Sea
MEINPSEVTKILKEQIKKFGDKAEVTEVGQVLSVGDGIARIYGLDNVQAGEMVEFSDGSKGMALNLESENVGVVIFGDDKAVKEGDTVKRTGAIVDTPVGKELLGRVVDGLGNPIDGKGALDKSIKRSRVEVKAPGIIPRKSVSEPMQTGLKSIDSLVPIGRGQRELIIGDRQTGKTAVAIDAIINQKKINESGDEKKKLYCIYVAVGQKRSTVRQMKKL

SEQ ID NO: 174102 - protein, 253 aa, Unknown
  Bacterial polypetide isolated from the Sargasso Sea
MVSIRPDEISAFLKQQIEDYDKSVSVSNVGTVLQVGDGIARVYGLQEAMAGELLEFEDGTEAIALNLEDDNVGAVLMGEGLGIQEGSTVKATGKIASVPVGDATLGRVVNPLGQPIDGKGDIATTEMRLIESMAPGIIQRKSVHEPMQTGITAIDAMIPVGRGQRELIIGDRQTGKTAIAIDTILNQADQDMICVYVAIGQKAASVANVVEVLRERGALDYTVVVAANASEPAALQYLAPYTGASIAEYFMYK

SEQ ID NO: 174103 - protein, 275 aa, Unknown
  Bacterial polypetide isolated from the Sargasso Sea
MVSIRPDEISSILKQQIADYDKSVSVSNVGTVLQIGDGIARVYGLEKVMAGELVEFEDGTEGIALNLEDDNVGVVLMGEALGVQEGSTVKATGKIASVPVGEAMLGRVVNPLGQQIDGKGEMATTDSRLIESIAPGIIKRKSVHEPMQTGITSIDAMIPIGRGQRELIIGDRQTGKTAIAIDTIINQKGQDVVCVYVAVGQKQASVANVVEVLKEKGALDYTIIVNAGASEAAALQYLAPYTGAAIAEHFMYQGKATLVIYDDLTKQAQAYRQMS

SEQ ID NO: 174104 - protein, 229 aa, Unknown
  Bacterial polypetide isolated from the Sargasso Sea
REAYPGDVFYLHSRLLERASKLADEQGGGSLTALPIIETQGGDVSAYIPTNVISITDGQIFLEPDLFNSGVRPAVNVGISVSRVGGSAQIKAMKKVAGRLRLDLAQYRELEAFAQFGSDLDAATQRQLARGARTVEMLKQPQYQPMPVENQVAVIYAVTNGYLDDVDVSLVRQWELGFHQQMAAKHQGVLDGIRDGGQLTDELNEQLVSAIESFNESFAAEHQATGASA

SEQ ID NO: 174105 - protein, 256 aa, Unknown
  Bacterial polypetide isolated from the Sargasso Sea
MTVNPSEVTKLLKDQIKNFGKKAEVSEIGKVLSVGDGIARVYGLDNVQAGEMVEFEDGSKGMALNLENDNVGVVIFGDDRNIKEGDTIKRTNAIVDVPVGKELLGRVVDGLGNPIDGKGALSPKERKRVEVKAPGIIPRQSVNEPMQTGLKSIDSLIPIGRGQRELIIGDRQTGKTAVAIDAIINQKKINESTDESKKLYCVYVAIGQKRSTVAQITKTLEEAGALKYTTIVAATASDSAPLQFLAPYTGCTIGEF

SEQ ID NO: 174106 - protein, 279 aa, Unknown
  Bacterial polypetide isolated from the Sargasso Sea
MVESGVIVPDGPGSKAALVYGQMNEPPGARARVALTGLTLAEYFRDQEGQDVLFFVDNIFRFTQAGSEVSALLGRIPSAVGYQPTLATDMGALQERITTTTKGSITSVQAIYVPADDLTDPAPATSFAHLDATTVLSRQIAEIGIYPAVDPLDSTSRMLDPRIVGEEHYEVARKVQEVLQQYKSLQDIIAILGMDELSEEDKLVVSRARKIQRFLSQPFHVAEVFTGSPGVLVPLEDTIKGFKGIADGVYDDLPEAAFYMVGTIEEAIEKAKKLAKEAA

SEQ ID NO: 174107 - protein, 166 aa, Unknown
  Bacterial polypetide isolated from the Sargasso Sea
VPADDLTDPAPATSFAHLDATTTLSRSIAEKGIYPAVDPLDSTSRMLDPMIVGEEHYQVARAVQSTLQRYKSLQDIIAILGMDELSEEDKLTVARARKIERFLSQPFHVAEVFTGSPGILVSLEDTIRSFKALVEGEYDHLPEAAFYMVGTIDDAVERAKKLAEAA

SEQ ID NO: 174108 - protein, 71 aa, Unknown
  Bacterial polypetide isolated from the Sargasso Sea
KSQRFLSQPFFVAEVFTGSPGKLVDLESTIKGFDAICKGEYDHLPEAAFYMVGTIEEAIEKAEKMEKEVAA

SEQ ID NO: 174109 - protein, 278 aa, Unknown
  Bacterial polypetide isolated from the Sargasso Sea
CKLGLKSIDSLVPIGRGQRELIIGDRQTGKTAVAIDAIINQKKINESNDEKQKLYCVYVAIGQKRSTVRQIEKTLEEAGAMEYTTIVAATASDAAPLQFLAPYTGCAMGEYFRDNGMHALIIYDDLSKQAVAYRQMSLLLRRPPGREAYPGDVFYLHSRLLERAAKLGDEHGGGSLTALPIIETQGGDVSAFIPTNVISITDGQIFLETELFNQGIRPAINVGLSVSRVGSSAQTKAMKKVSGSMKLELAQYREMAAFAQFGSDLDASTQKLLNRGSK

SEQ ID NO: 174110 - protein, 286 aa, Unknown
  Bacterial polypetide isolated from the Sargasso Sea
MPNLKEIRNRISSVTSTMKITSAMKMVSAAKLKKAQDAVTAMRPYSEKLGELMSSFYEIISTSSASQLSEKRDIKNVLLIPICSNKGLCGAFNSNVIKKAISLKNDPNFSKAKFSFIIIGKKANDIISKTENVISNHSDIFENINYDDTASVVDSIIELFSNGEFDHVELIYNTFKNAANQTTITEQFLPISKPEGTEALSDYIFEPSMEQIVSDLVPKSLKIQLYKAIRDSFAGEHGARMTAMHKATDNASELKSELVLTYNKARQAAITNEILEIVSGAEALNG

SEQ ID NO: 174111 - protein, 278 aa, Unknown
  Bacterial polypetide isolated from the Sargasso Sea
VDVKFEGDLPEILTALECKNGDNRLVLEVAQHLGESTVRTIAMDATEGLKRGDEVMNTNSPIKVPVGPETLGRIINVIGEPIDEKGEVKTKESWPIHRPAPEFNDQSTETEILVTGIKVIDLLAPYAKGGKIGLFGGAGVGKTVLIMELINNVAKAHGGFSVFAGVGERTREGNDLYHEMIDSGVIKTDGEGSKAALVYGQMNEPPGARARVALTGLTVAEYFRDQEGQDVLFFVDNIFRFTPAGSEVSALLGRIPSAGGYQPTLATDMGNLQERIQL

SEQ ID NO: 174112 - protein, 283 aa, Unknown
  Bacterial polypetide isolated from the Sargasso Sea
KKRIASVKSTQKITKAMKMVAAAKLRKAQESAEKGRPYSEKMNNIILNLSNGISDKENTSKLLSGTGDDKVHLCVVMTSDRGLCGGFNSNIIKKAKSYFSKISAEGKEFKIITVGSKGNDQLKRVYGEKIIENISFKESKNANYFDADKVGKMIIEKFEAGEFDVCTIFYNQFKNVITQIPQAQQIVPLNNEENENNSDESYEFEPDEDEILSNLLPKNISTQIFKAMLENSASEQGSRMSAMDNATRNAGEMVDKLTIEYNRSRQAAITKELIEIISGAESL

SEQ ID NO: 174113 - protein, 271 aa, Unknown
  Bacterial polypetide isolated from the Sargasso Sea
MPSLDDLRKRISSVKSTQKITKAMKMVAAAKLRKAQEMAEKGRPYSDKMDIIIQNLSMAIKDPLNAPKLLVGTGEDKTHLCVVMTADRGLCGGFNTNIVKLAKNYFNKILKDSKNLKIITVGTKGLDQLKRDYGKYIIKKIDFKDKKNISFNEAKVVGKEILDLFKNKEFDKCLIFFNKFKNVMSQIPQTQQVIPAKKSGQAETNQDSSYEFEPEEDEILEDLLPKNISTQIYKGFLENSASEQGSRMTAMDNATRNAGDLVEKLTINYNR

SEQ ID NO: 174114 - protein, 178 aa, Unknown
  Bacterial polypetide isolated from the Sargasso Sea
MANEKEIRTKIGSVKNTQKITKAMEMVAASKMRRTQETMKKALPYADKIRAVIGHIYKANPDYKHPFLEKRDVKTAGYIVVSSDRGLCGGLNVNMFRGLIAELKDNKNNQVESKLCLVGAKAVQFFRSVDVDVVAAASHLGEEPQVEDLVGSIKTMLDEYIDGKIDQLFIVHNDFVNT

SEQ ID NO: 174115 - protein, 324 aa, Unknown
  Bacterial polypetide isolated from the Sargasso Sea
VALPKIYDALEVFKADGTRVVLEVQSHVGESSVRTIAMDSSDGFQRGMEVQSTGSAIKMPTGEEIKGRLFNVVGEAIDGIQEIDSKNGLPIHREAPKFDQLSTATEVLFTGIKVIDLIEPYAKGGKIGLFGGAGVGKTVLIQELINNIAKGHGGLSVFAGVGERTREGNDLLREMLESGIIKYGDDFMHSMEEGGWDLTKVDLEQMKESKATFVFGQMNEPPGARARVALSGLTVAEYFRDGEGDGEGKDILFFVDNIFRFTQAGSEVSALLGRMPSAVGYQPTLASEMGAMQERITSTKSGSITSVQAVYVPADDLTDPAPAI

SEQ ID NO: 174116 - protein, 262 aa, Unknown
  Bacterial polypetide isolated from the Sargasso Sea
DSVGAVVLGDYLGLIEGQKAVCTGRILEVPVGEELLGRVVDALGSPIDGKGEIKTEMTAPVEVVAPGVIARQSVDQPVQIGLKAVDAMVPIGRGQRELIIGDRQTGKTAVAVDAIINQKGTGIKCIYVAIGQKQSTVVNVVKKLEEHGALEHTIIVSASASDPAPMQYLSAYSGCSMGEYFRDKGEDALIVYDDLSKQAVAYRQVSLLLKRPPGREAYPGDVFYLHSRLLERAARVNADYVEKATNGKVKGKTGSLTALPII

SEQ ID NO: 174117 - protein, 150 aa, Unknown
  Bacterial polypetide isolated from the Sargasso Sea
SFSHLDATTVLSRQIAELGIYPAVDPLDSTSRILDPRVVGDEHYRVAREVQKILQTYKSLQDIIAILGMDELSEEDKLTVARARKIQRFLSQPFFVAEVFTGSPGKLVDLESTIKGFDAICKGEYDHLPEAAFYMVGTIEEAVEKAEKME

SEQ ID NO: 174118 - protein, 313 aa, Unknown
  Bacterial polypetide isolated from the Sargasso Sea
RSRPKDSSVAVAIDVLRKHGAMDYTTVIVAGASTAAPLQYIAPYSGTAMAEHFMHDGQHALIVYDDLSKQATAYRQLSLLMRRPPGREAYPGDVFYAHSRLLERSSKLSDELGGGSLTSLPIIETLEGEVSAYIPTNVISITDGQIYLQPDLFFAGQRPAMNVGISVSRVGGAAQTKAMKKVSGGLRLDLASFRELEAFAQLGTDLDAATQQRLDRGYRMVELLKQGQYEPLEMVDQVLSIYAGTRGHLDDVKRDEVAAWEASFLTFVKDQVPELRNRIIESNELDDESERQLEAAIAEFKRQHTSGTDKQEP

SEQ ID NO: 174119 - protein, 91 aa, Unknown
  Bacterial polypetide isolated from the Sargasso Sea
MAKNKTGIITQVIGAVVDVKFEENLPPILNALEVDNDGNRLVLEVAQHLGENTVRCIAMDSTEGLVRGAEVTDSGKPITVPVGPETLGRII

SEQ ID NO: 174120 - protein, 140 aa, Unknown
  Bacterial polypetide isolated from the Sargasso Sea
NQILKLFKENKVDCVELIYNRFISVISQVVSKKQLVPAEVTQSENDDIKEDENTTIAPYDYEPDEQSILDDLLPRNLTTQLFAAILESSAGELAARMTAMDNATRNAGEIIDKLTLEYNRTRQAFITKELIEIISGAEAL

SEQ ID NO: 174121 - protein, 206 aa, Unknown
  Bacterial polypetide isolated from the Sargasso Sea
RLLERAAKLNEKSGGGSLTALPIIETQAGDVSAYIPTNVISITDGQIFLETDLFNQGIRPAVNVGLSVSRVGSAAQTKAMKKVAGSIKLELAQYREMAAFAQFGSDLDASTQQLLNRGAKLTELLKQDQYSPLTVAEQVISVFTGVKGYLDNIDLNKIKNFEKKLIEKIKTEKPEIINTIQSSGKLDEDTENLLSQIIEEFKKSEK

SEQ ID NO: 174122 - protein, 252 aa, Unknown
  Bacterial polypetide isolated from the Sargasso Sea
AGNRLVLEVAQHLGESSVRTIAMDATEGLKRGDEVTDTGAPIKVPVGPETLGRIVNVIGDPIDEKGEIKTKENWPIHRAAPEFNDQSTETEILVTGIKVVDLLAPYAKGGKIGLFGGAGVGKTVIIMELINNIAKAHGGFSVFAGVGERTREGNDLYHEMIESGVIKPEGPGSKAALVYGQMNEPPGARARVALSGLTVAEYFRDQEGQDVLFFVDNIFRFTQAGSEVSALLGRIPSAVGYQPTLATDMGNL

SEQ ID NO: 174123 - protein, 249 aa, Unknown
  Bacterial polypetide isolated from the Sargasso Sea
MSKDGKITQIIGAVVDVNFDDDLPEIYTALEVKNFGNKLVLEVAQHLGENDVRTIAMDSTEGLKRGDAVINTGSPISVPVGPETLGRIINVVGESIDEKGDVKTKEKWPIHRPAPKFTDQATETEQLVTGIKVIDLLAPYAKGGKIGLFGGAGVGKTVTIMELINNIAKAHGGFSVFAGVGERTREGNDLYHEMIESGVIKTEGKGSKAALVYGQMNEPPGARARVALTGLTVAEYFRDKEGQDVLFFV

SEQ ID NO: 174124 - protein, 306 aa, Unknown
  Bacterial polypetide isolated from the Sargasso Sea
GAVVLGDYLELVEGQKAICTGKILEVPVGEALLGRVVNTLGQPIDGKGEIKAEGFAPVEVVAPGVIARQSVDQPVQIGLKAVDAMVPIGRGQRELIIGDRQTGKTAVAIDAIINQKGTGVKCIYVAIGQKQSTVANVVRKLEEYGAMEHTIVVSATAADPAPMQYLSAYAGCSMGEYFRDKGEDALIVYDDLSKQAVAYRQVSLLLKRPPGREAYPGDVFYLHSRLLERAARVNADYVEQITGGKVKGKTGSLTALPIIETLAGDVSAFVPTNVISITDGQIYLETELFNSGIRPAINPGLSVSRV

SEQ ID NO: 174125 - protein, 290 aa, Unknown
  Bacterial polypetide isolated from the Sargasso Sea
VGKTVLIMELINNVAKAHGGFSVFAGVGERTREGNDLYHEMIDSGVIKKEGTGSKAALVYGQMNEPPGARARVALTGLTVAEYFRDQEGQDVLFFVDNIFRFTQAGSEVSALLGRIPSAVGYQPTLATDMGNLQERITTTNKGSITSVQAIYVPADDLTDPAPATSFAHLDATTVLSRQIAEIGIYPAVDPLDSTSRILDPRIVGDEHYRVAREVQKILQTYKSLQDIIAILGMDELSEEDKLVVARARKIQRFLSQPFFVAEVFTGSPGKLVELESTIKGFDAICKGEY

SEQ ID NO: 174126 - protein, 262 aa, Unknown
  Bacterial polypetide isolated from the Sargasso Sea
AKLKRAQESAEKGRPYSEKMNNVILNLSNGISDKENAPRLLSGTGKDKVHLCVVMTSDRGLCGGFNSNIIKKAKSYFAKLSEEGKDLKIVTVGSKGNDQLKRTYEDRIIANISFKESKNANFFDAEKVGKMVIEKFEAEEFDVCTIFYNQFKNVITQIPQSQQIIPLKTDNSEENKSEDNYEFEPDEDEILSNLLPKNISTQIFKAMLENSASEQGSRMSAMDNATRNAGEMVDKLTIEYNRSRQAAITKELIEIISGAESL

SEQ ID NO: 174127 - protein, 273 aa, Unknown
  Bacterial polypetide isolated from the Sargasso Sea
TDTGSPIKVPVGPETLGRIVNVIGEPIDEKGEVKTKESWPIHRAAPEFNDQSTETEILVTGIKVVDLLAPYAKGGKIGLFGGAGVGKTVIIMELINNIAKAHGGFSVFAGVGERTREGNDLYHEMIESGVIKPEGPGSKAALVYGQMNEPPGARSRVALTGLTVAEYFRDQEGQDVLFFVDNIFRFTQAGSEVSALLGRIPSAVGYQPTLATDMGNLQERITTTNKGSITSVQAIYVPADDLTDPAPATSFAHLDATTVLSRQIAELGIYPAS

SEQ ID NO: 174128 - protein, 251 aa, Unknown
  Bacterial polypetide isolated from the Sargasso Sea
MSKGIITQVIGAVVDVKFEGELPEILTALECKNGDNRLVLEVAQHLGESTVRTIAMDATEGLKRGDEVVNTNAPIQVPVGPETLGRIINVIGEPIDERGEVKTKESWPIHRAAPEFNDQSTETEILVTGIKVIDLLAPYAKGGKIGLFGGAGVGKTVLIMELINNVAKAHGGFSVFAGVGERTREGNDLYHEMMDSGVIKKDGPGSKAALVYGQMNEPPGARARVALTGLTVAEYFRDQEGQDVLFFVDNI

SEQ ID NO: 174129 - protein, 247 aa, Unknown
  Bacterial polypetide isolated from the Sargasso Sea
ARARVALTGLTVAEYFRDQEGQDVLFFVDNIFRFTQAGSEVSALLGRIPSAVGYQPTLATDMGNLQERITTTNKGSITSVQAIYVPADDLTDPAPATSFSHLDATTVLSRQIAELGIYPAVDPLDSTSRILDPRIVGDEHYRVAREVQKILQTYKSLQDIIAILGMDELSEEDKLTVARARKIQRFLSQPFFVAEVFTGSPGKLVDLESTIKGFDAICKGEYDHLPEAAFYMVGTIEEAVEKAEKMA

SEQ ID NO: 174130 - protein, 193 aa, Unknown
  Bacterial polypetide isolated from the Sargasso Sea
ATDMGNLQERITTTNKGSITSVQAIYVPADDLTDPAPATSFSHLDATTVLSRQIAELGIYPAVDPLDSTSRILDPRIVGDEHYRVAREVQKILQTYKSLQDIIAILGMDELSEEDKLTVARARKIQRFLSQPFFVAEVFTGSPGKLVDLEATIKGFDAICKGEYDHLPEAAFYMVGTIEEAIEKAEKMAKDAA

SEQ ID NO: 174131 - protein, 124 aa, Unknown
  Bacterial polypetide isolated from the Sargasso Sea
MANNLTGKISQVLGAVVDVEFDGELPAIMNALEVDNNGTRLMLEVAQHLGENAVRTIAMDTTDGLVRGQTATDTGAPISMPVGPETLGRIMNVVGEPVDERGDIGTSKSYPIHRPAPEFVDQST

SEQ ID NO: 174132 - protein, 190 aa, Unknown
  Bacterial polypetide isolated from the Sargasso Sea
EIYRERITTTNKGSITSVQAIYVPADDLTDPAPATSFSHLDATTVLSRQIAELGIYPAVDPLDSTSRILDPRVVGEEHYRVAREVQRILQAYKSLQDIIAILGMDELSEEDKLTVARARKIQRFLSQPFFVAEVFTGSPGKLVDLQSTIKGFDAICKGQYDHLPEAAFYMVGSIEEAVEKAEKMAKEAAN

SEQ ID NO: 174133 - protein, 290 aa, Unknown
  Bacterial polypetide isolated from the Sargasso Sea
MASLDDLKKRIASVKSTQKITKAMKMVAAAKLRRAQESAEKGRPYSEKMNNVILNLSNGISDKENAPKLLSGTGDEKVHLCVVMTSDRGLCGGFNSNIIKKAKSYFSKILDEGKEFKIITVGSKGNDQLKRIYGDKIVENISFKESKNANYFDADKVGKMVIEKFEAGEFDVCTIFYNQFKNVITQIPQAQQIIPLNNEEEENSSDESYEFEPDEDEILSNLLPKNISTQIFKAMLENSASEQGSRMSAMDNATRNAGEMVDKLTIEYNRSRQAAITKELIKIISGAESL

SEQ ID NO: 174134 - protein, 230 aa, Unknown
  Bacterial polypetide isolated from the Sargasso Sea
ITKLLKEQIKNFGEKTEVSEVGKVLTVGDGIARVYGLDNVQAGEMVEFNDGSKGMALNLESDNVGIVIFGDDRQIKEGDTVKRTNSIVDVPVGKELLGRVVDGLGVPIDGKGTLPSKIIRKRVEVKAPGIIPRQSVNEPMQTGLKAIDSLIPIGRGQRELIIGDRQTGKTAVAVDTIINQKAINESSDEKKKLYCVYVAIGQKRSTVAQIVKTLEDAGAMKYTTSGICNC

SEQ ID NO: 174135 - protein, 194 aa, Unknown
  Bacterial polypetide isolated from the Sargasso Sea
VGYQPTLAIDMGNLQERITTTNKGSITSVQAIYVPADDLTDPAPATSFSHLDATTVLSRQIAELGIYPAVDPLDSTSRILDPRVVGDEHYRVAREVQKILQTYKSLQDIIAILGMDELSEEDKLTVARARKIQRFLSQPFFVAEVFTGSPGKLVDLESTIKGFDAICKGEYDHLPEAAFYMDGTIEEAVEKAEK

SEQ ID NO: 174136 - protein, 268 aa, Unknown
  Bacterial polypetide isolated from the Sargasso Sea
AVGQKRSTVAQVVKALEEAGAMEYTTVVAATASEPAPLQFLAPYTGCTMGEYFRDNGMHALIIYDDLSKQATAYRQMSLLLRRPPGREAFPGDVFYLHSRLLERAAKLNDDEGAGSLTALPVIETQASDVSAYIPTNVISITDGQIFLETDLFYQGIRPAINVGISVSRVGSAAQIKAMKQVAGSIKLELAQYREMAAFAQFGSDLDVTTQRLLNRGARLTELLKQPQYQPLPVEEQVVAIFAGVNGYLDELPLESITDFEEKFLNEV

SEQ ID NO: 174137 - protein, 233 aa, Unknown
  Bacterial polypetide isolated from the Sargasso Sea
MDIKTDQITSLLKEQLEKYNNDIDVSEVGEIIEVGDGVARASGLENVMSSELVELPNDVFGMALNLEEDNVGLVLFGETRKVKEGDIAKRTGKVVEVPVGREMLGRVVNPLGQPLDGKGPINSSEFLPVERKALGVMSRSPVNEPLQTGIKAIDSMVPIGRGQRELIIGDRQTGKTAVAIDAIINQKNTQDTDAPVFCVYVAIGQKASTVASLVSELEAQGAMDYTIVVAANN

SEQ ID NO: 174138 - protein, 285 aa, Unknown
  Bacterial polypetide isolated from the Sargasso Sea
RTREGNDFYYEMQESGVVNVEKPSESKVAMVYGQMNEPPGNRLRVALTGLTMAEKFRDEGRDVLLFIDNIYRYTLAGVEVSALLGRMPSAVGYQPTLAEEMGALQERITSTKDGSITSIQAVYVPADDLTDPSPATTFAHLDATVVLSRQIAELGIYPAVDPLDSTSRQLDPLVVGEEHYNVAQGVQGVLQKYKELKDIIAILGMDELSEEDKLAVARARKVERFLSQPFTVAEVFTGSPGKYVKLEDTIKSFKGILAGDYDDLPEQAFYMVGTIEEAVEKAKTL

SEQ ID NO: 174139 - protein, 193 aa, Unknown
  Bacterial polypetide isolated from the Sargasso Sea
PTLADEMGELQERITTTRGRSITSMQAVYVPADDYTDPAPFTSFTHFDGTTELSRDIAALGIYPAVDPLASTSTILTPEVVGQKHYDTARRVQEILQRYKELQDIIAILGLDELSEEDKITVSRARKVQRFLSQPMNVAEIFTGLPGVTVSVEETVDSFAALVDGELDELPEQAFLNVGGAEDAQRKAQELEA

SEQ ID NO: 174140 - protein, 89 aa, Unknown
  Bacterial polypetide isolated from the Sargasso Sea
MANNLTGKISQVLGAVVDVEFDGELPAIMNALEVDNNGTRLMLEVAQHLGENAVRTIAMDTTDGLVRGQTATDTGAPISMPVGPETLGR

SEQ ID NO: 174141 - protein, 306 aa, Unknown
  Bacterial polypetide isolated from the Sargasso Sea
TGIKCIYVAIGQKASSIAGVVRKLEEEGAMEHTIVVAAAAADSPAMQYIAPYSGTSMGEYFLDNGEDALIIFDDLTKQAWAYRQVSLLLRRPPGREAYPGDVFYLHSRLLERASRVSQEHVESISDGKIKGKTGSLTALPIIETQAGDVSAFVPTNVISITDGQIFLETDLFNAGIRPAINAGLSVSRVGGSAQTKIIKKLGGGIRLALAQYRELAAFAQFASDLDEATRKQLERGQRATELMKQKQYSPLSVSEMALSLFAVNEGYLDDVEVAKISDYESALHDYARSNEGELLENINKTGDYND

SEQ ID NO: 174142 - protein, 113 aa, Unknown
  Bacterial polypetide isolated from the Sargasso Sea
SILGQEHYDTTRAVQGVLQKYKELKDIIAILGMDELSDEDKLSVNRARKIQRYLSQPFFVAETFTGTPGKYVSLKDTIKGFQAIVNGDYDDLPEQAFYMIGEIEEAKKKADEI

SEQ ID NO: 174143 - protein, 222 aa, Unknown
  Bacterial polypetide isolated from the Sargasso Sea
MSGLNPSEISSVLKDKISGLDLKAETKNEGTIVNVSDGIIRIHGMGDVMYGELVEFENGVFGLALNLEQDSVGVVVLGDYLGLSEGQKVTCTGKILEVPVGEEMLGRVVDALGNPIDGKGELKTKQTAPIEVVAPGVIARQSVDQPVQIGLKSIDAMVPIGRGQRELIIGDRQTGKTAVAIDAIINQKGTGIKCIYVAIGQKQSTIANVVAKLEEYGAMEHT

SEQ ID NO: 174144 - protein, 218 aa, Unknown
  Bacterial polypetide isolated from the Sargasso Sea
MANEKEIRTKIGSVKNTQKITKAMEMVAASKMRRTQETMKKALPYADKIRAVIGHIYNANPDYKHPFLEKRDVKTAGYIVVSSDRGLCGGLNVNMFRGLIAELKENKNNQVESKLCLVGAKAVQFFRSVDVDVVAAASHLGEEPQVEDLVGSIKTMLDEYIDGKIDQLFIVHNDFVNTMTQKPEIKTLLPIDPEDREEMQEHWDYIYEPDSKELLTIY

SEQ ID NO: 174145 - protein, 182 aa, Unknown
  Bacterial polypetide isolated from the Sargasso Sea
MSNGSIVQIIGAVIDVEFPRDSVPEVYDALIVSDKGLTLEVQQQLGDGVVRAIAMGASEGVSRGLSVENTKAPISVPVGQATLGRIMDVLGNPIDEKGPLAEHDTSAIHRDAPKYDELSASDELLETGIKVIDLVCPFAKGGKVGLFGGAGVGKTVNMMELINNIATEHSGLSVFAGVAKER

SEQ ID NO: 174146 - protein, 167 aa, Unknown
  Bacterial polypetide isolated from the Sargasso Sea
MSTGNIVQVIGAVVDVEFPKEAIPSVYDALTLKDGDLVFEVQQQLGDGIVRTIAMGASEGLKRGLEVENTGAPISVPVGQETLGRVLDVLGNPIDEKGPVGAKSNRPIHAKAPSFEEQSTEADVLETGIKVIDLLCPFAKGGKVGLFGGAGVGKTVTVMELIRNIAA

SEQ ID NO: 174147 - protein, 189 aa, Unknown
  Bacterial polypetide isolated from the Sargasso Sea
LTALPIIETQAGDVSAYIPTNVISITDGQIFLETELFNQGIRPAVNVGLSVSRVGSAAQTKAMKKVAGSIKLELAQYREMAAFAQFGSDLDASTQQLLNRGSKLTELLKQDQYSPMTVAEQVISVFTGVKGYLDDVELPKIKAFEKDIIEKIKSEKPDVLETVQSSGKLDETSETAIKQVIEDYKKGKN

SEQ ID NO: 174148 - protein, 237 aa, Unknown
  Bacterial polypetide isolated from the Sargasso Sea
MPSLDDLKKRIKSVKSTQKITKAMKMVAAAKLRKAQENAEKSRPYSQKMQNIILNLTKSINDPENAPKLLVGTGKDKTYLCVLLTADRGLCGGFNSNICKLAKKNFKKIISEEKNLKIITVGSKGLDQIKREYGNYVIKKFSFKENKNISFKEAEIVGNEIISLFNNDEFDKCILFYNNFKNVITQIPQAQQIIPAKNNASNVKVNKSQSYEFEPDEDEILEDLLPKNVSTQVFRAF

SEQ ID NO: 174149 - protein, 154 aa, Unknown
  Bacterial polypetide isolated from the Sargasso Sea
MEIKAAEISSVIKEQISNFESKADVAEVGTVLSIGDGIARVYGLDQVQAGEMVEFPGGIKGMALNLEMDNVGISIFGDDTGIKEGDTVKRTGEIVDVPVGKALLGRVVDGLGNPIDGKGPIQSSEKRRIELKAPGIIPRQSVSEPMQTGIKALD

SEQ ID NO: 174150 - protein, 260 aa, Unknown
  Bacterial polypetide isolated from the Sargasso Sea
MSKLGKITQLIGAVVDVSFDASLPEIYTALEVNNKGNKLILEVAQHLGESSVRTIAMDSTEGLKRGDTVIDTGAPISVPVGPETLGRIINVIGQPIDEKGEVKTKENWPIHRQAPKFTDQSTETEMLVTGIKVVDLLAPYAKGGKIGLFGGAGVGKTVTIMELINNIAKAHGGFSVFAGVGERTREGNDLYHEMIESGVIKKEGKGSKAALVYGQMNEPPGARARVALTGLTVAEYFRDKEGQDVLFFIDNIFRFTQAGS

SEQ ID NO: 174151 - protein, 279 aa, Unknown
  Bacterial polypetide isolated from the Sargasso Sea
MAINPSEVTKLLKDQIKNFGEKAEVSEIGKVLSVGDGIARVFGLDNVQAGEMVEFEDGSKGMALNLESDNVGVVIFGDDRNIKEGDTIKRTNAIVDVPVGKELLGRVVDGLGNPIDGKGPLSAKNRKRVEVKAPGIIPRQSVNEPMQTGLKSIDSLIPIGRGQRELIIGDRQTGKTAVAIDAIINQKKINESSDEKKKLYCVYVAIGQKRSTVAQITKTLEEAGALEYTTIIAATASDSAPLQFLAPYTGCTIGEYFRDNGMHALIVYDDLSKQAVHID

SEQ ID NO: 174152 - protein, 80 aa, Unknown
  Bacterial polypetide isolated from the Sargasso Sea
GSRGQRELIIGDRQTGKTAIAIDTILNQKDQDMICVYVAVGQKAASVANVVEVLRERGALDYSVIVAATLPSRSSAVLAP

SEQ ID NO: 174153 - protein, 262 aa, Unknown
  Bacterial polypetide isolated from the Sargasso Sea
LDSLIPIGRGQRELIFGDRQTGKTAVAVDTIINQKSINETNDESKKLYCVYVAIGQKRSTVAQIVKTLEDAGAMSYTTVVSATASDSAPLQFLAPYTGCAIGEYFRDNGMHALIIYDDLSKQAVAYRQMSLLLRRPPGREAFPGDVFYLHSRLLERAAKLNDENGGGSLTALPIIETQAGDVSAYIPTNVISITDGQIFLETELFNQGVRPAVNVGLSVSRVGSAAQTKAMKKVAGSIKLELAQYREMAAFAQFGSDLDAST

SEQ ID NO: 174154 - protein, 269 aa, Unknown
  Bacterial polypetide isolated from the Sargasso Sea
KFDGELPEILTALECKNGDNRLVLEVAQHLGETTVRTIAMDATEGLKRGDEVINTNAPIQVPVGPETLGRIINVIGEPIDERGEVKTKESWPIHRAAPEFNDQSTETEILVTGIKVIDLLAPYAKGGKIGLFGGAGVGKTVLIMELINNVAKAHGGFSVFAGVGERTREGNDLYHEMMDSGVIKKDGAGSKAALVYGQMNEPPGARARVALTGLTVAEYFRDQEGQDVLFFVDNIFRFTQAGSEVSALLGRIPSAVGYQPTLATDMGNL

SEQ ID NO: 174155 - protein, 162 aa, Unknown
  Bacterial polypetide isolated from the Sargasso Sea
MPSLKDLRNRITSVKSTQKITKAMKMVAAAKLRKAQENAEKSRLYSEKMNEIITNLKSSITDKSSAPRLLIGNNDNKRFLCVIMTADRGLCGGFNSNICKKSKEYINNLLKENKEVKIITVGSKSFDQMKRNYGNYIIEKLTFKNQKEINVTDAQKISNKII

SEQ ID NO: 174156 - protein, 166 aa, Unknown
  Bacterial polypetide isolated from the Sargasso Sea
MANEKEIRTKIGSVKNTQKITKAMEMVAASKMRRTQETMKKALPYADKIRAVIGHIYKANPDYKHPFLEKRDVKTAGYIVVSSDRGLCGGLNVNMFRGLIAELKENKNNQVESKLCLVGAKAVQFFRSVDVDVVAAASHLGEEPQVEDLVGSIKTMLDEYIDGKID

SEQ ID NO: 174157 - protein, 259 aa, Unknown
  Bacterial polypetide isolated from the Sargasso Sea
HREPPTFEEQETDADILVTGIKVLDLLCPFLKGGKIGLFGGAGVGKTVVIMELIRNIAAEHGGFSVFAGVGERTREGNDLWNEMKESGVLDKTSLVYGQMNEPPGARARVALTGLTVAEYFRDEEGADVLMFIDNIFRFTQAGSEVSALLGRIPAAVGYQPTLSTEMGNLQERITSTKKGSITSVQAIYVPADDLTDPAPATTFSHLDATVVLNRSIAELGIYPAVDPLDSTSRILTADILGEEHYSVANEVQQLLQRY

SEQ ID NO: 174158 - protein, 228 aa, Unknown
  Bacterial polypetide isolated from the Sargasso Sea
VSVTDGITRIHGLNDVQYGEMIEFPGDTFGLALNLEQDSVGAVVLGDYTHISEGAEVKTTNRILEVPVGEGLLGRVVDSLGTPLDGKGAVSSDQTAPIEKVAPGVISRQSVDQPVQTGLKSIDAMVPIGRGQRELIIGDRQTGKTAVAVDTIINQKGTGIKCIYVAVGQKNSSVANVVKKLEEEGALEHTIIVNAAASDSAAMQYIAPYSGCAMGEYFRDKGEDALII

SEQ ID NO: 174159 - protein, 233 aa, Unknown
  Bacterial polypetide isolated from the Sargasso Sea
MPPNAKGRITYVAPPGEYTLEDKVIEVEFAGERKSYTMLQQWPVRAPRPVAEKLPANYPLLTGQRVLDVMFPSVLGGTCAIPGAFGCGKTVISQALSKYSNSDGIIYVGCGERGNEMAEVLAEFPELTMTLPDGSEESIMKRTTLVANTSNMPVAAREASIYTGITLAEYFRDQGYNISMMADSTSRWAEALREISGRLAEMPADSGYPAYLGARLASFYERAGRVRCLGGPN

SEQ ID NO: 174160 - protein, 237 aa, Unknown
  Bacterial polypetide isolated from the Sargasso Sea
AQYGEMIEFPGDTFGLALNLEQDSVGAVVLGDYTHISEGAEVKTTNRILEVPVGEGLLGRVVDSLGTPLDGKGAIETEQTAPIEKVAPGVISRQSVDQPVQTGLKSIDAMVPIGRGQRELIIGDRQTGKTAVAVDTIINQKGTGIKCIYVAVGQKNSSVANVVKKLEEEGALEHTIIVNAAASDSAAMQYIAPYSGCAMGEYFRDKGEDALIIFDDLTKQAWAYRQVSLLLKRPPGK

SEQ ID NO: 174161 - protein, 140 aa, Unknown
  Bacterial polypetide isolated from the Sargasso Sea
AEIGIYPAVDLLDSTSRILDPRIVGEEHYRVAREVQKVLQTYKSLQDIIAILGMDELSEEDKLVVARARKIQRFLSQPFFVAEVFTGSPGKLVDLESTIKGFDAICKGEYDHLPEAAFYMVGTIEEAIQKAEDLAKEAAA

SEQ ID NO: 174162 - protein, 271 aa, Unknown
  Bacterial polypetide isolated from the Sargasso Sea
HRQAPSFNDQSTETEILVTGIKVIDLLAPYAKGGKIGLFGGAGVGKTVIIMELINNIAKAHGGFSVFAGVGERTREGNDLYHEMIESGVIKPDGDGSKAALVYGQMNEPPGARARVALTGLTVAEYFRDQEGQDVLFFVDNIFRFTQAGSEVSALLGRIPSAVGYQPTLATDMGNLQERITTTNKGSITSVQAIYVPADDLTDPAPATSFSHLDATTVLSRQIAELGIYPAVDPLDSTSRILDPRIVGDEHYRVAREVQKILQTYKSLQDI

SEQ ID NO: 174163 - protein, 148 aa, Unknown
  Bacterial polypetide isolated from the Sargasso Sea
ANTVLSRAISELGIYPAVDPLDSSSRLLDPLVVGDEHYQVAREVQSILQRYKSLQDIIAILGMDELSEEDKLIVGRARKIQRFLSQPFDVAKVFTGSDGVQVPLDVTIDSFKRVAAGEFDHLPEAAFYMVGGIEDVIAKAEELASRAA

SEQ ID NO: 174164 - protein, 285 aa, Unknown
  Bacterial polypetide isolated from the Sargasso Sea
GQRELIIGDRQTGKTAVAIDAIINQKKINESGDEKKKLYCIYVAVGQKRSTVRQIEKTLEEAGAMDYTTIVAATASDAAPLQFLAPYTGCTMGEYFRDNGMHALIIYDDLSKQAVAYRQMSLLLRRPPGREAYPGDVFYLHSRLLERAAKLSDEHGGGSLTALPIIETQGGDVSAFIPTNVISITDGQIFLETELFNQGIRPAINVGLSVSRVGSSAQTKAMKKVSGSMKLELAQYREMAAFAQFGSDLDASTQKLLNRGSKLTELLKQNQYSPMTVAEQVISVF

SEQ ID NO: 174165 - protein, 272 aa, Unknown
  Bacterial polypetide isolated from the Sargasso Sea
MSKNGKIVQVIGAVVDVQFDGALPEILTALEVDNSGNKLVLEVAQHLGENSVRTIAMDSTEGLKRGDAVQNTGAPISVPVGPETLGRIINVIGQPIDQKGEVKTKEKWPIHREAPKFTDQSTETEILETGIKVIDLLAPYSKGGKIGLFGGAGVGKTVIIMELINNIAKAHGGFSVFAGVGERTREGNDLYHEMIESGVIKPEGKGSKAALVYGQMNEPPGARARVGLTGLTVAEYFRDKEGQDVLFFVDNIFRFTQAGSEVSALLGRIPSA

SEQ ID NO: 174166 - protein, 292 aa, Unknown
  Bacterial polypetide isolated from the Sargasso Sea
KLLGRIMNVIGEPVDERGEIKTSKTYPIHRPAPEFVNQSTETEVLVTGIKVVDLLAPYARGGKIGLFGGAGVGKTVLIMELINNIAKAHGGYSVFAGVGERTREGNDLYHEMIESGIIDLKGDKSKVALVYGQMNEPPGARARVALSGLTQAEYFRDEEGQDVLFFVDNIFRFTQAGSEVSALLGRIPSAVGYQPTLATDMGALQERITTTKKGSITSVQAIYVPADDLTDPAPATSFAHLDATTVLNRAISEKGIYPAVDPLDSTSRILDPQVVGDDHYRVAREVQRVLST

SEQ ID NO: 174167 - protein, 266 aa, Unknown
  Bacterial polypetide isolated from the Sargasso Sea
LAPYTGCAMGEYFRDNGMHALIIYDDLSKQAVAYRQMSLLLRRPPGREAYPGDVFYLHSRLLERAAKLSDEHGGGSLTALPIIETQGGDVSAFIPTNVISITDGQIFLETELFNQGIRPAINVGLSVSRVGSSAQTKAMKKVSGSMKLELAQYREMAAFAQFGSDLDASTQQLLNRGSKLTELLKQKQYSPMTVAEQVISVFCGVKGYLDDIDLKDVAEFESKIIEKCKSDKPEIIESILSSGKLEEDKEKLLVEVITQLKGNFKS

SEQ ID NO: 174168 - protein, 160 aa, Unknown
  Bacterial polypetide isolated from the Sargasso Sea
LFNSGVRPAINVGLSVSRVGGAAQVKAVKQVAGTLRLDLAQYREKEAFAQFGSDLDQATQKQLQRGQRLVEILKQPQYQPMPWVDQAISIFAATNGFLDDQPVNMLGKFESEFLTYIQTKKADLRKSIEEKEMIDEAADTELKSALNEFAEAFSAENSSN

SEQ ID NO: 174169 - protein, 302 aa, Unknown
  Bacterial polypetide isolated from the Sargasso Sea
KSVDAMIPIGRGQRELVIGDRQTGKTTVCIDTILNQKEFYDAGEPVYCIYVAVGQKASTVAGIAKILEDKGALAYTTIVAANASDPAAMQVYAPFTGASIGEYFRDTGRPALIIYDDLSKQAVAYREISLLLRRPPGREAYPGDVFYLHSRLLERAAKVINDDAIAKEMNDLPESLKAIVKGGGSLTALPIIETQAGDVSAYIPTNVISITDGQIFLESDLFNSGVRPAINVGISVSRVGGSAQIKSMKKVSGTLKLDQAQFRELEAFAKFGSDLDAATLNVIEKGKRNVEILKQAQNDPFK

SEQ ID NO: 174170 - protein, 289 aa, Unknown
  Bacterial polypetide isolated from the Sargasso Sea
CICWSWRKTREGNDLYHEMIESGVIKPEGPGSKAALVYGQMNEPPGARSRVALTGLTVAEYFRDQEGQDVLFFVDNIFRFTQAGSEVSALLGRIPSAVGYQPTLATDMGNLQERITTTNKGSITSVQAIYVPADDLTDPAPATSFAHLDATTVLSRQIAELGIYPAVDPLDSTSRILDPRIVGDEHYRVAREVQKILQTYKSLQDIIAILGMDELSEEDKLIVARARKIQRFLSQPFFVAEVFTGSSGKLVDLESTIKGFDAICKGEYDHLPEAAFYMVGTIEEAVEKA

SEQ ID NO: 174171 - protein, 241 aa, Unknown
  Bacterial polypetide isolated from the Sargasso Sea
MALLPFPLPFAELEVGHHLYWQIGDLYLHGQVFLSSWILIGILLVLVLAGTRNMQRDPLGLQNLLEFLWNFIRDIARDNIGEKYYRDWLPFIGTLFLFIFVSNWGGALIPWKIIELPEGELGAPTADINTTVAMALLVSLAYFYAGLSRKGLRFFELYVEPTPIMLPFKIIEEFTKPLSLSFRLFGNILADELAVGVLVYLVPLLVPLPVMLLGLFTSAIQALIFATLTAFYIGEGLHEAH

SEQ ID NO: 174172 - protein, 254 aa, Unknown
  Bacterial polypetide isolated from the Sargasso Sea
MTINPTEISDIIKAKIKEYDIKSTAHNEGTVVSVSDGIAIIYGITEALQGEMLEFPNKTFGMALNLERDSVGAVILGDYKHISEGDTVKCTGRILEVPVGNELLGRVVNSLGEPIDNNGTIDSKSTSPIEKIAPGVIERKSVDQPVQTGLKSVDAMVPIGRGQRELIIGDRQTGKTAVAIDAIINQKDTGVKCIYVAIGQKASSVAQVVRKLEEHDALKHTIIVAATASDSAAMQYIAPYAGCAMGEYFRDIGE

SEQ ID NO: 174173 - protein, 270 aa, Unknown
  Bacterial polypetide isolated from the Sargasso Sea
MPSLDDLRKRITSVKSTQKITKAMKMVAAAKLRKAQEMAEKGRPYSDKMDVIIQNLSKAISDPSNAPKLLVGTGEDKTHLCVVMTADRGLCGGFNTNICKLAKKHFDEALKSSKNLKIITVGTKGLDQIKRDYGKYIIKKINLKDKKKLTFQDAENIGKQIVELFKNKEFDKCFIFYNKFKNVISQIPQQQQVIPAKVDDKSKKEEEISAYEFEPEEDEILDDLLPKNISTQIFKAFLENSASEQGSRMTAMDNATRNAGDLVDKLTINY

SEQ ID NO: 174174 - protein, 302 aa, Unknown
  Bacterial polypetide isolated from the Sargasso Sea
SSDNWPIHRAAPEFNDQSTETEILVTGIKVIDLLAPYAKGGKIGLFGGAGVGKTVLIMELINNVAKAHGGFSVFAGVGERTREGNDLYHEMIDSGVIKTDGEGSKAALVYGQMNEPPGARARVALTGLTVAEYFRDQEGQDVLFFVDNIFRFTQAGSEVSALLGRIPSAVGYQPTLATDMGNLQERITTTNKGSITSVQAIYVPADDLTDPAPATSFAHLDATTVLSRQIAEIGIYPAVDPLDSTSRILDPRIVGDEHYRVAREVQKVLQTYKSLQDIIAILGMDELSEEDKLVVARARKIQ

SEQ ID NO: 174175 - protein, 194 aa, Unknown
  Bacterial polypetide isolated from the Sargasso Sea
TLGTDVGELQERITSTLEGSITSIQAVYVPADDLTDPAPATTFAHLDATTVLARALAAKGIYPAVDPLDSTSTMLQPSVVGDEHYKTARAVQSTLQRYKELQDIIAILGLDELSEEDRLTVDRARKIEKFLSQPFFVAEIFTGMSGKYVKLEDTIAGFNMILSGELDDLPEQAFYLVGNIDEVKAKAEKIKSEK

SEQ ID NO: 174176 - protein, 94 aa, Unknown
  Bacterial polypetide isolated from the Sargasso Sea
MAISLKVLAPNKNVYQGEAEEVILPSTTGQLGILPGHISLVTAIDIGVLRLRMNSQWKSIALMGGFAEIESDEVIVLVNNAEIGSEINVQNAEQ

SEQ ID NO: 174177 - protein, 216 aa, Unknown
  Bacterial polypetide isolated from the Sargasso Sea
LERASRVSEEYVEKFTNGAVKGKTGSLTALPIIETQAGDVSAFVPTNVISITDGQIFLESAMFNSGIRPAVNAGISVSRVGGAAQTKIIKKLSGGIRTALAQYRELAAFAQFASDLDEATRKQLEHGQRVTELMKQKQYAPMSIAEMSVSLYAAERGFLQDVEVAKIISFEQALIAFFKRDHADLMAKINEKGDFNDEIDAGLKAGIEKFKATQTW

SEQ ID NO: 174178 - protein, 321 aa, Unknown
  Bacterial polypetide isolated from the Sargasso Sea
MAEASIGRVTQIIGAVVDVAFDGDLPPIMNALETDNHGNRLVLEVAQHLGQNEVRTIAMDATEGLVRGQEVKNTGSPIEVPVGVETLGRIMNVIGEPVDEVGPIKTKSKRAIHQEAPPYVDQSTEAEILVTGIKVVDLLAPYAKGGKIGLFGGAGVGKTVLIQELINNIAKAHGGYSVFAGVGERTREGNDLYHEMIESNVNVDPAENNGSAEGSKCALVYGQMNEPPGARARVALSGLTIAENFRDEGQDVLFFVDNIFRFTQAGSEISALLGRIPSAVGYQPTLSTDMGALQERITTTTKGSITSVQAIYVPADDLTDP

SEQ ID NO: 174179 - protein, 160 aa, Unknown
  Bacterial polypetide isolated from the Sargasso Sea
QLPEILTALECDNSGNRLVLEVAQHLGETSVRTIAMDSTEGLKRGDKVTDTGSPIKVPVGPETLGRIINVIGEPIDQKGKVSTKESWPIHRPAPKFTEQCTETEILVTGIKVVDLLAPYSKGGKIGLFGGAGVGKTVIIMELINNIAKAPWRLFCFCWSW

SEQ ID NO: 174180 - protein, 118 aa, Unknown
  Bacterial polypetide isolated from the Sargasso Sea
MRKGKITQIIGAVVDVKFEGELPEILTALECDNGGIRLVLEVAQHLGESSVRTIAMDATEGLKRGDEVTDTGAPIKVPVGPETLGRIINVIGEPIDEKGEVKTKEHWPIHRSAPEFTD

SEQ ID NO: 174181 - protein, 263 aa, Unknown
  Bacterial polypetide isolated from the Sargasso Sea
GNDLYHEMIESGIIDLKGKDSKVALVYGQMNEPPGARARVALSGLTQAEYFRDEEGQDVLFFVDNIFRFTQAGSEVSALLGRIPSAVGYQPTLATDMGALQERITTTKKGSITSVQAIYVPADDLTDPAPATSFSHLDATTVLNRAISEKGIYPAVDPLDSTSRILDPQVVGDDHYRVAREVQRVLQTYKSLQDIIAILGMDELSEEDKLTVARARKIEKFLSQPFFVAEVFTGSPGKYVDLEDTIKSFDGIVKGEYDHMPEA

SEQ ID NO: 174182 - protein, 250 aa, Unknown
  Bacterial polypetide isolated from the Sargasso Sea
TTLEVQQQLGDGVVRTIAMGATEGLKRGLTASRTNAPISVPVGPETLGRIVDVLGNPIDEKGPIGEKSKMPIHRKPPSYTDQSASNEVLETGIKVIDLMCPFAKGGKIGLFGGAGVGKTVNMMELINNIALQHSGLSVFAGVGERTREGNDFYYEMQESGVVNIDNLGESKVAMVYGQMNEPPGNRLRVALTGLTMAESFRDEGKDVLLFIDNIYRYTLAGVEVSALLGRMPSAVGYQPTLAEEMGALSR

SEQ ID NO: 174183 - protein, 300 aa, Unknown
  Bacterial polypetide isolated from the Sargasso Sea
MDINPSEITKILKEQIKNLGEKAEVSEIGKVLSVGDGIARVYGLDNVQAGEMVEFKDGLKGMALNLESDNVGVVIFGDDRSIKEGDTVKRTGAIVDVPVGKELLGRVVDALGNPIDGKESLKKNIKRQRVEVKAPGIIPRKSVSEPMQTGLKAIDSLIPVGRGQRELIIGDRQTGKTAVAIDTIINQKKINESDDEKKKLYCIYVAIGQKRSTVAQIVKTLQDAGAMDYTIIVSATASDPAPLQFLAPYTGCTFGEFFRDNGMHALIIYDDLSKQAVAYRQMSLFIRRLQEENISGRCIL

SEQ ID NO: 174184 - protein, 243 aa, Unknown
  Bacterial polypetide isolated from the Sargasso Sea
MANEDIASIIKQQIKQFGDDLKVEQTGTVTEAGDGVARVQGLSNVKANEIVQFENDVFGLALNLEEDTVGVVILGDYLGIKEGDEVKSTGRIVEVPVAPDMIGRVLNPLGQPVDGKGNINSSETIEVEKIAPGVVERESVNQPVQFGVKVVDGLVPIGRGQRELVIGDRGTGKTAVCIDAIINQKGGDLICIYVSIGQKASKVANIVNQLEVNGAMDHTIVVTANASESAALQYLAPYSGCAM

SEQ ID NO: 174185 - protein, 303 aa, Unknown
  Bacterial polypetide isolated from the Sargasso Sea
YVAIVQKQSSMAQVVRTLEQYGAMENTIVVVAAAADPAPMQYIAPFAACSMGEYFRDRGEDALIIYDDLSKQAVAYRQMSLLLRRPPGREAYPGDVFYLHSRLLERAARVNEEYVENYTNGEVKGKTGSLTALPIIETQAGDVSAFVPTNVISITDGQIFLESSLFSSGLKPAMDPGISVSRVGGAAQVPIIKKLGGGIKTALAQYRELEAFAQFASDLDEASKEQLEHGVRVTELTKQDQFSPMSVAEMGLMLYTANEGYLRQVEVEKIKDFEKSLIAYMSSEHKDLMDKVSETGEYGDDIQ

SEQ ID NO: 174186 - protein, 162 aa, Unknown
  Bacterial polypetide isolated from the Sargasso Sea
IIGDRHYNVARDVQGVLQKYKDLQDIIAILGMDELSDEDKLTVSRARKIQKFFSQPFFVAEQFTGTPGRYVELEDTVSGFEAILNGEADETPENSFAYVGSIDEAIDKGKEESSSKDKNSKKEKSKEEKESPVEEAPAEESPVEEVPAEEASAEESSEEESS

SEQ ID NO: 174187 - protein, 200 aa, Unknown
  Bacterial polypetide isolated from the Sargasso Sea
RMPSAVGYQPTLATEMGALQERITTTKDGSITSVQAIYVPADDYTDPGVVTAFAHLDGRIVLERSLADQGLYPAVDPLASSSRILDPRVVGEDHYLVTQRVQEVLQRYRDLREIIAILGIDELSDEDKLVVARARKIQFFLTQPFHVAEVFTGTPGAYVKVEDTVRGFKGLVDGDYDDVPEQAFYMVGTIEEALEKAKGM

SEQ ID NO: 174188 - protein, 244 aa, Unknown
  Bacterial polypetide isolated from the Sargasso Sea
MVLTVAEYFRDKEGQDVLFFVDNIFRFTQAGSEVSALLGRIPSAVGYQPTLATDMGNLQERITSTDKGSITSVQAIYVPADDLTDPAPATSFSHLDATTVLSRQIAEIGIYPAVDPLDSTSRILDPRVVGDEHYRVARDVQRILQAYKSLQDIIAILGMDELSEDDKLTVARARKIQRFLSQPFFVAEVFTGSPGKLVDLDSTIKGFDAICKGEYDHLPEAAFYMVGGIEEVVEKAEKLTKESK

SEQ ID NO: 174189 - protein, 119 aa, Unknown
  Bacterial polypetide isolated from the Sargasso Sea
MKIRAEEISNIIQQQIENFEKQTTKTEVGTVLEVGDGIARVYGLDNIVAGELVEFPNNLQGMALNLEEDNVGVVLFGDDRNIKEGDEARRTERIAEVPVGDAMLGRVVDPLGQPIDGKG

SEQ ID NO: 174190 - protein, 317 aa, Unknown
  Bacterial polypetide isolated from the Sargasso Sea
FGGAGVGKTVLIMELINNVAKAHGGFSVFAGVGERTREGNDLYHEMIESGVIKKDGDGSKAALVYGQMNEPPGARARVALTGLTVAEYFRDQEGQDVLFFVDNIFRFTQAGSEVSALLGRIPSAVGYQPTLATDMGNLQERITTTNKGSITSVQAIYVPADDLTDPAPATSFAHLDATTVLSRQIAEIGIYPAVDPLDSTSRILDPRIVGDEHYRVARDVQKILQSYKSLQDIIAILGMDELSEEDKLVVARARKIQRFLSQPFFVAEVFTGSPGKLVDLESTIKGFDAICKGEYDHLPEAAFYMVGTIEEAIEKGE

SEQ ID NO: 174191 - protein, 231 aa, Unknown
  Bacterial polypetide isolated from the Sargasso Sea
MEINPSEVTKILKEQIKKYGDKAEVTEVGQVLSVGDGIARIYGLDNVQAGEMVEFSDGSKGMALNLESENVGVVIFGDDKAIKEGDTVKRTGAIVDTPVGKELLGRVVDGLGNPIDGKGVLNKEVKRSRVEVKAPGIIPRKSVSEPMQTGLKSIDSLVPIGRGQRELIIGDRQTGKTAVAIDAIINQKKINESNDEKQKLYCVYVAIGQKRSTVRQIEKTLEEAGAMEYTT

SEQ ID NO: 174192 - protein, 295 aa, Unknown
  Bacterial polypetide isolated from the Sargasso Sea
RQTGKSAIAIDTIINQKGQDVVCVYVAIGQKSASVANIVEVLRERGALDYTVVVSAGASEPAALQYLAPYTGAAIAEHFMYQGKATLVIYDDLTKQAQAYRQMSLLLKRPPGREAYPGDVFYLHSRLLERAAKLSDAMGGGSMTALPIIETQAGDVSAYIPTNVISITDGQIFLSADLFNSGLRPAINVGISVSRVGGAAQTKAIKKIAGTLKLELAQFDELAAFSQFASDLDEATQQQLERGKRLRELLKQPQFSPLNLAEQVAVVYAGVKGLIDEVPVEDVTKFATELREYLK

SEQ ID NO: 174193 - protein, 84 aa, Unknown
  Bacterial polypetide isolated from the Sargasso Sea
MFTQLRLWLPFKILEDFTKPLSLSFRLFGNILADELVVGVLVFLVPLILPIPVMFLGLFTSAIQALIFATLAAYYIGEAVEEHH

SEQ ID NO: 174194 - protein, 325 aa, Unknown
  Bacterial polypetide isolated from the Sargasso Sea
GTWYGRCSTSAPITVPVGPETLGRILNVIGDPVDDGKPVKSKITLPIHRDAPEYVDQSTSADILVTGIKVVDLLAPYAKGGKIGLFGGAGVGKTVLIMELINNVAKAHGGYSVFAGVGERTREGNDLFHEMVESGVIVPDGPGSKAALVYGQMNEPPGARARVALTGLTLAEYFRDQEGQDVLFFVDNIFRFTQAGSEVSALLGRIPSAVGYQPTLATDMGALQERITTTTKGSITSVQAIYVPADDLTDPAPATSFAHLDATTVLSRQIAEIGIYPAVDPLDSTSRMLDPRIVGEEHYESARKVQEVLSTYKSFTDIIAILGDG

SEQ ID NO: 174195 - protein, 67 aa, Unknown
  Bacterial polypetide isolated from the Sargasso Sea
QPGSVTVLADTAIRGQDLDEARALEAKRKAEEHIKSSHGDVDYAQASAELAKAIAKLRVIELTKKAM

SEQ ID NO: 174196 - protein, 139 aa, Unknown
  Bacterial polypetide isolated from the Sargasso Sea
SELGIYPAVDPWDSSSRLMDPAVFGEEHYQVARDVQGILQRYKSLQDIIAILGMDELSEEDKLTVARARKIQRFLSQPFDVAKVFTGSDGVQVPLEDTISSFKAVVAGEYDHLPEGAFYMVGGIDEVIAKAEKMAAEAA

SEQ ID NO: 174197 - protein, 102 aa, Unknown
  Bacterial polypetide isolated from the Sargasso Sea
MSKSGKIIQVIGAVVDVQFEGDLPEILTALEVDNSGNKLILEVAQHLGENSVRTIAMDSTEGLKRGDPVQNTGAPISVPVGPETLGRIINVIGQPIDQKGEV

SEQ ID NO: 174198 - protein, 253 aa, Unknown
  Bacterial polypetide isolated from the Sargasso Sea
MSDSLGRVVKIAGPVVDVAFAQDSLPEITNALEVDVEIDGSKSTIVLEVAQHLGEGRVRAISMQGTDGLRRGAEVSDTGAPISVPVGQETLGHIFNVWGETLDVETSSIGVKQKWPIHRQPPPYEEVTAQNEMFETGIKVIDLLMPYVQGGKIGLFGGAGVGKTVLIQEMINRVATQHGGVSVFAGVGERTREGNDLFREMQESGVIDKTALVFGQMDEPPGVRLRVALSALTMAEYFRDEEKQDVLLFIDNI

SEQ ID NO: 174199 - protein, 120 aa, Unknown
  Bacterial polypetide isolated from the Sargasso Sea
PRVVGDEHYKVARDVQKILQSYKSLQDIIAILGMDELSEEDKLVVARARKIQRFLSQPFFVAEVFTGSPGKLVDLESTIKGFDAICKGEYDHLPEAAFYMVGTIEEAIEKAKKMEKEAAA

SEQ ID NO: 174200 - protein, 307 aa, Unknown
  Bacterial polypetide isolated from the Sargasso Sea
EVSEVGQVLSVGDGIARIYGLDNVQAGEMVEFSDGSKGMALNLENDNVGVVIFGDDKAVKEGDTVKRTGAIVDTPVGKELLGRVVDGLGNPIDGKGALDKGIKRSRVEVKAPGIIPRKSVSEPMQTGLKSIDSLVPIGRGQRELIIGDRQTGKTAVAIDAIINQKKINESDDEKQKLYCVYVAIGQKRSTVRQIEKTLEEAGAMDYTTIVAATASDAAPLQFLAPYTGCAMGEYFRDNGMHALIIYDDLSKQAVAYRQMSLLLRRPPGREAYPGDVFYLHSRLLERAAKLSDEHGGGSLTALPIIET

SEQ ID NO: 174201 - protein, 209 aa, Unknown
  Bacterial polypetide isolated from the Sargasso Sea
MQINPSEVTKLLKEQIKNFGEKAEISEIGKVLSVGDGIARVYGLDNVQAGEMVEFDDGSKGMALNLENDNVGVVIFGDDRQIKEGDTVKRTNSIVDVPIGKELLGRVVDGLGNPIDGKGNLSTKVQRKRVEVKAPGIIPRQSVNEPMQTGLKAIDSLIPIGRGQRELIIGDRQTGKTAVAIDTIINQKGINDSDDEKKKLYCVYVAMDK

SEQ ID NO: 174202 - protein, 173 aa, Unknown
  Bacterial polypetide isolated from the Sargasso Sea
ITSIQAVYVPADDLTDPSPATTFAHLDATVVLSRRIAELGIYPAVDPLDSTSRQLDPMVVGQEHYEVAQRVQGVLQRYKELKDIIAILGMDELSDEDKNTVSRARKVEKFLSQPFFVAEVFTGSPGKYVSVKDTIQGFKEILDGVHDDVPEQAFYMVGSIDEVLEKAKTVKND

SEQ ID NO: 174203 - protein, 293 aa, Unknown
  Bacterial polypetide isolated from the Sargasso Sea
VGTVLSVGDGIARVYGLDQVQAGEMVEFPGGIKGMALNLEMDNVGVSIFGDDTGIKEGDTVKRTGEIVDVPVGKELLGRVVDGLGNPIDGKGPIQSSEKRRIELKAPGIIPRQSVSEPMQTGIKALDALVPVGRGQRELIIGDRQTGKTAVAIDTILNQKSVNQSDNEKDKLYCIYVAIGQKRSTVAQIVKTLEDNGAMEYTIVVSATASEPAPLQFLSAYTGCTMGEYFRDNGMHALIVYDDLSKQAVAYRQMSLLLRRPPGREAYPGDVFYIHSRLLERAAKMSDEHGGEV

SEQ ID NO: 174204 - protein, 227 aa, Unknown
  Bacterial polypetide isolated from the Sargasso Sea
MDIKAAEISSILKDQIDNFGVEAEVTEIGKVLSVGDGIARVYGLDEIKAGEMVEFDGGIAGMALNLEKDNVGVVIFGSDKDIKEGDTVKRTGAIVDVPTGKGLLGRVVDALGNPIDGKGPLKNVTKTRVETKAPGIMPRQSVNEPMQTGLKAIDSLIPIGRGQRELIIGDRQTGKTAIAIDTFLNQKAVNDAAGKEDSKKLFCIYVAVGQKRSTVAQIVKTWRKMVL

SEQ ID NO: 174205 - protein, 157 aa, Unknown
  Bacterial polypetide isolated from the Sargasso Sea
APATTFAHLDATTVLARALAAKGIYPAVDPLDSTSTMLQPSVVGDEHYKTARAVQSTLQRYKELQDIIAILGLDELSEEDRLTVDRARKIEKFLSQPFFVAEIFTGMSGKYVKLEDTIAGFNMILSGELDDLPEQAFYLVGNIDEVKAKAEKIKSEK

SEQ ID NO: 174206 - protein, 170 aa, Unknown
  Bacterial polypetide isolated from the Sargasso Sea
IPTNVISITDGQIFLETELFNQGIRPAVNVGLSVSRVGSAAQTKAMKKVAGSIKLELAQYREMAAFAQFGSDLDASTQQLLNRGAKLTELLKQDQYSPMTVAEQVISVFAGVKGYLDDVDLGKIKGFEKDIIEKIRNDKPEIIEAIQSSGKLDEDTENQLKQVIEKYKKK

SEQ ID NO: 174207 - protein, 107 aa, Unknown
  Bacterial polypetide isolated from the Sargasso Sea
MPSLDDLKKRIKSVKSTQKITKAMKMVAAAKLRKAQESAEKGRPYSQKMQNIILNLTKSINDPQNAPKLLVGTGEDKKYLCVVLTADRGLCGGFNSNICKLAKTNLK

SEQ ID NO: 174208 - protein, 228 aa, Unknown
  Bacterial polypetide isolated from the Sargasso Sea
MRKGKITQIIGAVVDVSFEGELPEILTALECKNAGNRLVLEVAQHLGESSVRTIAMDSTEGLKRGDEVTDTGAPIKVPVGPETLGRIINVIGEPIDEKGDVKSKENWPIHRAAPEFNDQSTETEILVTGIKVIDLLAPYAKGGKIGLFGGAGVGKTVLIMELINNVAKAHGGFSVFAGVGERTREGNDLYHEMIDSGVIKPEGKGSKAALVYGQMNEPPGARARVALT

SEQ ID NO: 174209 - protein, 209 aa, Unknown
  Bacterial polypetide isolated from the Sargasso Sea
SLEDAGAMEYTTIVSATASDPAPLQFLAPYTGCTMGEYFRDNGMHALIIYDDLSKQAVAYRQMSLLLRRPPGREAYPGDVFYLHSRLLERAAKLNDDNGGGSLTALPIIETQAGDVSAYIPTNVISITDGQIFLETELFNQGIRPAVNVGLSVSRVGSAAQTKAMKKVAGSIKLELAQYREMAAFAQFGSDLDAATQKLLNRGSKLTEL

SEQ ID NO: 174210 - protein, 131 aa, Unknown
  Bacterial polypetide isolated from the Sargasso Sea
VKAMKQVAGKLKLELAQFAELEAFSQFASDLDKATQNQLARGQRLRELLKQPQNSPLSVAEQVAIVYAGLNGYIDEIPVGSVKTFSANLISYLKTSKPEYGNAIASSAKLEESTENILKSAIETVREGVLA

SEQ ID NO: 174211 - protein, 229 aa, Unknown
  Bacterial polypetide isolated from the Sargasso Sea
VLFFVDNIFRFTQAGSEVSALLGRIPSAVGYQPTLATDMGNLQERITTTNKGSITSVQAIYVPADDLTDPAPATSFAHLDATTVLSRQIAEIGIYPAVDPLDSTSRILDPRIVGDEHYRVARDVQRILQSYKSLQDIIAILGMDELSEEDKLVVARARKIQRFLSQPFFVAEVFTGSPGKLVDLDSTIKGFDAICKGEYDHLPEAAFYMVGTMEEAIEKAKKMEKEAAA

SEQ ID NO: 174212 - protein, 226 aa, Unknown
  Bacterial polypetide isolated from the Sargasso Sea
TKILKEQIKKFGDKAEVTEVGQVLSVGDGIARIYGLDNVQAGEMVEFSDGSKGMALNLESDNVGVVIFGDDRAVKEGDIVKRTGAIVDTPVGKELLGRVVDGLGNPIDGKGALDKGIKRSRVEVKAPGIIPRKSVSEPMQSGLKSVDSLVPIGRGQRELIIGDRQTGKTAVAIDTIINQKKINESNDEKQKLYCIYVAIGQKRSTVRQIEKSLEEAGAMEYTTIVA

SEQ ID NO: 174213 - protein, 237 aa, Unknown
  Bacterial polypetide isolated from the Sargasso Sea
MSKGIITQVIGAVVDVKFDGELPEILTALECKNSGNRLVLEVAQHLGESTARTIAMDATEGLKRGDEVINTNAPIKVPVGPETLGRIINVVGEPIDERGEVKTKENWPIHRPAPEFNDQSTETEILVTGIKVIDLLAPYAKGGKIGLFGGAGVGKTVLIMELINNVAKAHGGFSVFAGVGERTREGNDLYHEMMESGVIKPQGPGSKAALVYGQMNEPPGARARVALTGLTVAEYFR

SEQ ID NO: 174214 - protein, 307 aa, Unknown
  Bacterial polypetide isolated from the Sargasso Sea
LEVPVGEELLGRVVNTLGTPIDGKGEIKAEKSLPVEVVAPGVIARQSVDQPVQIGLKAVDAMVPIGRGQRELIIGDRQTGKTAVAVDAIINQKGTGIKCIYVAIGQKQSTVANVVRKLEEYGAMEHTIVVSATAADPAPMQYLSAYAGCTMGEYFRDKGEDALIVYDDLSKQAVAYRQVSLLLKRPPGREAYPGDVFYLHSRLLERAARVNAEYVEQVTGGKVKGKTGSLTALPIIETLAGDVSAFVPTNVISITDGQIYLETELFNSGVRPAINPGLSVSRVGGSAQTKIMKKLAGGVRTALAPVS

SEQ ID NO: 174215 - protein, 103 aa, Unknown
  Bacterial polypetide isolated from the Sargasso Sea
MVATPSTSSQTKGIVRQVIGPVLDVEFPAGKLPKILNALRIEAKNPAGQEIALTAEVQQLLGDHRVRAVAMSGTDGLVRGMEAIDTGAPISVPVGEATLGRIF

SEQ ID NO: 174216 - protein, 160 aa, Unknown
  Bacterial polypetide isolated from the Sargasso Sea
FLETELFNQGIRPAINVGLSVSRVGSSAQTKAMKKVSGSMKLELAQYREMAAFAQFGSDLDASTQQLLNRGSKLTELLKQKQYSPMTVAEQVISVFCGVKGYLDDIDLKNVAEFESKIIEKCKSDKPEIIESILNSGKLEEDKEKLLVEVITQLKGNFKS

SEQ ID NO: 174217 - protein, 282 aa, Unknown
  Bacterial polypetide isolated from the Sargasso Sea
VVSAGASEPAALQYLAPYTGAAIAEHFMYQGKATLVIYDDLTKQAQAYRQMSLLLKRPPGREAYPGDVFYLHSRLLERAAKLSDAMGGGSMTALPIIETQAGDVSAYIPTNVISITDGQIFLSADLFNSGLRPAINVGISVSRVGGAAQTKAIKKIAGTLKLELAQFDELAAFSQFASDLDEATQQQLERGKRLRELLKQPQFSPLNLAEQVAVVYAGVKGLIDEVPVEDVTKFATELREYLKLNKSEFIEEILKEKKLNDGLEATLKEVINEVKSSMLATV

SEQ ID NO: 174218 - protein, 294 aa, Unknown
  Bacterial polypetide isolated from the Sargasso Sea
GLDNVQAGEMVEFEDGSKGMALNLESDNVGVVIFGDDRKIKEGDTIKRTNAIVDVPVGKELLGRVVDGLGNPIDGKGPLSAKNRKRVEVKAPGIIPRQSVSEPMQTGLKSIDSLIPIGRGQRELIIGDRQTGKTAVAIDAIINQKKINESSDEKKKLYCVYVAIGQKRSTVAQITKTLEEAGALKYTTIVAATASDSAPLQFLAPYTGCTIGEYFRDNSMHALIVYDDLSKQAVAYRQMSLLLRRPPGREAYPGDVFYLHSRLLERASKLNDKSGGGSLTALPIIETQAGDVSA

SEQ ID NO: 174219 - protein, 192 aa, Unknown
  Bacterial polypetide isolated from the Sargasso Sea
MTALPIIETQAGDVSAYIPTNVISITDGQIFLSADLFNSGLRPAINVGISVSRVGGAAQTKAIKKIAGTLKLELAQFDELAAFSQFASDLDEATQQQLERGKRLRELLKQPQFSPLNLAEQVAVVYAGVKGLIDEVPVEDVTKFATELREYLKLNKAEFIEEILKEKKLNDELEATLKEVINEVKSSMLATV

SEQ ID NO: 174220 - protein, 193 aa, Unknown
  Bacterial polypetide isolated from the Sargasso Sea
MPAGHTGGVFSVSGPVVIAENMLGAAMYELVRVGHNSLVGEIIRLEEHRATIQVYEETSGLQVGDPVLCTGQPLSLQLGPGIMGRIYDGIQRPLEKIAEVCASIYIPRGISVAALDNDIGWSFTPTALKVGSPVSGGDIIGIVPENSMITHKVMLKPGTMGTLTFLASKGSYTIDDTVAKTKFEGVETEHKMQ

SEQ ID NO: 174221 - protein, 271 aa, Unknown
  Bacterial polypetide isolated from the Sargasso Sea
MGVIKKDGKGSKAALVYGQMNEPPGARSRVALTGLTVAEYFRDKEGQDVLFFVDNIFRFTQAGSEVSALLGRIPSAVGYQPTLATDMGNLQERITTTSKGSITSVQAIYVPADDLTDPAPATSFSHLDATTVLSRQIAELGIYPAVDPLDSTSRILDPRIVGEEHYRVAREVQRILQAYKSLQDIIAILGMDELSEEDKLTVARARKIQRFLSQPFFVAEVFTGSPGKLVDLDSTIKGFDAICKGEHDNLPEAAFYMVGTIEEAIEKAEKM

SEQ ID NO: 174222 - protein, 66 aa, Unknown
  Bacterial polypetide isolated from the Sargasso Sea
FLSQPFFVAEVFTGSPGKLVDLESTIKGFDAICKGDYDHLPEAAFYMVGGIDEVVDKAEKLSKDNK

SEQ ID NO: 174223 - protein, 211 aa, Unknown
  Bacterial polypetide isolated from the Sargasso Sea
MEINPSEVTKILKEQIKKFGDKAEVTEVGQVLSVGDGIARIYGLDNVQAGEMVEFSDGSKGMALNLESDNVGVVIFGDDRAVKEGDTVKRTGAIVDTPVGKELLGRVVDGLGNPIDGKGALDKGVKRSRVEVKAPGIIPRKSVSEPMQSGLKSVDSLVPIGRGQRELIIGDRQTGKTAVAIDTIINQKKINESNDEKQKLYCIYVAIGQKR

SEQ ID NO: 174224 - protein, 248 aa, Unknown
  Bacterial polypetide isolated from the Sargasso Sea
ALIVYDDLSKQAVAYRQMSLLLRRPPGREAYPGDVFYIHSRLLERAAKMSDEHGGGSLTALPIIETQAGDLSAYIPTNVISITDGQIFLETNLFFAGIRPAINVGLSVSRVGSAAQTKAMKKIAGPVKLELAQYREMAAFAQFASDLDASTKQLLDRGARLVEILKQGQYSPLTVSEQVVSIYAGVRGYLDKVAVNDVVSFETEVLNEIRSNHADLLDAIANEKELSKDNDDKLKSILDSLVGKFTSN

SEQ ID NO: 174225 - protein, 287 aa, Unknown
  Bacterial polypetide isolated from the Sargasso Sea
EGNDLYHEMVESGVIKTDGPGSKAALVYGQMNEPPGARARVALTGLTLAEYFRDEEGQDVLFFVDNIFRFTQAGSEVSALLGRIPSAVGYQPTLATDMGALQERITTTNKGSITSVQAIYVPADDLTDPAPATSFAHLDATTVLSRQIAELGIYPAVDPLDSSSRMLDPRIVGEHHYNVARQVQEVLQQYKSLQDIIAILGMDELSEEDKLVVARARKIQRFLSQPFHVAEVFTGSPGKLVGLEDTIAGFEGILKGDYDHLPEAAFYLVGTIEEAVDKGKKLAKDAA

SEQ ID NO: 174226 - protein, 222 aa, Unknown
  Bacterial polypetide isolated from the Sargasso Sea
MASLDDLKKRIASVKSTQKITKAMKMVAAAKLRRAQESAEKGRPYSEKMNNVILNLSNGISDKENAPKLLSGTGQEKTHLCVVMTSDRGLCGGFNSNIIKKAKSYFSKILDEGKELKIITVGSKGNDQLKRVYGDKIIENISFKESKNANYFDADKVGKMVIEKFEAGEFDVCTIFYNQFKNVITQIPQAQQIIPLNNEGEENSSEESYEFEPDEDEIFSNL

SEQ ID NO: 174227 - protein, 233 aa, Unknown
  Bacterial polypetide isolated from the Sargasso Sea
YRQISLLLRRPPGREAYPGDVFYLHSRLLERCAKVSEELGGGSLTGLPIIETKAGDVSAFIPTNVISITDGQIYLESELFYSGVRPAVNPGTSVSRVGGAAQTKAMKKVSGPLRINLAQFRELEAFAEFGSDLDAASQAQLDRGRRVVELLKQPQYQPVPMEEQVVSLYAVTEGFLDVVDPADIPQAEQDLIEFVKTRHSDVINSIKTTGELPEEELKAAVEAFVSTLEKKEE

SEQ ID NO: 174228 - protein, 188 aa, Unknown
  Bacterial polypetide isolated from the Sargasso Sea
YLQERITTTNKGSITSVQAIYVPADDLTDPAPATSFAHLDATTVLSRQIAEIGIYPAVDPLDSTSRILDPRIVGDEHYRVAREVQKVLQTYKSLQDIIAILGMDELSEEDKLTVARARKIQRFLSQPFFVAEVFTGSPGKLVDLESTIKGFDAICKGEYDHLPEAAFYMVGTIEEAIEKAEKMKKDAA

SEQ ID NO: 174229 - protein, 219 aa, Unknown
  Bacterial polypetide isolated from the Sargasso Sea
MFFNSLLTNFAALEVGQHLYWQIGNIRLHGQVFLTSWILLGALLFFISLGTKKMENDPKGLQNLLEFLWDYIRDLARTQIGEKVYRDWMPFIGTLFLFVFVSNWGGALIPWRLIKLPSGELGAPTADINTTIALALLVSLSYFYAGLSNKGWRYFEYYVHPTPIMLPFKILEDFTKPLSLSFRLFGNILADELVVGVLVFLVPLILPIPVMFLGLFTSA

SEQ ID NO: 174230 - protein, 211 aa, Unknown
  Bacterial polypetide isolated from the Sargasso Sea
FFLHSRLLERAAKLNEKSGGGSLTALPIIETQAGDVSAYIPTNVISITDGQIFLETELFNQGIRPAVNVGLSVSRVGSAAQTKAMKKVAGSIKLELAQYREMAAFAQFGSDLDASTQQLLNRGAKLTELLKQDQYSPMTVAEQVISVFTGVRGYLDDLDLNKIKTFEKNIIEKIKSEKPEIIESIEQSGKIEENTEKTLNQIIEAYKKGNK

SEQ ID NO: 174231 - protein, 159 aa, Unknown
  Bacterial polypetide isolated from the Sargasso Sea
MASLDDLKKRISSVKSTQKITKAMKMVAASKLRRAQESAEKGRPFSDKMNNIILNLSNSITDKENSPKLLVGSGDGKVHLCVVMTADRGLCGGFNTNIIKKAKLYFQKIIDEGKTLKIITVGSKGYDQLKRTYKDNIIEKISFKESKNANYFDADKVGK

SEQ ID NO: 174232 - protein, 282 aa, Unknown
  Bacterial polypetide isolated from the Sargasso Sea
VDLLAPYARGGKIGLFGGAGVGKTVLIMELINNIAKAHGGYSVFAGVGERTREGNDLYHEMIESGIIDLKGDKSKVALVYGQMNEPPGARARVALSGLTQAEYFRDEEGQDVLFFVDNIFRFTQAGSEVSALLGRIPSAVGYQPTLATDMGALQERITTTNKGSITSVQAIYVPADDLTDPAPATSFSHLDATTVLNRAISEKGIYPAVDPLDSNSRILDPQVVGDDHYRVAREVQRVLQTYKSLQDIIAILGMDELSEEDKLTVARARKIEKFLSQPFLSQ

SEQ ID NO: 174233 - protein, 212 aa, Unknown
  Bacterial polypetide isolated from the Sargasso Sea
VGQKRSTVRQIQKTLEEAGAMEYTTIVAATASDSAPLQFLAPYTGCAMGEYFRDNGMHALIIYDDLSKQAVAYRQMSLILRRPPGREAYPGDVFYLHSRLLERAAKLSDEHGGGSLTALPIIETQGGDVSAYIPTNVISITDGQIFLETELFNQGIRPAINVGLSVSRVGSAAQTKAMKKVSGSMKLELAQYREMAAFAQFGSDLDASTQQL

SEQ ID NO: 174234 - protein, 267 aa, Unknown
  Bacterial polypetide isolated from the Sargasso Sea
SGVINPEKLEESKVALVYGQMNEPPGARARVGLTGLTLAEQFRDQSGTDVLFFVDNIFRFTQAGSEVSALLGRIPSAVGYQPTLATDMGALQERITSTKSGSITSVQAIYVPADDLTDPAPATSFSHLDATTVLSRAISEIGIYPAVDPLDSTSRILDPQIVGEDHYNVARDVQGILQRYKSLQDIIAILGMDELSEDDKLTVARARKIQRFLSQPFDVAKVFTGSDGKQVPLDVTIDSFKRVVAGEFDHLPESAFYMVGGIDEVIE

SEQ ID NO: 174235 - protein, 308 aa, Unknown
  Bacterial polypetide isolated from the Sargasso Sea
FDVLGNTIDQKGDCETEKRNPIHRPAPKHEDLATSTEVLVTGIKVVDLMEPYTRGGKTGLFGGAGVGKTVLIQELIRNIATEHGGYSVFAGVGERTREGNDLYNEMTESGVIDKTTMVFGQMNEPPGARLRVALSGLAMAEFFRDDEGRDVLLFIDNIFRFTQAGSEVSALLGRMPSAVGYQPTLSTEMGDLQERITSTKKGSITSVQAVYVPADDLTDPAPATAFAHLDATSVLERKIAELGIYPAVDPLASTSRILDPRVIGDHHYNVARNVQSVLQQYKDLQDIIAILGMDELSDDDKLTVSRAR

SEQ ID NO: 174236 - protein, 239 aa, Unknown
  Bacterial polypetide isolated from the Sargasso Sea
MSLKGKISQVMGAVVDVVFEEGNLPEIYNALSVDRGDEGKLVLEVAQHLGDSSVRTVAMDSTDGLVRGTEVIDSGSPISVPVGPDTLGRLFDVLGNTIDNKKEVKTKKVNPIHRSAPKHEELATSTEMLVTGIKVVDLMEPYTKGGKTGLFGGAGVGKTVLIQELIRNIAAEHGGYSVFAGVGERTREGNDLYNEMTESGVIDKTTMVFGQMNEPPGARLRVALSGLAMAEYFRDDEGR

SEQ ID NO: 174237 - protein, 317 aa, Unknown
  Bacterial polypetide isolated from the Sargasso Sea
ETEILVTGIKVVDLLAPYAKGGKIGLFGGAGVGKTVLIMELINNVAKAHGGFSVFAGVGERTREGNDLYHEMIESGVIKPDGEGSKAALVYGQMNEPPGARARVALSGLTVAEYFRDQEGQDVLFFVDNIFRFTQAGSEVSALLGRIPSAVGYQPTLATDMGNLQERITTTNKGSITSVQAIYVPADDLTDPAPATSFSHLDATTVLSRQIAEIGIYPAVDPLDSTSRILDPRIVGDEHYRVAREVQKILQTYKSLQDIIAILGMDELSEEDKLTVARARKIQRFLSQPFFVAEVFTGSPGKLVDLESTIKGFDAIC

SEQ ID NO: 174238 - protein, 262 aa, Unknown
  Bacterial polypetide isolated from the Sargasso Sea
MVSIRPDEISSILKQQITDYDQSVSVSNVGTVLQIGDGIARIYGLDQVMAGELLEFEDGTEGIALNLEDDNVGAVLMGEALGVQEGSKVKSTGKIASVPVGEAMQGRVVNPLGQPIDGKGEIPTSDTRLIEEMAPGIIKRRSVHEPMQTGITSIDAMIPVGRGQRELIIGDRQTGKSAIAIDTIINQKGQDVVCVYVAIGQKSASVANIVEVLRERGALDYTVVVSAGASEPAALQYLAPYTGAAIAEHFMYQGKATLVIYD

SEQ ID NO: 174239 - protein, 183 aa, Unknown
  Bacterial polypetide isolated from the Sargasso Sea
ETKAGDVSAFIPTNVISITDGQIYLESELFYSGVRPAVNPGTSVSRVGGAAQTKAMKKVSGPLRINLAQFRELEAFAEFGSDLDAASQAQLDRGRRVVELLKQPQYQPVPMEEQVVSLYAVTEGFLDVVDPSDIPQAEQDLIDFVKTRHSDVINSIKTTGELPEEELKAAVEAFVSTLEKKEE

SEQ ID NO: 174240 - protein, 313 aa, Unknown
  Bacterial polypetide isolated from the Sargasso Sea
GLFGGAGVGKTVTLMELINNIAKEHGGYSVFAGVGERTREGNDFYHEMKDSKVLDKVSLVYGQMNEPPGNRLRVALTGLTIAEGFRDEGRDVLMFIDNIYRYTLAGTEVSALLGRMPSAVGYQPTLAEEMGVLQERITSTSTGSITSFQAVYVPADDLTDPSPATTFAHLDATLVLSRQIAELGIYPAVDPLDSTSRLLDPNVVGEEHYQTARSVQAVLQRYKELQDIIAILGMDELSENDKLVVQRARKIQRFLSQPFAVAETFTGTPGKYVPLKETISSFKAIVAGDYDHLPEQAFYMVGSIEEAEEQGRA

SEQ ID NO: 174241 - protein, 201 aa, Unknown
  Bacterial polypetide isolated from the Sargasso Sea
MEELNPSEISQVIKQKIDALDTVSTPSNEGTIVFLADGIARIYGLGEVMNGELIEFEHGVMGMALNLEVDSVGAVILGDYKLLAEGGSAKCTGRILEVPVGDALMGRVVDALGNPIDGKGEVQTNQTAPVEKVAPGVISRKSVDQPVQLGIKAVDSMVPIGRGQRELIIGDRQTGKTAIAIDAIINQKDTGVKCIYVAIGQ

SEQ ID NO: 174242 - protein, 220 aa, Unknown
  Bacterial polypetide isolated from the Sargasso Sea
KDKVNLCVVLTADRGLCGGFNSNICKLAKTKFEKILSEGKELKIITVGTKGLDQIKREYGKYVIKKFSFKNKKQITFSEAETIGNEIINLFKQNQFDKCILFYNNFKNVITQIPQAQQIIPAENNPSKDKEKEESLTSYEFEPEEDEILEDLLPKNISTQVFKAFLENAASEQGSRMTAMDNATRNAGELVDKLTINYNRSRQASITKELIEIISGAESL

SEQ ID NO: 174243 - protein, 316 aa, Unknown
  Bacterial polypetide isolated from the Sargasso Sea
VGQVLSVGDGIARIYGLDNVQAGEMVEFADGSKGMALNLESENVGVVIFGDDRAVKEGDTVKRTGAIVDTPVGKELLGRVVDGLGNPIDGKGELNKEVKRSRVEVKAPGIIPRKSVSEPMQTGLKSVDSLVPIGRGQRELIIGDRQTGKTAVAIDTIINQKKINESNDEKLKLYCVYVAIGQKRSTVRQIEKTLEEAGAMEYTTIVAATASDAAPLQFLAPYTGCTMGEYFRDNGMHALIIYDDLSKQAVAYRQMSLLLRRPPGREAYPGDVFYLHSRLLERAAKLSDEHGGGSFTALPIIENQGGDVSAFIPLML

SEQ ID NO: 174244 - protein, 234 aa, Unknown
  Bacterial polypetide isolated from the Sargasso Sea
FGGAGVGKTVLIQELINNIAKGHGGVSVFAGVGERTREGNDLYHEFLDAGVIAKNDDGEAISEGSKVALVFGQMNEPPGARARVALSGLTMAEYFRDVEGQDVLFFVDNIFRFTQAGSEVSALLGRIPSAVGYQPTLATDMGNLQERITSTTKGSITSVQAIYVPADDLTDPAPATSFAHLDATTTLNRAISELGIYPAVDPLDSTSRVLEPRVVGDEHYQTARRVQETLQKYK

SEQ ID NO: 174245 - protein, 157 aa, Unknown
  Bacterial polypetide isolated from the Sargasso Sea
MRKGQITQIIGAVVDVKFDGELPEILTALECDNGGNRLVLEVAQHLGESSVRTIAMDATEGLKRGDEVTDTAAPIKVPVGPETLGRIINVIGEPIDEKGDVKSSDNWPIHRAAPEFNDQSTETEILVTGIKVIDLLAPYAKGGKIGLFGGAGVEKQF

SEQ ID NO: 174246 - protein, 220 aa, Unknown
  Bacterial polypetide isolated from the Sargasso Sea
MASLDDLKKRIASVKSTQKITKAMKMVAAAKLRRAQESAERGRPYSEKMNNIILNLSNGISDKENAPKLLSGTGENKVHLCVVMTSDRGLCGGFNSNIIKKAKSYFSKILNEGKQLKIITVGSKGNDQLKRVYGDKIIENISFKESKNANYFDADKVGRIIIEKFEAGEFDICTIFYNQFKNVITQLPQAQQIIPLNNEEDHNNSDESYEFEPDEDEILS

SEQ ID NO: 174247 - protein, 297 aa, Unknown
  Bacterial polypetide isolated from the Sargasso Sea
SQVIKQKIDALDTASTPSNEGTIVFLADGIARIHGLGEVMNGELIEFEHGVMGMALNLEVDSVGAVILGDYKLLAEGGSAKCTGRILEVPVGDALMGRVVDALGSPIDGKGEVPTNQTAPVEKVAPGVISRKSVDQPVQLGIKAVDSMVPIGRGQRELIIGDRQTGKTAIAIDAIINQKDTGVKCIYVAIGQKQSSIAQVVRTLEQYGAMDNTIVVVAAAADPAPMQYIAPFAACSMGEYFRDRGEDALIIYDDLSKQAVAYRQMSLLLRRPPGREAYPGDVFYLHSRLLERAARVK

SEQ ID NO: 174248 - protein, 225 aa, Unknown
  Bacterial polypetide isolated from the Sargasso Sea
KDENILIVPVSADRGLCGGFNSSINRETFKLVKKFESENKKVQLLPIGKKSRDFFNRLMKDKILESFVDTNVSSSGYDAALNISNKLQELFFDGKFDKCILVFNKFKSAITQEVTQQQLIPLDVSSSSEEKDKVAENTETNAIYIYEPDEETILQDLLPKNISIQIFKVLLESDAGEQGARMAAMDNATRNAGEMIDSLTLKYNRTRQAFITKELIEIISGAESV

SEQ ID NO: 174249 - protein, 181 aa, Unknown
  Bacterial polypetide isolated from the Sargasso Sea
MTGKISQIMGAVVDVAFEDGHLPNIMNSLSVDRGDEGTLVLEVAQHLGDNMVRTVAMDSTDGLTRGIDVVDSGSPISVPVGQETLGRLFDVLGNVIDGKGDLKTEKKNPIHRPAPKHEELATSTEILVTGIKVVDLMEPYTKGGKTGLFGGAGVGKTVLIQELIRNIATEHGGYSVFAGVG

SEQ ID NO: 174250 - protein, 123 aa, Unknown
  Bacterial polypetide isolated from the Sargasso Sea
FNSRQLEPAIVGQEHYDVANAVKQQLNRYKELKDIIAILGMDELSEEDKLVVARARKIERFLSQPFFVAEVFTNAPGKYVPLSETIRGFKGIVNGEYDDIPEQAFYMTGNIDEVIEKAKTEAA

SEQ ID NO: 174251 - protein, 175 aa, Unknown
  Bacterial polypetide isolated from the Sargasso Sea
MDINPSEITKILKEQIKNLGEKTEVSEIGKVLSVGDGIARVYGLDNVQAGEMVEFKDGSKGMALNLESDNVGIVIFGDDKTIKEGDTVKRTGAIVDVPVGKELLGRVVDALGNPIDGKESLKKGIQRKRVEVKAPGIIPRKSVSEPMQTGLKAIDSLIPIGRGQRELIMEIDKQE

SEQ ID NO: 174252 - protein, 101 aa, Unknown
  Bacterial polypetide isolated from the Sargasso Sea
KQQLNRYKELKDIIAILGMDELSEDDKLVVARARKIERFLSQPFFVAEVFTNAPGKYVPLSETIRGFKGIVNGDYDDIPEQAFYMTGNIDEVVEKAKTEAA

SEQ ID NO: 174253 - protein, 227 aa, Unknown
  Bacterial polypetide isolated from the Sargasso Sea
FFVDNIFRFTQAGSEVSALLGRIPSAVGYQPTLATDMGNLQERITTTNKGSITSVQAIYVPADDLTDPAPATSFAHLDATTVLSRQIAELGIYPAVDPLDSTSRILDPRIVGEEHYRVAREVQRILQSYKSLQDIIAILGMDELSEEDKLTVARARKIQKFLSQPFFVAEVFTGFPGKLVDLEATIKGFDAICKGEYDHLPENAFYMVGTIEEAVEKAEKMAKDAAA

SEQ ID NO: 174254 - protein, 175 aa, Unknown
  Bacterial polypetide isolated from the Sargasso Sea
MQQLNPSEISDIIKSRIQGLDVSAEAQNEGTIVGVSDGIIRIHGLAEAQYGEMIEFDGGLFGMALNLERDSVGVVVLGDYSGLKEGQNARCTGRILEVPVGKELLGRVVDALGNPIDGKGPIGAKSSSPIEKVAPGVIARQSVDQPVQIGFKCIDAMVPIGRGQRELIIGDRQIG

SEQ ID NO: 174255 - protein, 172 aa, Unknown
  Bacterial polypetide isolated from the Sargasso Sea
LLISQLMLLSITDGQIFLETELFNQGIRPAVNVGLSVSRVGSAAQTKAMKKVAGSIKLELAQYREMAAFAQFGSDLDASTQQLLNRGAKLTELLKQDQYSPMTVAEQVISVFTGVKGFLDDVDLDKIKKFEKDIIEKIKSEKPEIIDSIQNSGKIDEDTEKLLTQVIEEHKK

SEQ ID NO: 174256 - protein, 267 aa, Unknown
  Bacterial polypetide isolated from the Sargasso Sea
PSLDDLKKRIKSVKSTQKITKAMKMVAAAKLKKAQDNAEKGRPYSEKIQNIILNLTQSISDPSNAPKLLIGNGNSKVHLCLVLTADRGLCGGFNTNICKLAKQHIRKMLSEKKQIKIITVGSKGHDQIKNEFGDYIIENLSFKDKKQITFKEADEIGKKVIDLYEKDQFDKCYLFYNNFKNVITQIPCSEQIIPASVKEKEIIKEEKPGYEFEPDEDEILEDLLPKNISTQIYKAFLENAASEQGSRMTAMDNATRNARDLVDKLTI

SEQ ID NO: 174257 - protein, 238 aa, Unknown
  Bacterial polypetide isolated from the Sargasso Sea
RETREGNDLYHEMIESGVIKPDGKGSKAALVYGQMNEPPGARARVGLTGLTVAEYFRDKEGQDVLFFVDNIFRFTQAGSEVSALLGRIPSAVGYQPTLATDMGNLQERITTTNKGSITSVQAIYVPADDLTDPAPATSFAHLDATTVLSRQIAELGIYPAVDPLDSTSRILDPRIVGEEHYRVAREVQKILQTYKSLQDIIAILGMDELSEEDKLTVARARKIQRFLSQPFFVAEVFT

SEQ ID NO: 174258 - protein, 159 aa, Unknown
  Bacterial polypetide isolated from the Sargasso Sea
MKGKISQVIGPVIDVSFENASVLPNLMDAIEITKEDGAKVILECQKHIGEDSVRTVAMDSTDGLRRGMDAIALGKPISMPTGDAVKGRLFNVIGDAIDGIGECETETKLPIHREAPKFEDLSTSTEVLFTGIKVIDLVEPYAKGGKIGLFGGAGVGKTS

SEQ ID NO: 174259 - protein, 133 aa, Unknown
  Bacterial polypetide isolated from the Sargasso Sea
ELGIYPAVDPLDSNSRQLDPGIVGQEHYDTARSVQQVLQRYKELQDIIAILGMDELSEEDKLTVQRARKIQRFLSQPFFVAEVFTGSPGQYVSLRDSIKAFQGIVAGEYDDLPEQAFYMVGTIEEAVEKAKSM

SEQ ID NO: 174260 - protein, 271 aa, Unknown
  Bacterial polypetide isolated from the Sargasso Sea
RSWYRTSIGDGIARVYCLTGVQYGELIEFDGGIQGIALNLEEDNVGAVILGKSSEVKEGDNVKRLGRIASIKVGEEMVGRVVDTLGLPIDGKGPVTGELFEMPIERKAPGVIFRQPVSEPLQTGIKAIDSMIPIGRGQRELIIGDRQTGKTTVAIDTIINQKEFYDRGEPVFCIYVAIGQKGSTVAGIVKKLEDAGAMKYTVVVAANASDPAPMQFYAPMTGAAIGEYFRDTGRPALIIYDDLSKQAAAYREVSLLLRRPPGREAYPGDVF

SEQ ID NO: 174261 - protein, 70 aa, Unknown
  Bacterial polypetide isolated from the Sargasso Sea
KVQRFLSQPFHVAEVFTGSPGKYVDLKDTISGFKGLINGNYDDLPEMAFYMVGDMNEAVTKADELAKQVA

SEQ ID NO: 174262 - protein, 291 aa, Unknown
  Bacterial polypetide isolated from the Sargasso Sea
LLGRVVDGLGNPIDGKGALDKGIKKSRVEVKAPGIIPRKSVSEPMQTGLKSIDSLVPIGRGQRELIIGDRQTGKTAVAIDAIINQKKINESNDEKQKLYCVYVAIGQKRSTVRQIEKTLEEAGAMEYTTIVAATASDAAPLQFLAPYTGCAMGEYFRDNGMHALIIYDDLSKQAVAYRQMSLLLRRPPGREAYPGDVFYLHSRLLERAAKLSDEHGGGSLTALPIIETQGGDVSAFIPTNVISITDGQIFLETELFNQGIRPAINVGLSVSRVGSSAQTKAMKKVSGSMKL

SEQ ID NO: 174263 - protein, 278 aa, Unknown
  Bacterial polypetide isolated from the Sargasso Sea
EQDSVGVVVLGDYLGLSEGQKVTCTGKILEVPVGEEMLGRVVDALGSPIDGKGELKTKQTAPIEVVAPGVIARQSVDQPVQIGLKSIDAMVPIGRGQRELIIGDRQTGKTAVAIDAIINQKGTGIKCIYVAIGQKQSTIANVVAKLEEYGAMEHTIVVSAAAADPAAMQYLSAYSGCAMGEYFRDTGQDALIVYDDLSKQAVAYREISLLLRRPPGREAFPGDVFYLHSRLLERAARVNAEYVEKITEGKVKGKTGSLTALPIMKHKPEMYLLLFQQM

SEQ ID NO: 174264 - protein, 290 aa, Unknown
  Bacterial polypetide isolated from the Sargasso Sea
IGLFGGAGVGKTVLIMELINNVAKAHGGFSVFAGVGERTREGNDLYHEMMESGVIKQDGPGSKAALVYGQMNEPPGARARVALTGLTVAEYFRDQEGQDVLFFVDNIFRFTQAGSEVSALLGRIPSAVGYQPTLATDMGNLQERITTTNKGSITSVQAIYVPADDLTDPAPATSFAHLDATTVLSRQIAEIGIYPAVDPLDSTSRILDPRIVGDEHYKVARDVQKILQSYKSLQDIIAILGMDELSEEDKLVVARARKIQRFLSQPFFVAEVFTGSPGKLVDLESTIKGF

SEQ ID NO: 174265 - protein, 154 aa, Unknown
  Bacterial polypetide isolated from the Sargasso Sea
LFNQGIRPAVNVGLSVSRVGSAAQIKAMKKVAGSIKLELAQYREMAAFAQFGSDLDASTQQLLNRGSKLTELLKQDQYSPLTVAEQVVSVFTGVRGYLDDVDLNKIKSFEKDIIEKIKSEKSEILENIQSSGKLEEGDEKSLIQIIEEYKKSEK

SEQ ID NO: 174266 - protein, 127 aa, Unknown
  Bacterial polypetide isolated from the Sargasso Sea
MPSLDDLKKRIKSVKSTQKITKAMKMVAAAKLKKAQESAEKGRPYSEKMQNIILNLTRSASDSENAPKLLIGTGKNQIHLCVVMTADRGLCGGFNSNICKLAKNYFKNIISQGKELKIITVGSKGLD

SEQ ID NO: 174267 - protein, 273 aa, Unknown
  Bacterial polypetide isolated from the Sargasso Sea
AGCTMGEYFRDKGEDALIVYDDLSKQAVAYRQVSLLLKRPPGREAYPGDVFYLHSRLLERAARVNADYVEQVTGGKVKGKTGSLTALPIIETLAGDVSAFVPTNVISITDGQIYLETELFNSGIRPAINPGLSVSRVGGSAQTKIMKKLAGGVRTALAQYRELAAFSQFASDLDDATKQQLANGRAFTELLKQKQYAPMSVAQQALSLFAADRGYMADIEVEKILDFEAALHGYLTAEKGELEQQINSTGDWNDDIENQFKELVEDFKKTQTF

SEQ ID NO: 174268 - protein, 231 aa, Unknown
  Bacterial polypetide isolated from the Sargasso Sea
MEINPSEVTKILKEQIKNFGDKAEVTEVGQVLSVGDGIARIYGLDNVEAGEMVEFSDGSKGMALNLESENVGVVIFGDDRNIKEGDVVKRTGNIVDTPVGKELLGRVVDGLGNPIDGKGALDKSVQKSRVEVKAPGIIPRQSVNEPMQTGLKSIDSLVPIGRGQRELIIGDRQTGKTAVAVDAIINQKKINESGDEKQKLYCIYVAVGQKRSTVRQIQKTLEEAGAKWNIQ

SEQ ID NO: 174269 - protein, 125 aa, Unknown
  Bacterial polypetide isolated from the Sargasso Sea
MVSIRPDEISAILKQQIEDYDKSVSVSNVGTVLTVGDGIARVYGLQQAMAGELLEFEDGTEGIALNLEDDNVGAVLMGEGYGIQEGSTVKATGKIASVPVGEAMLGRVVNSLGRAIDGKGEIATS

SEQ ID NO: 174270 - protein, 220 aa, Unknown
  Bacterial polypetide isolated from the Sargasso Sea
MNIQASEISKILKEQIKNFGDDTEVAEVGKVLSVGDGIARIYGLDKVQAGEMVEFPGGTMGMALNLEIDNVGVVIFGSDRDIKEGDLVKRTSSIVDVPVGMELLGRVVDGLGNPLDGKGPIKSKKRSVADVKAPGIIPRKSVHEPMATGLKSVDSLIPIGRGQRELIIGDRQTGKTAVAVDTILNQKSYNDAAGTDESKKLYCVYVAIGQKRSTVAQLVK

SEQ ID NO: 174271 - protein, 272 aa, Unknown
  Bacterial polypetide isolated from the Sargasso Sea
MASLDDLKKRILSVKSTQKITKAMKMVAAAKLKRAQENAEKGRPYSEKMNNIILNLSNGISDKENAPKLLAGNGNDKVHLCVVLTSDRGLCGGFNSNIIKKAKAYFNKIASEGKNLKIITVGSKGHDQLKRQYNDKIVNKISFKESKNINFFDAEKVSKIIIESFQKNEFDVCTIFYNKFKNVITQIPQAQQIIPLKSSETSKDNEKDNYEFEPEEDEILGNLLPKNISTQIFKAMLENSASEQGSRMSAMDNATRNAGEMVDKLTIQYNRS

SEQ ID NO: 174272 - protein, 248 aa, Unknown
  Bacterial polypetide isolated from the Sargasso Sea
ACFIIYDDLSKQAVAYRQMSLLLRRPPGREAYPGDVFYLHSRLLERAAKLSDEHGGGSLTALPIIETQGGDVSAFIPTNVISITDGQIFLETELFNQGIRPAINVGLSVSRVGSSAQTKAMKKVSGSMKLELAQYREMAAFAQFGSDLDASTQQLLNRGSKLTELLKQKQYSPMTVAEQVISVFCGVKGYLDDIELKDIAEFENKIIEKCKSDKPEIIDSILASGKLEDDMEKLLVEVITQLKENFKS

SEQ ID NO: 174273 - protein, 264 aa, Unknown
  Bacterial polypetide isolated from the Sargasso Sea
MPSLDDLRKRIASVKSTQKITKAMKMVAAAKLRKAQEMAEKGRPYSDKMDVIIQNLSKAINDPSNAPKLLVGTGEDKSHLCVVMTADRGLCGGFNTNIVKLAKNYFNKILKDSKSLKIITVGSKGLDQLKRDYGKYIIKKINFKDKKKLSFEDAEAIGNEIVKLFKNREFDKCVIFFNKFKNVMTQIPQSQQVIPAKSEEKLKEEQDLSYEFEPEEDEILEDLLPKNISTQIYKGFLENSASEQGSRMTAMDNATRNAGDLVEK

SEQ ID NO: 174274 - protein, 181 aa, Unknown
  Bacterial polypetide isolated from the Sargasso Sea
MEINPSEITKLLKEQIKNFGEKAEVSEVGKVLTVGDGIARVYGLDNVQAGEMVEFNDGSKGMALNLESDNVGVVIFGDDRQIKEGDTVKRTNSIVDVPVGKELLGRVVDGLGVPIDGKGNLSPKVLRKRVEVKAPGIIPRQSVNEPMQTGLKAIDSLIPIGRGQRELIIGDRQTGKTAVAI

SEQ ID NO: 174275 - protein, 255 aa, Unknown
  Bacterial polypetide isolated from the Sargasso Sea
KAQQAILDARPYAIKMMDVINHLAARCNSDLHPLLDDREGKRTLLLIITSDKGLCGGFNGSIIRKTAQYLKDNDQNENSLIVAGKKGNDIFSNRPVTIVEDLVGWTKDFDYLKAQAIGGNLATMFSENKIDKVLVVYNEFKSVMQQEVVVEQLLPVVPEKVEQGKDSVAMDYIYEPDEETILNVLLKRYVADVVYRAFLESSASEHGARMTAMDSASRNAGEMIDGLTLTYNKARQAYITKELIEIVNGAEALKG

SEQ ID NO: 174276 - protein, 186 aa, Unknown
  Bacterial polypetide isolated from the Sargasso Sea
MGSGDVVQVIGAVVDVKFAANEVPKIFDALNIENSEIVLEVQQQLGGGVVRTIALGSTDGLRRGISAVNTGKGITVPVGEQTLGRIMNVLGEPIDECGPIGEQERMEIHREAPKFVELSPATELLETGIKVIDLICPFAKGGKVGLFGGAGVGKTVNMMELINNIATEHSGLSVFTGVGERTREGN

SEQ ID NO: 174277 - protein, 285 aa, Unknown
  Bacterial polypetide isolated from the Sargasso Sea
KKRISSVKSTQKITKAMKMVASAKLRKAQENAEKGRPFSEKMNNIILNLSNSITDKDSASKFLVGTGKNNVHLCVVITADRGLCGGFNTNICRKAKSYFENILKEGKTLKIFTIGSKGHDQLKRAYSQYIIEKINYKNVKKLTYNEAEDVAKKIIKLFNDSQFDICTIFYNKFKNIITQTPQAQQIIPIESPTKTEEKKSESFYEFEPEEDEILNDLLPRNISTQIFKAFLENAASEQGSRMTAMDSATRNAGDLVDKLTINYNRSRQAAITKELIEIISGAESL

SEQ ID NO: 174278 - protein, 285 aa, Unknown
  Bacterial polypetide isolated from the Sargasso Sea
ITQVIGAVVDVKFDGELPEILTALECKNGDNRLVLEVAQHLGESSVRTIAMDATEGLKRGDEVTDTGAPIKVPVGPETLGRIVNVVGEAIDEKGQVKTKESWPIHRAAPKFNDQSTETEILVTGIKVVDLLAPYAKGGKIGLFGGAGVGKTVIIMELINNIAKAHGGFSVFAGVGERTREGNDLYHEMIESGVIKPDGPGSKAALVYGQMNEPPGARARVALTGLTVAEYFRDQEGQDVLFFVDNIFRFTQAGSEVSALLGRIPSAVGYQPTLATDMGNYKRESQ

SEQ ID NO: 174279 - protein, 143 aa, Unknown
  Bacterial polypetide isolated from the Sargasso Sea
SRKIAELGIYPAVDPLDSTSRILTPDILGDEHYNCAQRVKELLQRYKELQDIIAILGMEELSEEDKLAVARARRVQRFLSQPFHVAEQFTGIPGALVDIKDTIKGFNMIMDGELDHIPEAAFNLKGNIEEAIEAGEKMLAETK

SEQ ID NO: 174280 - protein, 183 aa, Unknown
  Bacterial polypetide isolated from the Sargasso Sea
TTTNKGSITSVQAIYVPADDLTDPAPATSFSHLDATTVLSRQIAEIGIYPAVDPLDSTSRILDPRIVGDEHYRVAREVQKVLQTYKSLQDIIAILGMDELSEEDKLTVARARKIQRFLSQPFFVAEVFTGSPGKLVDLESTIKGFDAICKGEYDHLPEAAFYMVGTIEEAVEKAEKMAKEAAA

SEQ ID NO: 174281 - protein, 243 aa, Unknown
  Bacterial polypetide isolated from the Sargasso Sea
MPSLDDLKKRIKSVKSTQKITKAMKMVAAAKLKKAQENAEKGRPYSQKMQNIILNLTKSINDPENAPKLLVGTGKDKINLCVVLTADRGLCGGFNSNICKLAKTKFEKILSEGKELKIITVGTKGLDQIKREYGKYVIKKFSFKNKKQITFSEAETVGNEIINLFKQNQFDKCILFYNNFKNVITQIPQAQQIIPAENNSSKEKEESLTSYEFEPEEDEILEDLLPKNISTQVFKAFLENAAS

SEQ ID NO: 174282 - protein, 228 aa, Unknown
  Bacterial polypetide isolated from the Sargasso Sea
MASLDDLKKRISSVKSTQKITKAMKMVAAAKLRRAQESAEKGRPYSEKMNNIILNLSNGISDKENAPKLLVGTGEEKTHLCVVMTSDRGLCGGFNTNIIKKAKQYFQKILKENKILKIITVGSKGYDQLKRQYKENIIEKISFKDSKNINYFDADKVGKIIINRFEKKEFDVCAIFYNQFKNVITQIPQEHQIIPLKSNEEKDTISNSSYEFEPDEDEILSNLLPKNI

SEQ ID NO: 174283 - protein, 152 aa, Unknown
  Bacterial polypetide isolated from the Sargasso Sea
AHLDATTVLSRKISELGIYPAVDPLDSTSRILTPEILGDEHYNCAQRVKELLQKYNELQDIIAILGMEELSEEDKLAVARARRVQRFLSQPFHVAEQFTGIPGALVDIKDTIKGFNMIMDGELDHLPEAAFNLKGNIEEAIEAGEKMLSEAK

SEQ ID NO: 174284 - protein, 274 aa, Unknown
  Bacterial polypetide isolated from the Sargasso Sea
MELKHFKYGKDMSNGTVVQIIGAVIDVEFPKENLPKVYDALRVDEKDLVLEVQQQLGDGVVRTIAMGASEGLQRGVSVTNTGQPISVPVGEGTLGRIMNILGDPIDEKGEIDAKEKMPIHRAAPSYEDQADSSELLETGIKVIDLICPFAKGGKVGLFGGAGVGKTVNMQELIRNIAYEHSGFSVFAGVGERTREGNDMYHEMIEGGVLDKVALVYGQMNEPPGNRLRVGLSGLTMAEKFRDDGRDVLLFIDNIYRYTLAGTECSALLGRMPSA

SEQ ID NO: 174285 - protein, 91 aa, Unknown
  Bacterial polypetide isolated from the Sargasso Sea
MIESGVIKQDGPGFKAALVYGQMNEPPGARARVALTGLTVAEYFRDQEGQDVLFFVDNIFRFTQAGSEVSALLGRIPSAVGYQPTLANDMG

SEQ ID NO: 174286 - protein, 121 aa, Unknown
  Bacterial polypetide isolated from the Sargasso Sea
MVATPSTSSQTKGVVRQVIGPVLDVEFPAGKLPKILNALRIEAKNPAGQDIALTAEVQQLLGDHRVRAVAMSGTDGLVRGMEAIDTGAPISVPVGEATLGRIFNVLGEPVDEQGPVNTTDT

SEQ ID NO: 174287 - protein, 281 aa, Unknown
  Bacterial polypetide isolated from the Sargasso Sea
GEMVEFEDGSKGMALNLENDNVGVVIFGDDRNIKEGDTIKRTNAIVDVPVGKELLGRVVDGLGNPIDGKGALSVKNRKRVEVKAPGIIPRQSVNEPMQTGLKSIDSLIPIGRGQRELIIGDRQTGKTAVAIDAIINQKKINESSDEKKKLYCVYVAIGQKRSTVAQITKTLEEAGALKYTTIVAATASDSAPLQFLAPYTGCTIGEYFRDNGMHALIVYDDLSKQAVAYRQMSLLLRRPPGREAYPGDVFYLHSRLLERAAKLNEKSGGGSLTALPIIETQ

SEQ ID NO: 174288 - protein, 207 aa, Unknown
  Bacterial polypetide isolated from the Sargasso Sea
MANNLTGKISQVLGAVVDVEFDGELPAIMNALEVDNNGTRLMLEVAQHLGENAVRTIAMDTTDGLVRGQTATDTGAPISMPVGPETLGRIMNVVGEPVDERGDIGTTKTYPIHRPAPEFVDQSTETEVLVTGIKVVDLLAPYARGGKIGLFGGAGVGKTVLIMELINNIAKAHGGYSVFAGVGERTREGNDLYHEMIESGIIDLKGK

SEQ ID NO: 174289 - protein, 212 aa, Unknown
  Bacterial polypetide isolated from the Sargasso Sea
MEYTTIVAATASDAAPLQFLAPYTGCAMGEYFRDNGMHALIIYDDLSKQAVAYRQMSLLLRRPPGREAYPGDVFYLHSRLLERAAKLSDEHGGGSLTALPIIETQGGDVSAFIPTNVISITDGQIFLETELFNQGIRPAINVGLSVSRVGSSAQTKAMKKVSGSMKLELAQYREMAAFAQFGSDLDASTQKLLNRGSKLTELLKQKQYSPLT

SEQ ID NO: 174290 - protein, 284 aa, Unknown
  Bacterial polypetide isolated from the Sargasso Sea
VEVKAPGIIPRQSVSEPMQTGLKSIDSLIPVGRGQRELIIGDRQTGKTAVAIDAIINQKKINESSDEKKKLYCVYVAIGQKRSTVAQITKTLEEAGALKYTTIVAATASDSAPLQFLAPYTGCTIGEYFRDNGMHALIVYDDLSKQAVAYRQMSLLLRRPPGREAYPGDVFYLHSRLLERSAKLSDVNGGGSLTALPIIETQAGDVSAYIPTNVISITDGQIFLETELFNQGIRPAVNVGLSVSRVGSAAQTKAMKKVAGSIKLELAQYREMAAFAQFGSDLDA

SEQ ID NO: 174291 - protein, 194 aa, Unknown
  Bacterial polypetide isolated from the Sargasso Sea
NEPPGARARVALTGLTVAEYFRDQEGQDVLFFVDNIFRFTQAGSEVSALLGRIPSAVGYQPTLATDMGNLQERITTTNKGSITSVQAIYVPADDLTDPAPATSFAHLDATTVLSRQIAEIGIYPAVDPLDSTSRILDPRIVGDEHYRVARDVQRILQSYKSLQDIIAILGMDELSEEDKLVVARARKIQRFLSQ

SEQ ID NO: 174292 - protein, 268 aa, Unknown
  Bacterial polypetide isolated from the Sargasso Sea
IIGAVVDVKFDGELPEILTALECDNGGNRLVLEVAQHLGESSVRTIAMDATEGLKRGDEVTDTAAPIKVPVGPETLGRIINVIGEPIDEKGEVKTKENWPIHRSAPEFNDQSTETEILVTGIKVVDLLAPYAKGGKIGLFGGAGVGKTVLIMELINNVAKAHGGFSVFAGVGERTREGNDLYHEMIESGVIKPEGKGSKAALVYGQMNEPPGARARVALSGLTVAEYFRDQEGQDVLFFVDNIFRFTQAGSEVSALLGRIPSAVGYQP

SEQ ID NO: 174293 - protein, 235 aa, Unknown
  Bacterial polypetide isolated from the Sargasso Sea
RDKEGQDVLFFVDNIFRFTQAGSEVSALLGRIPSAVGYQPTLATDMGNLQERITSTDKGSITSVQAIYVPADDLTDPAPATSFSHLDATTVLSRQIAEIGIYPAVDPLDSTSRILDPRVVGEEHYRVARDVQKILQAYKSLQDIIAILGMDELSEEDKLTVARARKIQRFLSQPFFVAEVFTGSPGKLVDLDDTIKGFDAICKGEYDNLPEAAFYMVGGIEEVIEKAEKLSKDSK

SEQ ID NO: 174294 - protein, 144 aa, Unknown
  Bacterial polypetide isolated from the Sargasso Sea
LKAVDAMVPIGRGQRELIIGDRQTGKTAVAIDAIINQKGTGIKCIYVAIGQKQSTVANVVRKLEEYGAMEHTIVVSATAADPAPMQYLSAYAGCTMGEYFRDKGEDALIVYDDLSKQAVAYRQVSLLLKRPPGREAYPGDVFYL

SEQ ID NO: 174295 - protein, 263 aa, Unknown
  Bacterial polypetide isolated from the Sargasso Sea
MQYLSAYSGCALGEYFRDTGQDALIVYDDLSKQAVAYREISLLLRRPPGREAFPGDVFYLHSRLLERAARVNAEYVEKITEGKVKGKTGSLTALPIIETQAGDVSAFVPTNVISITDGQIFLETDLFNSGVRPAIDPGLSVSRVGGAAQTKIIKKLSGGIRTDLAQYRELAAFSQFASDLDDATKEQLEHGKRITELLKQKQYSPMSVADQAMSLYAADKGYMKDVDIDKVGDFESALLAYFESEKSDLKKQINDTGDWDDDI

SEQ ID NO: 174296 - protein, 293 aa, Unknown
  Bacterial polypetide isolated from the Sargasso Sea
NVAKAHGGFSVFAGVGERTREGNDLYHEMIDSGVIKPDGEGSKAALVYGQMNEPPGARARVALTGLTVAEYFRDQEGQDVLFFVDNIFRFTQAGSEVSALLGRIPSAVGYQPTLATDMGNLQERITTTNKGSITSVQAIYVPADDLTDPAPATSFAHLDATTVLSRQIAEIGIYPAVDPLDSTSRILDPRIVGDEHYRVAREVQKVLQTYKSLQDIIAILGMDELSEEDKLIVARARKIQRFLSQPFFVAEVFTGSPGKLVDLESTIKGFDAICKGEYDHLPEAAFYMLELSR

SEQ ID NO: 174297 - protein, 208 aa, Unknown
  Bacterial polypetide isolated from the Sargasso Sea
MTSDRGLCGGFNTNIIKKAKLYFQKVLDEGKVLKIITVGSKGYDQLKRSYKDNIVEKISFKESKYVNYFDADKVGKIIIDKFEKKEFDVCAIFYNQFKNVITQIPQEQQIIPLKNSETEGSSSEDNYEFEPEEDEILSNLLPKNISTQIFKAMLENSASEQGSRMSAMDNATRNAGEMVDKLTIQYNRSRQAAITKELIEIISGAESL

SEQ ID NO: 174298 - protein, 85 aa, Unknown
  Bacterial polypetide isolated from the Sargasso Sea
MRKGQITQIIGAVVDVKFDEELPEILTALECDNAGNRLVLEVAQHLGESSVRTIAMDATEGLKRGDEVIDTGAPIKVPVGPETLG

SEQ ID NO: 174299 - protein, 226 aa, Unknown
  Bacterial polypetide isolated from the Sargasso Sea
MSLLLRRPPGREAYPGDVFYLHSRLLERSAKLSDTNGGGSLTALPIIETQAGDVSAYIPTNVISITDGQIFLETELFNQGIRPAVNVGLSVSRVGSAAQTKAMKKVAGSIKLELAQYREMAAFAQFGSDLDASTQQLLNRGAKLTELLKQDQYSPMTVAEQVISVFTGVEGYLDDVDLDKIKKFEKDIIEKIKSENPEIIDSIQSTGKLDEDTEKLLSKAIEDYKK

SEQ ID NO: 174300 - protein, 168 aa, Unknown
  Bacterial polypetide isolated from the Sargasso Sea
MPSLDDLRKRISSVKSTQKITKAMKMVAAAKLRKAQEMAENGRPYSDKMNVVIQNLSKAISDPSNAPKLLIGSGNDKTHLCVVMTADRGLCGGFNTNIVKQAKNYFNKILKESKNLKIITVGTKGLDQLKREYGKYIVKKIDFKNKKQISFKDASIVGDEIVKLFKNN

SEQ ID NO: 174301 - protein, 205 aa, Unknown
  Bacterial polypetide isolated from the Sargasso Sea
LERAAKLSDEHGGGSLTALPIIETQGGDVSAFIPTNVISITDGQIFLETELFNQGIRPAINVGLSVSRVGSSAQTKAMKKVSGSMKLELAQYREMAAFAQFGSDLDASTQQLLNRGSKLTELLKQKQYSPMTVAEQVISVFCGVKGYLDDIDLKDVAEFENKIIEKCKSDKPEIIESILTSGKLEEDKEKLLVEVITQLKGNFKS

SEQ ID NO: 174302 - protein, 292 aa, Unknown
  Bacterial polypetide isolated from the Sargasso Sea
MSTKINPSEISSIIKKKIEDYKGASSESNVGEVLSTADGIVQIFGLEDAMYGELLDFGEGTYGLALNLENDSVGAVVLGDAGHIKEGQKVKTTGRILEVPVGEGLKGRVIDALGRPIDGKGEVKSETNAPIEVVAPGVIDRQGVDQPVQTGIKSIDVMVPIGRGQRELIIGDRQTGKTAIAVDAIIKQKDSDITCVYVAIGQKQSTVATVVRQLEEADALKNTIVVSASAAESASLQFLAPYSGCTMGEYFRDRGEDALIIYDDLSKHAVAYRQISLLLKRPPGRETFSGDI

SEQ ID NO: 174303 - protein, 157 aa, Unknown
  Bacterial polypetide isolated from the Sargasso Sea
LETELFNQGIRPAVNVGLSVSRVGSAAQTKAMKKVAGSIKLELAQYREMAAFAQFGSDLDASTQRLLNRGSKLTELLKQNQYSPLSVAEQVISVFSGVNGYLDDIDLGEIKSFESDLIDLMRSSHQDIINSINDSGNLDDDIKDKLVGIIEEFKKSR

SEQ ID NO: 174304 - protein, 305 aa, Unknown
  Bacterial polypetide isolated from the Sargasso Sea
IHRSAPKHEDLSTSTEMLVTGIKVVDMMEPYTKGGKTGLFGGAGVGKTVLIQELIRNIATEHGGYSVFAGVGERTREGNDLYNEMTESGVIEKTTMVFGQMNEPPGARLRVALSGLTMAEYFRDDEGRDVLLFIDNIFRFTQAGSEVSALLGRMPSAVGYQPTLGTEMGDLQERITSTKNGSITSVQAVYVPADDLTDPAPATAFAHLDATSVLERKIAELGIYPAVDPLASTSRILDPRVIGDNHYNTAREVQNILQKYKDLQDIIAILGMDELSDDDKLSVSRARKIKRFMSQPFFVAEQFTK

SEQ ID NO: 174305 - protein, 229 aa, Unknown
  Bacterial polypetide isolated from the Sargasso Sea
AYPGDVFYLHSRLLERASRINEDYVEKITNGEVKGKTGSLTALPIIETQAGDVSAFVPTNVISITDGQIFLESDLFNSGFRPAINAGLSVSRVGGAAQTKIIKKLGGGVRLALAQYRELAAFAQFASDLDEATRKQLERGQRVMELMKQKQYTPLNVAEMGVSLFAVENGFIDDIELEKIGAFESALHDYMKSEQSALMDKIGVEGNYDDDIETEMNSAIDKFKKNNTW

SEQ ID NO: 174306 - protein, 153 aa, Unknown
  Bacterial polypetide isolated from the Sargasso Sea
CSLDATTVLSRQIAEIGIYPAVDPLDSTSRILDPRIVGDEHYRVAREVQKVLQTYKSLQDIIAILGMDELSEEDKLVVARARKIQRFLSQPFFVAEVFTGSPGKLVDLESTIKGFDAICKGEYDHLPEAAFYMVGTIEEAVQKAESLANEAAA

SEQ ID NO: 174307 - protein, 291 aa, Unknown
  Bacterial polypetide isolated from the Sargasso Sea
DSDLPQILDALQVDNNGQKLILEVAQHLGENEVRTIAMDSTDGLVRGMDVVQTGAPITVPVGPDTLGRILNVIGDPVDDGKPVKSKTTLPIHRDAPEYVDQSTSADILVTGIKVVDLLAPYAKGGKIGLFGGAGVGKTVLIMELINNVAKAHGGYSVFAGVGERTREGNDLFHEMVESGVIVPDGPGSKAALVYGQMNEPPGARARVALTGLTLAEYFRDQEGQDVLFFVDNIFRFTQAGSEVSALLGRIPSAVGYQPTLATDMGALQERITTTTKGSITSVQAIYVPADD

SEQ ID NO: 174308 - protein, 290 aa, Unknown
  Bacterial polypetide isolated from the Sargasso Sea
AKLIGEVIRLTGDVAFIQVYESTSGLKPGEPVVGTGNPLSVLLGPGIIGQIYDGIQRPLKDLADKSGSFIGRGITTTPVDMTKKYHFNPTVAVGDEVEPGNIIGTVPETSLIEHKILVPPNHAGGKITKIVSEGDYDLETEIAVVEKDGQSAPLKMYHKWPVRSPRPYLKRYDPTIPLLTGQRVIDTFFPLAKGGTGSIPGAFGTGKTVTLHQIAKWADSQVVVYIGCGERGNEMTEVLVEFPELKDPRTGKPLMDRTVLVANTSNMPVAAREASIYTGVTIAEYYRDMG

SEQ ID NO: 174309 - protein, 275 aa, Unknown
  Bacterial polypetide isolated from the Sargasso Sea
IIQQQIENFEKQTTKTEVGTVLEVGDGIARVYGLDNIVAGELVEFPNNLQGMALNLEEDNVGVVLFGDDRNIKEGDEARRTERIAEVPVGDAMLGRVVDPLGQPIDGKGPIETSESRRVEVIAPGIVTRKSVHEPLQTGLKAIDSMVPIGRGQRELIIGDRQTGKTAIAMDTIINQKGGDVVCIYVGIGQKRSTMAKIVSKLQEYGAMEYTIVVSATASEPAPLQFLAPYSGVSMGEYFRDKGKHVLYIYDDLSKQAVAYRKLSLLLRRPPWTRG

SEQ ID NO: 174310 - protein, 241 aa, Unknown
  Bacterial polypetide isolated from the Sargasso Sea
MASLDDLKKRIVSVKSTQKITKAMKMVAAAKLKRAQENAEKGRPYSEKMNNIILNLADGISDKENAPKLLAGTGQDKIHLCVVLTSDRGLCGGFNSNIIKKAKIYFGKVLGEGKTLKIITVGSKGYDQLKRLYSDKIVEKISFKESKNVNYFDAEKVGKIIIESFLKKEFDVCTIFYNKFKNVITQIPQEQQIIPLKSSESEDSASEDNYEFEPEEDEILSNLLPKNISTQIFKAMLENSA

SEQ ID NO: 174311 - protein, 314 aa, Unknown
  Bacterial polypetide isolated from the Sargasso Sea
VIDLICPFAKGGKIGLFGGAGVGKTVNMMELINNIATEHSGLSVFAGVGERTREGNDFYYEMQESGVVNVEKPSESKVAMVYGQMNEPPGNRLRVALTGLTIAEKFRDEGRDVLLFIDNIYRYTLAGVEVSALLGRMPSAVGYQPTLAEEMGALQERITSTKIGSITSIQAVYVPADDLTDPSPATTFAHLDATVVLSRQIAELGIYPAVDPLDSTSRQLDPLVVGAEHYEVAQGVQGVLQRYRELKDIIAILGMDELSEEDKLTVARARKVERFLSQPFFVAEVFTGSPGKYVSLEDTIKAFKGILASDYDDL

SEQ ID NO: 174312 - protein, 280 aa, Unknown
  Bacterial polypetide isolated from the Sargasso Sea
EKQKLYCVYVAIGQKRSTVRQIEKTLQEAGAMEYTTIVAATASDAAPLQFLAPYTGCTMGEYFRDNGMHALIIYDDLSKQAVAYRQMSLLLRRPPGREAYPGDVFYLHSRLLERAAKLSDEHGGGSLTALPIIETQGGDVSAFIPTNVISITDGQIFLETELFNQGIRPAINVGLSVSRVGSSAQTKAMKKVSGSMKLELAQYREMAAFAQFGSDLDASTQKLLNRGSKLTELLKQKQYSPMTVAEQVISIFCGVKGHLDDIEQKNIADFENKIIEKCKS

SEQ ID NO: 174313 - protein, 284 aa, Unknown
  Bacterial polypetide isolated from the Sargasso Sea
MKLGIKVIDLLAPYRQGGKVGLFGGAGVGKTVLIQELINNIAKEHGGVSVFGGVGERTREGNDLYEEFKESGVINADDLTQSKVALCFGQMNEPPGARMRVGLSALTMAEHFRDVNKQDVLLFVDNIFRFVQAGSEVSALLGRMPSAVGYQPTLGTDVGELQERITSTLEGSITSIQAVYVPADDLTDPAPATTFAHLDATTVLARALAAKGIYPAVDPLDSTSTMLQPSVVGDEHYKTARAVQSTLQRYKELQDIIAILGLDELSEEDRLTVDRARKIEKFLS

SEQ ID NO: 174314 - protein, 291 aa, Unknown
  Bacterial polypetide isolated from the Sargasso Sea
MASLDDLKKRISSVKSTQKITKAMKMVAAAKLKRAQESAERGRPYSQKMNNVILNLSNGISDKENAPKLMSGTGKDKTHLCVVLTSDRGLCGGFNANIIKKAKSFFRKLDKEDKELKIITVGSKGNDQLKRLYGDKIIENISFKNSKNANYFDAEKVGKIIIEKFEKNEFDFCTIFYNQFKNVITQIPQAQQIIPLNTDIDEENKSEETYEFEPDEDEILNNLLPKNISTQIFKAMLENSASEQGARMSAMDNATRNAGEMVDKLTIEYNRSRQAAITKELIEIISGAESL

SEQ ID NO: 174315 - protein, 99 aa, Unknown
  Bacterial polypetide isolated from the Sargasso Sea
FYAGLSRKGLRFFELYVEPTPIMLPFKIIEEFTKPLSLSFRLFGNILADELAVGVLVYLVPLLVPLPVMLLGLFTSAIQALIFATLTAFYIGEGLHEAH

SEQ ID NO: 174316 - protein, 238 aa, Unknown
  Bacterial polypetide isolated from the Sargasso Sea
MKKGKITQIIGAVVDVKFDGELPEILTALECKNGENRLVLEVAQHLGETSVRTIAMDATEGLKRGDDVTDTGAPIKVPVGPETLGRIVNVIGEPIDEKGEVKTKESWPIHRAAPEFNDQSTETEILVTGIKVVDLLAPYAKGGKIGLFGGAGVGKTVLIMELINNVAKAHGGFSVFAGVGERTREGNDLYHEMIESGVIKPDGEGSKAALVYGQMNEPPGARARVALSGLTVAEYFRD

SEQ ID NO: 174317 - protein, 244 aa, Unknown
  Bacterial polypetide isolated from the Sargasso Sea
KKFNDILTNVSSTLDNSDHPMMKSNKGNKILLIALSSNRGLCGGFNNNIVKEIKKTISSNPENKYSILTVGKKVFDAFKKSDLINNSDQLPKDTQSIWDSLNYENSIGITNKLISSFKNNQFDKAYIIYNSFKNAAIQTIQNEPFLPVSQPKNESSTNTDYIYDPDKEEILNDLIPQSLKIQLYKALLDSFASEHGARMTAMHKATDNANEMKNDLKLFYNKARQAAITNEILEIVAGAEALGG

SEQ ID NO: 174318 - protein, 146 aa, Unknown
  Bacterial polypetide isolated from the Sargasso Sea
MASLDDLKKRISSVKSTQKITKAMKMVAAAKLRRAQESAEKGRPYSKKMNNIILNLSSGISDKESAPQLLVGSGENKIHLCVVLTSDRGLCGGFNSNIIKKAKSYFQKILNEGKTLKIITVGSKGYDQLKRVYKDNIIEKISFKES

SEQ ID NO: 174319 - protein, 191 aa, Unknown
  Bacterial polypetide isolated from the Sargasso Sea
MSKKVGNVSQIIGPVVDVSFDTTSTELPKIYDSLEIIKDDGSVLVLEVQSHVGEDMVRTISMDSTDGLQRGAEVVSTGNPIQMPIGKDIYGRLFNVIGDAIDGMENLPKIEENGLPIHREAPPFEQLSTSTEVLFTGIKVIDLIEPYAKGGKIGLFGGAGVGKTVLIQELINNIAKGHGGLSVFAGVVKGL

SEQ ID NO: 174320 - protein, 240 aa, Unknown
  Bacterial polypetide isolated from the Sargasso Sea
INNVAKESGGYSFFAGVGERTREGNDLYMEMKESGVLNKTGLVFGQMNEPPGARARVALTGLTQAEYFRDKEGQDVLLFVDNIFRFTQAGSEVSALLGRIPSAVGYQPTLATDLGALQERITSTVNGSITSVQAIYVPADDLTDPAPATTFAHLDGTIVLSRQLAELGIYPAVDPLDSTSRMLDPRIVGDEHYRVAREVQRILQRYKQLQEIIAILGMDELSEQDKIDVSRARKIQRFLS

SEQ ID NO: 174321 - protein, 254 aa, Unknown
  Bacterial polypetide isolated from the Sargasso Sea
MSKGIITQVIGAVVDVKFEGELPEILTALECKNGDNRLVLEVAQHLGETTVRTIAMDATEGLKRGDEVTNTKAPIQVPVGPETLGRIINVIGEPIDERGEVKTKETWPIHRAAPEFNDQSTETEILVTGIKVIDLLAPYAKGGKVGLFGGAGVGKTVLIMELINNVAKAHGGFSVFAGVGERTREGNDLYHEMIESGVIKKDGDGSKAALVYGQMNEPPGARARVALTGLTVAEYFRDQEGQDVLFFVDNIFRF

SEQ ID NO: 174322 - protein, 297 aa, Unknown
  Bacterial polypetide isolated from the Sargasso Sea
IPRQSVSEPMQTGLKSIDSLIPIGRGQRELIIGDRQTGKTAVAIDTIINQKEINKSNNEKDKLYCIYVAIGQKRSTVAQIVKTLEEAGAMSYTTIVSATASDPAPLQFLAPYSGCTMGEFFRDNGMHALIIYDDLSKQAVAYRQMSLLLRRPPGREAYPGDVFYLHSRLLERAAKLNDKQGGGSLTALPIIETQAGDVSAYIPTNVISITDGQIFLETELFNQGIRPAVNVGLSVSRVGSAAQTKAMKKVAGSIKLELAQYREMAAFAQFGSDLDAATQKLLNRGSKLTELLKQNQY

SEQ ID NO: 174323 - protein, 253 aa, Unknown
  Bacterial polypetide isolated from the Sargasso Sea
PGARARVGLTGLTLAEYFRDEEGQDVLLFIDNIFRFTQAGSEVSALLGRIPSAVGYQPTLGTDMGQLQERITSTNKGSITSVQAIYVPADDLTDPAPATAFSHLDATTVLNRQIAELGIYPAVDPLDSTSRMLDPRIIGDEHYEVAREVQRVLQTYKSLQDIIAILGMDELSEDDKLTVSRARKLQRFLSQPFHVAEVFTGHAGVFVPLEETIRGFQEIVAGKHDDLPEAAFYMVGTIDDVVEKAKEMAAEAA

SEQ ID NO: 174324 - protein, 288 aa, Unknown
  Bacterial polypetide isolated from the Sargasso Sea
PIDQKGKVATKESWPIHRPAPKFTDQSTETEILVTGIKVVDLLAPYSKGGKIGLFGGAGVGKTVIIMELINNIAKAHGGFSVFAGVGERTREGNDLYHEMIESGVIKPDGKGSKAALVYGQMNEPPGARARVGLTGLTVAEYFRDKEGQDVLFFVDNIFRFTQAGSEVSALLGRIPSAVGYQPTLATDMGNLQERITTTNKGSITSVQAIYVPADDLTDPAPATSFAHLDATTVLSRQIAELGIYPAVDPLDSTSRILDPRIVGEEHYRVAREVQKILQTYKSLQDII

SEQ ID NO: 174325 - protein, 152 aa, Unknown
  Bacterial polypetide isolated from the Sargasso Sea
MEGIAKGAIEFAAASDIGARLIQMFEAGDFDVCSLIYNKFQSAMTQIVTVQQIIPASVPEEVDAAPSLGAYEYEPDEEQILAELLPRNVSTQVFSALLENTASEHGARMTAMDSATRNAGDMIDKLTLTYNRTRQAFITKELIEIISGAEAL

SEQ ID NO: 174326 - protein, 107 aa, Unknown
  Bacterial polypetide isolated from the Sargasso Sea
MSTNATGKITQVIGAVVDVQFEGDLPPILNALHTQNGDTRLVLEVAQHLGENMVRTIAMDSTEGLVRGSEVIDTGDAIKVPVGPETLGRLINVIGETIDEGEPIKSK

SEQ ID NO: 174327 - protein, 203 aa, Unknown
  Bacterial polypetide isolated from the Sargasso Sea
TNVISITDGQIFLQDDLFKSGIRPAIDVGISVSRVGSAAQVKAMKNAVGTLKSDLQQFRELESFAAFGSDLDAVSQAQLDRGYRLTELLKQGLNSPLLVEEQVVSIWAGTRGHLDNVEIADVSRFESELLDWFRTRHGAILSEIRESGNIGDEDAFESAIAAFSEQFEGTNPTQDTPDAEFADTDSNIVDADTTLPEEDISEA

SEQ ID NO: 174328 - protein, 311 aa, Unknown
  Bacterial polypetide isolated from the Sargasso Sea
EKQTQIVLEVAQHLGEGKIRAISMQGTDGLRRGAEVSNTGSPISVPVGEATLGHIFNVYGRSLDVPTESLDIKERWPIHRNPPPFEEVTAQNEMFETGIKVIDLLIPYVQGGKIGLFGGAGVGKTVLIQEMINRVATHHSGVSVFAGVGERTREGNDLFREMQESGVIDKTALVFGQMDEPPGVRLRVALSALTMAEYFRDVEQQDVLLFIDNIFRFSQAGSEVSTLLGRMPSAVGYQPTLADEMGFLQERITSLKGRSITSLQAVYVPADDITDPAPHTAFAHLDARTVLDRKVADLGIYPAVVLLTHQV

SEQ ID NO: 174329 - protein, 290 aa, Unknown
  Bacterial polypetide isolated from the Sargasso Sea
WPIHREAPKFTDQSTETEILETGIKVIDLLAPYSKGGKIGLFGGAGVGKTVIIMELINNIAKAHGGFSVFAGVGERTREGNDLYHEMIESGVIKPDGKGSKAALVYGQMNEPPGARARVGLTGLTVAEYFRDKEGQDVLFFVDNIFRFTQAGSEVSALLGRIPSAVGYQPTLATDMGNLQERITTTGKGSITSVQAIYVPADDLTDPAPATSFSHLDATTVLSRQIAELGIYPAVDPLDSTSRILDPRIVGEEHYRVARQVQKILQTYKSLQDIIAILGMDELSEEDKLT

SEQ ID NO: 174330 - protein, 258 aa, Unknown
  Bacterial polypetide isolated from the Sargasso Sea
FAGVGERTREGNDLYHEMIESGVIKPEGTGSKAALVYGQMNEPPGARARVALSGLTVAEYFRDQEGQDVLFFVDNIFRFTQAGSEVSALLGRIPSAVGYQPTLATDMGNLQERITTTNKGSITSVQAIYVPADDLTDPAPATSFSHLDATTVLSRQIAEIGIYPAVDPLDSTSRILDPRIVGDEHYRVAREVQKVLQTYKSLQDIIAILGMDELSEEDKLTVARARKIQRFLSQPFFVAEVFTGSPGKLVDLESTIKG

SEQ ID NO: 174331 - protein, 275 aa, Unknown
  Bacterial polypetide isolated from the Sargasso Sea
MSKGIITQVIGAVVDVKFEGELPEILTALECKNGNNRLVLEVAQHLGESTARTIAMDATEGLKRGDEVVNTNAPIKVPVGPETLGRIINVVGEPIDEKGEVKTKENWPIHRPAPEFNDQSTETEILVTGIKVIDLLAPYAKGGKIGLFGGAGVGKTVLIMELINNVAKAHGGFSVFAGVGERTREGNDLYHEMMDSGVIKPEGPGSKAALVYGQMNEPPGARARVALTGLTVAEYFRDQEGQDVLFFVDNIFRFTPAGSEVSALLGRIPSAVGYQ

SEQ ID NO: 174332 - protein, 202 aa, Unknown
  Bacterial polypetide isolated from the Sargasso Sea
MQINPSEVTKILKEQIKKFGEKAEISEVGQVLSVGDGIARIYGLDNVQAGEMVEFSGGIKGMALNLESDNVGVVIFGDDRSIKEGDVVKRTGAIVDSPVGKNLLGRVVDALGNPIDGKGDLDKKIERRRVDVKAPGIIPRKSVNEPMQTGLKAIDSLIPIGRGQRELIIGDRQTGKTAVAIDTIINQKEINKTGDEKNKLYC

SEQ ID NO: 174333 - protein, 243 aa, Unknown
  Bacterial polypetide isolated from the Sargasso Sea
LIIYDDLSKQAVAYRQMSLLLRRPPGREAYPGDVFYLHSRLLERAAKLNDSKGGGSLTALPIIETQAGDVSAYIPTNVISITDGQIFLETELFNQGIRPAVNVGLSVSRVGSAAQTKAMKKVAGSIKLELAQYREMAAFAQFGSDLDASTQKLLNRGSKLTELLKQGQYSPMTVAEQVISIFCGVRGYLDDIALNDISEFEKKVLQKCKNDKPEIIQSIISSGKLEEEFEKKLIQLIKEIKGK

SEQ ID NO: 174334 - protein, 162 aa, Unknown
  Bacterial polypetide isolated from the Sargasso Sea
QIFLETELFNQGIRPAINVGLSVSRVGSSAQTKAMKKVSGSMKLELAQYREMAAFAQFGSDLDASTQQLLNRGSKLTELLKQKQYSPMTVAEQVISVFCGVKGYLDDIDLKDISEFENKIIERCKSEKPEIIESIQSSGKLEDDKEKLLVEVITKLKENFKS

SEQ ID NO: 174335 - protein, 115 aa, Unknown
  Bacterial polypetide isolated from the Sargasso Sea
MASLDDLKKRIASVKSTQKITKAMKMVAAAKLRRAQESAEKGRPYSKKMNNIILNLSNGILDKQNAPKLLTGSGNDKIHLCVVMTSDRGLCGGFNSNIIKKAKIYFAKLSEEGKD

SEQ ID NO: 174336 - protein, 167 aa, Unknown
  Bacterial polypetide isolated from the Sargasso Sea
MSKNIGKVSKVIGAVVDVEFSSKESTLPEIYDSLEIKREDGTILVLEVQSHIGENIVRTISMDSTDGLSRGTEVVATGNPIQMPIGKEVYGRLFNVVGDPIDGLEVLPKINDDGMSIHRQAPDFDQLSTSTEVLFTGIKVIDLIEPYAKGGKIGLFGGAGVGKTVLI

SEQ ID NO: 174337 - protein, 275 aa, Unknown
  Bacterial polypetide isolated from the Sargasso Sea
NDQSTETEILVTGIKVVDLLAPYAKGGKIGLFGGAGVGKTVLIMELINNVAKAHGGFSVFAGVGERTREGNDLYHEMIESGVIKPEGTGSKAALVYGQMNEPPGARARVALSGLTVAEYFRDQEGQDVLFFVDNIFRFTQAGSEVSALLGRIPSAVGYQPTLATDMGNLQERITTTNKGSITSVQAIYVPADDLTDPAPATSFSHLDATTVLSRQIAEIGIYPAVDPLDSTSRILDPRIVGDEHYRVAREVQKILQTYKSLQDIIAILGMDELSE

SEQ ID NO: 174338 - protein, 287 aa, Unknown
  Bacterial polypetide isolated from the Sargasso Sea
ITQIIGAVVDVKFDGELPEILTALECDNSGNRLVLEVAQHLGESSVRTIAMDATEGLKRGDEVTNTGAPIKVPVGPETLGRIINVIGEPIDEKGEVKTKENWPIHRSAPEFNDQSTETEILVTGIKVVDLLAPYAKGGKIGLFGGAGVGKTVLIMELINNVAKAHGGFSVFAGVGERTREGNDLYHEMIESGVIKPEGKGSKAALVYGQMNEPPGARARVALSGLTVAEYFRDQEGQDVLFFVDNIFRFTQAGSEVSALLGRIPSAVGYQPTLATDMGNLQERITTT

SEQ ID NO: 174339 - protein, 126 aa, Unknown
  Bacterial polypetide isolated from the Sargasso Sea
KAVAGTVRLELAQYNELKAFAQFGSDLDEATQKTLRRGAVLVEVLKQPQYQPAPIGLQVAMIFAATRGYLDEVEVEAIKGWEKAFSTYLGAQCQSLLKRVADGAKLKEIEQELVAAIEEHKKGYAA

SEQ ID NO: 174340 - protein, 335 aa, Unknown
  Bacterial polypetide isolated from the Sargasso Sea
IQVIGAVVDVQFEGDLPEILTALVVDNSGNKLILEVAQHLGENSVRTIAMDSTEGLKRGDQVKNTGSPISVPVGPETLGRIINVIGEPIDQKGEVKTKERWPIHREAPKFTDQSTETEILETGIKVIDLLAPYSKGGKIGLFGGAGVGKTVIIMELINNIAKAHGGFSVFAGVGERTREGNDLYHEMIESGVIKPEGKGSKAALVYGQMNEPPGARARVGLTGLTVAEYFRDKEGQDVLFFVDNIFRFTQAGSEVSALLGRIPSAVGYQPTLATDMGNLQERITTTGKGSITSVQSIYVPADDLTDPASATSFSHLGCNTVLSRPIAELGIYPSR

SEQ ID NO: 174341 - protein, 159 aa, Unknown
  Bacterial polypetide isolated from the Sargasso Sea
KELLGRVVDGLGNPIDGKGALDKGIKRSRVEVKAPGIIPRKSVSEPMQSGLKSVDSLVPIGRGQRELIIGDRQTGKTAVAIDTIINQKKINESNDEKQKLYCIYVAIGQKRSTVRQIEKSLEEAGAMEYTTIVAATASDAAPLQFLAPYTGCAMGEYFR

SEQ ID NO: 174342 - protein, 280 aa, Unknown
  Bacterial polypetide isolated from the Sargasso Sea
MQSGLKAIDSLVPIGRGQRELIIGDRQTGKTAVAVDTIINQKKINETGDEKQKLYCIYVAIGQKRSTVRQIQKTLEEAGAMDYTTIVAATASDAAPLQFLAPYTGCAMGEYFRDNGMHALIIYDDLSKQAVAYRQMSLLLRRPPGREAYPGDVFYLHSRLLERAAKLSDEHGGGSLTALPIIETQAGDVSAYIPTNVISITDGQIFLETNLFNQGIRPAINVGLSVSRVGSAAQTKAMKKVSGSMKLELAQYREMAAFAQFGSDLDASTQKLLNRGSKLT

SEQ ID NO: 174343 - protein, 94 aa, Unknown
  Bacterial polypetide isolated from the Sargasso Sea
MVSIRPDEISSILKQQITDYDQSVSVSNVGTVLQIGDGIARIYGLDQVMAGELLEFEDGTEGIALNLEDDNVGAVLMGEALGVQEGSNVKSTGK

SEQ ID NO: 174344 - protein, 305 aa, Unknown
  Bacterial polypetide isolated from the Sargasso Sea
IGRIIDGNGLPIDGKGPITTMTEYPLMGTPINPLERKRLKEPLDIGIRSINGLLSFAKGQRLGILAGTGVGKSVLMGMIARNTNADINVIALIGERGREVKEFIDENLGEEGLKRSIVIAAASDEPPLVRLQGAFIATTIAEYFRDQGQDVMLMMDSLTRFALAQREIGLSVGEPPTTRGFTPSVFSILPKLLERAGTSASEGSITALYTVLVEGDDLNEPISDAVRAILDGHIVLSRELASHNHYPAIDILNSISRLMIDVVTKEHQELSMKFKDFLATYKSAEDLINIGAYVKGSNPKIDMAI

SEQ ID NO: 174345 - protein, 245 aa, Unknown
  Bacterial polypetide isolated from the Sargasso Sea
EKMNNIILNLSNGISDKENAPKLLAGTGEEKTHLCVVMTSDRGLCGGFNTNIIKKAKQYFQKILKENKILKIITVGSKGYDQLKRQYKDNIIEKISFKDSKNINYFDADKVGKIIIDRFEKKEFDVCAIFYNQFKNVITQIPQEQQIIPLKSNEEKDVNSESSYEFEPEEDEILSNLLPKNISTQIFKAMLENSASEQGSRMSAMDNATRNAGEMVEKLTIQYNRSRQAAITKELIEIISGAESL

SEQ ID NO: 174346 - protein, 213 aa, Unknown
  Bacterial polypetide isolated from the Sargasso Sea
SEVSALLGRIPSAVGYQPTLATDMGALQERITTTNKGSITSVQAIYVPADDLTDPAPATSFSHLDATTVLNRAISEKGIYPAVDPLDSNSRILDPQVVGDDHYRVAREVQRVLQTYKSLQDIIAILGMDELSEEDKLTVARARKIEKFLSQPFFVAEVFTGSPGKYVELEDTIKSFDGLVKGEYDHLPEAAFYMVGGIEEALEKAKKLEAEAA

SEQ ID NO: 174347 - protein, 231 aa, Unknown
  Bacterial polypetide isolated from the Sargasso Sea
QMSLLLRRPPGREAYPGDVFYLHSRLLERAAKLSDEHGGGSLTALPIIETQGGDVSAFIPTNVISITDGQIFLETELFNQGIRPAINVGLSVSRVGSSAQTKAMKKVSGSMKLELAQYREMAAFAQFGSDLDASTQQLLNRGSKLTELLKQKQYSPMTVAEQVISVFCGVKGYLDDIDLKDVAEFESKIIEKCKSDKPEIIESILSSGKLEEDKEKLLVEVITQLKGNFKS

SEQ ID NO: 174348 - protein, 252 aa, Unknown
  Bacterial polypetide isolated from the Sargasso Sea
MYQGKATLVIYDDLTKQAQAYRQMSLLLKRPPGREAYPGDVFYLHSRLLERAAKLSDAMGGGSMTALPIIETQAGDVSAYIPTNVISITDGQIFLSADLFNSGLRPAINVGISVSRVGGAAQTKAIKKIAGTLKLELAQFDELAAFSQFASDLDEATQQQLERGKRLRELLKQPQFSPLNLAEQVAVVYAGVKGLIDEVPVEDVTKFATELREYLKLNKAEFIEEILKEKKLNDGLEATLKEVINEVKSSML

SEQ ID NO: 174349 - protein, 230 aa, Unknown
  Bacterial polypetide isolated from the Sargasso Sea
MSLLLRRPPGREAYPGDVFYLHSRLLERSAKLGDDHGNGSLTALPIIETQGGDVSAFIPTNVISITDGQIFLETELFYQGIRPAVNTGLSVSRVGSSAQTDSMKSVAGPVKLSLAQYREMAAFAQFGSDLDAATQQLLNRGARLTELMKQPQYSPLTNAEIVCLIFAGTNGYLDKIDVSEVGRFEAGLLTNLRGKHSDLLEYITKEDPKIKGEAANKISSVLDEFSADFA

SEQ ID NO: 174350 - protein, 157 aa, Unknown
  Bacterial polypetide isolated from the Sargasso Sea
ATSFAHLDATTVLSRQIAEIGIYPAVDPLDSTSRILDPRVVGDEHYRVARDVQRILQSYKSLQDIIAILGMDELSEEDKLVVARARKIQRFLSQPFFVAEVFTGSPGKLVDLESTIKGFDAICKGEYDHLPEAAFYMVGTIEEAIEKAEKMSKEVAA

SEQ ID NO: 174351 - protein, 221 aa, Unknown
  Bacterial polypetide isolated from the Sargasso Sea
MEKIRVEEVSSIIAEKIKNYGKKIELQEVGTVLSVGDGIARVYGLEHAVAGELVEFSCGVKGVVLNLEEDNVGISVLGESQKICEGDSVKRLKEINSVPLGESLLGRVVDALGNPVDGKGPLNLETSGVVEVKAPGIIDRKSVDEPLQTGIKCIDAMTPIGRGQRELIIGDRQTGKTALAIDTIINQKNKDVICFYVAIGQKASTVAQIVSKLEESGCYEV

SEQ ID NO: 174352 - protein, 132 aa, Unknown
  Bacterial polypetide isolated from the Sargasso Sea
MRKGQITQVIGAVVDVKFDGELPEILTALECKNSGNRLVLEVAQHLGESSVRTIAMDATEGLKRGDIVTDTGAPIKVPVGPETLGRIINVIGEPIDEKGEVKTKENWPIHRSAPEFNDQSTETEILVTGIKV

SEQ ID NO: 174353 - protein, 274 aa, Unknown
  Bacterial polypetide isolated from the Sargasso Sea
MSINPSEVTKLLKDQIKNFGEKAEVSEIGKVLSVGDGIARVYGLDNVQAGEMVEFEDGSKGMALNLENDNVGVVIFGDDRKIKEGDTIKRTNAIVDVPVGKELLGRVVDGLGNPIDGKGAISSKERKRVEVKAPGIIPRQSVSEPMQTGLKSIDSLIPVGRGQRELIIGDRQTGKTAVAIDAIINQKKINESSDEKKKLYCVYVAIGQKRSTVAQITKTLEEAGALKYTTIVAATASDSAPLQFLAPYTGCTIGEYFRDNGMHALIVYDDCQNR

SEQ ID NO: 174354 - protein, 233 aa, Unknown
  Bacterial polypetide isolated from the Sargasso Sea
MSQKVGKVSQIIGPVVDVSFDTANTELPKIYDSLEIKKDDGSVLVLEVQSHVGEDMVRTISMDSTDGLQRGADVVSTGNPIQMPIGKDIYGRLFNVIGDAIDGMEDLPKSGKSGLPIHREAPPFEQLSTSTEVLFTGIKVIDLIEPYAKGGKIGLFGGAGVGKTVLIQELINNIAKGHGGLSVFAGVGERTREGNDLLREMLESGIIDYGKEFMESMENGGWDLSKVDKKALE

SEQ ID NO: 174355 - protein, 165 aa, Unknown
  Bacterial polypetide isolated from the Sargasso Sea
AVYVPADDLTDPSPATTFAHLDATVVLSRQISELGIYPAVDPLDSTSRQLDPFVVGDDHYEVAQGVQKILQRYNELKDIIAILGMDELSEEDKGLVARARKAQRFLSQPFFVAEIFTGTPGKYVSLEDTIKAFKGILNGDYDHLPEQAFYMVGTIEEAVEKAKTL

SEQ ID NO: 174356 - protein, 293 aa, Unknown
  Bacterial polypetide isolated from the Sargasso Sea
GIARVHGLDNVQAGEMVEFPGGIRGMALNLESDNVGVVIFGSDRDIKEGDVVKRTNSIVDVPAGDALLGRVVDGLGNPLDGKGPIKGVERRVADVKAPGIIPRKSVHEPMATGLKSVDAMIPIGRGQRELIIGDRQTGKTAVALDTILNQKSYNDAAGDDESKKLYCIYVAVGQKRSTVAQLVKKLEESGAIEYSIVVAATASDPAPMQFLAPYSATSMAEYFRDNGRHALIIYDDLSKQAVAYRQMSLLLRRPPGREAYPGDVFYLHSRLLERSAKLNEDNGAGSLTALPVI

SEQ ID NO: 174357 - protein, 230 aa, Unknown
  Bacterial polypetide isolated from the Sargasso Sea
MSLLLRRPPGREAYPGDVFYLHSRLLERAAKLSDEHGGGSLTALPIIETQGGDVSAFIPTNVISITDGQIFLETELFNQGIRPAINVGLSVSRVGSSAQTKAMKKVSGSMKLELAQYREMAAFAQFGSDLDASTQQLLNRGSKLTELLKQKQYSPMTVAEQVISVFCGVKGYLDDIDLKDVAEFESKIIEKCKSDKPEIIESILTSGKLEEDKEKLLVEVITQLKGNFKS

SEQ ID NO: 174358 - protein, 204 aa, Unknown
  Bacterial polypetide isolated from the Sargasso Sea
MSDTGVIKQIIGAVIDVEFDKAQIPNIYDALVVSENNLVLETQQQLGDGVVRTVAMGTTEGLKRGLDVENTKAPISVPVGEATLGRIMNVLGDPIDMKGEVKTKERMPIHRKPPEYVDLSDSNEILETGIKVIDLVCPFAKGGKVGLFGGAGVGKTVNMMELIRNIAIEHSGYSVFAGVGERTREGNDFYHEMTDSNVLDKVSL

SEQ ID NO: 174359 - protein, 168 aa, Unknown
  Bacterial polypetide isolated from the Sargasso Sea
ISITDGQIFLETELFNQGIRPAVNVGLSVSRVGSAAQTKAMKKVAGSIKLELAQYREMAAFAQFGSDLDASTQKLLNRGSKLTELLKQNQYSPMTVAQQVIAVFSGVKGFLDDVDLPKIKDLEKNIYEEIKSSNPEIIDNINSTGKLEEETEKKLKLIIEQFKKKNSK

SEQ ID NO: 174360 - protein, 294 aa, Unknown
  Bacterial polypetide isolated from the Sargasso Sea
GVGKTVNIQELIRNIAYEHSGYSVFAGVGERTREGNDMYHEMIEGGVLDKVALVYGQMNEPPGNRLRVALSGLTMAENFRDEGRDVLLFVDNIYRYTLAGTECSALLGRMPSAVGYQPTLAEEMGVLQERIASTKTGSITSVQAVYVPADDLTDPSPATTFAHLDANVVLSRQIASLGIYPAVDPLDSNSRQLEPGIVGQEHYDVANSVKQILNRYKELKDIIAILGMDELSEDDKLVVARARKIERFLSQPFFVAEVFTQVPGKYVPLSETIRGFKGIVNGDYDDIPEQAFLM

SEQ ID NO: 174361 - protein, 175 aa, Unknown
  Bacterial polypetide isolated from the Sargasso Sea
TSVQAIYVPADDLTDPAPATSFSHLDATTVLSRQIAELGIYPAVDPLDSTSRILDPRIVGDEHYRVAREVQKILQTYKSLQDIIAILGMDELSEEDKLTVARARKIQRFLSQPFFVAEVFTGSPGKLVDLESTIKGFEAICKGEYDHLPESAFYMVGTIEEAVEKAEKMAKEAAA

SEQ ID NO: 174362 - protein, 300 aa, Unknown
  Bacterial polypetide isolated from the Sargasso Sea
DRQTGKTAVAIDTIINQKKINESDDEKKKLYCIYVAIGQKRSTVAQILKTLQDAGAMDYTIIVSATASDPAPLQFLAPYTGCTFGEFFRDNGMHALIIYDDLSKQAVAYRQMSLLLRRPPGREAYPGDVFYLHSRLLERAAKLNDDNGGGSLTALPIIETQAGDVSAYIPTNVISITDGQIFLGTELFNQGIRPAVNVGLSVSRVGSAAQTKAMKKVAGSIKLELAQYREMAAFAQFGSDLDASTQKLLNRGSKLTELLKQDQYSPMTVAEQVVTIYAGVKGYLDSIEIGQIRSFEEGLL

SEQ ID NO: 174363 - protein, 169 aa, Unknown
  Bacterial polypetide isolated from the Sargasso Sea
MEKNIGIVTQIIGAVVDVQFNDELPEILNALETENNGNRLVLEVAQHLGESTVRAVAMDATEGLVRGAKVTDLGGPISVPVGNETLGRILNVVGDPVDEKGPVKASEKRPIHQPAPEFSEQSTETEILVTGIKVIDLLAPYAKGGKIGLFGGAGVGKTVLIMELINNIA

SEQ ID NO: 174364 - protein, 190 aa, Unknown
  Bacterial polypetide isolated from the Sargasso Sea
EEMGVLQERITSTKTGSITSIQAVYVPADDLTDPSPATTFAHLDATVVLSRRIAELGIYPAVDPLDSTSRQLDPLVVGQEHYEVAQRVQGVLQRYKELKDIIAILGMDELSDEDKNTVSRARKVEKFLSQPFFVAEVFTGSPGKYVSVKDTIQGFKEILDGVHDDVPEQAFYMVGSIDEVLEKAKTVKND

SEQ ID NO: 174365 - protein, 285 aa, Unknown
  Bacterial polypetide isolated from the Sargasso Sea
MADANIQNISEQLKTKIKGLESNFKSDEVGTVTSVGDGIAKIYGLDQAMAGELVSFDNGIIGLVLNLEEDSVGVAIFGDDSSVLEGDTVKRTGDIAQVGVGNSMLGRVVNGLGQPIDGKGDIQATEFKPVEIKAPGVIARKSVNEPLQTGIKAIDSMIPIGRGQRELILGDRQTGKTAIAVDTIINQKGKGVNCIYVAIGQKQSTVAQVVEKLKENGAFEYTTVVAANASDPAPYQFLSPFTGCAIGEYFRDNGQHALVIYDDLTKHAYSYRQLSLLLRRPPGRE

SEQ ID NO: 174366 - protein, 272 aa, Unknown
  Bacterial polypetide isolated from the Sargasso Sea
MVSIRPDEISSILKQQITDYDQSVNVSNVGTVLQIGDGIARIYGLDQVMAGELLEFEDGTEGIALNLEDDNVGAVLMGEALGVQEGSNVKSTGKIASVPVGEAMKGRVVNPLGQPIDGKGEIPTSDNRLIEEMAPGIIKRRSVHEPMQTGITSIDAMIPVGRGQRELIIGDRQTGKTAIAIDTIINQKGQDVVCVYVAIGQKSASVANVVEVLREKGALEYTVVVSAGASEAAALQYLAPYTGAAIAEHFMYQGKATLVIYDDLTKQAQAYR

SEQ ID NO: 174367 - protein, 99 aa, Unknown
  Bacterial polypetide isolated from the Sargasso Sea
MKEKGKIIQVIGAVVDVQFEGELPEILTALEVDNSGNKLILEVAQHLGENGVRTIAMDSTEGLKRGDAVQNTGAPISVPVGPETLGRIINVIGQPIDQK

SEQ ID NO: 174368 - protein, 202 aa, Unknown
  Bacterial polypetide isolated from the Sargasso Sea
AVGYQPTLATDMGSLQERITSTNKGSITSVQAIYVPADDLTDPAPATSFAHLDATTVLSRQIAELGIYPAVDPLDSTSRILDPRVVGDEHYQVARNVQAVLQTYKSLQDIIAILGMDELSEEDKLTVARARKIQRFMSQPFFVAEVFTGTPGKYVELEDTIKGFDAICKGEYDHLPEAAFYMVGTIEEAIQKAEKMAEEAAA

SEQ ID NO: 174369 - protein, 153 aa, Unknown
  Bacterial polypetide isolated from the Sargasso Sea
PFPLGCTTVLNRAISEKGIYPAVDPLDSTSRILDPQVVGDDHYRVAREVQRVLQTYKSLQDIIAILGMDELSEEDKLTVARARKIEKFLSQPFFVAEVFTGSPGKYVDLEDTIKSFDGLVKGEYDHMPEAAFYMVGGIDEAIEKAKKLEAEAA

SEQ ID NO: 174370 - protein, 270 aa, Unknown
  Bacterial polypetide isolated from the Sargasso Sea
MQYIAPYAGAAMGEYFRDNGKHALIVYDDLSKQAVAYRQMSLVLRRPPGREAFPGDVFYLHSRLLERSSKLSESLGGGSLTALPIIETQEGDVSAYIPTNVISITDGQIFLETNLFNSGVRPAINVGLSVSRVGGNAQIKAMKSIAGTLRLDLANYREMEAFAKFGSDLDKATIAQLTRGERMVEILKQNQYVPMNIDKQVAIIYAGSKGYLDDLEIERVLEFESGLFEYLDSNASSALSSIIMEGLISDETEKLLDKAINDYKQAFITE

SEQ ID NO: 174371 - protein, 292 aa, Unknown
  Bacterial polypetide isolated from the Sargasso Sea
GINPSEVTKILKEQIKNFGEKAEVAEVGQVLSVGDGIARIYGLDNVQAGEMVEFSDGSKGMALNLESENVGVVIFGDDRNVKEGDVVKRTGNIVDTPVGKELLGRVVDGLGNPIDGKGPFDKNIKKTRVEVKAPGIIPRQSVNEPMQTGLKSIDSLVPIGRGQRELIIGDRQTGKTAVAVDAIINQKKINESGDEKQKLYCIYVAVGQKRSTVRQIQKTLEEAGAMEYTTIVAATASDSAPLQFLAPYTGCAMGEYFRDNGMHALIIYDDLSKQAVAYRQMSLLLRRPPGRE

SEQ ID NO: 174372 - protein, 279 aa, Unknown
  Bacterial polypetide isolated from the Sargasso Sea
MASLDDLKKRISSVKSTQKITKAMKMVAAAKLRRAQENAEKGRPYSEKMNKIIINLSSGISDKENAPKLLAGTGEEKIHLCVVLTSDRGLCGGFNTNIIKKAKQYFQKILKENKILKIITVGSKGYDQLKRQYKENIIDKISFKDSKNINYFDADKVGKIIINRFENKEFDVCAIFYNQFKNVITQIPQEQQIIPLKSNKENETSSEDNYEFEPEEDEILSNLLPKNISTQIFKAMLENSASEQGSRMSAMDNATRNAGEMVDKLTIQYNRSRQAAITK

SEQ ID NO: 174373 - protein, 301 aa, Unknown
  Bacterial polypetide isolated from the Sargasso Sea
NGKIIQVIGAVVDVQFEGELPEILTALEVENTGNKLILEVAQHLGENGVRTIAMDSTEGLKRGDQVHNTGAPISVPVGPETLGRIINVIGQPIDQKGEVKTKEKWPIHREAPKFTDQSTETEILETGIKVIDLLAPYSKGGKIGLFGGAGVGKTVIIMELINNIAKAHGGFSVFAGVGERTREGNDLYHEMIESGVIKPDGKGSKAALVYGQMNEPPGARARVGLTGLTVAEYFRDKEGQDVLFFVDNIFRFTQAGSEVSALLGRIPSAVGYQPTLATDMGNLQERITTTGKGSITSVQAI

SEQ ID NO: 174374 - protein, 144 aa, Unknown
  Bacterial polypetide isolated from the Sargasso Sea
PGISVSRVGGAAQTKIMKKLSGGVRTALAQYRELAAFSQFASDLDDATKAQLARGIRITELIKQKQYSPMSVAQQSLSIFAADRGYMDDVEVEKIGSFEEALHGYFTSEKADLEKSINDTGDWNDDIEKQFTEVVEQFKKTQTF

SEQ ID NO: 174375 - protein, 183 aa, Unknown
  Bacterial polypetide isolated from the Sargasso Sea
GLFGGAGVGKTVLIMELINNVAKAHGGFSVFAGVGERTREGNDLYHEMIDSGVIKPDGDGSKAALVYGQMNEPPGARARVALTGLTVVEYFRDQEGQDVLFFVDNIFRFTQAGYEVSALLGRIPSAVGYQPTLATDMGNLQERITTTNKGSITSVQAIYVPADDLTDPAPATSFAHLDATTVL

SEQ ID NO: 174376 - protein, 313 aa, Unknown
  Bacterial polypetide isolated from the Sargasso Sea
ELLGRVVDSLGYPIDGKGEIESQKSEPIEKIAPGVIARQSVDQPVQTGLKSIDSMVPIGRGQRELIIGDRQTGKTAVAVDAIINQKGTGIKCIYVAIGQKASSINAVIRKLEEHDAMEHTIIVAATASDSAAMQYIAPYSGCAMGEYFRDRGEDALIIYDDLTKQAWAYRQVSLLLRRPPGREAYPGDVFYLHSRLLERAARVNSEHIEKITNGEVKGKTGSLTALPIIETQAGDVSAFVPTNVISITDGQIYLETDLFNSGFRPAINAGLSVSRVGGAAQTKIIKKLGGGVRLALAQYRELAAFSQICVRFG

SEQ ID NO: 174377 - protein, 190 aa, Unknown
  Bacterial polypetide isolated from the Sargasso Sea
MGSMQERITTTNKGSITSVQAIYVPADDLTDPAPATSFAHLDATTVLSRQIAELGIYPAVDPLDSTSRILDPRILGDEHYEVARSVQEVLQRYKSLQDIIAILGMDELSEEDKLVVARARKIQRFLSQPFHVAEIFTGFPGVLVSLEDTIKGFKGLVAGDYDDLPEAAFYMVGTIDDAVEKAKKLAAEAA

SEQ ID NO: 174378 - protein, 286 aa, Unknown
  Bacterial polypetide isolated from the Sargasso Sea
INPIHRPAPRHEDLATSTEILVTGIKVVDLMEPYTKGGKTGLFGGAGVGKTVLIQELIRNIATEHGGYSVFAGVGERTREGNDLYNEMTESGVIEKTTMVFGQMNEPPGARLRVALSGLAMAEYFRDDEGRDVLLFIDNIFRFTQAGSEVSALLGRMPSAVGYQPTLSTEMGDLQERITSTKNGSITSVQAVYVPADDLTDPAPATAFAHLDATSVLERKIAELGIYPAVDPLASTSRILDPRIIGDRHYDTAQKVQAVLQQYKDLQDIIAILGMDELSDDDKLTV

SEQ ID NO: 174379 - protein, 262 aa, Unknown
  Bacterial polypetide isolated from the Sargasso Sea
AYSGCAMGEYFRDTGQDALIVYDDLSKQAVAYREISLLLRRPPGREAFPGDVFYLHSRLLERAARVNAEYVEKITEGKVKGKTGSLTALPIIETQAGDVSAFVPTNVISITDGQIFLETDLFNSGVRPAIDPGLSVSRVGGAAQTKIIKKLSGGIRTDLAQYRELAAFSQFASDLDDATKEQLEHGKRITELLKQKQYSPMSVADQAMSLYAADKGYMKDVDIDKVGDFESALLAYFESEKSDLKKQINDTGDWDDDIENPV

SEQ ID NO: 174380 - protein, 210 aa, Unknown
  Bacterial polypetide isolated from the Sargasso Sea
GSEVSALLGRIPSAVGYQPTLGTEMGAMQERITSTKDGSITSIQAIYVPADDYTDPAPATTFAHLDATTELSRPIAELGIYPAVDPLSSSSTILTPDVVGELHYNTAKEVKRILQRYKELQDIIAILGMDELTEDDKLLVSRARKIQKFMSQPFHVAEVFTGFPGVFVEIEDTVKSFKAIIDGEVDDLPEQAFYMVGGIDQVREKAKKLG

SEQ ID NO: 174381 - protein, 104 aa, Unknown
  Bacterial polypetide isolated from the Sargasso Sea
MKKGKITQVIGAVVDVKFDEKLPEILTALECNNAGNRLVLEVAQHLGESSVRTIAMDATEGLKRGDEVTDTGAPIKIPVGPETLGRIINVIGEPIDEKGEVKNK

SEQ ID NO: 174382 - protein, 239 aa, Unknown
  Bacterial polypetide isolated from the Sargasso Sea
AGVGKTVNMMELIRNIAIEHSGYSVFAGVGERTREGNDFYHEMTDSNVLDKVSLVYGQMNEPPGNRLRVALTGLTMAEKFRDEGRDVLLFVDNIYRYTLAGVEVSALLGRMPSAVGYQPTLAEEMGVLQERITSTKTGSITSIQAVYVPADDLTDPSPATTFAHLDATVVLSRRIAELGIYPAVDPLDSTSRQLDPNIVSQEHYDVAQRVQGVLQRYKELKDIIAILGMDELSDDDKNT

SEQ ID NO: 174383 - protein, 262 aa, Unknown
  Bacterial polypetide isolated from the Sargasso Sea
VKEGDVVKRTGNIVDTPVGKELLGRVVDGLGNPIDGKGPLDKGIKKSRVEVKAPGIIPRQSVSEPMQTGLKSIDSLVPIGRGQRELIIGDRQTGKTAVAVDAIINQKKINESGDEKQKLYCIYVAVGQKRSTVRQIQKTLEEAGAMEYTTIVAATASDSAPLQFLAPYTGCAMGEYFRDNGMHALIIYDDLSKQAVAYRQMSLLLRRPPGREAYPGDVFYLHSRLLERAAKLSDEHGGGSLTALPIIETQGGDVSAFIPTNV

SEQ ID NO: 174384 - protein, 271 aa, Unknown
  Bacterial polypetide isolated from the Sargasso Sea
IESGVIDLEGKESKCALVYGQMNEPPGARARVALTGLTVAEYFRDMEGQDVLFFVDNIFRFTQAGSEVSALLGRIPSAVGYQPTLATDMGSLQERITSTNKGSITSVQAIYVPADDLTDPAPATSFAHLDATTVLSRQIAELGIYPAVDPLDSTSRILDPRVVGDEHYRVARNVQAVLQTYKSLQDIIAILGMDELSEEDKLTVARARKIQRFMSQPFFVAEVFTGTPGKYVELEDTIKGFDAICKGEYDHLPEAAFYMVGTIEEAIQKAE

SEQ ID NO: 174385 - protein, 124 aa, Unknown
  Bacterial polypetide isolated from the Sargasso Sea
IRILDPQVVGEDHYRVAREVQRVLQTYKSLQDIIAILGMDELSEEDKLTVARARKIEKFLSQPFFVAEIFTGSPGKYVDLEDTIKSFDGLVKGEYDHMPEAAFYMVGGIDEAIEKSKKLEAEAA

SEQ ID NO: 174386 - protein, 242 aa, Unknown
  Bacterial polypetide isolated from the Sargasso Sea
AYRQISLLLRRPPGREAYPGDVFYLHSRLLERCAKVSDELGGGSLTGLPIIETKAGDVSAFIPTNVISITDGQIYLESELFYSGIRPAVNPGTSVSRVGGAAQIKAMKKVAGPLRINLAQFRELEAFAEFGSDLDAASQAQLDRGRRVVELLKQQQYEPVAVEYQVVTLFAVTEGYLDKVPEEDMVSTEEGLHEYIDTRHPEILETIRDTGDFAEDELKNAVTAFVKTIVTVEEEVTTEEES

SEQ ID NO: 174387 - protein, 240 aa, Unknown
  Bacterial polypetide isolated from the Sargasso Sea
MEIRAAEISAILKKQIDNFNSDVEISEVGQVLSVGDGIARIHGLDQVQAGEMVEFIDGTRGMALNLEDDNVGVVIFGNDRNIKEGETVKRTGAIVDVPVGKELLGRVVDPLGNPIDGKGDIKATERRMVDVKAPGIIPRKSVHEPMQTGLKALDSLVPVGRGQRELIIGDRQTGKTAVAIDTIINQKKNWDSGDETKRLYCIYVAIGQKRSSVAQVVKTLEDAGAMEYTIVVSATASEPA

SEQ ID NO: 174388 - protein, 283 aa, Unknown
  Bacterial polypetide isolated from the Sargasso Sea
MRVLEKETREGNDLYHEMIESGVIKPDGPGSKAALVYGQMNEPPGARARVALTGLTVAEYFRDQEGQDVLFFVDNIFRFTQAGSEVSALLGRIPSAVGYQPTLATDMGNLQERITTTNKGSITSVQAIYVPADDLTDPAPATSFSHLDATTVLSRQIAELGIYPAVDPLDSTSRILDPRIVGDEHYRVAREVQKILQTYKSLQDIIAILGMDELSEEDKLTVARARKIQRFLSQPFFVAEVFTGSPGKLVELDSTIKGFDAICKGEYDHLPEAAFYMVGTIDE

SEQ ID NO: 174389 - protein, 172 aa, Unknown
  Bacterial polypetide isolated from the Sargasso Sea
MPSLDDLRKRITSVKSTQKITKAMKMVAAAKLRKAQEMAEKGRPYSDKMNSIIQNLSKAITDPSNAPKLLVGSGGDKTHLCVVMTADRGLCGGFNTNIVKQAKNYFKKILKDSKTLKIITVGTKGLDQLKREYGKYIIKKIDFKNKKQTSFEDASLVGDEIVKLFKNNEFDK

SEQ ID NO: 174390 - protein, 88 aa, Unknown
  Bacterial polypetide isolated from the Sargasso Sea
ILGIEDYQMTINLQYQELDKIQRFLTQPFSVAEVFTGSPGKYVSVRDTVQGFKEILEGIHDELPEQAFYMVGTIDEAVEKGKQMAASN

SEQ ID NO: 174391 - protein, 308 aa, Unknown
  Bacterial polypetide isolated from the Sargasso Sea
QQQLGDGIVRTLAMGISDGLARGLEVTNTGAPISIPVGEETLGRIVDVLGNPIDEKGPVNAQEHMAIHRAAPTYEDQVGGNEVLETGIKVIDLICPFARGGKVGLFGGAGVGKTVTMLELIRNIAIEHSGLSVFAGVGERTREGNDFYYEMEEAGVLDKISLVFGQMNEPPGNRLRVALTGLTMAEKFRDEGRDVLLFVDNIYRYTLAGTEVSALLGRMPSAVGYQPTLAEEMGVLQERITTTKTGSITSVQAVYVPADDLTDPSPATTFAHLDSTVTLSRAITDLGIYPAVDPLDSTSRQLDPLVVG

SEQ ID NO: 174392 - protein, 115 aa, Unknown
  Bacterial polypetide isolated from the Sargasso Sea
DEHYRVAREVQKILQTYKSLQDIIAILGMDELSEEDKLVVARARKIQRFLSQPFFVAEVFTGSPGKLVDLDSTIKGFAAICKGDYDHLPEAAFYMVGTIEEAIEKADKMAKEAAA

SEQ ID NO: 174393 - protein, 271 aa, Unknown
  Bacterial polypetide isolated from the Sargasso Sea
MIESGVIKTNEAGSKAALVYGQMNEPPGARARVALTGLTVAEYFRDQEGQDVLFFVDNIFRFTQAGSEVSALLGRIPSAVGYQPTLATDMGNLQERITTTNKGSITSVQAIYVPADDLTDPAPATSFAHLDATTVLSRQIAEIGIYPAVDPLDSTSRILDPRIVGDEHYRVAREVQKVLQTYKSLQDIIAILGMDELSEDDKLIVARARKIQRFLSQPFFVAEVFTGSPGKLVDLESTIKGFDAICKGEYDHLPEAAFYMVGTIEEAIEKS

SEQ ID NO: 174394 - protein, 135 aa, Unknown
  Bacterial polypetide isolated from the Sargasso Sea
AAQTKSMKKMQGPVKLELAQYREMAAFAQFASDLDASTRQLLDRGVRLVELLKQGQYSPLTVPEQVVSVYAGVKGYLDKIDVKDVVRFESEVHEEVRANHAELLESIAKEKELSSANEEKLKSFLDAFLNKFQSK

SEQ ID NO: 174395 - protein, 276 aa, Unknown
  Bacterial polypetide isolated from the Sargasso Sea
KAHGGFSVFAGVGERTREGNDLYHEMIESGVIKTNEAGSKAALVYGQMNEPPGARARVALTGLTVAEYFRDQEGQDVLFFVDNIFRFTQAGSEVSALLGRIPSAVGYQPTLATDMGNLQERITTTNKGSITSVQAIYVPADDLTDPAPATSFAHLDATTVLSRQIAEIGIYPAVDPLDSTSRILDPRIVGDEHYRVAREVQKVLQTYKSLQDIIAILGMDELSEEDKLIVARARKIQRFLSQPFFVAEVFTGSPGKLVDLESTIKGFDAIVRESMI

SEQ ID NO: 174396 - protein, 319 aa, Unknown
  Bacterial polypetide isolated from the Sargasso Sea
EVKAPGIIPEKSVNEPMQTRLKAIDSLIPIGRGQRELIIGDRQTGKTAVAIDTIINQKKINESNDEKKKLYCIYVAIGQKRSTVAQILKTLQDAGAMEYTIIVSATASDPAPLQFLAPYTGCTFGEFFRDNGMHALIIYDDLSKQAVAYRQMSLLLRRPPGREAYPGDVFYLHSRLLERAAKLNDDNGGGSLTALPIIETQAGDVSAYIPTNVISITDGQIFLGTELFNQGIRPAVNVGLSVSRVGSAAQTKAMKKVAGSIKLELAQYREMAAFAQFGSDLDASTQKLLNRGSKLTELLKQNQYSPMTVAEQVVVIYAG

SEQ ID NO: 174397 - protein, 220 aa, Unknown
  Bacterial polypetide isolated from the Sargasso Sea
MEINPSEVTKILKEQIKKFGDKAEITEVGQVLSVGDGIARVYGLDNVQAGEMVEFVDGSKGMALNLESENVGVVIFGDDKAIKEGDTVKRTGEIVDTPVGKELLGRVVDGLGNPIDGKGALDKNVKKSRVEVKAPGIIPRKSVSEPMQSGLKAIDSLVPIGRGQRELIIGDRQTGKTAVAVDTIINQKKINESGDEKQKLYCIYVAIGQKRSTVRQIQKT

SEQ ID NO: 174398 - protein, 327 aa, Unknown
  Bacterial polypetide isolated from the Sargasso Sea
GKGPIDAKQRGRVEVKAPGIMPRKGVHEPMQTGLKAIDSLIPVGRGQRELIIGDRQTGKTAIAIDAFINQKSVNDAAGDDDSKKLFCIYVAVGQKRSTVAQIVKTLEDYGAMEYSIVIASTASEPAPMQFLAPYAGCTMGEYFRDNGMHALIVYDDLSKQAVAYRQMSLLLRRPPGREAYPGDVFYIHSRLLERAAKMNDENGAGSLTALPVIETQAGDVSAYIPTNVISITDGQIFLETELFYRGIRPAVNVGLSVSRVGSAAQIKAMKQVAGRIKLELAQYREMAAFAQFASDLDPVTQRLLARGVRLTEVLKQGSYAPLTVEEQ

SEQ ID NO: 174399 - protein, 245 aa, Unknown
  Bacterial polypetide isolated from the Sargasso Sea
MIPLQCNFIAPYSGCSMGEYYRDRGEDALIIYDDLTKQAWAYRQISLLLRRPPGREAYPGDVFYLHSRLLERAARVSANYVEKFTEGKVKGKTGSLTALPVIETQAGDVSAFVPTNVISITDGQIFLETDLFNSGIRPAMNPGISVSRVGGAAQTKIIKKLGGGIRIALAQYRELAAFAAFASDLDDATRAQLEHGQRVTELMKQKQYSPLSIAEMGVSLFAANEGFLEDIELNKVLDFESALLA

SEQ ID NO: 174400 - protein, 213 aa, Unknown
  Bacterial polypetide isolated from the Sargasso Sea
MTINPSEVTKLLKDQIKNFGEKAQVSEIGKVLSVGDGIARVFGLDNVQAGEMVEFEDGSKGMALNLENDNVGVVIFGDDRNIKEGDTIKRTKAIVDVPVGKELLGRVVDGLGNPIDGKGALKVKNRKRVEVKAPGIIPRQSVNEPMQTGLKSIDSLIPIGRGQRELIIGDRQTGKTAVAIDAIINQKKINESSDEKKKLYCVYVAIGQKRSTV

SEQ ID NO: 174401 - protein, 228 aa, Unknown
  Bacterial polypetide isolated from the Sargasso Sea
SGIEVGVHYYWDIAGISLHGEVFIISWLVIFLILGAAFLGTSNLEQIPKGWQNFMESVLEFTTDIARNQLGESFYRPWVPFVSTLFLFIFGCNWAGALIPWKVISLPEGELAAPTNDINTTVALALLVSVTYFYAGIRKKGLGYFGRYLQPTPILLPINILEDFTKPLSLSFRLFGNTLADELTIAVITLLVPLFIPLPIMGLGIFASSVQALIFSTLAAAYIAEAVE

SEQ ID NO: 174402 - protein, 262 aa, Unknown
  Bacterial polypetide isolated from the Sargasso Sea
MSNGVVTQIIGAVIDVEFDRENIPNVYEALNIVGLETVLEVQQQLGDGIVRTIAMGSTEGLKRGLEVVRTNAPISVPVGQETLGRIMDVLGNPIDEKGDIGEKERQPIHKSPPSYTDQAGSNELLETGIKVIDLMCPFAKGGKVGLFGGAGVGKTVNMMELIRNIAIEHSGFSVFAGVGERTREGNDFYHEMTESNVLDKVSLVYGQMNEPPGNRLRVALTGLTIAEKFRDEGRDVLLFIDNIYRNTLAGVEVSALLGRMPS

SEQ ID NO: 174403 - protein, 207 aa, Unknown
  Bacterial polypetide isolated from the Sargasso Sea
RKSVSEPMQTGLKSIDSLVPIGRGQRELIIGDRQTGKTAVAVDAIINQKKINESNDEKQKLYCVYVAIGQKRSTVRQIEKTLEEAGAMEYTTIVAATASDAAPLQFLAPYTGCAMGEYFRDNGMHALIIYDDLSKQAVAYRQMSLLLRRPPGREAYPGDVFYLHSRLLERAAKLSDEHGGGSLTALPIIETQGGDVSAFIPTNVISI

SEQ ID NO: 174404 - protein, 177 aa, Unknown
  Bacterial polypetide isolated from the Sargasso Sea
MRKGKITQIIGAVVDVKFDGELPEILTALECKNSGNRLVLEVAQHLGESSVRTIAMDATEGLKRGDEVIDTGAPIKVPVGPGTLGRIINVIGEPIDEKGEVKTKENWPIHRSAPEFNDQSTETEILVTGIKVVDLLAPYAKGGKIGLFGGAGVGKTVLIMELINNVAKAHGGFSVFA

SEQ ID NO: 174405 - protein, 178 aa, Unknown
  Bacterial polypetide isolated from the Sargasso Sea
ITSTKTGSITSIQAVYVPADDLTDPSPATTFAHLDATVVLARSIAELGIYPAVDPLDSNSRQLDPGIVGQEHYDTARAVQQVLQRYKELQDIIAILGMDELSEEDKLTVQRARKIQRFLSQPFFVAEVFTGSPGQYVSLRDSIKAFQGIVAGDYDDLPEQAFYMVGTIEEAVEKAKSM

SEQ ID NO: 174406 - protein, 134 aa, Unknown
  Bacterial polypetide isolated from the Sargasso Sea
GAAQTKAMKKVAGSIKLELAQYREMAAFAQFGSDLDASTQRLLNRGARLTELLKQPQFSPMPVEEQVVSIFAGTNGYLDKIAVDQVTDYEAAMLSFMRSDHPQVLAEIRDTGKFEDGTRDKLKTALDTFAKQFA

SEQ ID NO: 174407 - protein, 230 aa, Unknown
  Bacterial polypetide isolated from the Sargasso Sea
RKGNITQVIGAVVDVKFDGDLPEILTALECKNGDSRLVLEVAQHLGESSVRTIAMDATEGLKRGDEVIDTGAPIKVPVGPGTLGRIINVVGEPIDEKGQVKTKESWPIHRAAPEFNDQSTETEILVTGIKVIDLLAPYAKGGKIGLFGGAGVGKTVIIMELINNIAKAHGGFSVFAGVGERTREGNDLYHEMIESGVIKPEGNGSKAALVYGQMNEPPGARARVALTGLT

SEQ ID NO: 174408 - protein, 254 aa, Unknown
  Bacterial polypetide isolated from the Sargasso Sea
YFRDQGKDVCIIYDDLTKQAAAYRELSLLLRRPPGREAYPGDVFYLHSRLLERACKLSDDLGGGSITAFPIIETQAGDISAYIPTNVISITDGQIFLESELFYSGIRPAMNVGLSVSRVGGAAQIPAMKAVAGSVRLELAQYNELKAFAQFGSDLDESTKKTLKRGSVLVEVLKQPQYEPLDAAIQVCVLYAATRGFLDEMELSLLASWESSFKAYLSEEKSKLLDQIRGGAKISEYESEIKETLSAHMTRFKN

SEQ ID NO: 174409 - protein, 282 aa, Unknown
  Bacterial polypetide isolated from the Sargasso Sea
QSVSEPMQTGLKALDSLVPVGRGQRELIIGDRQTGKTAVAIDTIINQKEINQSDDESKKLYCIYVAIGQKRSTVAQVVKTLEENGAMEYTIVVAASASDPAPLQFLAPYAGCSMGEFFRDNGMHGLIVYDDLSKQAVAYRQMSLLLRRPPGREAFPGDVFYLHSRLLERAAKMNDENGGGSLTALPVIETQAGDVSAFIPTNVISITDGQIFLETELFFSGIRPAINVGLSVSRVGSAAQTKAMKKVAGKIKLELAQYREMAAFSQFASDLDASTKQLWQEG

SEQ ID NO: 174410 - protein, 265 aa, Unknown
  Bacterial polypetide isolated from the Sargasso Sea
YTTIVAATASDSAPLQFLAPYTGCAMGEYFRDNGMHGLIIYDDLSKQAVAYRQMSLLLRRPPGREAYPGDVFYLHSRLLERAAKLSDEHGGGSLTALPIIETQGGDVSAFIPTNVISITDGQIFLETELFNQGIRPAINVGLSVSRVGSSAQTKAMKKVSGSMKLELAQYREMAAFAQFGSDLDASTQQLLNRGSKLTELLKQKQYSPMTVAEQVISVFCGVKGYLDDIELKDIAEFENKIIEKCKSDKPEIIDSIQSSGKLEEE

SEQ ID NO: 174411 - protein, 147 aa, Unknown
  Bacterial polypetide isolated from the Sargasso Sea
AHLDANVVLSRQIASLGIYPAVDPLDSNSRQLEPGIVGQEHYDVANSVKQILNRYKELKDIIAILGMDELSEDDKLVVARARKIERFLSQPFFVAEVFTQVPGKYVPLSETIRGFKGIVDGEYDDIPEQAFLMAGGIDEVVEKAKDV

SEQ ID NO: 174412 - protein, 307 aa, Unknown
  Bacterial polypetide isolated from the Sargasso Sea
VGEIIEVGDGVARASGLENVMSSELVELPNDVFGMALNLEEDNVGLVLFGETRLVKEGDIAKRTGRVVEVPVGKEMLGRVVNPLGQPLDGKGPINSSSTLPIERKALGVMARSPVNEPLQTGIKAIDSMVPIGRGQRELIIGDRQTGKTAVAIDAIINQKYTHETDDPVYCVYVAIGQKASTVASLVSELEAQGAMEYTVVVAANASDPAPMQYIAPYAGCAMGEFFRDNGQHSLIVYDDLSKQAVAYRQMSLVLRRPPGREAFPGDVFYLHSRLLERASKLSKDHGGGSLTALPVIETQEGDVSAY

SEQ ID NO: 174413 - protein, 301 aa, Unknown
  Bacterial polypetide isolated from the Sargasso Sea
KRSTVRQIEKTLEEAGAMEYTTIVAATASDAAPLQFLAPYTGCTMGEYFRDNGMHALIIYDDLSKQAVAYRQMSLLLRRPPGREAYPGDVFYLHSRLLERAAKLSDEHGGGSLTALPIIETQGGDVSAFIPTNVISITDGQIFLETELFNQGIRPAINVGLSVSRVGSSAQTKAMKKVSGSMKLELAQYREMAAFAQFGSDLDASTQKLLNRGSKLTELLKQNQYSPMTVAEQVISVFCGVRGHLDDIEQKDISSFESKIIEKCKSEKPDIIESITASGKLEDDKEKELNEIILQLKKDLT

SEQ ID NO: 174414 - protein, 260 aa, Unknown
  Bacterial polypetide isolated from the Sargasso Sea
EALREISGRLAEMPADSGYPAYLGARLASFYERSGKCRLSGAPERIGSISIVGAVSPPGGDFSDPVCSATLGIVQVFWGLDKKLAQRKHFPSLHWLLSYSKYLRALDPWYEENWPQFPPMRTIVKEILQTEDDLTEIVQLVGKDSLAEGDKLILDVAKIIKDDYLQQNGFSDYDRVCPFYKCVWMMKNITDFYTLASKAIENSTAENKITCNKIKQSMNDTIYKIVSQKFRLPTDGEEANVAHFQELNEEIFDAFRSFED

SEQ ID NO: 174415 - protein, 134 aa, Unknown
  Bacterial polypetide isolated from the Sargasso Sea
SAQTKAMKKVFGSMKLELAQYREMAAFAQFGSDLDASTQQLLNRGSKLTELLKQKQYSPMTVAEQVISVFCGVKGYLDDIDLKDVAEFESKIIEKCKSDKPEIIESILTSGKLEEDKEKLLVEAITQLKGNFKS

SEQ ID NO: 174416 - protein, 114 aa, Unknown
  Bacterial polypetide isolated from the Sargasso Sea
MASLDDLKKRIASVKSTQKITKAMKMVAAAKLRRAQESAEKGRPYSEKMNNVILNLSNGISDKENAPKLLSGTGQEKTHLCVVMTSDRGLCGGFNSNIIKKAKSYFAKILDEGK

SEQ ID NO: 174417 - protein, 303 aa, Unknown
  Bacterial polypetide isolated from the Sargasso Sea
DGKGALDKGIKRSRVEVKAPGIIPRKSVSEPMQSGLKSVDSLVPIGRGQRELIIGDRQTGKTAVAIDTIINQKKINESNDEKQKLYCIYVAIGQKRSTVRQIEKSLEEAGAMEYTTIVAATASDAAPLQFLAPYTGCAMGEYFRDNGMHALIIYDDLSKQAVAYRQMSLLLRRPPGREAYPGDVFYLHSRLLERAAKLSDEHGGGSLTALPIIETQGGDVSAFIPTNVISITDGQIFLETNLFNQGIRPAINVGLSVSRVGSSAQTKAMKKVSGSMKLELAQYREMAAFAPFGSDLDALTQKL

SEQ ID NO: 174418 - protein, 286 aa, Unknown
  Bacterial polypetide isolated from the Sargasso Sea
GPETLGRIINVIGEPIDEKGEVKTKESWPIHRAAPEFNDQSTETEILVTGIKVVDLLAPYAKGGKIGLFGGAGVGKTVIIMELINNIAKAHGGFSVFAGVGERTREGNDLYHEMIESGVIKPEGPGSKAALVYGQMNEPPGARSRVALTGLTVAEYFRDQEGQDVLFFVDNIFRFTQAGSEVSALLGRIPSAVGYQPTLATDMGNLQERITTTNKGSITSVQAIYVPADDLTDPAPATSFAHLDATTVLSRQIAELGIYPAVDPLDSTSRILDPRIVGDEHYRVAR

SEQ ID NO: 174419 - protein, 267 aa, Unknown
  Bacterial polypetide isolated from the Sargasso Sea
MSKKGKITQIIGAVVDVNFDGDLPEIYTALEANNSGNKLVLEVAQHLGENDVRTIAMDATEGLKRGDEVNNTGSPISVPVGPETLGRIINVVGEAIDEKGIVKTKEKWPIHRSAPKFTDQATETEQLVTGIKVIDLLAPYAKGGKIGLFGGAGVGKTVTIMELINNIAKAHGGFSVFAGVGERTREGNDLYHEMIESGVIKTEGKGSKAALVYGQMNEPPGARARVALTGLTVAEYFRDKEGQDVLFFVDNIFRFTQAGSEVSALLG

SEQ ID NO: 174420 - protein, 274 aa, Unknown
  Bacterial polypetide isolated from the Sargasso Sea
IVDVPIGKGLLGRVVDALGNPIDGKGALKNVKRSRVETKAPGIMPRESVSEPMQTGLKAIDSLIPVGRGQRELIIGDRQTGKTAIAIDTFLNQKSTNDKASKDDTKKLFCIYVAVGQKRSTVAQIVKTLEERGALEYSIVVAATASDPAPMQFLAPYSAAAMGEFFRDNGMHAVVVYDDLSKQAVAYRQMSLLLRRPPGREAYPGDVFYLHSRLLERAAKLNEENGSGSLTALPIIETQGGDVSAFIPTNVISITDGQIFLETELFYKGIRPAV

SEQ ID NO: 174421 - protein, 92 aa, Unknown
  Bacterial polypetide isolated from the Sargasso Sea
FSVFAGVGERTREGNDLYHEMIDSGVIKPDGEGSKAALVYGQMNEPPGARARVALTGLTVAEYFRDQEGQDVLFFVDNIFRFTQAGSEVSAL

SEQ ID NO: 174422 - protein, 263 aa, Unknown
  Bacterial polypetide isolated from the Sargasso Sea
LVYGQMNEPPGARARVGLTGLTVAEYFRDKEGQDVLFFVDNIFRFTQAGSEVSALLGRIPSAVGYQPTLATDMGNLQERITTTNKGSITSVQAIYVPADDLTDPAPATSFAHLDATTVLSRQIAELGIYPAVDPLDSTSRILDPRIVGEEHYKVAREVQKILQTYKSLQDIIAILGMDELSEEDKLTVARARKIQRFLSQPFFVAEVFTGSPGKLVDLESTIKGFDAICKGEYDHLPEAAFYMVGTIEEVVEKAEKMAKDAAA

SEQ ID NO: 174423 - protein, 258 aa, Unknown
  Bacterial polypetide isolated from the Sargasso Sea
MNEPPGARMSVGLSALTMAEHFRDVNKQDVLLFIDNIFRFVQAGSEVSALLGRMPSAVGYQPTLGTDVGELQERITSTLEGSITSIQAVYVPADDLTDPAPATTFAHLDATTVLARALAAKGIYPAVDPLDSTSTMLQPSVVGDEHYRTARAVQSTLQRYKELQDIIAILGLDELSEEDRKTVDRARKIEKFLSQPFFVAEIFTGMSGKYVKLEDTIKGFNMILSGELDQLPEQAFYLVGSIDEVKAKAEKIASESKA

SEQ ID NO: 174424 - protein, 280 aa, Unknown
  Bacterial polypetide isolated from the Sargasso Sea
MTSLDSAEISKIIEQQIKQFDVSVETRTEGTIMSLKDGIVRLYGMEEVMQGEMIEFPGGTYGIALNLERDAVGAVVLGPSGHLQEGQTVKCTGRILEVPVGEAMLGRVVDALGKPVDGKGPIDTQYHSPIEKIAPGVIARQSVSQPLQTGLKAIDALVPIGRGQRELIIGDRQTGKTAIAIDTIINQKDTGVKCVYVAIGQKASSVAAVVNKLQAHDAMAHTVIVTATAAEAAALQFIAPYAGCAMGEYFRDRGEDALIIYDDLTKQAWAYRQISLLLRR

SEQ ID NO: 174425 - protein, 283 aa, Unknown
  Bacterial polypetide isolated from the Sargasso Sea
CTGRILEVPVGKELLGRVVDALGNPVDGKGPLGNTETDAVEKVAPGVIWRKSVDQPVQTGYKAVDAMIPVGRGQRELIIGDRQIGKTALAIDAIINQKDSGIFCVYVAIGQKQSTIANVVRKLEENGALANTIIVAASASESPALQFLAPYSGCTMGEFFRDRGEDALIVYDDLSKQAVAYRQISLLLRRPPGREAYPGDVFYLHSRLLERASRVSEEYVEKFTNGAVTGKTGSLTALPIIETQAGDVSAFVPTNVISITDGQIFLESAMFNSGIRPAVNAGV

SEQ ID NO: 174426 - protein, 296 aa, Unknown
  Bacterial polypetide isolated from the Sargasso Sea
ILNALRIEAKNPAGQDIALTAEVQQLLGDHRVRAVAMSGTDGLVRGMEAIDTGAPISVPVGEATLGRIFNVLGEPVDEQGPVNTKDTAPIHRAAPKLTDLETKPKVFETGIKVIDLLAPYRQGGKVGLFGGAGVGKTVLIQELINNIAKEHGGVSVFGGVGERTREGNDLYEEFKESGVINADDLTQSKVALCFGQMNEPPGARMRVGLSALTMAEHFRDVNKQDVLLFVDNIFRFVQAGSEVSALLGRMPSAVGYQPTLGTDVGELQERITSTLEGSITSIQAVYVPADDLTDPA

SEQ ID NO: 174427 - protein, 154 aa, Unknown
  Bacterial polypetide isolated from the Sargasso Sea
MTINPSEITKLLKDQIKNFGEKAEVSEIGKVLSVGDGIARVYGLDNVQAGEMVEFEDGSKGMALNLENDNVGVVIFGDDRSIKEGDTIKRTNAIVDVPVGKELLGRVVDGLGNPIDGKGKLSSKSRKRVEVKAPGIIPRQSVNEPMQTGLKSID

SEQ ID NO: 174428 - protein, 287 aa, Unknown
  Bacterial polypetide isolated from the Sargasso Sea
MEINPSEVTKILKEQIKNFGDKAEVTEVGQVLSVGDGIARIYGLDNVQAGEMVEFADGSKGMALNLESENVGVVIFGDDRNVKEGDVVKRTGNIVDTPVGKELLGRVVDGLGNPIDGKGPLDKGIKKSRVEVKAPGIIPRQSVSEPMQTGLKSIDSLVPIGRGQRELIIGDRQTGKTAVAVDAIINQKKINESGDEKQKLYCIYVAVGQKRSTVRQIQKTLEEAGAMEYTTIVAATASDSAPLQFLAPYTGCAMGEYFRDNGMHALIIYDDLSKQAVAYRQMSLLLR

SEQ ID NO: 174429 - protein, 269 aa, Unknown
  Bacterial polypetide isolated from the Sargasso Sea
QTGITAIDSMIPVGRGQRELIIGDRQTGKTAIAIDTILNQKDQDMICVYVAVGQKAASVANVVEVLRERGALDYTVVVAANASEPAALQYLAPYTGASIAEYFMYKGKATLVIYDDLSKQAAAYRQMSLLLRRPPGREAYPGDVFYCHSRLLERAAKLSDEMGKGSMTALPIIETQAGDVSAYIPTNVISITDGQIFLSSDLFNSGLRPAINVSVSVSRVGGAAQTKAIKKIAGKLKLELAQFDELSAFLQFASELDAATQSSWAAASV

SEQ ID NO: 174430 - protein, 179 aa, Unknown
  Bacterial polypetide isolated from the Sargasso Sea
DKGSITSVQAIYVPADDLTDPAPATSFSHLDATTVLSRQIAEIGIYPAVDPLDSTSRILDPRVVGEEHYRVARDVQKILQAYKSLQDIIAILGMDELSEEDKLTVARARKIQRFLSQPFFVAEVFTGSPGKLVDLESTIKGFDSICKGEYDHLPEAAFYMVGGIEEVIEKAEKLTKDNK

SEQ ID NO: 174431 - protein, 142 aa, Unknown
  Bacterial polypetide isolated from the Sargasso Sea
VVLSRNIAELGIYPAVDPLDSTSRQLDPLIIGQEHYDTTRAVQGVLQKYKELKDIIAILGMDELSEDDKLAVNRARKIQRYLSQPFYVAETFTGTPGKYVSLKDTISGFQAIVNGDYDHLPEQAFYMIGEISEAEKRAEEIK

SEQ ID NO: 174432 - protein, 334 aa, Unknown
  Bacterial polypetide isolated from the Sargasso Sea
VVGESIDEKGDVKTKEKWPIHRPAPKFTDQATETEQLVTGIKVVDLLAPYAKGGKIGLFGGAGVGKTVTIMELINNIAKAHGGFSVFAGVGERTREGNDLYHEMIESGVIKTEGKGSKAALVYGQMNEPPGARARVALTGLTVAEYFRDKEGQDVLFFIDNIFRFTQAGSEVSALLGRIPSAVGYQPTLATDMGNLQERITSTDKGSITSVQAIYVPADDLTDPAPATSFSHLDATTVLSRQIAEIGIYPAVDPLDSTSRILDPRIVGEEHYRVARDVQRILQAYKSLQDIIAILGMDELSEEDKLTVARARKIQDFYLNRFLLPKYLLVHPVS

SEQ ID NO: 174433 - protein, 215 aa, Unknown
  Bacterial polypetide isolated from the Sargasso Sea
GNSSGKRTGVILVTSDRGLCGGFNSNLSKTLLQQLLDEGVECAEFAIFGRKGNDFFKRTPHKILINHAGTPPDQHLSLVREVVGEFTKRFENDELDQVLLAYNHFISVISQVPMIEQLLPIKPIEAESVDEREILFEPSPEEILQTLLKKYVQNQVYVSWLDTIAGEHAARMTSMDAATKNAGEIIDRLQLHYNRTRQAAITGELIEIISGAESL

SEQ ID NO: 174434 - protein, 157 aa, Unknown
  Bacterial polypetide isolated from the Sargasso Sea
ATSFSHLDATTVLSRQIAEIGIYPAVDPLDSTSRILDPRIVGDEHYRVAREVQKVLQTYKSLQDIIAILGMDELSEEDKLIVARARKIQRFLSQPFFVAEVFTGSPGKLVELESTIKGFDAICKGEYDHLPEAAFYMVGTIEEAIEKAEKMAKDAAA

SEQ ID NO: 174435 - protein, 284 aa, Unknown
  Bacterial polypetide isolated from the Sargasso Sea
FAKGGKIGLFGGAGVGKTVNMMELINNIALQHSGLSVFAGVGERTREGNDFYYEMQESGVVNIDNLGESKVAMVYGQMNEPPGNRLRVALTGLTMAESFRDEGKDVLLFIDNIYRYTLAGVEVSALLGRMPSAVGYQPTLAEEMGALQERITSTKTGSITSIQAVYVPADDLTDPSPATTFAHLDATVVLSRQISELGIYPAVDPLDSTSRQLDPFVVGDDHYQVAQGVQKILQRYNELKDIIAILGMDELSEEDKGLVARARKAQRFLSQPFFVAEIFTGTPR

SEQ ID NO: 174436 - protein, 305 aa, Unknown
  Bacterial polypetide isolated from the Sargasso Sea
DVPVGKELLGRVVDGLGTPIDGKGNLPAKVQRKRVEVKAPGIIPRQSVNEPMQTGLKAIDSLIPIGRGQRELIIGDRQTGKTAVAVDTIINQKAINESNDEKKKLYCVYVAIGQKRSTVAQIVKTLEDAGAMKYTTVVSATASDSAPLQFLAPYTGCTIGEYFRDNGMHALIIYDDLSKQAVAYRQMSLLLRRPPGREAYPGDVFYLHSRLLERAAKLNEKNGGGSLTALPIIETQAGDVSAYIPTNVISITDGQIFLETELFNQGIRPAVNVGLSVSRVGSAAQTKAMKKVAGSIKLELAQYRE

SEQ ID NO: 174437 - protein, 290 aa, Unknown
  Bacterial polypetide isolated from the Sargasso Sea
SVFAGVGERTREGNDLFLEMTESGVIEKTALVFGQMDEPPGTRLRVALAALTMAEYFRDVQKQDVLLFIDNIFRFTQAGSEVSTLLGRMPSAVGYQPTLADEMGQLQERITSTRGHSITSLQAIYVPADDLTDPAPATTFAHLDATTVLSRPISELGIYPAVDPLDSTSRILDPRYIGDEHYAVAARVKEILQRYKDLQDIIAILGIDELSEEDKIIVGRARRIQRFLSQNMFVAEAFTGQPGSFVPIEETIASFKKLAEGDYDHLPEQAFFMCGGIEDVERKAAELEKK

SEQ ID NO: 174438 - protein, 155 aa, Unknown
  Bacterial polypetide isolated from the Sargasso Sea
MEIKAAEISSVIKDQISNFETKADVAEVGTVLSVGDGIARVYGLDQVQAGEMVEFPGGIKGMTLNLEMDNVGVSIFGDDTGIKEGDTVKRTGEIVDVPVGKELLGRVVDGLGNPIDGKGPIKSSDKRRIELKAPGIIPQQSVTEPMQTGIKALDA

SEQ ID NO: 174439 - protein, 203 aa, Unknown
  Bacterial polypetide isolated from the Sargasso Sea
MPSLDDLRKRITSVKSTQKITKAMKMVAAAKLRKAQEMAEKGRPYSDKMDLIIQNLSKAINDPSNAPKLLVGTGEDKTHLCVVMTADRGLCGGFNTNICKLAKKYFDEAIKSSKNLKIITVGTKGLDQLKRDYGQYIIKRINLKDKKKLSFLDAEEIGKQIVELFKNNEFDKCFIFYNKFKNVISQIPQQQTSNPAKVENKNK

SEQ ID NO: 174440 - protein, 111 aa, Unknown
  Bacterial polypetide isolated from the Sargasso Sea
RVARDVQRILQSYKSLQDIIAILGMDELSEEDKLVVARARKIQRFLSQPFFVAEVFTGSPGKLVDLDSTIKGFDAICKGEYDHLPEAAFYMVGTIEEVIEKAKKMEKEAAA

SEQ ID NO: 174441 - protein, 99 aa, Unknown
  Bacterial polypetide isolated from the Sargasso Sea
MRKGKITQIIGAVVDVKFEGELPEILTALECNNSGNRLVLEVAQHLGESSVRTIAMDATEGLKRGDEVTDTGAPIKVPVGPETLGRIINVIGEPIDEKG

SEQ ID NO: 174442 - protein, 124 aa, Unknown
  Bacterial polypetide isolated from the Sargasso Sea
MEKIGKISQIMGAVVDVTFEDGNLPEILNALNVDRGDQGNLVLEVAQHLGESTVRTVAMDSTDGLVRGISAKDTGNPISVPVGPETLGRLFDVTGNVIDGKGAVSANKEYPIHRSAPKHEDLST

SEQ ID NO: 174443 - protein, 242 aa, Unknown
  Bacterial polypetide isolated from the Sargasso Sea
LTVAEYFRDQEGQDVLFFVDNIFRFTQAGSEVSALLGRIPSAVGYQPTLATDMGNLQERITTTNKGSITSVQAIYVPADDLTDPAPATSFAHLDATTVLSRQIAEIGIYPAVDPLDSTSRILDPRIVGDEHYRVAREVQKILQTYKSLQDIIAILGMDELSEEDKLIVARARKIQRFLSQPFFVAEVFTGSPGKLVDLDSTIKGFDAICKGEYDHLPEAAFYMVGTIEEAIEKAEKMKKDVA

SEQ ID NO: 174444 - protein, 192 aa, Unknown
  Bacterial polypetide isolated from the Sargasso Sea
MIWGNLQERITTTNKGSITSVQAIYVPADDLTDPAPATSFAHLDATTVLSRQIAEIGIYPAVDPLDSTSRILDPRIVGDEHYRVAREVQKILQTYKSLQDIIAILGMDELSEEDKLVVARARKIQRFLSQPFFVAEVFTGSPGKLVDLESTIKGFDAICKGEYDHLPEAAFYMVGTIEEAIEKAEKIKKDAA

SEQ ID NO: 174445 - protein, 213 aa, Unknown
  Bacterial polypetide isolated from the Sargasso Sea
VFYLHSRLLERAAKLSDEHGGGSLTALPIIETQGGDVSAFIPTNVISITDGQIFLETELFNQGIRPAINVGLSVSRVGSSAQTKAMKKVSGSMKLELAQYREMAAFAQFGSDLDASTQQLLNRGSKLTELLKQKQYSPMTVAEQVISVFCGVKGYLDDIDLKDVAEFESKIIEKCKSDKPEIIESILSSGKLEEDKEKLLVEVITQLKGNFKS

SEQ ID NO: 174446 - protein, 287 aa, Unknown
  Bacterial polypetide isolated from the Sargasso Sea
SAPEFNDQSTETEILVTGIKVVDLLAPYAKGGKIGLFGGAGVGKTVLIMELINNVAKAHGGFSVFAGVGERTREGNDLYHEMIESGVIKPEGTGSKAALVYGQMNEPPGARARVALSGLTVAEYFRDQEGQDVLFFVDNIFRFTQAGSEVSALLGRIPSAVGYQPTLATDMGNLQERITTTNKGSITSVQAIYVPADDLTDPAPATSFSHLDATTVLSRQIAEIGIYPAVDPLDSTSRILDPRIVGDEHYRVAREVQKVLQTYKSLQDIIAILGMDELSEEDKLTVA

SEQ ID NO: 174447 - protein, 310 aa, Unknown
  Bacterial polypetide isolated from the Sargasso Sea
ALKNVKRARVETKAPGIMPRQSVHEPMQTGLKAIDSLIPIGRGQRELIIGDRQTGKTAIAIDTFLNQKAVNDAAGKDESKKLFCIYVAVGQKRSTVAQIVKTLEENGALDYTIVVAATASDPAPMQFLAPYSAATMGEYFRDNGMHAVIVYDDLSKQAVAYRQMSLLLRRPPGREAYPGDVFYLHSRLLERAAKLNSDNGSGSLTALPVIETQGGDVSAFIPTNVISITDGQIFLETELFYKGIRPAVNVGLSVSRVGSSAQIKAMKQVAGTIKLDLAQYREMAAFAQFASDLDTSTRQLLARGERLTEL

SEQ ID NO: 174448 - protein, 104 aa, Unknown
  Bacterial polypetide isolated from the Sargasso Sea
QKILQTYKSLQDIIAILGMDELSEEDKLTVARARKIQRFLSQPFFVAEVFTGSPGKLVDLEATIKGFDAICKGEYDHLPEAAFYMVGTIEEAIEKAEKMAKDAA

SEQ ID NO: 174449 - protein, 287 aa, Unknown
  Bacterial polypetide isolated from the Sargasso Sea
MRKGQITQIIGAVVDVKFDGELPEILTALECDNGGNRLVLEVAQHLGESSVRTIAMDATEGLKRGDEVTDTAAPIKVPVGPETLGRIINVIGEPIDEKGDVKSSDNWPIHRAAPEFNDQSTETEILVTGIKVIDLLAPYAKGGKIGLFGGAGVGKTVLIMELINNVAKAHGGFSVFAGVGERTREGNDLYHEMIDSGVIKPDGEGSKAALVYGQMNEPPGARARVALTGLTVAEYFRDQEGQDVLFFVDNIFRFTQAGSEVSALLGRIPSAVGYQPTLATDMGNYRR

SEQ ID NO: 174450 - protein, 233 aa, Unknown
  Bacterial polypetide isolated from the Sargasso Sea
MPSLDDLKKRIKSVKSTQKITKAMKMVAAAKLRKAQESAEKGRPYSQKMQNIILNLTKSINDPQNAPKLLVGTGEDKKYLCVVLTADRGLCGGFNSNICKLAKTNFKKILGEGKELNIITVGSKGHDQIKREYGKYVIKKFSFKDKKNISFNEADEVGKEIISLFNQNKFDKCIIFYNNFKNVITQIPQAQQIIPAESKDLKETNDKNFSYEFEPEEDEILEDLLPKNISTQV

SEQ ID NO: 174451 - protein, 214 aa, Unknown
  Bacterial polypetide isolated from the Sargasso Sea
FRDNGMHALIIYDDLSKQAVAYRQMSLLLRRPPGREAYPGDVFYLHSRLLERAAKLGDEHGGGSLTALPIIETQGGDVSAFIPTNVISITDGQIFLETELFNQGIRPAINVGLSVSRVGSSAQTKAMKKVSGSMKLELAQYREMAAFAQFGSDLDASTQKLLNRGSKLTELLKQNQYSPMTVAEQVISVFCGVRGHLDDIEQKDIASFENKIIE

SEQ ID NO: 174452 - protein, 306 aa, Unknown
  Bacterial polypetide isolated from the Sargasso Sea
LGETSVRTIAMDSTEGLKRGDKVTDTGSPIKVPVGPETLGRIINVIGEPIDQKGKVSTKESWPIHREAPKFTDQSTETEILVTGIKVVDLLAPYSKGGKIGLFGGAGVGKTVIIMELINNIAKAHGGFSVFAGVGERTREGNDLYHEMIESGVIKPEGKGSKAALVYGQMNEPPGARARVGLTGLTVAEYFRDKEGQDVLFFVDNIFRFTQAGSEVSALLGRIPSAVGYQPTLATDMGNLQERITTTNKGSITSVQAIYVPADDLTDPAPATSFAHLDATTVLSRQIAELGIYPAVDPLDSTSRIL

SEQ ID NO: 174453 - protein, 129 aa, Unknown
  Bacterial polypetide isolated from the Sargasso Sea
MASLDDLKKRIASVKSTQKITKAMKMVAAAKLRRAQESAEKGRPYSEKMNNVILNLSNGISDKENAPKLLSGTGQEKTHLCVVMTSDRGLCGGFNSNIIKKAKSYFAKILDEGKELKIITVGSKGNDQL

SEQ ID NO: 174454 - protein, 78 aa, Unknown
  Bacterial polypetide isolated from the Sargasso Sea
MATAPKLNQSPNGVISQVIGAVVDVAFEGDLPPILTALETKNGDNTLVLEVAQHLGENTVRTIAMDGTDGLVRGQEVV

SEQ ID NO: 174455 - protein, 207 aa, Unknown
  Bacterial polypetide isolated from the Sargasso Sea
IIVDRQTVKTAVAVDAIINQKKINETGDEKQKLYCIYVAVGQKRSTVRQIQKTLEEAGAMEYTTIVAATASDSAPLQFLAPYTGCAMGEYFRDNGMHALIIYDDLSKQAVAYRQMSLLLRRPPGREAYPGDVFYLHSRLLERAAKLSDEHGGGSLTALPIIETQGGDVSAFIPTNVISITDGQIFLETELFNQGIRPAINVGLSVSR

SEQ ID NO: 174456 - protein, 200 aa, Unknown
  Bacterial polypetide isolated from the Sargasso Sea
MSNGLVTQIIGAVIDVEFEKNNIPQVYEAIKIKDTGTVLEVQQQLGDGIVRAIAMGTTEGLKRGLTAERTNAPISVPVGEKTLGRIMDVLGNPIDECGPIGAEEQMPIHRKPPSYMDQSLSDDLLETGIKVIDLICPFAKGGKIGLFGGAGVGKTVNMMELINNIATEHSGLSVFAGVGERTREGNDFYYEMQESGVVNV

SEQ ID NO: 174457 - protein, 151 aa, Unknown
  Bacterial polypetide isolated from the Sargasso Sea
MAEKGKISQVMGAVVDVVFEQGHLPDIYNALTVDRGEEGQLVLEVAQHLGDSAVRTVAMDSTDGLVRGIDVVDSGIPISVPVGPETLGRLFDVLGNTIDNKGDAKTEKVNPIHRPAPRHEDLATSTEILVTGIKVVDLMEPYTKGGKTGLF

SEQ ID NO: 174458 - protein, 165 aa, Unknown
  Bacterial polypetide isolated from the Sargasso Sea
DDLTDPAPATSFAHLDATTVLSRQIAELGIYPAVDPLDSTSRILDPRVVGDEHYRVARNVQAVLQTYKSLQDIIAILGMDELSEEDKLTVARARKIQRFMSQPFFVAEVFTGTPGKYVELEDTIKGFDAICKGEYDHLPEAAFYMVGTIEEAIQKAEKMAEEAAA

SEQ ID NO: 174459 - protein, 96 aa, Unknown
  Bacterial polypetide isolated from the Sargasso Sea
LQDIIAILGMDELSEDDKLTVARARKIQRFLSQPFFVAEVFTGSAGKLVDLEATIKGFDAICKGEYDHLPEAAFYMVGTIEEAIEKAEKMAKEAAA

SEQ ID NO: 174460 - protein, 241 aa, Unknown
  Bacterial polypetide isolated from the Sargasso Sea
LGRVVDALGNPIDGKEVLKKGIKRKRVEVKAPGIIPRKSVNEPMQTGLKAIDSLIPIGRGQRELIIGDRQTGKTAVAIDTIINQKKINESSDEKKKLYCIYVAIGQKRSTVAQILKTLQDAGAMDYTIIVSATASDPAPLQFLAPYTGCTFGEFFRDNGMHALIIYDDLSKQAVAYRQMSLLLRRPPGREAYPGDVFYLHSRLLERAAKLNDDNGGGSLTALPIIETQAGNVSAYIPTNVI

SEQ ID NO: 174461 - protein, 160 aa, Unknown
  Bacterial polypetide isolated from the Sargasso Sea
MDINPSEITKILKEQIKNLGDKTEVSEIGKVLSVGDGIARVYGLDNVQAGEMVEFNDGSKGMALNLESDNVGIVIFGDDRTIKEGDTVKRTGAIVDVPVGKELLGRVVDALGNPIDGKESLKKGIKRKRVEVKAPGIIPRKSVNEPMQTGLKAIDSLIPI

SEQ ID NO: 174462 - protein, 264 aa, Unknown
  Bacterial polypetide isolated from the Sargasso Sea
RDRGEDALIIYDDLSKQAVAYRQMSLLLRRPPGREAYPGDVFYLHSRLLERAARVNEEYVENYTNGEVKGKTGSLTALPIIETQAGDVSAFVPTNVISITDGQIFLESSLFSSGLKPAMDPGISVSRVGGAAQVPIIKKLGGGIKTALAQYRELEAFAQFASDLDEASKEQLEHGVRVTELTKQDQFSPMSVAEMGLMLYTANEGYLRQVEVEKIKDFEKSLIAYMNSEHKDLMDKVSETGEYGDDIQNAFKEALDKFMETQTW

SEQ ID NO: 174463 - protein, 42 aa, Unknown
  Bacterial polypetide isolated from the Sargasso Sea
DLSKQAVAYRQMSLLLRRPPGREAYPGDVFYLHSRLLERASK

SEQ ID NO: 174464 - protein, 117 aa, Unknown
  Bacterial polypetide isolated from the Sargasso Sea
MANAKGKITQVIGAVVDVQFEDHLPEILNALNTDNNGKKLVLEVAQHLGENTVRTIAMDASEGLVRGQEVVDTDGPISVPVGNATLGRILNVVGEPVDEQGPVKAKESRAIHQPAPE

SEQ ID NO: 174465 - protein, 192 aa, Unknown
  Bacterial polypetide isolated from the Sargasso Sea
MASLDDLKKRISSVKSTQKITKAMKMVAASKLRRAQENAEKGRPYSDKMNNIILNLSTNITDKENSPKLLVGSGEDKVHLCIVMTSDRGLCGGFNTNIIKKAKLYFQKILDEGKILKIITVGSKGYDQLKRVYKENIIEKISFKESKYVNYFDADKVGKIIIDKFEKKEFDVCTIFYNQFRNVISQIPQEQQ

SEQ ID NO: 174466 - protein, 259 aa, Unknown
  Bacterial polypetide isolated from the Sargasso Sea
NIAKGHGGFSVFAGVGERTREGNDLYHEMLESGVINPGGEGSKAALVYGQMNEPPGARARVGLTGLTLAEYFRDEEGQDVLLFIDNIFRFTQAGSEVSALLGRIPSAVGYQPTLGTDMGQLQERITSTNKGSITSVQAIYVPADDLTDPAPATAFSHLDATTVLNRQIAELGIYPAVDPLDSTSRMLDPRIIGDEHYEVAREVQRVLQTYKSLQDIIAILGMDELSEDDKLTVTRARKLQRFLSQPFHVAEVFTGHAGV

SEQ ID NO: 174467 - protein, 285 aa, Unknown
  Bacterial polypetide isolated from the Sargasso Sea
GEPIDGKGAIDAASFEPVEKIAPGVIERQSVDQPVQTGYKSVDAMIPVGRGQRELIIGDRQCGKTAMAVDAIINQKGTGIKCVYVAVGQKASTIANVVRKLEEHGALDHTIVVAASASESAALQYLAPYSGCTMGEYFRDRGEDALIVYDDLSKQAVAYRQISLLLKRPPGREAYPGDVFYLHSRLLERAARVNEQYVENYTNGEVKGKTGSLTALPIIETQAGDVSAFVPTNVISITDGQIFLETDLFNAGIRPAVNAGISVSRVGGAAQTKIIKKLGGGIRLA

SEQ ID NO: 174468 - protein, 153 aa, Unknown
  Bacterial polypetide isolated from the Sargasso Sea
FAHLDATTVLSRQIAELGIYPAVDPLDSTSRILDPRIVGDEHYRVAREVQKILQTYKSLQDIIAILGMDELSEEDKLIVARARKIQRFLSQPFFVAEVFTGSAGKLVDLESTIKGFDAICKGEYDHLPEAAFYMVGTIEEAVEKAEKMAKEVA

SEQ ID NO: 174469 - protein, 249 aa, Unknown
  Bacterial polypetide isolated from the Sargasso Sea
MHALIIYDDLSKQAVAYRQMSLLLRRPPGREAYPGDVFYLHSRLLERAAKLSDEHGGGSLTALPIIETQGGDVSAFIPTNVISITDGQIFLETNLFNQGIRPAINVGLSVSRVGSSAQTKAMKKVSGSMKLELAQYREMAAFAQFGSDLDASTQKLLNRGSKLTELLKQKQYTPMTVAEQVISVFCGVRGYLDDVEQKNIADFETKILQKCKTEKPEIIESISSSGKLEENTEKLLVEVITNLKKNLSS

SEQ ID NO: 174470 - protein, 264 aa, Unknown
  Bacterial polypetide isolated from the Sargasso Sea
EINPSEITKLLKEQIKSLGDQTEVSEVGKVLTVGDGIARVYGLDNVQAGEMVEFNDGSKGMALNLESDNVGVVIFGDDRQIKEGDIVKRTKSIVDVPVGKELLGRVVDGLGNPIDGKGTLSEKILRKRVEVKAPGIIPRQSVNEPMQTGLKAIDSLIPIGRGQRELIIGDRQTGKTAVAIDTIINQKAINETKDESKKLYCVYVAIGQKRSTVAQIVKTLEDAGAMKYTTVVSATASDSAPLQFLAPYTGCTIGEYFRDNGMHA

SEQ ID NO: 174471 - protein, 62 aa, Unknown
  Bacterial polypetide isolated from the Sargasso Sea
APLQFLAPYTGCTIGEYFRDNGMHALIIYDDLSKQAVAYRQMSLLLRRPPGREAYPGDVFYL

SEQ ID NO: 174472 - protein, 258 aa, Unknown
  Bacterial polypetide isolated from the Sargasso Sea
RAQESAEKGRPYSKKMNNIILNLSSGISDKESAPKLLSGSGKEKIHLCVVMTSDRGLCGGFNANIIKKAKSYFAKLVNEGKELKIITVGSKGNDQLKRVYGDKIIESISFKNSKNLNYFDAEKVSKTIIERFEKEEFDVCAIFYNQFKNVITQIPQAQQIIPLNTENTDDSKSEDSYEFEPDEDEILSNLLPKNISTQIFKAMLENSASEQGARMSAMDNATRNAGEMVDKLTIEYNRSRQAAITKELIEIISGAESL

SEQ ID NO: 174473 - protein, 207 aa, Unknown
  Bacterial polypetide isolated from the Sargasso Sea
MPFWVVCRPAVGYQPTLAEEMGVLQERIASTKTGSITSVQAVYVPADDLTDPSPATTFAHLDANVVLSRQIASLGIYPAVDPLDSNSRQLEPAIVGQEHYDVANAVKQQLNRYKELKDIIAILGMDELSEEDKLVVARARKIERFLSQPFFVAEVFTNAPGKYVPLSETIRGFKGIVNGEYDDIPEQAFYMAGNIDEVIEKAKTEAA

SEQ ID NO: 174474 - protein, 273 aa, Unknown
  Bacterial polypetide isolated from the Sargasso Sea
MRKGQITQIIGAVVDVKFDGELPEILTALECDNGGNRLVLEVAQHLGESSVRTIAMDATEGLKRGDEVTDTAAPIKVPVGPETLGRIINVIGEPIDERGEVKSSDNWPIHRAAPEFNDQSTETEILVTGIKVIDLLAPYAKGGKIGLFGGAGVGKTVLIMELINNVAKAHGGFSVFAGVGERTREGNDLYHEMIDSGVIKTDGEGSKAALVYGQMNEPPGARARVALTGLTVAEYFRDQEGQDVLFFVDNIFRFTQAGSEVSALLGRIPSAVG

SEQ ID NO: 174475 - protein, 272 aa, Unknown
  Bacterial polypetide isolated from the Sargasso Sea
MSIDASEISEILKTEINELNDSAKVTEVGTVLTVGDGIARVYGLDNVQAGEMVEFPGKIMGMALNLEDDNVGIVIFGSDKSIKEGDIVKRTKSIVEVPTGESLLGRVVDGLGNPIDGKGPLKNIVNQRVELKAPGIIPRKSVHEPMQTGIKAIDSLIPIGRGQRELIIGDRQTGKTSVIIDTILNQKEINKGSDESKKLYCIYVSIGQKRSTVAQIVKTLEDHDALKYSIVVAATASDPAPLQFLAPYTGCAMGEYFRDNGKHAVIFYDDLS

SEQ ID NO: 174476 - protein, 316 aa, Unknown
  Bacterial polypetide isolated from the Sargasso Sea
GDHRVRAVAMSGTDGLVRGMEAIDTGAPISVPVGEATLGRIFNVLGEPVDEQGPVNTKDTAPIHRSAPKLTDLETKPKVFETGIKVIDLLAPYRQGGKVGLFGGAGVGKTVLIQELINNIAKEHGGVSVFGGVGERTREGNDLYEEFKESGVINADDLTQSKVALCFGQMNEPPGARMRVGLSALTMAEHFRDVNKQDVLLFVDNIFRFVQAGSEVSALLGRMPSAVGYQPTLGTDVGELQERITSTLEGSITSIQAVYVPADDLTDPAPATTFAHLDATTVLARALAAKGIYPAVDPLDSTSTMLQPSVVAMSIQ

SEQ ID NO: 174477 - protein, 250 aa, Unknown
  Bacterial polypetide isolated from the Sargasso Sea
MEINPSEVTKILKEQIKKFGDKAEITEVGQVLSVGDGIARIYGLDNVQAGEMVEFADGSKGMALNLERENVGVVIFGDDRAVKEGDTVKRTGAIVDTPVGKELLGRVVDGLGSPIDGKGALDKGVKRSRVEVKAPGIIPRKSVNEPMQTGLKSVDSLVPIGRGQRELIIGDRQTGKTAVAIDTIINQKKINESNDEKLKLYCVYVAIGQKRSTVRQIEKTLEEAGAMEYTTIVAATASDAAPLQFLAPYT

SEQ ID NO: 174478 - protein, 215 aa, Unknown
  Bacterial polypetide isolated from the Sargasso Sea
SEVSALLGRIPSAVGYQPTLATDMGNLQERITSTGKGSITSVQAIYVPADDLTDPAPATSFSHLDATTVLSRQIAELGIYPAVDPLDSTSRILDPRVVGDEHYRVAREVQRILQAYKSLQDIIAILGMDELSEEDKLTVARARRIQRFLSQPFFVAEVFTGSPGKLVDLESTIKGFDAICKGEYDHLPEAAFYMVGSIEEAIEKADKIAKDTKAA

SEQ ID NO: 174479 - protein, 267 aa, Unknown
  Bacterial polypetide isolated from the Sargasso Sea
MSKNGKITQVIGAVVDVQFEGELPEILTALEVDNGGNKLILEIAQHLGENSVRTIAMDSTEGLKRGDTVQNTGAPISVPVGPETLGRIINVIGQPIDQKGEVKTKEKWPIHREAPKFTDQSTETEILETGIKVIDLLAPYSKGGKIGLFGGAGVGKTVIIMELINNIAKAHGGFSVFAGVGERTREGNDLYHEMIESGVIKPEGKGSKAALVYGQMNEPPGARARVGLTGLTVAEYFRDKEGQDVLFFVDNIFRFTQAGSEVSALLG

SEQ ID NO: 174480 - protein, 124 aa, Unknown
  Bacterial polypetide isolated from the Sargasso Sea
MNQNGKIIQVIGAVVDVQFEGDLPEILTALVVDNSGNKLILEVAQHLGENSVRTIAMDSTEGLKRGDQVKNTGSPISVPVGPETLGRIINVIGEPIDQKGEVKTKERWPIHREAPKFTDQSTET

SEQ ID NO: 174481 - protein, 209 aa, Unknown
  Bacterial polypetide isolated from the Sargasso Sea
MNKSGKIIQVIGAVVDVQFEGDLPEILTALEVNNGGNKLILEVAQHLGENSVRTIAMDSTEGLKRGDIVQNTGSPISVPVGPETLGRIINVIGQPIDQKGEVKTKERWPIHREAPKFTEQSTETEILETGIKVIDLLAPYSKGGKIGLFGGAGVGKTVIIMELINNIAKAHGGFSVFAGVGERTREGNDLYHEMIESGVIKPDGKGSKA

SEQ ID NO: 174482 - protein, 173 aa, Unknown
  Bacterial polypetide isolated from the Sargasso Sea
MANKIGKITQIIGAVVDVQFEGQLPEILTALECDNSGNRLVLEVAQHLGETAVRTIAMDSTEGLKRGDKVTDTGSPIKVPVGPETLGRIINVIGEPIDQKGKVSTKENWPIHRPAPKFTDQSTETEILATGIKVVDLLAPYSKGGKIGLFGGAGVGKTVIIMELINNMQKHTV

SEQ ID NO: 174483 - protein, 159 aa, Unknown
  Bacterial polypetide isolated from the Sargasso Sea
MIKKGRITQIIGAVVDVNFGGDLPEIYTALEANNSGNKLILEVAQHLGENDVRTIAMDATEGLKRGDEVINTGSPISVPVGPETLGRIINVVGESIDEKGDVKTKEKWPIHRPAPKFTDQATETEQLVTGIKVIDLLAPYAKGGKIGLFGGAGVEKQLQ

SEQ ID NO: 174484 - protein, 232 aa, Unknown
  Bacterial polypetide isolated from the Sargasso Sea
MVSIRPDEISAILKQQIEDYDKSVSVSNVGTVLTVGDGIARVYGLQQAMAGELLEFEDGTEGIALNLEDDNVGAVLMGEGYGIQEGSTVKATGKIAAVPVGEAMLGRVVNSLGRAIDGKGEIATSETRLIESMAPGIIQRKSVHEPMQTGITAIDAMIPVGRGQRELIIGDRQTGKTAIAIDTILNQADQDMICVYVAVGQKAASVANVVEVLRERGALDYTVIVAANASEP

SEQ ID NO: 174485 - protein, 154 aa, Unknown
  Bacterial polypetide isolated from the Sargasso Sea
FNQGIRPAINVGLSVSRVGSSAQTKAMKKVSGSMKLELAQYREMAAFAQFGSDLDASTQKLLNRGSKLTELLKQDQYSPMTVAEQVISVFCGVRGHLDDIEQKNISNFENKIIEKCKSEKPDIIESITASGKLEDDKEKELNEIILQLKKDFNS

SEQ ID NO: 174486 - protein, 366 aa, Unknown
  Bacterial polypetide isolated from the Sargasso Sea
EKWPIHRPSPKFTDQSTETEILVTGIKVIDLLAPYAKGGKIGLFGGAGVGKTVTIMELINNIAKAHGGFSVFAGVGERTREGNDLYHEMIESGVIKKEGKGSKAALVYGQMNEPPGARARVALTGLTVAEYFRDQEGQDVLFFVDNIFRFTQAGSEVSALLGRIPSAVGYQPTLATDMGNLQERITSTGKGSITSVQAIYVPADDLTDPAPATSFSHLDATTVLSRQIAELGIYPAVDPLDSTSRILDPRVVGDEHYRVAREVQRILQAYKSLQDIIAILGMDELSEEDKLTVARARKIQRFLSQPFFVAEVFTGSPGKLVDLESTIKGFDAICKGEYDHLPEAAFYMVGSIEEVIEKAEKLEKNS

SEQ ID NO: 174487 - protein, 156 aa, Unknown
  Bacterial polypetide isolated from the Sargasso Sea
MDINPSEVTKILKEQIKKFGDKSEVTEIGQVLSVGDGIARIYGLDNVQAGEMVEFSDGSKGMALNLESDNVGVVIFGDDRAIKEGDTVKRTGSIVDVPVGKQLLGRVVDGLGNPIDGKANLEKNLERRRVEVKAPGIIPRQSVGEPMQTGLKSIDS

SEQ ID NO: 174488 - protein, 420 aa, Unknown
  Bacterial polypetide isolated from the Sargasso Sea
MVASAPASAGTKGVIRQVIGPVLDVEFPAGKLPKIYNALRVETKNTAGQDVALTAEVQQLLGDHRVRAVAMSGTDGLVRGMEIADTGAPISVPVGEATLGRIFNVLGEPVDEQGPVNASATAPIHRDAPNLTELETKPKVFETGIKVIDLLAPYRQGGKVGLFGGAGVGKTVLIQELINNIAKEHGGVSVFGGVGERTREGNDLYEEFKESGVINADDLSKSKVALCYGQMNEPPGARMRVGLSALTMAEHFRDVNKQDVLLFVDNIFRFVQAGSEVSALLGRMPSAVGYQPTLGTDVGALQERVASTVEGSITSIQAVYVPADDLTDPAPATTFAHLDATTVLNRALASKGIYPAVDPLDSTSTMLQPTVVGDEHYRTARLVQSTLQRYKELQDIIAILGLDELSEDDRQTVDRARKGR

SEQ ID NO: 174489 - protein, 515 aa, Unknown
  Bacterial polypetide isolated from the Sargasso Sea
MSTKINPSEISSIIKKKIEDYKGASSESNVGEVLSTADGIVQIFGLEDAMYGELLDFGEGTYGLALNLENDSVGAVVLGDAGHIKEGQKVKTTGRILEVPVGEALKGRVIDALGRPIDGKGEVKSETNAPIEVVAPGVIDRQGVDQPVQTGIKSIDVMVPIGRGQRELIIGDRQTGKTAIAVDAIIKQKDSDITCVYVAIGQKQSTVATVVRQLEEADALKNTIVVSASAAESASLQFLAPYSGCTMGEYFRDRGEDALIIYDDLSKHAVAYRQISLLLKRPPGREAFPGDIFYLHSRLLERAARVNPDYVERLTNGKVKGKTGSLTALPIIETQASDVSAFIPTNVISITDGQIFLETDLFNSGIRPAINVGISVSRVGGAAQTKIIKKLGGGVKLALAQFRELESFSQFASDLDDATKEQLEDGQRITELFKQTQFSPRSVACISIILYAIEYKYLKDIEKDKMQSFEENLRDYFKTKHLKVWEEVNKTGDWNDDIEKKYKKVLDTFMKEGSW

SEQ ID NO: 174490 - protein, 511 aa, Unknown
  Bacterial polypetide isolated from the Sargasso Sea
MEINPSEVTKILKEQIKQFGDKAEVSEVGQVLSVGDGIARIYGLDNVQAGEMVEFSDGSKGMALNLESENVGVVIFGDDRAVKEGDTVKRTGAIVDTPVGKELLGRVVDGLGNPIDGKGALDKGIKKSRVEVKAPGIIPRKSVSEPMQTGLKSIDSLVPIGRGQRELIIGDRQTGKTAVAIDAIINQKKINESGDEKQKLYCVYVAVGQKRSTVRQIEKTLEEAGAMEYTTIVAATASDAAPLQFLAPYTGCAMGEYFRDNGMHALIIYDDLSKQAVAYRQMSLLLRRPPGREAYPGDVFYLHSRLLERAAKLSDEHGGGSLTALPIIETQGGDVSAFIPTNVISITDGQIFLETELFNQGIRPAINVGLSVSRVGSSAQTKAMKKVSGSMKLELAQYREMAAFAQFGSDLDASTQKLLNRGAKLTELLKQKQYSPMTVAEQVISVFCGVKGHLDDVEQKDIASFEAKIIEKCRSEKPEIIDSIISSGKLEDDVEKLLNELILDLKKNFNS

SEQ ID NO: 174491 - protein, 252 aa, Unknown
  Bacterial polypetide isolated from the Sargasso Sea
MTTNNKGTISQVIGAVVDVRFEENLPPILAALECKVGDKTVILEVAQHLGESTVRTIAMESTDGMTRGGDVVDTGNQIQVPVGPETLGRIMNVVGEPVDERGEIKSTDRWSIHRDAPDFVDQATETEILVTGIKVVDLLAPYSRGGKIGLFGGAGVGKTVIIMELINNIAKAHGGYSVFSGVGERTREGNDLYHEMIESGVIDLEGKESKCALVYGQMNEPPGARARVALTGLTVAEYFRDMEGPRCFIFCR

SEQ ID NO: 174492 - protein, 525 aa, Unknown
  Bacterial polypetide isolated from the Sargasso Sea
MARNRIDYQERIMQLNPSEISELIKSRIQGLEASADVRNQGTVISVTDGIVRIHGLSEVMQGEMLEFPGNTFGLALNLERDSVGAVILGEYEHISEGDIVKTTGRILEVPVGPELLGRVVDALGNPIDGKGPINAKKTDAIEKIAPGVIWRKSVSEPVQTGLKSIDAMVPVGRGQRELIIGDRQCGKTAVAVDAIINQKGKNLFCIYVAIGQKASSIMNVVRKLEETGALEYTIVVAASASESAAMQYLAPYAGCTMGEYFRDRGQDALIVYDDLTKQAWAYRQISLLLRRPPGREAYPGDVFYLHSRLLERAARVSEEYVEKFTNGEVKGKSGSLTALPVIETQAGDVTAFVPTNVISITDGQIFLETDLFNAGIRPAINAGVSVSRVGGAAQTKVVKKLSGGIRTDLAQYRELAAFAQFASDLDEATRKQLERGRRVTELLKQPQYQPLQVWELAVSLFAANNGYLDDLEVAQVLPFEKGLRDYLKSSHADLVKRIEDTKELSKDDEALLHTALKDFKKSGAY

SEQ ID NO: 174493 - protein, 459 aa, Unknown
  Bacterial polypetide isolated from the Sargasso Sea
MVEGKIVQCIGAVIDVEFPRDHMPKIYDALILEGSELTLEVQQQLGDGVVRTICLGASDGLRRGTTVKNTGNPISVPVGKPTLGRIMDVLGRPIDEAGPINSDVVRGIHQKAPAFDELSPSTELLETGIKVIDLICPFAKGGKVGLFGGAGVGKTVNMMELINNIAKEHGGYSVFAGVGERTREGNDFYHEMKDSNVLDKVALVYGQMNEPPGNRLRVALTGLTMAEHFRDEGLDVLFFVDNIYRFTLAGTEVSALLGRMPSAVGYQPTLAEEMGKLQERITSTKTGSITSVQAVYVPADDLTDPSPATTFGHLDATVVLSRDIASLGIYPAVDPLDSTSRQIDPNVIGEEHYSITRGVQQTLQRYKELRDIIAILGMDELAPEDKLAVARARKIQRFLSQPFHVAEVFTGSPGKYVPLKETIRGFKMIVEGECDHLPEQAFYMVGTIDEAFEKAKKIQ

SEQ ID NO: 174494 - protein, 141 aa, Unknown
  Bacterial polypetide isolated from the Sargasso Sea
MATIKVDVVSAEEQIFSGQAKFVALPGEAGELGILPGHTPLITRIRPGAVRIEAENGEEEFVFVAGGILEIQPGAVTVLADTAIRGKDLDEAKAEDARKRAEEALQNTGSNLEYATAQAELAYATAQLAAIQRLRKLRGQS

SEQ ID NO: 174495 - protein, 395 aa, Unknown
  Bacterial polypetide isolated from the Sargasso Sea
MVATPSTSSQTKGVVRQVIGPVLDVEFPAGKLPKILNALRIEAKNPAGQDIALTAEVQQLLGDHRVRAVAMSGTDGLVRGMEAIDTGAPISVPVGEATLGRIFNVLGEPVDEQGPVNTKDTAPIHRAAPKLTDLETKPKVFETGIKVIDLLAPYRQGGKVGLFGGAGVGKTVLIQELINNIAKEHGGVSVFGGVGERTREGNDLYEEFKESGVINADDLTQSKVALCFGQMNEPPGARMRVGLSALTMAEHFRDVNKQDVLLFVDNIFRFVQAGSEVSALLGRMPSAVGYQPTLGTDVGELQERITSTLEGSITSIQAVYVPADDLTDPAPATTFAHLDATTVLARALAAKGIYPAVDPLDSTSTMLQPSVVGDEHYKTARAVQSTLPRYKELQD

SEQ ID NO: 174496 - protein, 136 aa, Unknown
  Bacterial polypetide isolated from the Sargasso Sea
MSLTLRVLAPDQNVFDGSADEVILPSTTGQLGILPGHISLLTAIDVGVLRVRANGGWNSIALMGGFAEVDADEVTVLVNQAELGSTIDGNAAEADFQKATTVVDGMEGQPASPEKVKAQQQLNMARARMQASKSAD

SEQ ID NO: 174497 - protein, 227 aa, Unknown
  Bacterial polypetide isolated from the Sargasso Sea
MASLDDLKKRITSVKSTQKITKAMKMVAAAKLKRAQDSAEKGRPYSQKMNNIILNLSNGISDKSNAPKLLSGTGNERIHLCVVMTSDRGLCGGFNANIIKKAKSYFLKLKEEGKELKIITVGSKGNDQLKRVYGDKIIENISFKDSKNANYFDAEKVGKTIIERFQKEEFDICTIFYNQFKNVITQIPQAQQIIPLNTENNDENKSEESYEFEPDEDEILSNLLPKN

SEQ ID NO: 174498 - protein, 302 aa, Unknown
  Bacterial polypetide isolated from the Sargasso Sea
KRSTVRQIQKTLEEAGAMEYTTIVAATASDSAPLQFLAPYTGCAMGEFFRDNGMHALIIYDDLSKQAVAYRQMSLILRRPPGREAYPGDVFYLHSRLLERAAKLSDEHGGGSLTALPIIETQGGDVSAYIPTNVISITDGQIFLETELFNQGIRPAINVGLSVSRVGSAAQTKAMKKVSGSMKLELAQYREMAAFAQFGSDLDASTQQLLNRGSKLTELLKQKQYSPMTVAEQVISVFCGVKGFLDDIDLKDISEFENKIIDRCKSDKPEIIDSILSSGKLEEGSEKDLIEIITNLKKNFKS

SEQ ID NO: 174499 - protein, 290 aa, Unknown
  Bacterial polypetide isolated from the Sargasso Sea
MASLDDLKKRIASVKSTQKITKAMKMVAAAKLRRAQESAEKGRPYSEKMNNIILNLSNGISDKENAPKLLSGTGQEKTHLCVVMTSDRGLCGGFNSNIIKKAKSHFAKILDEGKELKIITVGSKGNDQLKRVYGDKIIENISFKESKNANYFDADKVGKMVIEKFEAGEFDICTIFYNQFKNVITQIPQAQQIIPLNNEGDETSSDESYEFEPDEDEILSNLLPKNISTQIFKAMLENSASEQGSRMSAMDNATRNAGEMVDKLTIEYNRSRQAAITKELIEIISGAESL

SEQ ID NO: 174500 - protein, 273 aa, Unknown
  Bacterial polypetide isolated from the Sargasso Sea
MEINPSEVTKILKEQIKNFGDKAEVTEVGQVLSVGDGIARIYGLDNVQAGEMVEFADGSKGMALNLESENVGVVIFGDDRNIKEGDVVKRTGSIVDTPVGKELLGRVVDGLGNPIDGKGPLSKNVKKTRVEVKAPGIIPRQSVSEPMQTGLKSIDSLVPIGRGQRELIIGDRQTGKTAVAVDAIINQKKINESGDEKQKLYCIYVAVGQKRSTVRQIQKTLEEAGAMEYTTIVAATASDSAPLQFLAPYTGCAMGEYFRDNGMHALIIYDDLS

SEQ ID NO: 174501 - protein, 472 aa, Unknown
  Bacterial polypetide isolated from the Sargasso Sea
MNKGIITQVIGAVVDVKFEGDLPEILTALECKNGDNRLVLEVAQHLGESTARTIAMDATEGLKRGDEVVNTNAPIKVPVGPETLGRIINVVGEPIDERGKVETKESWPIHRPAPEFNDQSTETEILVTGIKVIDLLAPYAKGGKIGLFGGAGVGKTVLIMELINNVAKAHGGFSVFAGVGERTREGNDLYHEMMESGVIKSEGPGSKAALVYGQMNEPPGARARVALTGLTVAEYFRDQEGQDVLFFVDNIFRFTQAGSEVSALLGRIPSAVGYQPTLATDMGNLQERITTTNKGSITSVQAIYVPADDLTDPAPATSFAHLDATTVLSRQIAEIGIYPAVDPLDSTSRILDPRIVGDEHYRVAREVQKILQTYKSLQDIIAILGMDELSEDDKLIVARARKIQRFLSQPFFVAEVFTGSPGKLVDLESTIKGFDAICKGEYDHLPEAAFYMVGTIEEAIEKAEKMKKDAAA

SEQ ID NO: 174502 - protein, 174 aa, Unknown
  Bacterial polypetide isolated from the Sargasso Sea
TSVQAIYVPADDLTDPAPATSFSHLDATTVLSRQIAELGIYPAVDPLDSTSRMLDPRILGEEHYSVARQVQEVLQTYKSLQDIIAILGMDELSEEDRLVVDRARKIQRFLSQPFFVAEIFTGTPGVLVPLEETIRGFKEIVEGKHDDLPEAAFYMVGTIDEAIEKAKQMEQEAA

SEQ ID NO: 174503 - protein, 305 aa, Unknown
  Bacterial polypetide isolated from the Sargasso Sea
MEINPSEVTKILKEQIKKFGDKTEVSEVGQVLSVGDGIARIYGLDNVQAGEMVEFSDGSKGMALNLESDNVGVVIFGEDRAIKEGDTVKRTGAIVDTPVGKELLGRVVDGLGNPIDGKGALDKGVKRNRVEIKAPGIIPRKSVSEPMQTGLKSVDSLVPIGRGQRELIIGDRQTGKTAVAIDTIINQKKINESNDEKQKLYCVYVAIGQKRSTVRQIEKTLEEAGAMEYTTIVAATASDAAPLQFLAPYTGCAMGEYFRDNGMHALIIYDDLSKQAVAYRQMSLLLRRPPGREAYPGDVFYLHSR

SEQ ID NO: 174504 - protein, 369 aa, Unknown
  Bacterial polypetide isolated from the Sargasso Sea
PVQTGLKAIDAMVPIGRGQRELIIGDRQTGKTAVAIDTIINQKDTGIKCIYVAIGQKQSTIANVVRKLEEYGAMDHTIVVSAAAADPAAMQYLSAYSGCAMGEYFRDRGEDALIVYDDLSKQAVAYRQISLLLRRPPGREAFPGDVFYLHSRLLERAARVNADHVEKITNGEVKGKTGSLTALPIIETQAGDVSAFVPTNVISITDGQIFLETDLFNSGVRPAINPGISVSRVGGAAQTKIIKKLGGGVRLALAQFRELASFAQFASDLDDATKEQLAHGQRITELLKQKQYSPLSVAQQAVTLFAADRGFLKDVEVEKLGSFEDALHSYFHAEAGELENRINETGDWDDDIEKQFESLLENFKKTQTY

SEQ ID NO: 174505 - protein, 382 aa, Unknown
  Bacterial polypetide isolated from the Sargasso Sea
ELKAPGIIPRQSVSEPMQTGIKALDALVPIGRGQRELIIGDRQTGKTAVAIDTILNQKTVNQSGNEKEKLYCIYVAIGQKRSTVAQIVKTLEDNGAMEYTIVVSATASEPAPLQFLSAYTGCTMGEYFRDNGMHALIVYDDLSKQAVAYRQMSLLLRRPPGREAYPGDVFYIHSRLLERAAKMSDEHGSGSLTALPIIETQAGDLSAYIPTNVISITDGQIFLETNLFFAGIRPAINVGLSVSRVGSAAQTKAMKKIAGPVKLELAQYREMAAFAQFASDLDASTKQLLERGARLVEILKQGQYSPLTVSEQVVSIYAGVRGYLDKVAVNDVVRFETEVLNEVRSSHADLLNAVANEKELSKENDEKLKSILDNIVEKFTSN

SEQ ID NO: 174506 - protein, 204 aa, Unknown
  Bacterial polypetide isolated from the Sargasso Sea
MSAGTTVQVIGAVVDVEFPSDAIPNIYDALTIEDADLTLEVQQQLGDGVVRTIAMGSSEGLKRGMSVNNTGQPISVPVGEKTLGRIMDVLGTPIDNKGDIGAEMNMPIHRTPPTYEEQASSTEMLETGIKVIDLIMPIAKGGKVGLFGGAGVGKTVTLMELIRNIAAEHSGYSVFAGVGERTREGNDFYHEMTESNVIDKVSFG

SEQ ID NO: 174507 - protein, 506 aa, Unknown
  Bacterial polypetide isolated from the Sargasso Sea
MEINPSEVTKILKEQIKKLGDRAEVSEVGQVLSVGDGIARIYGLDNVQAGEMVEFSDGSKGMALNLESDNVGVVIFGDDREIKEGDTVKRTGAIVDVPVGKQLLGRVVDGLGNPIDGKGALDKSLERKRVEVKAPGIIPRQSVGEPMQTGLKAIDSLIPVGRGQRELIIGDRQTGKTAVAIDTIINQKKINESDDESKKLYCIYVAIGQKRSTVAQIVKTLEDAGAMEYTTIVSATASDSAPLQFLAPYTGCTMGEYFRDNGMHALIIYDDLSKQAVAYRQMSLLLRRPPGREAYPGDVFYLHSRLLERAAKLSDENGGGSLTALPIIETQAGDVSAYIPTNVISITDGQIFLETELFNQGIRPAVNVGLSVSRVGSAAQTKAMKSVAGSIKLELAQYREMAAFAQFGSDLDASTQKLLNRGSKLTELLKQGQYSPMTVAEQVISIFCGVKGYLDDIELKDVADFENKVLQKCKSDKPEIMESIAKTGKIEEDIEKQLVELIKGIK

SEQ ID NO: 174508 - protein, 410 aa, Unknown
  Bacterial polypetide isolated from the Sargasso Sea
MSKKGNITQVIGAVVDVKFDGELPEILTALECDNGGNRLVLEVAQHLGESSVRTIAMDSTEGLKRGDEVKDTGAPIQVPVGPETLGRIVNVIGEPIDEKGQISTKENWPIHRQAPSFNDQSTETEILVTGIKVIDLLAPYAKGGKIGLFGGAGVGKTVIIMELINNIAKAHGGFSVFAGVGERTREGNDLYHEMIESGVIKPEGTGSKAALVYGQMNEPPGARARVALTGLTVAEYFRDQEGQDVLFFVDNIFRFTQAGSEVSALLGRIPSAVGYQPTLATDMGNLQERITTTNKGSITSVQAIYVPADDLTDPAPATSFSHLDATTVLSRQIAELGIYPAVDPLDSTSRILDPRVVGDEHYRVARSVQKILQTYKSLQDIIAILGMDELSEDDKLTVARARKIQRFLSH

SEQ ID NO: 174509 - protein, 475 aa, Unknown
  Bacterial polypetide isolated from the Sargasso Sea
MASNKAGKVTQVLGAVVDVAFEGELPPILNALSTKVGDQDLILEVAQHLGENTVRTIAMDATEGLQRGQEVQDNGDPISVPVGPETLGRIMNIIGEPIDERGPIESKKSLPIHRAAPDFVDQSTETEVLVTGIKVIDLLAPYSKGGKIGLFGGAGVGKTVLIMELINNVAKAHGGYSVFAGVGERTREGNDLYHEMIESGVINLEGDTSKVSLVYGQMNEPPGARARVALSGLTQAEYFRDEENQDVLFFVDNIFRFTQAGSEVSALLGRIPSAVGYQPTLATDMGALQERITTTNKGSITSVQAIYVPADDLTDPAPATSFSHLDATTVLNRSIAELGIYPAVDPLDSTSRILEPRTLGEKHYQVARDVQKTLQTYKSLQDIIAILGMDELSEEDKLVVSRARKIQRFLSQPFHVAEVFTGSPGKFVSLEDTIKGFDGLVKGDYDHIPEAAFYLVGTIEEALEKAKKMAEEATK

SEQ ID NO: 174510 - protein, 288 aa, Unknown
  Bacterial polypetide isolated from the Sargasso Sea
SLKDLKNRIGSVKSTQKITSAMKMVAAAKLRKAQEQALASRPYTSLMDSVVSKISSKTIGSSIDLLSGKEEIKTQLLVVFSADRGLCGGFNGSITRAVRSEIKKLKDDGINVKLLMVGKKSADALNREFSDFFVEKIDGNSAKPNYTDAEVLAKKIIDLFENNEFGVCRVIFNKFVSAITQEVTFKSLIPVEVKNDEIDENDSSSLYEFEPSEEEILNDLLPRNLATQLYSSQIESTASELAARMTAMDNATRNAGEMIDNLTLQYNRTRQAVITKELIEIISGAEAL

SEQ ID NO: 174511 - protein, 203 aa, Unknown
  Bacterial polypetide isolated from the Sargasso Sea
MAKKPSTKQNGKISQVIGAVVDVEFDADLPQILDALQVDNNGQKLILEVAQHLGENEVRTIAMDSTDGLVRGMDVVQTGAPITVPVGPETLGRILNVIGDPVDDGKPVKSKSTLPIHRDAPEYVDQSTSADILVTGIKVVDLLAPYAKGGKIGLFGGAGVGKTVLIMELINNVAKAHGGYSVFAGVGERTREGNDLFHEMVES

SEQ ID NO: 174512 - protein, 259 aa, Unknown
  Bacterial polypetide isolated from the Sargasso Sea
MSKGIITQVIGAVVDVKFDGELPEILTALECKNGDNRLVLEVAQHLGESNVRTIAMDATEGLKRGDEVINTKSPIQVPVGPETLGRIINVIGEPIDERGQVKTKESWPIHRAAPEFNEQSTETEILVTGIKVIDLLAPYAKGGKIGLFGGAGVGKTVLIMELINNVAKAHGGFSVFAGVGERTREGNDLYHEMIDSGVIKKDGEGSKAALVYGQMNEPPGARARVALTGLTVAEYFRDQEGQDVLFFVDNIFRFTQGRL

SEQ ID NO: 174513 - protein, 475 aa, Unknown; identical to SEQ ID NO: 174509
  Bacterial polypetide isolated from the Sargasso Sea

SEQ ID NO: 174514 - protein, 387 aa, Unknown
  Bacterial polypetide isolated from the Sargasso Sea
VKRSRVEVKAPGIIPRKSVSEPMQTGLKSIDSLVPIGRGQRELIIGDRQTGKTAVAIDAIINQKKINESGDEKQKLYCIYVAIGQKRSTVRQIEKTLEEAGAMEYTTIVAATASDAAPLQFLAPYTGCTMGEYFRDNGMHSLIIYDDLSKQAVAYRQMSLLLRRPPGREAYPGDVFYLHSRLLERAAKLSDDHGGGSLTALPIIETQGGDVSAFIPTNVISITDGQIFLETELFNQGIRPAINVGLSVSRVGSSAQTKAMKKVSGSMKLELAQYREMAAFAQFGSDLDASTQKLLNRGSKLTELLKQKQYSPMTVSEQVISIFCGVKGYLDDIEQKNIADFENKIIEKCKSEKQEILDSIKSSGKLEEDAEKSLTEVITELKKNFKS

SEQ ID NO: 174515 - protein, 284 aa, Unknown
  Bacterial polypetide isolated from the Sargasso Sea
DLYHEMIESGVIKTYGKGSKAALVYGQMNEPPGARARVALTGLTVAEYFRDKEGQDVLFFVDNIFRFTQAGSEVSALLGRIPSAVGYQPTLATDMGNLQERITSTDKGSITSVQAIYVPADDLTDPAPATSFSHLDATTVLSRQIAEIGIYPAVDPLDSTSRILDPRVVGEEHYRVARDVQKILQAYKSLQDIIAILGMDELSEEDKLTVARARKIQRFLSQPFFVAEVFTGSPGKLVDLNDTIKGFDAICKGEYDHLPEAAFYMVGGIEEVIEKAEKLSKDSK

SEQ ID NO: 174516 - protein, 248 aa, Unknown
  Bacterial polypetide isolated from the Sargasso Sea
VALTGLTVAEYFRDQEGHDVLFFVDNIFRFTQAGSEVSALLGRIPSAVGYQPTLATDMGNLQERITTTNKGSITSVQAIYVPADDLTDPAPATSFAHLDATTVLSRQIAEIGIYPAVDPLDSTSRILDPRIVGDEHYRVAREVQKILQTYKSLQDIIAILGMDELSEEDKLVVARARKIQRFLSQPFFVAEVFTGSPGKLVDLESTIKGFDAICKGEYDHLPEAAFYMVGTIEEAIEKAEKMSKDAAA

SEQ ID NO: 174517 - protein, 418 aa, Unknown
  Bacterial polypetide isolated from the Sargasso Sea
MDINPSEITKILKEQIKNLGEKTEVSEIGKVLSVGDGIARVYGLDNVQAGEMVEFKDGSKGMALNLESDNVGIVIFGDDKAIKEGDTVKRTGAIVDVPVGKDLLGRVVDALGNPIDGKDNLKKGIKRQRVEVKAPGIIPRKSVNEPMQTGLKAIDSLIPIGRGQRELIIGDRQTGKTAVAIDTIINQKKINESSDEKKKLYCIYVAIGQKRSTVAQILKTLQDAGAMDYTIIVSATASDPAPLQFLAPYTGCTFGEFFRDNGMHALIIYDDLSKQAVAYRQMSLLLRRPPGREAYPGDVFYLHSRLLERAAKLNDENGGGSLTALPIIETQAGDVSAYIPTNVISITDGQIFLGTELFNQGIRPAVNVGLSVSRVGSAAQTKAMKKVAGSIKLELAQYREMAAFAQFGSDLDASTQNF

SEQ ID NO: 174518 - protein, 153 aa, Unknown
  Bacterial polypetide isolated from the Sargasso Sea
MSNGLVTQIIGAVIDVEFEKNNIPQVYEAIKITDTGTVLEVQQQLGDGIVRAIAMGTTEGLKRGLTAERTNAPISVPVGEKTLGRIMDVLGNPIDECGPIGEDEQMPIHRKPPSYMDQSLSDDLLETGIKVIDLICPFAKGGKIGLFGGAGCW

SEQ ID NO: 174519 - protein, 328 aa, Unknown
  Bacterial polypetide isolated from the Sargasso Sea
IGLFGGAGVGKTVLIMELINNVAKAHGGFSVFAGVGERTREGNDLYHEMMESGVIKPEGPGSKAALVYGQMNEPPGARARVALTGLTVAEYFRDQEGQDVLFFVDNIFRFTQAGSEVSALLGRIPSAVGYQPTLATDMGNLQERITTTNKGSITSVQAIYVPADDLTDPAPATSFAHLDATTVLSRQIAEIGIYPAVDPLDSTSRILDPRIVGDEHYRVAREVQKILQTYKSLQDIIAILGMDELSEEDKLVVARARKIQRFLSQPFFVAEVFTGSPGKLVDLESTIKGFDAICKGEYDHLPEAAFYMVGTIEEAIEKAEKMKKDAAA

SEQ ID NO: 174520 - protein, 268 aa, Unknown
  Bacterial polypetide isolated from the Sargasso Sea
EVQQLLGDHRIRAVAMSTTDGLVRGMEALDTGAPISVPVGEGTLGRIMNVLGDPVDEQGPVKADTTSPIHRGAPKLTELETKPKVFETGIKVIDLLAPYRQGGKVGLFGGAGVGKTVLIQELINNIAKEHGGVSVFGGVGERTREGNDLYEEFKDSGVINAEDLSKSKVALCYGQMNEPPGARMRVGLSALTMAEHFRDVNKQDVLLFVDNIFRFVQAGSEVSALLGRMPSAVGYQPTLGTDVGELQERITSTPGRFHHLDSGRLRPC

SEQ ID NO: 174521 - protein, 247 aa, Unknown
  Bacterial polypetide isolated from the Sargasso Sea
MLNIRPDEISSIIKQQIENYKQEKPSTTVGTVLQVGDGIARIYGLNKVMAGELLDFEDGTIGIALNLEVDNVGAVLMGDGLSIQEGSKVTATGKIAQIPVGENYLGRVVDALARPIDGKGEISTTESRLIESPAPGIISRRSVYEPMQTGLIAIDAMIPIGRGQRELIIGDRQTGKTAVAIDTILNQKTTGVICIYVAIGQKASSVAQIVTNLEERGAMDYTIIVSETANSPAPLQYLAPIYWSYIS

SEQ ID NO: 174522 - protein, 279 aa, Unknown
  Bacterial polypetide isolated from the Sargasso Sea
VSATASEPAPLQFLAPYSGVSMGEYFRDKGKHVLCIYDDLSKQAVAYRQLSLLLRRPPGREAFPGDVFYLHSRLLERACKLNEENGSGSLTALPIIETQAGDVSAYIPTNVISITDGQIFLSTDLFNSGIRPAINVGLSVSRVGGAAQVKAMKQVAGTLRLDLAQFREKEAFAQFGSDLDKATQQQLARGVRLVETLKQPEYNPMPWEEQVITIFAATKGYLDGFPLSEIQRFEEGFLSLMKSKHSELMKQISDDLSISDDSSSKLVSVLDEYVKSFAA

SEQ ID NO: 174523 - protein, 283 aa, Unknown
  Bacterial polypetide isolated from the Sargasso Sea
MASLKDIRKRIDSVKKTQKTTSAMNMVSAAKLKRAENNIRSAIPYSDKLKEVVSSLRSRLSDEENPLFQEKDGEKTAVILITSDRGLCGGFNTNLCKRVLEQFGDIPTDRLTMTMIGRKGFDYFKRRSYEILGNFQETRPEDQINVVREVISQCIRRYENDELDKVYLAYNHYRSVISQKPVIEQLIPIPKIETESPDEREVSFEPSPEAILDRLLDKFLENRVYVSWLDSNAGEHAARMTAMDSATKNAGDMIDKLQLKYNRTRQAAITTELIEIISGAESM

SEQ ID NO: 174524 - protein, 369 aa, Unknown
  Bacterial polypetide isolated from the Sargasso Sea
MNTGKVVQVLGPVVDVIFEDGELPEIFTALEINTESTGKLICEVQQHLGENTVRTVSMGATEGLSRGIDVKDLGSPITTPVGKASLGRIINVTGDPVDEAGPIEADQRWPIHREPPTFEEQETDADILVTGIKVLDLLCPFLKGGKIGLFGGAGVGKTVVIMELIRNIAAEHGGFSVFAGVGERTREGNDLWNEMKESGVLDKTSLVYGQMNEPPGARARVALTGLTVAEYFRDEEGADVLMFIDNIFRFTQAGSEVSALLGRIPAAVGYQPTLSTEMGNLQERITSTKKGSITSVQAIYVPADDLTDPAPATTFSHLDATVVLNRSIAELGIYPAVDPLDSTSRILTADILGEEHYSVANEVQQLLQR

SEQ ID NO: 174525 - protein, 513 aa, Unknown
  Bacterial polypetide isolated from the Sargasso Sea
MDIRAAEISTILKDQIENFGAEAEVTEVGKVLSVGDGIARVHGLDQVQAGEMVEFPGGIAGMALNLERDNVGVVIFGSDKTIKEGDVVKRTGSIVDVPIGKGLLGRVVDALGNPIDGKGTLKNVKRTRVESKAPGIMPRESVSEPMQTGLKAIDSLIPVGRGQRELIIGDRQTGKTAIAIDTFLNQKSTNDKAGKDDTKKLFCIYVAVGQKRSTVAQIVKTLEERGALEYSIVVAATASDPAPMQFLAPYSAAAMGEFFRDNGMHAVVVYDDLSKQAVAYRQMSLLLRRPPGREAYPGDVFYLHSRLLERAAKLNGDNGSGSLTALPIIETQGGDVSAFIPTNVISITDGQIFLETELFYKGIRPAVNVGLSVSRVGSAAQIKAMKQVAGTIKLDLAQYREMAAFAQFASDMDASTRQLLSRGERLTELLKQSQYSPMEVEEQVAVIFAGVKGYLDQIPTQKIGEFEQALLQKLNTKGSKVLDSIRKDKAISDDTEKSLKDTLDQLVKNFLNY

SEQ ID NO: 174526 - protein, 495 aa, Unknown
  Bacterial polypetide isolated from the Sargasso Sea
MVSIRPDEISSILKQQITDYDQSVSVSNVGTVLQIGDGIARIYGLDQVMAGELLEFEDGTEGIALNLEDDNVGAVLMGEALGVQEGSNVKSTGKIASVPVGEAMQGRVVNPLGQPIDGKGEIPTSDTRLIEEMAPGIIKRRSVHEPMQTGITSIDAMIPVGRGQRELIIGDRQTGKSAIAIDTIINQKGQDVVCVYVAIGQKSASVANIVEVLRERGALDYTVVVSAGASEPAALQYLAPYTGAAIAEHFMYQGKATLVIYDDLTKQAQAYRQMSLLLKRPPGREAYPGDVFYLHSRLLERAAKLSDAMGGGSMTALPIIETQAGDVSAYIPTNVISITDGQIFLSADLFNSGLRPAINVGISVSRVGGAAQTKAIKKIAGTLKLELAQFDELAAFSQFASDLDEATQQQLERGKRLRELLKQPQFSPLNLAEQVAVVYAGVKGLIDEVPVEDVTKFATELREYLKLNKAEFIEEILKEKKLNDGIRSDTQRGDK

SEQ ID NO: 174527 - protein, 331 aa, Unknown
  Bacterial polypetide isolated from the Sargasso Sea
KGGKIGLFGGAGVGKTVIIMELINNIAKAHGGFSVFAGVGERTREGNDLYHEMIESGVIKPEGPGSKAALVYGQMNEPPGARSRVALTGLTVAEYFRDQEGQDVLFFVDNIFRFTQAGSEVSALLGRIPSAVGYQPTLATDMGNLQERITTTNKGSITSVQAIYVPADDLTDPAPATSFAHLDATTVLSRQIAELGIYPAVDPLDSTSRILDPRIVGDEHYRVAREVQKILQTYKSLQDIIAILGMDELSEEDKLIVARARKIQRFLSQPFFVAEVFTGSPGKLVDLESTIKGFDAICKGEYDHLPEAAFYMVGTIEEAIEKAEKMAKDVA

SEQ ID NO: 174528 - protein, 361 aa, Unknown
  Bacterial polypetide isolated from the Sargasso Sea
MANNLTGKISQVLGAVVDVEFDGELPAIMNALEVDNNGTRLMLEVAQHLGENAVRTIAMDTTDGLVRGQTATDTGAPISMPVGPETLGRIMNVVGEPVDERGDIGTSKSYPIHRPAPEFVDQSTETEVLVTGIKVVDLLAPYARGGKIGLFGGAGVGKTVLIMELINNIAKAHGGYSVFAGVGERTREGNDLYHEMIESGIIDLKGKDSKVALVYGQMNEPPGARARVALSGLTQAEYFRDEEGQDVLFFVDNIFRFTQAGSEVSALLGRIPSAVGYQPTLATDMGALQERITTTKKGSITSVQAIYVPADDLTDPAPATSFSHLDATTVLNRAISEKGIYPAVDPLDSTSRILDPQVVGD

SEQ ID NO: 174529 - protein, 422 aa, Unknown
  Bacterial polypetide isolated from the Sargasso Sea
ELGSIVDTPVGKELLGRVVDGLGNPIDGKGSLDKGVKKSRVEVKAPGIIPRQSVSEPMQTGLKSIDSLVPIGRGQRELIIGDRQTGKTAVAIDTIINQKKINESGDEKQKLYCIYVAVGQKRSTVRQIQKTLEEAGAMEYTTIVAATASDSAPLQFLAPYTGCAMGEYFRDNGMHALIIYDDLSKQAVAYRQMSLILRRPPGREAYPGDVFYLHSRLLERAAKLGDDHGGGSLTALPIIETQGGDVSAYIPTNVISITDGQIFLETELFNQGIRPAINVGLSVSRVGSAAQTKAMKKVSGSMKLELAQYREMAAFAQFGSDLDASTQQLLNRGSKLTELLKQKQYTPMTVAEQVISVFCGVKGYLDDIDLKDIAEFEIKIIERCKSDKPDIIDSILTSGKLEENPEKSLIEVITNLKKTFKS

SEQ ID NO: 174530 - protein, 221 aa, Unknown
  Bacterial polypetide isolated from the Sargasso Sea
MKIRAEEISNIIQQQIENFEKQTTKTEVGTVLEVGDGIARVYGLDNIVAGELVEFPNNLQGMALNLEEDNVGVVLFGDDRNIKEGDEARRTERIAEVPVGDAMLGRVVDPLGQPIDGKGPIETSESRRVEVIAPGIVTRKSVHEPLQTGLKAIDSMVPIGRGQRELIIGDRQTGKTAIAMDTIINQKGGDVVCIYVGIGQKRSTMAKIVSKLQEYGARNTP

SEQ ID NO: 174531 - protein, 367 aa, Unknown
  Bacterial polypetide isolated from the Sargasso Sea
KSYPIHRPAPEFVDQSTETEVLVTGIKVVDLLAPYARGGKIGLFGGAGVGKTVLIMELINNIAKAHGGYSVFAGVGERTREGNDLYHEMIESGIIDLKGKDSKVALVYGQMNEPPGARARVALSGLTQAEYFRDEEGQDVLFFVDNIFRFTQAGSEVSALLGRIPSAVGYQPTLATDMGALQERITTTKKGSITSVQAIYVPADDLTDPAPATSFSHLDATTVLNRAISEKGIYPAVDPLDSTSRILDPQVVGDDHYRVAREVQRVLQTYKSLQDIIAILGMDELSEEDKLTVARARKIEKFLSQPFFVAEVFTGSPGKYVDLEDTIKSFDGLVKGEYDHMPEAAFYMVGGIDEAIEKAKKLEAEAA

SEQ ID NO: 174532 - protein, 406 aa, Unknown
  Bacterial polypetide isolated from the Sargasso Sea
KFDGELPEILTALECNNAGNRLVLEVAQHLGESSVRTIAMDATEGLKRGDEVTDTGSPIKVPVGPETLGRIVNVIGEPIDEKGEVKTKESWPIHRAAPEFNDQSTETEILVTGIKVVDLLAPYAKGGKIGLFGGAGVGKTVIIMELINNIAKAHGGFSVFAGVGERTREGNDLYHEMIESGVIKPEGPGSKAALVYGQMNEPPGARSRVALTGLTVAEYFRDQEGQDVLFFVDNIFRFTQAGSEVSALLGRIPSAVGYQPTLATDMGNLQERITTTNKGSITSVQAIYVPADDLTDPAPATSFAHLDATTVLSRQIAELGIYPAVDPLDSTSRILDPRIVGDEHYRVAREVQKILQTYKSLQDIIAILGMDELSEEDKLIVARARKIQRFLSQPFFVAESIYRFSR

SEQ ID NO: 174533 - protein, 325 aa, Unknown
  Bacterial polypetide isolated from the Sargasso Sea
MEINPSEVTKILKEQIKNFGDKAEVTEVGQVLSVGDGIARIYGLDNVQAGEMVEFADGSKGMALNLESENVGVVIFGDDRNVKEGDVVKRTGNIVDTPVGKELLGRVVDGLGNPIDGKGPLDKGIKKSRVEVKAPGIIPRQSVSEPMQTGLKSIDSLVPIGRGQRELIIGDRQTGKTAVAVDAIINQKKINESGDEKQKLYCIYVAVGQKRSTVRQIQKTLEEAGAMEYTTIVAATASDSAPLQFLAPYTGCTMGEYFRDNGMHALIIYDDLSKQAVAYRQMSLLLRRPPGREAYPGDVFYLHSRLLERAAKLSDEHGGGSLTAL

SEQ ID NO: 174534 - protein, 238 aa, Unknown
  Bacterial polypetide isolated from the Sargasso Sea
MSKGIITQVIGAVVDVKFEGELPEILTALECKNGDNRLVLEVAQHLGESTARTIAMDATEGLKRGDEVINTKAPIKVPVGPETLGRIINVVGEPIDERGDVKTKESWPIHRPAPEFNDQSTETEILVTGIKVIDLLAPYAKGGKIGLFGGAGVGKTVLIMELINNVAKAHGGFSVFAGVGERTREGNDLYHEMIESGVIKKEGSGSKAALVYGQMNEPPGARARVALTGLTVAEYLEI

SEQ ID NO: 174535 - protein, 514 aa, Unknown
  Bacterial polypetide isolated from the Sargasso Sea
MEELNPSEISQVIKQKIDALDTSAKPSNEGTVVFLADGIARIHGLGEVMNGELIEFDHGVMGMALNLERDSVGAVILGDYKLLAEGSSAKCTSRILEVPVGEALLGRVVDSLGAPIDGKGEIKTTETAPVEKVAPGVISRKSVDQPVQLGIKAVDSMVPIGRGQRELIIGDRQTGKTAIAIDAIINQKDTGVKCIYVAVGQKQSSIAQVVRTLEEYGAMENTIVVAAAAADPAPMQYIAPFSACSMGEYFRDRGEDALIIYDDLSKQAVAYRQMSLLLRRPPGREAYPGDVFYLHSRLLERAARVSEEYVESFTEGKVKGKTGSLTALPIIETQAGDVSAFVPTNVISITDGQIFLESSLFSSGLKPAMDPGISVSRVGGAAQVPIIKKLGGGIKTALAQYRELEAFAQFASDLDEASKEQLEHGVRVTELTKQDQFSPMSVAEMGLMLFTANEGFLREVEVEKIKDFEKALISYMNAEHKDLMDRVSETGEYNDEVEGAFREALDKFMSTQTW

SEQ ID NO: 174536 - protein, 333 aa, Unknown
  Bacterial polypetide isolated from the Sargasso Sea
VAIDTIINQKKINESNDEKQKLYCIYVAIGQKRSTVRQIEKSLEEAGAMEYTTIVAATASDAAPLQFLAPYTGCAMGEYFRDNGMHALIIYDDLSKQAVAYRQMSLLLRRPPGREAYPGDVFYLHSRLLERAAKLSDEHGGGSLTALPIIETQGGDVSAFIPTNVISITDGQIFLETNLFNQGIRPAINVGLSVSRVGSSAQTKAMKKVSGSMKLELAQYREMAAFAQFGSDLDASTQKLLNRGSKLTELLKQKQYSPMTVAEQVISVFCGVKGYLDDLDLKDISSFETKIIEKCKSEKPEILEGISKSGKLEEDTENLLVETIKELKQNFNS

SEQ ID NO: 174537 - protein, 176 aa, Unknown
  Bacterial polypetide isolated from the Sargasso Sea
MRKGKITQVIGAVVDVKFDGELPEILTALECNNSGNRLVLEVAQHLGESSARTIAMDATEGLKRGDEVTDTGSPIKVPVGPETLGRIVNVIGEPIDEKGEVKTKESWPIHRAAPEFNDQSTETEILVTGIKVVDLLAPYAKGGKIGLFGGAGVGKTVIIMELINNIAKAPWWLLQY

SEQ ID NO: 174538 - protein, 473 aa, Unknown
  Bacterial polypetide isolated from the Sargasso Sea
MTDNIGKVTQVIGPVVDIQFEGDLPNILDGLEIDNSGERLVLEVAQHLGEKTVRAIAMSATDGLVRGKEVKATGKPISVPVGPEMLGRIVNVIGEPVDERGPVKTKSSYPIHRSAPSYTDQSTESEVLVTGIKVVDLLAPYAKGGKIGLFGGAGVGKTVLIMELINNIAKGHGGYSVFAGVGERTREGNDLYHEMIESGVIDLKGDQSKAALVYGQMNEPPGARSRVALSGLTMAEYFRDEEGQDVLFFVDNIFRFTQAGSEVSALLGRIPSAVGYQPTLATDMGTLQERITSTKKGSITSVQAIYVPADDLTDPAPATSFAHLDATTVLSRQIAELGIYPAVDPLDSTSRILDPRVIGEEHYNVARDVQSILQSYKSLQDIIAILGMDELSEEDKLVVSRARKIQRFLSQPFHVAEVFTGSPGKFVELEDTIKGFKALCSGEYDHLPEAAFYMVGTMEEAVEKAKTMEEEAA

SEQ ID NO: 174539 - protein, 197 aa, Unknown
  Bacterial polypetide isolated from the Sargasso Sea
MEINPSEVTKILKEQIKNFGDKAEITEVGQVLSVGDGIARIYGLDNVQAGEMVEFADGSKGMALNLESENVGVVIFGDDRNIKEGDIVKRTGNIVDTPVGKELLGRVVDGLGNPIDGKGALDKSVQKSRVEVKAPGIIPRQSVSEPMQTGLKSIDSLVPIGRGQRELIIGDRQTGKTAVAIDAIINQKKINESGRKT

SEQ ID NO: 174540 - protein, 353 aa, Unknown
  Bacterial polypetide isolated from the Sargasso Sea
MYGELIEFENGVLGLALNLEQDSVGAVVLGDYLGLIEGQKAVCTGRILEVPVGEELLGRVVDALGSPIDGKGEIKTEMTAPVEVVAPGVIARQSVDQPVQIGLKAVDAMVPIGRGQRELIIGDRQTGKTAVAVDAIINQKGTGIKCIYVAIGQKQSTVVNVVKKLEEHGALEHTIIVSASASDPAPMQYLSAYSGCSMGEYFRDKGEDALIVYDDLSKQAVAYRQVSLLLKRPPGREAYPGDVFYLHSRLLERAARVNADYVEKATNGKVKGKTGSLTALPIIETQAGDVSAFVPTNVISITDGQIFLETDLFNSGIRPAINPGISVSRVGGAAQTKIMKKLSGGVRTALAQY

SEQ ID NO: 174541 - protein, 465 aa, Unknown
  Bacterial polypetide isolated from the Sargasso Sea
MSNGLVTQIIGAVIDVEFEKNNIPQVYEAIKITDTGTVLEVQQQLGDGIVRAIAMGTTEGLKRGLTAERTNAPISVPVGEKTLGRIMDVLGNPIDECGPIGEDEQMPIHRKPPSYMDQSLSDDLLETGIKVIDLICPFAKGGKIGLFGGAGVGKTVNMMELINNIATEHSGLSVFAGVGERTREGNDFYYEMQESGVVNVEKPSESKVAMVYGQMNEPPGNRLRVALTGLTMAEKFRDEGRDVLLFIDNIYRYTLAGVEVSALLGRMPSAVGYQPTLAEEMGALQERITSTKDGSITSIQAVYVPADDLTDPSPATTFAHLDATVVLSRQIAELGIYPAVDPLDSTSRQLDPLVVGEEHYNVAQGVQGVLQKYKELKDIIAILGMDELSEEDKLAVARARKVERFLSQPFTVAEVFTGSPGKYVKLEDTIKSFKGILAGDYDDLPEQAFYMVGTIEEAVEKAKTL

SEQ ID NO: 174542 - protein, 387 aa, Unknown
  Bacterial polypetide isolated from the Sargasso Sea
HREAPPFEQLSTSTEVLFTGIKVIDLIEPYAKGGKIGLFGGAGVGKTVLIQELINNIAKGHGGLSVFAGVGERTREGNDLLREMLESGIIDYGKEFMESMENGGWDLSKVDKKALENSKATFVFGQMNEPPGARARVALSGLTVAEYFRDGSGDGQGKDVLFFVDNIFRFTQAGSEVSALLGRMPSAVGYQPTLATEMGAMQERITSTKKGSITSVQAVYVPADDLTDPAPATTFSHLDATTVLSRKIAELGIYPAVDPLDSTSRILTPEILGDDHYNCAQRVKEMLQKYKELQDIIAILGMEELSEEDKLVVSRARRVQRFLSQPFHVAEQFTGIPGVLVDIKDTIKGFNMIMDGELDHLPEAAFNLKGTIEEAIEAGEKMIAEAK

SEQ ID NO: 174543 - protein, 197 aa, Unknown
  Bacterial polypetide isolated from the Sargasso Sea
VGYQPTLSTEMGNLQERITSTNKGSITSVQAIYVPADDLTDPAPATTFSHLDATVVLSRAITELGIYPAVDPLDSTSRILSADVLGEDHYNVAHEVQILLQRYKDLQDIIAILGMDELSEEDKVVVSRARKVQRFLSQPFFVAETFTGTSGEYVDIKDTIKGFREILDGKHDDLPEQAFYMVGTIDQVMEKAKKLSN

SEQ ID NO: 174544 - protein, 513 aa, Unknown
  Bacterial polypetide isolated from the Sargasso Sea
MTINPTEISDIIKAKIKEYDIKSTAHNEGTVVSVSDGIAIIYGITEALQGEMLEFPNKTFGMALNLERDSVGAVILGDYKHISEGDTVKCTGRILEVPVGNELLGRVVNSLGEPIDNNGPINSKDTSPIEKIAPGVIERKSVDQPVQTGLKSVDAMVPIGRGQRELIIGDRQTGKTAVAIDAIINQKDTGVKCIYVAIGQKASSVAQVVRKLEEHDALKHTIIVAATASDSAAMQYIAPYAGCAMGEYFRDIGEDALIVYDDLTKQAWAYRQVSLLLKRPPGREAYPGDVFYLHSRLLERSARINEDAVSDLTKGKVTGKTGSLTALPVIETQAGDVSAFVPTNVISITDGQIFLESDLFNAGIRPAINAGLSVSRVGGAAQTKIIKKLGGGVRLALAQYRELAAFSQFASDLDDATKKQLDRGQRVTELMKQNQYSPLSVAEMALSLYAANEGYFDDVEIKKVMAFERALHEFARSKHKDLLDMINGSLDYNDDIAAKMKSTMDDFKANGVW

SEQ ID NO: 174545 - protein, 291 aa, Unknown
  Bacterial polypetide isolated from the Sargasso Sea
MASLDDLKKRISSVKSTQKITKAMKMVAAAKLRRAQENAEKGRPYSEKMNNIILNLSSGISDKENAPKLLTGTGEEKTHLCVVMTSDRGLCGGFNTNIIKKAKNYFQKILKENKILKIITVGSKGYDQLKRHYKENIIEKISFKDSKNINYFDADKVGKIIIDRFEKKEFDVCAIFYNQFKNVITQIPQEQQIIPLKSNEEKETSSNNSYEFEPEEDEILSNLLPKNISTQIFKAMLENSASEQGSRMSAMDNATRNAGEMVDKLTIQYNRSRQAAITKELIEIISGAESL

SEQ ID NO: 174546 - protein, 212 aa, Unknown
  Bacterial polypetide isolated from the Sargasso Sea
FYLHSRLLERAAKLSDEHGGGSLTALPIIETQGGDVSAFIPTNVISITDGQIFLETNLFNQGIRPAINVGLSVSRVGSSAQTKAMKKVSGSMKLELAQYREMAAFAQFGSDLDASTQKLLNRGSKLTELLKQKQYSPMTVAEQVISVFCGVKGYLDDLDLKDISSFERKIIEKCKSEKPEILEAISKSGKLEEDTENLLVETIKELKQNFNS

SEQ ID NO: 174547 - protein, 296 aa, Unknown
  Bacterial polypetide isolated from the Sargasso Sea
GVGERTREGNDLYHEMIESGVIKKEGKGSKAALVYGQMNEPPGARARVALTGLTVAEYFRDKEGQDVLFFIDNIFRFTQAGSEVSALLGRIPSAVGYQPTLATDMGNLQERITSTGKGSITSVQAIYVPADDLTDPAPATSFSHLDATTVLSRQIAELGIYPAVDPLDSTSRILDPRVVGDEHYRVAREVQKILQAYKSLQDIIAILGMDELSEEDKLTVARARKIQRFLSQPFFVAEVFTGSPGKLVDLESTIKGFDAICKGEYDHLPEAAFYMVGSIEEAIEKADKIKKETKVA

SEQ ID NO: 174548 - protein, 471 aa, Unknown
  Bacterial polypetide isolated from the Sargasso Sea
MKKGKITQIIGAVVDVKFDGELPEILTALECNNAGNRLVLEVAQHLGESSVRTIAMDATEGLKRGDEVTDTASPIKVPVGPETLGRIINVIGEPIDEKGEVKTKESWPIHRAAPEFNDQSTETEILVTGIKVVDLLAPYAKGGKIGLFGGAGVGKTVIIMELINNIAKAHGGFSVFAGVGERTREGNDLYHEMIESGVIKPEGPGSKAALVYGQMNEPPGARSRVALTGLTVAEYFRDQEGQDVLFFVDNIFRFTQAGSEVSALLGRIPSAVGYQPTLATDMGNLQERITTTNKGSITSVQAIYVPADDLTDPAPATSFAHLDATTVLSRQIAELGIYPAVDPLDSTSRILDPRIVGDEHYRVAREVQKVLQTYKSLQDIIAILGMDELSEEDKLTVARARKIQRFLSQPFFVAEVFTGSPGKLVDLESTIKGFDAICKGEYDHLPEAAFYMVGTIEEAIEKAEKMKKDAA

SEQ ID NO: 174549 - protein, 509 aa, Unknown
  Bacterial polypetide isolated from the Sargasso Sea
MTINPSEVTKLLKDQIKNFGEKAEVSEIGKVLSVGDGIARVYGLDNVQAGEMVEFEDGSKGMALNLENDNVGVVIFGDDRNIKEGDTIKRTNAIVDVPVGKELLGRVVDGLGVPIDGKGPLSAKTRKRVEVKAPGIIPRQSVNEPMQTGLKSIDSLIPIGRGQRELIIGDRQTGKTAVAIDAIINQKKINESSDEKKKLYCVYVAIGQKRSTVAQITKTLEEAGALKYTTIVAATASDSAPLQFLAPYTGCTIGEFFRDNGMHALIVYDDLSKQAVAYRQMSLLLRRPPGREAYPGDVFYLHSRLLERAAKLNEKSGGGSLTALPIIETQAGDVSAYIPTNVISITDGQIFLETELFNQGIRPAVNVGLSVSRVGSAAQTKAMKKVAGSIKLELAQYREMAAFAQFGSDLDASTQQLLNRGAKLTELLKQDQYSPMTVAEQVISVFTGVKGYLDDVDLSKIKDFEKAIIEKIKSSKPEIIDAIQSSGKLDEDNEKILSQVILEHKKSNN

SEQ ID NO: 174550 - protein, 312 aa, Unknown
  Bacterial polypetide isolated from the Sargasso Sea
MELINNIAKAHGGFSVFAGVGERTREGNDLYHEMIESGVIKTDGKGSKAALVYGQMNEPPGARARVALTGLTVAEYFRDKEGQDVLFFVDNIFRFTQAGSEVSALLGRIPSAVGYQPTLATDMGNLQERITSTDKGSITSVQAIYVPADDLTDPAPATSFSHLDATTVLSRQIAEIGIYPAVDPLDSTSRILDPRVVGDEHYRVARDVQRILQAYKSLQDIIAILGMDELSEEDKLTVARARKIQRFLSQPFFVAEVFTGSPGKLVDLESTIKGFDAICKGEYDHLPEAAFYMVGGIEEVIEKAEKLAKDNK

SEQ ID NO: 174551 - protein, 372 aa, Unknown
  Bacterial polypetide isolated from the Sargasso Sea
MRKGQITQIIGAVVDVKFDGELPEILTALECDNGGNRLVLEVAQHLGESSVRTIAMDATEGLKRGDEVTDTAAPIKVPVGPETLGRIINVIGEPIDEKGEVKTKENWPIHRSAPEFNDQSTETEILVTGIKVVDLLAPYAKGGKIGLFGGAGVGKTVLIMELINNVAKAHGGFSVFAGVGERTREGNDLYHEMIESGVIKPEGTGSKAALVYGQMNEPPGARARVALSGLTVAEYFRDQEGQDVLFFVDNIFRFTQAGSEVSALLGRIPSAVGYQPTLATDMGNLQERITTTNKGSITSVQAIYVPADDLTDPAPATSFSHLDATTVLSRQIAEIGIYPAVDPLDSTSRILDPRIVGDEHYRVAREVQKIYK

SEQ ID NO: 174552 - protein, 236 aa, Unknown
  Bacterial polypetide isolated from the Sargasso Sea
MASLDDLKKRISSVKSTQKITKAMKMVAASKLRRAQENAEKGRPYSEKMNNIILNLSSSISDKENSPKLLSGSGEDKVHLCVVMTSDRGLCGGFNTNIIKKAKFYFQKILDEGKILKIITVGSKGYDQLKRTYKDNIIEKISFKESKYVNYFDANKVGNIIIDKFEKKEFDVCTIFYNQFKNVITQIPQEQQIIPLKTSESEGNSSEDNYEFEPEEDEILSNLLPKNISTQILKQC

SEQ ID NO: 174553 - protein, 256 aa, Unknown
  Bacterial polypetide isolated from the Sargasso Sea
MVYGQMNEPPGNRLRVALTGLTMAEKFRDEGRDVLLFIDNIYRYTLAGVEVSALLGRMPSAVGYQPTLAEEMGALQERITSTKDGSITSIQAVYVPADDLTDPSPATTFAHLDATVVLSRQIAELGIYPAVDPLDSTSRQLDPLVVGEEHYNVAQGVQGVLQKYKELKDIIAILGMDELSEEDKLAVARARKVERFLSQPFTVAEVFTGSPGKYVKLEDTIKSFKGILAGDYDDLPEQAFYMVGTIEEAVEKAKTL

SEQ ID NO: 174554 - protein, 291 aa, Unknown
  Bacterial polypetide isolated from the Sargasso Sea
MASLDDLKKRIASVKSTQKITKAMKMVAAAKLKRAQESAEKGRPYSEKMNNIILNLSGSISDKENAPKLLSGTGNDKVHLCVVLTSDRGLCGGFNANIIKKAKAYFTKISEEGKELKIITVGSKGNDQLKRVYGDKIIEHISFKTSKNTNYFDAEKVGKLIIKKFEKVEFDICTIFYNQFKNVITQIPQAQQIIPLNTINENDKRSEDSYEFEPDEDEILSNLLPKNISTQIFKAMLENSASEQGARMSAMDNATRNAGEMVDKLTIEYNRSRQAAITKELIEIISGAESL

SEQ ID NO: 174555 - protein, 200 aa, Unknown
  Bacterial polypetide isolated from the Sargasso Sea
MSKGIITQVIGAVVDVKFDGELPEILTALECKNGGNRLVLEVAQHLGESTARTIAMDATEGLKRGDEVENTNAPIKVPVGPETLGRIINVVGEPIDERGEVKTKESWPIHRSAPEFNDQSTETEILVTGIKVIDLLAPYAKGGKIGLFGGAGVGKTVLIMELINNVAKAHGGFSVFAGVGERTREGNDLYHEMIESGVIK

SEQ ID NO: 174556 - protein, 395 aa, Unknown
  Bacterial polypetide isolated from the Sargasso Sea
PVGPGTLGRIMNVVGEPVDERGEIKSADKWSIHREAPDFVDQATETEILVTGIKVVDLLAPYSRGGKIGLFGGAGVGKTVIIMELINNIAKAHGGYSVFAGVGERTREGNDLYHEMLESGVNTVDGDDSKCALVFGQMNEPPGARARVALTGLTVAEYFRDMEGQDVLFFVDNIFRFTQAGSEVSALLGRIPSAVGYQPTLATDMGSLQERITSTNKGSITSVQAIYVPADDLTDPAPATSFAHLDATTVLSRQIAELGIYPAVDPLDSTSRILDPRIVGDEHYEVARNVQAVLQTYKSLQDIIAILGMDELSEEDKLTVARARKIQRFMSQPFFVAEVFTGTPGKYVDLEDTIKGFDAICKGEYDHLPEAAFYMVGTIEEAIQKAEKMAEDAAA

SEQ ID NO: 174557 - protein, 397 aa, Unknown
  Bacterial polypetide isolated from the Sargasso Sea
NKVPVGPETLGRIINVVGEPIDERGDVKTKENWPIHRAAPEFNDQSTETEILVTGIKVIDLLAPYAKGGKIGLFGGAGVGKTVLIMELINNVAKAHGGFSVFAGVGERTREGNDLYHEMIESGVIKKEGAGSKAALVYGQMNEPPGARARVALTGLTVAEYFRDQEGQDVLFFVDNIFRFTQAGSEVSALLGRIPSAVGYQPTLATDMGNLQERITTTNKGSITSVQAIYVPADDLTDPAPATSFAHLDATTVLSRQIAEIGIYPAVDPLDSTSRILDPRIVGDEHYRVAREVQKILQTYKSLQDIIAILGMDELSEEDKLIVARARKIQRFLSQPFFVAEVFTGSPGKLVDLESTIKGFDAICKGEYDHLPEAAFYMVGTIEEAVEKAEKMKKDAA

SEQ ID NO: 174558 - protein, 436 aa, Unknown
  Bacterial polypetide isolated from the Sargasso Sea
MSNGTVIQIIGAVIDVEFPKENLPKIYDALTVDETGLVLEVQQQLGDGVVRTIAMGASEGLKRGVSVTNTENPISVPVGEATLGRIMNVLGEPIDEKGPVEAKAAMPIHRNPPSYEDQAETTELLETGIKVIDLICPFAKGGKVGLFGGAGVGKTVNIQELIRNIAYEHSGYSVFAGVGERTREGNDMYHEMIEGGVLDKVALVYGQMNEPPGNRLRVALSGLTMAENFRDEGRDVLLFVDNIYRYTLAGTECSALLGRMPSAVGYQPTLAEEMGVLQERIASTKTGSITSVQAVYVPADDLTDPSPATTFAHLDANVVLSRQIASLGIYPAVDPLDSNSRQLEPGIVGQEHYDVANAVKQQLNRYKELKDIIAILGMDELSEDDKLVVARARKIERFLSQPFFVAEVFTNAPGKYVPLSETIRGFKGMLMGLRRH

SEQ ID NO: 174559 - protein, 344 aa, Unknown
  Bacterial polypetide isolated from the Sargasso Sea
MSQLNPSEISSVLKEKISGLDLSAERKNEGIIVSVSDGIVRIHGMGDVMYGELIEFENGVLGLALNLEQDSVGAVVLGDYLGLIEGQKAVCTGRILEVPVGEELLGRVVDALGSPIDGKGEIKTEMTAPVEVVAPGVIARQSVDQPVQIGLKAVDAMVPIGRGQRELIIGDRQTGKTAVAVDAIINQKGTGIKCIYVAIGQKQSTVVNVVKKLEEHGALEHTIIVSASASDPAPMQYLSAYSGCSMGEYFRDKGEDALIVYDDLSKQAVAYRQVSLLLKRPPGREAYPGDVFYLHSRLLERAARVNADYVEKATNGKVKGKTGSLTALPIIETQAGDVSAFVPT

SEQ ID NO: 174560 - protein, 513 aa, Unknown
  Bacterial polypetide isolated from the Sargasso Sea
MTINPTEISDIIKDKINKLDTKTQSHNQGTVISLTDGIARIYGITDALQGEMLEFPNNIFGLALNLERDSVGAVILGDYKSISEGDTVKCTGKILEVPVGEALLGRVVNSLGEPIDNAGEIKSDLSSPIEKIAPGVIERKSVDQPVQTGLKSIDSMVPIGRGQRELIIGDRQTGKTAVAVDAIINQKDTGVKCIYVAIGQKASSIAAVVRKLEEHDALKHTIIVAASAADSAAMQYIAPYSGCAMGEYFRDNGEDALIVYDDLTKQAWAYRQVSLLLKRPPGREAYPGDVFYLHSRLLERAARINEAAVSDLTNGKVKNQTGSLTALPIIETQAGDVSAFVPTNVISITDGQIFLETDLFNAGIRPAINAGLSVSRVGGAAQTKIIKKLGGGVRLALAQYRELAAFSQFASDLDEATRKQLERGKRVTELMKQSQYSPLSVAEMAISLFAANEGYLDNIDISKIISYEKSLHDFSKSKHKALVDKINSKLDYNDDIESKLRILLDEFKEQGVF

SEQ ID NO: 174561 - protein, 287 aa, Unknown
  Bacterial polypetide isolated from the Sargasso Sea
MSGSQEIRGQISSIKNTQKITKAMEMVAASKMKKAQDQMGKARPYADKIMNVMSHLAHAHPEYESDFLKVREIKKRGYIVVSSDRGLCGGLNNNLFKVVFESVMADKEKGIDSSFSLIGTKASSFFQRIGGDVISQTSQLGDKPRVEQVLGLIKSTVDKFLAADVDEVYLVFNKFKNTVSQEPTMLKILPISIDEKDKDYDFYWDYLYEPDAKDVLESLFTRYLESLVYRGIVENLACEQASRMVAMKAASDNATDLIGELQLIYNKNRQAAITQEISEIISGAAAL

SEQ ID NO: 174562 - protein, 459 aa, Unknown
  Bacterial polypetide isolated from the Sargasso Sea
MSQGTVVQVIGAVIDVEFSRQELPKIYDALEVEGEGLVLEVQQQLGDGIVRTIAMGQTEGLQRGAKVSNTGDAVKVPVGEKTLGRILNVLGEPIDGKGDVGAEEQMPIHRAPPSYEDQAESSEILETGIKVIDLMCPFAKGGKVGLFGGAGVGKTVNMMELIRNIAYETSGYSVFAGVGERTREGNDFYLEMTESQVLDKVALVYGQMNEPPGCRMRVALSGLTIAEKFRDEGKDVLLFVDNIYRYTLAGVECSSLLGRMPSAVGYQPTLAEEMGVLQERITSTKTGSITSVQAIYVPADDLTDPSPATTFAHLDATVVLSRQIASLGIYPAVDPLDSTSRQLDPAIVGQEHYDVAKGVQQVLQRYLELKDIIAILGMDELSDEDKQTVNRARRIEKYLSQPFFVAEVFTNSPGKFVSIKDTVRGFKGILEGEYDDLPEQAFLMAGKIEEVVENAEKLK

SEQ ID NO: 174563 - protein, 221 aa, Unknown
  Bacterial polypetide isolated from the Sargasso Sea
MSNGTVIQIIGAVIDVEFPKENLPKIYDALTVDETGLVLEVQQQLGDGVVRTIAMGASEGLKRGVSVTNTENPISVPVGEATLGRIMNVLGEPIDEKGAVEAKTTMPIHRNPPSYEDQAETAELLETGIKVIDLICPFAKGGKVGLFGGAGVGKTVNIQELIRNIAYEHSGYSVFAGVGERTREGNDMYHEMIEGGVLDKVALVYGQMNEPPGNRLRGALS

SEQ ID NO: 174564 - protein, 463 aa, Unknown
  Bacterial polypetide isolated from the Sargasso Sea
ELIEFEHGVMGMPLNLEVDSVGAVILGDYKLLEEGGSAKCTGRILEVPVGEALMGRVVDSLGEPIDGKGEVQTDMTAPVEKVAPGVISRKSVDQPVQLGIKAVDSMVPIGRGQRELIIGDRQTGKTAIAIDAIINQKDTGVKCIYVAIGQKQSSIAQVVRTLEQYGAMENTIVVVAGAADPAPMQYIAPFAACSMGEYFRDKGEDALIIYDDLSKQAVAYRQMSLLLRRPPGREAYPGDVFYLHSRLLERAARVSEEYVEKHTNGEVKGKTGSLTALPIIETQAGDVSAFVPTNVISITDGQIFLESSLFSSGLKPAMDPGISVSRVGGAAQVPIIKKLGGGIKTALAQYRELEAFAQFASDLDEASKEQLEHGVRVTELTKQDQFSPMSVAEMGLMLYTANEGYLMKVEVEKIRDFEKSLLAYMNSEHKELMDKVSQTGEYGDDIQSAFKEALDKFMETQTW

SEQ ID NO: 174565 - protein, 472 aa, Unknown
  Bacterial polypetide isolated from the Sargasso Sea
MSKGIITQVIGAVVDVKFEGELPEILTALECKNGDNRLVLEVAQHLGETTVRTIAMDATEGLKRGDEVVNTNAPIQVPVGPETLGRIINVIGEPIDERGEVKTKESWPIHRAAPEFNDQSTETEILVTGIKVIDLLAPYAKGGKIGLFGGAGVGKTVLIMELINNVAKAHGGFSVFAGVGERTREGNDLYHEMMESGVIKQDGPGSKAALVYGQMNEPPGARARVALTGLTVAEYFRDQEGQDVLFFVDNIFRFTQAGSEVSALLGRIPSAVGYQPTLATDMGNLQERITTTNKGSITSVQAIYVPADDLTDPAPATSFAHLDATTVLSRQIAEIGIYPAVDPLDSTSRILDPRVVGDEHYRVARDVQRILQSYKSLQDIIAILGMDELSEEDKLVVARARKIQRFLSQPFFVAEVFTGSPGKLVDLESTIKGFDAICKGEYDHLPEAAFYMVGTIEEAIEKAQKMEKEAAA

SEQ ID NO: 174566 - protein, 368 aa, Unknown
  Bacterial polypetide isolated from the Sargasso Sea
KKWPIHRQAPKFTDQSTETEILVTGIKVIDLLAPYAKGGKIGLFGGAGVGKTVTIMELINNIAKAHGGFSVFAGVGERTREGNDLYHEMIESGVIKTEGKGSKAALVYGQMNEPPGARARVALTGLTVAEYFRDKEGQDVLFFVDNIFRFTQAGSEVSALLGRIPSAVGYQPTLATDMGNLQERITSTGKGSITSVQAIYVPADDLTDPAPATSFSHLDATTVLSRQIAELGIYPAVDPLDSTSRILDPRVVGEEHYRVAREVQKILQAYKSLQDIIAILGMDELSEEDKLTVARARKIQRFLSQPFFVAEVFTGSPGKLVDLDSTIKGFDAICKGEYDHLPEAAFYMVGSIEEAVEKADKLEKDAKK

SEQ ID NO: 174567 - protein, 458 aa, Unknown
  Bacterial polypetide isolated from the Sargasso Sea
MSSGRIVQIIGAVIDVEFPRDKVPSVYEALKVVGAETTLEVQQQLGDGVVRTIAMGSTEGLKRGLDVNSSGKAISVPVGKATLGRIMDVLGNPIDEAGPIGEEEQWEIHRPAPSYAEQAGSNELLETGIKVIDLVCPFAKGGKVGLFGGAGVGKTVNMMELIRNIAIEHSGYSVFAGVGERTREGNDFYHEMKDSNVLDKVALVYGQMNEPPGNRLRVALTGLTMAEKFRDEGRDVLLFVDNIYRYTLAGTEVSALLGRMPSAVGYQPTLAEEMGVLQERITSTKKGSITSIQAVYVPADDLTDPSPATTFAHLDATVVLSRDIASLGIYPAVDPLDSTSRQLDPNVIGQDHYETARGVQYVLQRYKELKDIIAILGMDELSEDDKQLVSRARKIQRFLSQPFFVAEVFTGAPGKYVSLKDTIAGFSGILKGDYDHLPEQAFYMVGGIDEAIEKAKKL

SEQ ID NO: 174568 - protein, 208 aa, Unknown
  Bacterial polypetide isolated from the Sargasso Sea
VVTSDRGLCGGLNINLFKALLRSLKEWRDQKVEADFCVVGSKGASFFRSNGGNVVAAISKLGEEPSINDLIGSVKVVLDAYAEGRIDRLYLVSNKFVNTMTQKPEVQQLLPLAASDAQGVQKGLWDYVYEPDAQQLLDALLVRYVESQVYQSVVENSACEQAARMIAMKNATDNAGDLIKDLQLVYNKARQAAITQEISEIVGGAAAV

SEQ ID NO: 174569 - protein, 338 aa, Unknown
  Bacterial polypetide isolated from the Sargasso Sea
MSKGIITQVIGAVVDVKFDGELPEILTALECKNGSNRLVLEVAQHLGESTARTIAMDATEGLKRGDEVVNTKAPIKVPVGPETLGRIINVVGEPIDEKGEVKTKESWPIHRPAPEFNDQSTETEILVTGIKVIDLLAPYAKGGKIGLFGGAGVGKTVLIMELINNVAKAHGGFSVFAGVGERTREGNDLYHEMMESGVIKSDGPGSKAALVYGQMNEPPGARARVALTGLTVAEYFRDQEGQDVLFFVDNIFRFTQAGSEVSALLGRIPSAVGYQPTLATDMGNLQERITTTNKGSITSVQAIYVPADDLTDPAPATSFAHLDATTVLSRQIAEIGIY

SEQ ID NO: 174570 - protein, 295 aa, Unknown
  Bacterial polypetide isolated from the Sargasso Sea
MAKNNIGIISQVMGAVVDVKFEGDLPEILNALEVENQGNRLVLEVAQHMGESQVRTIAMDTTDGLMRGMDVVDTGDPIQMPVGPETLGRIMNVIGDPVDEKGPVKSTDSLPIHRSAPEFLDQSTDTEVLVTGIKVVDLIEPYAKGGKIGLFGGAGVGKTVIIMELINNIAKGHGGYSVFAGVGERTREGNDLYHEMIESGVIVPDGPGSKAALVYGQMNEPPGARARVALSGLTLAEYFRDQEGQDVLFFVDNIFRFTQAGSEVSALLGRIPSAVGYQPTLATDMGAMQERITST

SEQ ID NO: 174571 - protein, 196 aa, Unknown
  Bacterial polypetide isolated from the Sargasso Sea
AVGYQPTLAEEMGVLQERIASTKTGSITSIQAVYVPADDLTDPSPATTFAHLDATVVLSRDIASLGIYPAVDPLDSSSRQLDPLVIGQEHYDTARGVQTVLQRYKELKDIIAILGMDELSDEDKQLVSRARKIQRFLSQPFFVAEVFTGASGKYVSLKDTIAGFKGILNGEFDDLPEQAFYMVGSIEEAQEKAKSM

SEQ ID NO: 174572 - protein, 465 aa, Unknown
  Bacterial polypetide isolated from the Sargasso Sea
MSSGKVVQVIGAVIDVEFPRDSVPQVYDALMVGDKGLTLEVQQQLGDGVVRAIAMGPSEGVSRGLDVENTGAPISVPVGTETLGRIMDVLGNPIDEKGPIGEQERSAIHRAAPTYEELAASDELLETGIKVIDLVCPFAKGGKVGLFGGAGVGKTVNMMELINNIATEHSGLSVFAGVGERTREGNDFYYEMQESGVVNVEEMDKSKVAMVYGQMNEPPGNRLRVALTGLTMAEKFRDEGRDVLLFVDNIYRYTLAGTEVSALLGRMPSAVGYQPTLAEEMGVLQERITSTKTGSITSIQAVYVPADDLTDPSPATTFAHLDSTVVLSRDIAAKGIYPAVDPLDSTSRQLDPLIIGQEHYEVARGVQTVLQRYKELKDIIAILGMDELSEEDKLIVARARKIERFLSQPFHVAEVFTGSPGIYVSLKDTIAGFKGILAGEYDHLPEQAFYMVGSIEQAVERAAKL

SEQ ID NO: 174573 - protein, 310 aa, Unknown
  Bacterial polypetide isolated from the Sargasso Sea
MGAPIKVPVGPETLGRIVNVIGEPIDEKGEIKTKENWPIHRAAPEFNDQSTETEILVTGIKVVDLLAPYAKGGKIGLFGGAGVGKTVLIMELINNVAKAHGGFSVFAGVGERTREGNDLYHEMIESGVIKPDGAGSKAALVYGQMNEPPGARARVALSGLTVAEYFRDQEGQDVLFFVDNIFRFTQAGSEVSALLGRIPSAVGYQPTLATDMGNLQERITTTNKGSITSVQAIYVPADDLTDPAPATSFSHLDATTVLSRQIAELGIYPAVDPLDSTSRILDPRIVGDEHYRVAREVQKFYKPISLYKIL

SEQ ID NO: 174574 - protein, 510 aa, Unknown
  Bacterial polypetide isolated from the Sargasso Sea
MEINPSEVTKILKEQIKKFGDKAEVTEVGQVLSVGDGIARVYGLDNVQAGEMVEFSDGSKGMALNLESENVGVVIFGDDRAIKEGDTVKRTGAIVDTPVGKELLGRVVDGLGNPIDGKGVLEKGVKKSRVEVKAPGIIPRKSVSEPMQSGLKAIDSLVPIGRGQRELIIGDRQTGKTAVAVDTIINQKKINESGDEKQKLYCIYVAIGQKRSTVRQIQKTLEEAGAMDYTTIVAATASDAAPLQFLAPYTGCTMGEYFRDNGMHALIIYDDLSKQAVAYRQMSLLLRRPPGREAYPGDVFYLHSRLLERAAKLSDEHGGGSLTALPIIETQAGDVSAYIPTNVISITDGQIFLETNLFNQGIRPAINVGLSVSRVGSAAQTKAMKKVSGSMKLELAQYREMAAFAQFGSDLDASTQKLLNRGSKLTELLKQKQFSPMTVAEQVISVFCGVRGYLDDIELKDIAQFESKIIEKCKSEKPEIIESISASGKLEEDTEKLLVEIINELKKNLN

SEQ ID NO: 174575 - protein, 472 aa, Unknown
  Bacterial polypetide isolated from the Sargasso Sea
MRKGQITQIIGAVVDVKFEGELPEILTALECNNGGARLVLEVAQHLGESSVRTIAMDATEGLKRGDEVTDTGAPIKVPVGPETLGRIVNVIGEPIDEKGEVKTKESWPIHRAAPVFNEQSTETEILVTGIKVVDLLAPYAKGGKIGLFGGAGVGKTVLIMELINNVAKAHGGFSVFAGVGERTREGNDLYHEMIESGVIKPEGTGSKAALVYGQMNEPPGARARVALSGLTVAEYFRDQEGQDVLFFVDNIFRFTQAGSEVSALLGRIPSAVGYQPTLATDMGNLQERITTTNKGSITSVQAIYVPADDLTDPAPATSFSHLDATTVLSRQIAEIGIYPAVDPLDSTSRILDPRIVGDEHYRVAREVQKILQTYKSLQDIIAILGMDELSEEDKLIVARARKIQRFLSQPFFVAEVFTGSPGKLVELESTIKGFDSICKGEYDHLPEAAFYMVGTIEEAIEKAEKMAKDAAA

SEQ ID NO: 174576 - protein, 511 aa, Unknown
  Bacterial polypetide isolated from the Sargasso Sea
MEINPSEVTKILKEQIKQFGDKAEVSEVGQVLSVGDGIARIYGLDNVQAGEMVEFSDGSKGMALNLESENVGVVIFGDDRAVKEGDTVKRTGAIVDTPVGKELLGRVVDGLGNPIDGKGALDKGIKRSRVEVKAPGIIPRKSVSEPMQTGLKSIDSLVPIGRGQRELIIGDRQTGKTAVAIDAIINQKKINESGDEKQKLYCVYVAIGQKRSTVRQIEKTLEEAGAMEYTTIVAATASDAAPLQFLAPYTGCAMGEYFRDNGMHALIIYDDLSKQAVAYRQMSLLLRRPPGREAYPGDVFYLHSRLLERAAKLSDDHGGGSLTALPIIETQGGDVSAFIPTNVISITDGQIFLETELFNQGIRPAINVGLSVSRVGSSAQTKAMKKVSGSMKLELAQYREMAAFAQFGSDLDASTQKLLNRGAKLTELLKQKQYSPMTVAEQVISVFCGVKGHLDNIEQKDIANFEAKIIEKCRSEKPEIIDSIISSGKLEEDIEKTLTELILDLKKNFSS

SEQ ID NO: 174577 - protein, 274 aa, Unknown
  Bacterial polypetide isolated from the Sargasso Sea
MKMVAASKLRRSQKKAEPARPYSSRLEEMLASLASSAASGEGIIKLLTGTGNDQNYIVVPVSADRGLCGGFNSSINRETFKLVKSLQSDGKNVQLMPVGKKSRDFFNRVMKNQITESFVDLNISNSGYESALKVSNKLQELYFDSKFDKCIIVFNKFKSAISQEVTQQQLIPLDVSESSEKENTETTVAKAIYDYEPDEETILKDLLPKNVSIQIFKVLLESDAGEHGARMAAMDNATRNAGEMIDSLTLKYNRTRQAFITKELIEIISGAESV

SEQ ID NO: 174578 - protein, 513 aa, Unknown
  Bacterial polypetide isolated from the Sargasso Sea
MQLNSTEIAELIKQRIAQFDIKSEARNEGTIVSVSDGIIRIHGLADAMQGEMIELPGNRYALALNLERDSVGAVIMGSYDGLSEGMKVKGTGRILEVPVGRGLLGRVLNTLGQPIDGKGPIDNDGFSPIEVIAPGVIERKSVDQPVQTGLKAIDAMIPIGRGQRELIIGDRQVGKTAIAIDTIINQKDSGIKCVYVAIGQKASTIANVVRKLEEHGALANTIVVVASASEAAALQYLAPYAGCSMGEYFRDRGEDALIIYDDLSKQAVAYRQISLLLRRPPGREAYPGDVFYLHSRLLERAARVNAEYVEKFTNGAVKGQTGSLTALPIIETQAGDVSAFVPTNVISITDGQIFLTSQLFNSGIRPAVDPGISVSRVGGAAQTKIVKKLSGGIRTALAQYRELAAFAQFSSDLDDATRKQLDHGQKVTELMKQKQYSPLSVAHQSLVLFAAEKGYLSDVELNKIVDFEAALLSYANTQHAELMAEINAKADYNDAIVGKLTALLDDFKATQTW

SEQ ID NO: 174579 - protein, 288 aa, Unknown
  Bacterial polypetide isolated from the Sargasso Sea
MAGAKEIRNKIGSVKNTQKITGAMEMVAASKMRRAQDRMSASRPYAETMRKVIGHIAQGNLEYKHPYLIEREVKRVGYIVVSTDRGLCGGLNINLFKAALNDMKQWSAKGAKVDLALIGNKASNFFERHGAKVKAHVAGLGDNPSVNDLIGSVKVMLKAYDNGEIDRLYLVYNKFVNTMVQQPRVDQLLPLPVTEDSKLAKKHHWDYLYEPDPKQLLDTLLIRYVESQVYQGVVENLASEQAARMVAMQAATDNAGNLINDLQLVYNKARQASITQELTEIVSGAAAV

SEQ ID NO: 174580 - protein, 294 aa, Unknown
  Bacterial polypetide isolated from the Sargasso Sea
MSNGFIVQIIGAVVDIEFPQDAVPQVYDALKVVSEGQGQGLVLEVQQQIGGGVVRCITMGSSDGLRRGLEVVNSGKSIQVPVGVSTLGRIMNVLGDPIDEKGPIGEEERWSIHRAAPSYEDQSNSNDLLETGIKVIDLVCPFAKGGKVGLFGGAGVGKTVNMMELIRNIAIEHSGYSVFAGVGERTREGNDFYHEMMESNVLDKVSLVYGQMNEPPGNRLRVALTGLTMAEKFRDEGRDVLFFVDNIYRYTLAGTEVSALLGRMPSAVGYQPTLAEEMGVLQERITSTKTGSIT

SEQ ID NO: 174581 - protein, 234 aa, Unknown
  Bacterial polypetide isolated from the Sargasso Sea
MAEKFRDEGRDVLFFVDNIYRYTLAGTEVSALLGRMPSAVGYQPTLAEEMGVLQERITSTKTGSITSVQAVYVPADDLTDPSPATTFAHLDATVVLSRQIAALGIYPAVDPLDSTSRQLDPLVVGKEHYETARGVQTVLQRYKELKDIIAILGMDELSEEDKLTVARARKIERFLSQPFFVAEVFTGSPGKYVPLKETIRGFQGILKGEYDDLPEQAFYMVGSIDEVVEKAKKL

SEQ ID NO: 174582 - protein, 370 aa, Unknown
  Bacterial polypetide isolated from the Sargasso Sea
KSVSEPMQTGLKSIDSLVPIGRGQRELIIGDRQTGKTAVAIDAIINQKKINESGDEKQKLYCVYVAIGQKRSTVRQIEKTLQEAGAMEYTTIVAATASDAAPLQFLAPYTGCTMGEYFRDNGMHALIIYDDLSKQAVAYRQMSLLLRRPPGREAYPGDVFYLHSRLLERAAKLSDEHGGGSLTALPIIETQGGDVSAFIPTNVISITDGQIFLETELFNQGIRPAINVGLSVSRVGSSAQTKAMKKVSGSMKLELAQYREMAAFAQFGSDLDASTQKLLNRGSKLTELLKQRQYSPMTVAEQVISVFCGVRGHLDDIEQKDIANFESKIIEKCKSEKPEIINSINSSGKLEEDSEKALSELIVELKKNFN

SEQ ID NO: 174583 - protein, 318 aa, Unknown
  Bacterial polypetide isolated from the Sargasso Sea
KTVIIMELINNIAKAHGGFSVFAGVGERTREGNDLYHEMIESGVIKPEGTGSKAALVYGQMNEPPGARARVALTGLTVAEYFRDQEGQDVLFFVDNIFRFTQAGSEVSALLGRIPSAVGYQPTLATDMGNLQERITTTNKGSITSVQAIYVPADDLTDPAPATSFSHLDATTVLSRQIAELGIYPAVDPLDSTSRILDPRVVGDEHYRVARSVQKILQTYKSLQDIIAILGMDELSEDDKLTVARARKIQRFLSQPFFVAEVFTGSPGKLVDLESTIKGFDAICKGEYDHLPEAAFYMVGTIEEAIEKAEKMAKDAAA

SEQ ID NO: 174584 - protein, 472 aa, Unknown
  Bacterial polypetide isolated from the Sargasso Sea
MKKGKITQIIGAVVDVKFDGELPEILTALECDNSGNRLVLEVAQHLGESSVRTIAMDATEGLKRGDEVTDTGAPIKVPVGPETLGRIINVIGEPIDEKGKVQTKENWPIHRSAPEFNDQSTETEILVTGIKVVDLLAPYAKGGKIGLFGGAGVGKTVLIMELINNVAKAHGGFSVFAGVGERTREGNDLYHEMIESGVIKPEGKGSKAALVYGQMNEPPGARARVALSGLTVAEYFRDQEGQDVLFFVDNIFRFTQAGSEVSALLGRIPSAVGYQPTLATDMGNLQERITTTNKGSITSVQAIYVPADDLTDPAPATSFSHLDATTVLSRQIAEIGIYPAVDPLDSTSRILDPRIVGDEHYRVAREVQKILQTYKSLQDIIAILGMDELSEEDKLTVARARKIQRFLSQPFFVAEVFTGSPGKLVDLESTIKGFDAICKGEYDHLPEAAFYMVGTIEEAIEKAEKMAKEAAA

SEQ ID NO: 174585 - protein, 177 aa, Unknown
  Bacterial polypetide isolated from the Sargasso Sea
SITSVQAIYVPADDLTDPAPATSFAHLDATTVLSRQIAEIGIYPAVDPLDSTSRILDPRIVGDEHYRVARDVQRILQSYKSLQDIIAILGMDELSEEDKLVVARARKIQRFLSQPFFVAEVFTGSPGKLVDLESTIKGFDAICKGEYDHLPEAAFYMVGTIEEAIEKGEKMAKEAAA

SEQ ID NO: 174586 - protein, 254 aa, Unknown
  Bacterial polypetide isolated from the Sargasso Sea
MNEPPGTRARIALTGLTMAEYFREVGKQDVLLFVDNVYRYTLAGMEVSALLGRMPSAVGYQPTLATEMGDLQERITSTVDGSITSFQAVYVPADDYTDPGIVTTFGHLDASISLERSLAAQALFPAVDPLASNSRIMEPGIVGEDHYNTAREVQEVLQRFKDLQDVIAILGIEELSEEDREIVFRARKIQRFLTQPFHVGEVFTGIPGKYVKVEDTVKGFREILSGQHDDLPEQAFYMVGTIEEAVEKAKTLKS

SEQ ID NO: 174587 - protein, 365 aa, Unknown
  Bacterial polypetide isolated from the Sargasso Sea
LIGRVVDPLGRPIDGKGSIKTNSTAPVEKPAPNVVSRKSVDQPVQFGVKVVDALVPVGRGQRELIIGDRSTGKTAVAIDCIINQKGGDLICIYVGIGQKSSKVASVVDTLNKYDAMEHTIVVAANASDSAPLQYLAPYSGCAMAEYFMDQGKDVLIVYDDLSKHAWAYRQMSLLLRRPAGREAYPGDVFYLHSRLLERAARVEEEYGGGSITALPVIETLAGDVSAYVPTNVISITDGQIYLESDLFNSGVRPALNTGLSVSRVGGSAQAKAMKKVSGSLKIELAQYRELAAFAQFGSDDLDDVTKKQLSRGAIIVELLKQPQYEPVPLENQVTLLYLASEGLLDNIDVSDVAEYEKSWNEYANS

SEQ ID NO: 174588 - protein, 299 aa, Unknown
  Bacterial polypetide isolated from the Sargasso Sea
MSDGKIVEIIGAVVDVEFPKDSIPQVFDALKVDEASLTLEVQQQLGDGIVRTIAMGATDGVKRGFDVKNTGAPISVPVGEKTLGRIMNVLGDPVDQKGPVGSEKTLPIHRKPPSYEEQAGGNELLETGIKVIDLLCPFAKGGKVGLFGGAGVGKTVNMMELIRNIAIEHSGYSVFAGVGERTREGNDFYHEMRESNVLDKVSLVYGQMNEPPGNRLRVALTGLTMAEHFRDEGRDVLMFIDNIYRYTLAGTEVSALLGRMPSAVGYQPTLAEEMGALQERITSTQKGSITSIQAVYVPA

SEQ ID NO: 174589 - protein, 87 aa, Unknown
  Bacterial polypetide isolated from the Sargasso Sea
MDELSEEDKLTVARARKIQRFLSQPFFVAEVFTGTPGKLVNLDSTIKAFDAICKGDYDHLPEAAFYMVGTIEEAVAKAEKMAKEAAA

SEQ ID NO: 174590 - protein, 346 aa, Unknown
  Bacterial polypetide isolated from the Sargasso Sea
VDLSDSNEILETGIKVIDLVCPFAKGGKVGLFGGAGVGKTVNMMELIRNIAIEHSGYSVFAGVGERTREGNDFYHEMTDSNVLDKVSLVYGQMNEPPGNRLRVALTGLTMAEKFRDEGRDVLLFVDNIYRYTLAGVEVSALLGRMPSAVGYQPTLAEEMGVLQERITSTKTGSITSIQAVYVPADDLTDPSPATTFAHLDATVVLSRRIAELGIYPAVDPLDSTSRQLDPLVVGQEHYEVAQRVQGVLQRYKELKDIIAILGMDELSDEDKNTVSRARKVEKFLSQPFFVAEVFTGSPGKYVSVKDTIQGFKEILDGVHDDVPEQAFYMVGSIEEALEKAKTVKSD

SEQ ID NO: 174591 - protein, 515 aa, Unknown
  Bacterial polypetide isolated from the Sargasso Sea
MTTKINPSEISSIIKKKIDDYKGAATEANVGEVLSTADGIVQIYGLEDAMYGELLDFGEGTYGLALNLETDSVGAVVLGDSGHIKEGQKVKTTGRILEVPVGEGLKGRVIDALGRPLDGKGEIKSKHNAPIEVVAPGVIDRQSVDQPVQTGIKSIDVMVPIGRGQRELIIGDRQTGKTAIAVDTIVHQKNSGITCVYVAIGQKQSTVATVVRQLEEADALKNTIVVSATAAESASLQFLAPYSGCTMGEYFRDIGEDALIIYDDLSKHAIAYRQISLLLKRPPGREAFPGDIFYLHSRLLERASRVNAEYVERVTDGKVKGKTGSLTALPIIETQASDVSAFIPTNVISITDGQIFLETDLFNSGIRPAINPGISVSRVGGAAQTKIMKKLGGGVKLALAQFRELESFSQFASDLDDATREQLENGQRITELLKQKQFSPRSVACVSIVLYAIENKYLTNIEKEKMQSFEDNLRTYFKSNHKDVWEEVNKTGDWNDDLEKKYKTILDGFIKEGSW

SEQ ID NO: 174592 - protein, 473 aa, Unknown
  Bacterial polypetide isolated from the Sargasso Sea
MSEEKGRVSKIAGPVVDVAFPLDALPELNYALEVDVEVDGETNTIVLEVAQHLGEGKIRAISMQGTDGLRRGAEVTNTGAPISVPVGQATLGHIFNVYGRSLDVPTDSLDIKERWPIHRNPPPFEEVTAQNEMFETGIKVIDLLMPYVQGGKIGLFGGAGVGKTVLIQEMINRVATHHSGVSVFAGVGERTREGNDLFREMEESGVIDKTALVFGQMDEPPGVRLRVALSALTMAEYFRDVEQQDVLLFIDNIFRFSQAGSEVSTLLGRMPSAVGYQPTLADEMGFLQERITSLKGRSITSLQAVYVPADDITDPAPHTAFAHLDARTVLSRAISDLGIYPAVDPLDSSSRILDPKIVGDEHYTTAREVQRVLQRYNDLQDIIAILGLDELSEEDKLIVGRARRIQRFLSQPMYVAEQFTGIEGKFVSIKDSVEAFKTILSGDMDAIPEQAFYMTGGLDEVHEKAKELESSSA

SEQ ID NO: 174593 - protein, 268 aa, Unknown
  Bacterial polypetide isolated from the Sargasso Sea
IEGGVLDKVALVYGQMNEPPGNRLRVALSGLTMAENFRDEGRDVLLFVDNIYRYTLAGTECSALLGRMPSAVGYQPTLAEEMGVLQERIASTKTGSITSVQAVYVPADDLTDPSPATTFAHLDANVVLSRQIASLGIYPAVDPLDSNSRQLEPAIVGQEHYDVANAVKQQLNRYKELKDIIAILGMDELSEDDKLVVARARKIERFLSQPFFVAEVFTNAPGKYVPLSETIRGFKGIVNGDYDDIPEQAFYMTGNIDEVVEKAKTEAA

SEQ ID NO: 174594 - protein, 313 aa, Unknown
  Bacterial polypetide isolated from the Sargasso Sea
MSNGTVIQIIGAVIDVEFPKENLPKIYDALTVDETGLVLEVQQQLGDGVVRTIAMGASEGLKRGVSVTNTENPISVPVGEATLGRIMNVLGEPIDEKGPVDAKSAMPIHRNPPSYEDQAETTELLETGIKVIDLICPFAKGGKVGLFGGAGVGKTVNIQELIRNIAYEHSGYSVFAGVGERTREGNDMYHEMIEGGVLDKVALVYGQMNEPPGNRLRVALSGLTMAENFRDEGRDVLLFVDNIYRYTLAGTECSALLGRMPSAVGYQPTLAEEMGVLQERIASTKTGSITSVQAVYVPADDLTDPSPATTFAH

SEQ ID NO: 174595 - protein, 511 aa, Unknown
  Bacterial polypetide isolated from the Sargasso Sea
MEIKAAEISSVIKDQIANFETKADVAEVGTVLSVGDGIARVYGLDKVQAGEMVEFPGGIKGMALNLEMDNVGVSIFGDDTGIKEGDTVKRTGEIVDVPVGKELLGRVVDGLGNPIDGKGPIKSSEKRRIELKAPGIIPRQSVSEPMQTGIKALDALVPVGRGQRELIIGDRQTGKTAVAIDTILNQKSVNQSNNEKEKLYCIYVAIGQKRSTVAQIVKTLEDNGAMEYTIVVSATASEPAPLQFLSAYTGCTMGEYFRDNGMHALIVYDDLSKQAVAYRQMSLLLRRPPGREAYPGDVFYIHSRLLERAAKMSDEHGGGSLTALPIIETQAGDLSAYIPTNVISITDGQIFLETNLFFAGIRPAINVGLSVSRVGSAAQTKAMKKIAGPVKLELAQYREMAAFAQFASDLDASTKQLLDRGARLVEILKQGQYSPLTVSEQVVSIYAGVRGYLDKVAVNDVVKFESEVLNEIRSKHSDLLEAIANEKELSKENDEKLKSILDDLVGKFASN

SEQ ID NO: 174596 - protein, 436 aa, Unknown
  Bacterial polypetide isolated from the Sargasso Sea
MANNLTGKISQVLGAVVDVEFDGELPAIMNALEVDNNGTRLMLEVAQHLGENAVRTIAMDTTDGLVRGQTATDTGAPISMPVGPETLGRIMNVVGEPVDERGDIGATKTYPIHRPAPEFVDQSTETEVLVTGIKVVDLLAPYARGGKIGLFGGAGVGKTVLIMELINNIAKAHGGYSVFAGVGERTREGNDLYHEMIESGIIDLKGKESKVALVYGQMNEPPGARARVALSGLTQAEYFRDEEGQDVLFFVDNIFRFTQAGSEVSALLGRIPSAVGYQPTLATDMGALQERITTTKKGSITSVQAIYVPADDLTDPAPATSFSHLDATTVLNRAISEKGIYPAVDPLDSTSRILDPQVVGDDHYRVAREVQRVLQTYKSLQDIIAILGMDELSEEDKLTVARARKIEKFLSQPFFVAEIFTGSPGKYVDLEDTIKS

SEQ ID NO: 174597 - protein, 321 aa, Unknown
  Bacterial polypetide isolated from the Sargasso Sea
MANNLTGKISQVLGAVVDVEFDGELPAIMNALEVDNNGTRLMLEVAQHLGENAVRTIAMDTTDGLVRGQTATDTGAPISMPVGPETLGRIMNVVGEPVDERGDIGTTKTYPIHRPAPEFVDQSTETEVLVTGIKVVDLLAPYARGGKIGLFGGAGVGKTVLIMELINNIAKAHGGYSVFAGVGERTREGNDLYHEMIESGIIDLKGKDSKVALVYGQMNEPPGARARVALSGLTQAEYFRDEEGQDVLFFVDNIFRFTQAGSEVSALLGRIPSAVGYQPTLATDMGALQERITTTKKGSITSVQAIYVPADDLTDPAPATS

SEQ ID NO: 174598 - protein, 249 aa, Unknown
  Bacterial polypetide isolated from the Sargasso Sea
MEIKAAEISSVIKDQIANFETKADVAEVGTVLSVGDGIARVYGLDQVQAGEMVEFPGGIKGMALNLEMDNVGVSIFGDDTGIKEGDTVKRTGEIVDVPVGKELLGRVVDGLGNPIDGKGPIQSSEKRRIELKAPGIIPRQSVSEPMQTGIKALDALVPVGRGQRELIIGDRQTGKTAVAIDTILNQKTVNQSNNEKEKLYCIYVAIGQKRSTVAQIVKTLEDNGAMDYTIVVSATASEPAPLQFLSAYT

SEQ ID NO: 174599 - protein, 230 aa, Unknown
  Bacterial polypetide isolated from the Sargasso Sea
MSNGTVTQIIGAVIDVEFDKDNIPKVYEALMVDESGTTLEVQQQLGDGVVRTIAMGATEGLKRGLSASRTNAPISVPVGPETLGRIVDVLGNPIDEKGPIGEKAKMPIHRKPPSYTDQSASNEVLETGIKVIDLMCPFAKGGKIGLFGGAGVGKTVNMMELINNIALQHSGLSVFAGVGERTREGNDFYYEMQESGVVNIDNLGESKVAMVYGQMNEPPGNRLRVALTGL

SEQ ID NO: 174600 - protein, 284 aa, Unknown
  Bacterial polypetide isolated from the Sargasso Sea
MSQLNPSEISSVLKEKIAGLDLSAERKNEGIVVSVSDGIVRIHGMGDVMYGEVIEFENGTKGMALNLEQDSVGAVVLGDYLEIIEGQKAVCTGKVLEVPVGEAMLGRVVNTLGAPIDGKGEIKAENTAPVEVVAPGVIARQSVDQPVQIGLKAVDAMVPIGRGQRELIIGDRQTGKTAVAIDAIINQKGTGIKCIYVAIGQKQSTVANVVRKLEEYGAMEHTIVVSATAADPAPMQYLSAYAGCTMGEYFRDKGEDALIVYDDLSKQAVAYRQVSLLLKKPPGR

SEQ ID NO: 174601 - protein, 472 aa, Unknown
  Bacterial polypetide isolated from the Sargasso Sea
MAKGDKGKVVQVIGTVVDVGFDQNQLPEIFHALELENEGERLVLEVEQHVGNSWARCLALGPTEGLARGVEVVDTGAPVSVPVGKDSLGRLFNVIGDPIDDGEPINKEAIRWPIHRKAPDFDQQSGSVEVLETGIKVLDLITPFAKGGKIGAYGGAGVGKTVIITELIRNIAQEHSGVSVFAGVGERSREGNDLYHEMQDYGVLNSTALVFGQMNEPPGTRARIALTGLTMAEYFRDEQKQDVLLFVDNIYRYILAGMEVSALLGRMPSAVGYQPTLSTEMGDLEERITTTVNGSITSFQAVYVPADDYTDPGIVTTFGHLDANVSLDRSLAAQFLFPAVDPLASNSRIMEPAIVGEDHYNAARGVQQVLQRYKDLQDVIAILGIDELSEEDQIIVARARKIQRFLTQPFFVGEVFTGIPGKYVPVAETVKGFLEILDGKHDDLPEQAFYMVGGIEEAVAKGEEMKQQIENN

SEQ ID NO: 174602 - protein, 297 aa, Unknown
  Bacterial polypetide isolated from the Sargasso Sea
MPSLKDIKTQINSVVSTKKITTAMKMVAASKLRRSQEKAVAARPYSSRLEEMLSSLASSAASGEGIIKLLTGTGNDQNYIVVPVSADRGLCGGFNSSINRETFKLVKSLQNDGKNVQLMPVGKKSRDFFNRVMKEQIVESFIDLNVSNNGYDSALNVSNKLQDLYFEGKFDKCILVFNKFKSAISQEVTQQQLIPLDVSESSKEEKEDNNDAKAIYDYEPDEETILKDLLPKNVSIQIFKVLLESDAGEHGARMAAMDNATRNAGEMIDGLTLKYNRTRQAFITKELIEIISGAESI

SEQ ID NO: 174603 - protein, 315 aa, Unknown
  Bacterial polypetide isolated from the Sargasso Sea
STVAGIAKTLEEKGALEYTVIVAANASDPAPMQVFAPFSGACIGEYFRDTGRPALIIYDDLSKQAVAYREVSLLLRRPPGREAYPGDVFYLHSRLLERSAKVVNDDKVASGMNDLPVSLKSKVKGGGSLTALPIIETQAGDVSAYIPTNVISITDGQIFLESDLFNSGVRPAINVGISVSRVGGSAQIKSMKKVAGTLKLDQAQYRELEAFSKFGSDLDAATLNVIEKGRRNVEILKQNQNDPFQVEDQVAIIYAGSQNLLKEVPVEKVKAFEEAFLQELRKNNKKLLAELKSGKISDKETDEIKKVAEKIAKSF

SEQ ID NO: 174604 - protein, 219 aa, Unknown
  Bacterial polypetide isolated from the Sargasso Sea
MSKGIITQVIGAVVDVKFDGDLPEILTALECKNGDNRLVLEVAQHLGETTVRTIAMDATEGLKRGDEVTNTNAPIQVPVGPETLGRIINVIGEPIDERGEVKTKETWPIHRAAPEFNDQSTETEILVTGIKVIDLLAPYAKGGKVGLFGGAGVGKTVLIMELINNVAKAHGGFSVFAGVGERTREGNDLYHEMIESGVIKKDGDGSKAALVYGQMNEPP

SEQ ID NO: 174605 - protein, 280 aa, Unknown
  Bacterial polypetide isolated from the Sargasso Sea
MEINPSEVTKILKEQIKNFGDKAEVTEIGQVLSVGDGIARIYGLDNVQAGEMVEFADGSKGMALNLESENVGVVIFGDDRNIKEGDVVKRTGDIVDTPVGKELLGRVVDGLGNPIDGKGSLDKNVKKSRVEVKAPGIIPRQSVSEPMQTGLKSIDSLVPIGRGQRELIIGDRQTGKTAVAVDAIINQKKINESGDEKQKLYCIYVAVGQKRSTVRQIQKTLEEAGAMEYTTIVAATASDSAPLQFLAPYTGCAMGEFFRDNGMHALIIYDDLSKQAVAYR

SEQ ID NO: 174606 - protein, 339 aa, Unknown
  Bacterial polypetide isolated from the Sargasso Sea
VDLLAPYAKGGKIGLFGGAGVGKTVLIMELINNVAKAHGGFSVFAGVGERTREGNDLYHEMIESGVIKPDGAGSKAALVYGQMNEPPGARARVALSGLTVAEYFRDQEGQDVLFFVDNIFRFTQAGSEVSALLGRIPSAVGYQPTLATDMGNLQERITTTNKGSITSVQAIYVPADDLTDPAPATSFSHLDATTVLSRQIAELGIYPAVDPLDSTSRILDPRIVGDEHYRVAREVQKILQTYKSLQDIIAILGMDELSEEDKLTVARARKIQRFLSQPFFVAEVFTGSPGKLVDLEATIKGFDAICKGEYDHLPEAAFYMVGTIEEAIEKAEKMSKDAA

SEQ ID NO: 174607 - protein, 505 aa, Unknown
  Bacterial polypetide isolated from the Sargasso Sea
MSEFNIDAKQISDSLKDTLGNWQDSVKDDLVGSVSAVADGVARVRGLENVMASELLEFPGGLVGVALNLEEDSIGVVLMGDSNHIEEGMPVKQTGEVLSIGVGDGFLGRVIDPLGNPIDGKGPIEFSERRRLELQAPSVVERQPVGEPLQTGIKAIDSMIPIGRGQRELIIGDRQIGKTAVAVDTIINQKDTDVKCIYVAIGQKSSTVAEVVQRFEDEGVLDKTVIVNAPASAAAALQMYAPYAGSAIGQHWMYNGQHGLIVFDDLSKQAIAYRQISLLLRRPPGREAYPGDVFYLHSRLLERCAKVSEELGGGSLTGLPIIETKAGDVSAFIPTNVISITDGQIYLESELFYSGVRPAVNPGTSVSRVGGSAQTKAMKKVSGPLRINLAQFRELEAFAEFGSDLDAASQAQLDRGRRVVELLKQPQYKPVPVEEQVVSLYAVTEGFLDVVDPADIPQAEKDLVDFIKTRHSEVINSIKTTGELPEDELKAAVEAFVNTLEKKEE

SEQ ID NO: 174608 - protein, 472 aa, Unknown
  Bacterial polypetide isolated from the Sargasso Sea
MSENIGRVVKIAGPVVDVAFPQDELPEITFALEVDVEIDDVTSTIVLEVAQHLGEGRVRAISMQGTDGLRRGAEVTDTGAPISVPVGQETLGHIFNVWGETLDVETSSIGVKQKWPIHRKPPPYEDVSAQNEMFETGIKVIDLLMPYVQGGKIGLFGGAGVGKTVLIQEMINRVATQHGGVSVFAGVGERTREGNDLFREMQESGVIDKTALVFGQMDEPPGVRLRVALSALTMAEYFRDEEKQDVLLFIDNIFRFSQAGSEVSTLLGRMPSAVGYQPTLADEMGFLQERITSLKGRSITSLQAVYVPADDITDPAPHTAFAHLDARTVLSRTIADLGIYPAVDPLDSSSRILDPGIVGDDHYEIAREVQRVLQRYNDLQDIIAILGIDELSEEDKQIVGRARRIQRFLSQPMFVAEQFTGIEGKFVSIKDSLEAFKTILSGELDAVPEQAFYMTGGLDEVMAKAKDLEENL

SEQ ID NO: 174609 - protein, 465 aa, Unknown
  Bacterial polypetide isolated from the Sargasso Sea
MSNGIVTQIIGAVIDVEFDKDNIPKVYEALMVDESGTTLEVQQQLGDGVVRTIAMGATEGLKRGLTASRTNAPISVPVGPETLGRIVDVLGNPIDEKGPIGEKEKMPIHRKPPTYTDQSASNEVLETGIKVIDLMCPFAKGGKIGLFGGAGVGKTVNMMELINNIALQHSGLSVFAGVGERTREGNDFYYEMQESGVVNIDKLSESKVAMVYGQMNEPPGNRLRVALTGLTMAESFRDEGKDVLLFIDNIYRYTLAGVEVSALLGRMPSAVGYQPTLAEEMGALQERITSTKTGSITSIQAVYVPADDLTDPSPATTFAHLDATVVLSRQISELGIYPAVDPLDSTSRQLDPFVVGDEHYEVAQGVQKILQRYNELKDIIAILGMDELSEEDKGLVARARKAQRFLSQPFFVAEIFTGTPGKYVSLEDTIKAFKGILNGDYDHLPEQAFYMVGTIEEAVEKAKTL

SEQ ID NO: 174610 - protein, 472 aa, Unknown
  Bacterial polypetide isolated from the Sargasso Sea
MKKGQITQIIGAVVDVKFDGELPEILTALECDNAGNRLVLEVAQHLGESSVRTIAMDATEGLKRGDQVIDTGSPIKVPVGPETLGRIINVVGEPIDEKGEVKTKENWPIHRSAPEFNDQSTETEILVTGIKVVDLLAPYAKGGKIGLFGGAGVGKTVLIMELINNVAKAHGGFSVFAGVGERTREGNDLYHEMIESGVIKPEGDGSKAALVYGQMNEPPGARARVALSGLTVAEYFRDQEGQDVLFFVDNIFRFTQAGSEVSALLGRIPSAVGYQPTLATDMGNLQERITTTNKGSITSVQAIYVPADDLTDPAPATSFSHLDATTVLSRQIAEIGIYPAVDPLDSTSRILDPRIVGDEHYRVAREVQKILQTYKSLQDIIAILGMDELSEEDKLIVARARKIQRFLSQPFFVAEVFTGSPGKLVDLESTIKGFDAICKGEYDHLPEAAFYMVGTIEEAIEKAEKMAKDAAA

SEQ ID NO: 174611 - protein, 190 aa, Unknown
  Bacterial polypetide isolated from the Sargasso Sea
MTALPINETQAGDVSAFVPTNVISITDGQIFLETDLFNAGIRPAINAGLSVSRVGGSAQTKIIKKLGGGIRLALAQYRELAAFAQFASDLDEATRKQLERGQRATELMKQKQYSPLSVSEMALSLFAVNEGYLDDVEVAKISDYESALHDYARSNEGELLENINKTGDYNDDIEASMKKICDDFAKNGSY

SEQ ID NO: 174612 - protein, 458 aa, Unknown
  Bacterial polypetide isolated from the Sargasso Sea
MSAGTTVQVIGAVVDVEFPSDAIPNIYDALTIEDADLTLEVQQQLGDGVVRTIAMGSSEGLKRGMSVNNTGQPISVPVGEKTLGRIMDVLGTPIDNKGDIGAEMNMPIHRTPPTYEEQASSTEMLETGIKVIDLIMPIAKGGKVGLFGGAGVGKTVTLMELIRNIAAEHSGYSVFAGVGERTREGNDFYHEMTESNVIDKVSLVYGQMNEPPGNRLRVALTGLTMAEAFRDEGRDVLMFIDNIYRYTLAGTEVSALLGRMPSAVGYQPTLAEEMGVLQERITSTKTGSITSFQAVYVPADDLTDPSPATTFAHLDATLVLSRQIAELGIYPAVDPLDSTSRLLDPNIIGQEHYDCARRVQGVLQRYKELQDIIAILGMDELSEDDKLSVTRARKIIRFFSQPFFVAETFTGAPGKYVQLSETIKGFSGIVNGDYDDLPEQAFYMVGSIEEAVEKAKTT

SEQ ID NO: 174613 - protein, 465 aa, Unknown
  Bacterial polypetide isolated from the Sargasso Sea
MSNGIVTQIIGAVIDVEFDKDNIPKVYEALMVDESGTTLEVQQQLGDGVVRTIAMGATEGLKRGLSASRTNAPISVPVGPETLGRIVDVLGNPIDEKGPIGEKSKMPIHRKPPSYTDQSASNEVLETGIKVIDLMCPFAKGGKIGLFGGAGVGKTVNMMELINNIALQHSGLSVFAGVGERTREGNDFYYEMQESGVVNIDNLSESKVAMVYGQMNEPPGNRLRVALTGLTMAESFRDEGKDVLLFIDNIYRYTLAGVEVSALLGRMPSAVGYQPTLAEEMGALQERITSTKTGSITSIQAVYVPADDLTDPSPATTFAHLDATVVLSRQISELGIYPAVDPLDSTSRQLDPFVVGDDHYEVAQGVQKILQRYNELKDIIAILGMDELSEEDKGLVARARKAQRFLSQPFFVAEIFTGTPGKYVSLEDTIKAFKGILNGDYDHLPEQAFYMVGTIEEAVEKAKTL

SEQ ID NO: 174614 - protein, 510 aa, Unknown
  Bacterial polypetide isolated from the Sargasso Sea
MEINPSEVTKILKEQIKKFGDKAEVTEVGQVLSVGDGIARIYGLDNVQAGEMVEFADGSKGMALNLESDNVGVVIFGDDKAVKEGDTVKRTGAIVDTPVGKELLGRVVDGLGNPIDGKGNLDKGVKRSRVEVKAPGIIPRKSVSEPMQSGLKSVDSLVPIGRGQRELIIGDRQTGKTAVAIDTIINQKKINESGDEKQKLYCIYVAIGQKRSTVRQIEKTLEEAGAMEYTTIVAATASDAAPLQFLAPYTGCTMGEFFRDNGMHALIIYDDLSKQAVAYRQMSLLLRRPPGREAYPGDVFYLHSRLLERAAKLSDEHGGGSLTALPIIETQGGDVSAFIPTNVISITDGQIFLETNLFNQGIRPAINVGLSVSRVGSSAQTKAMKKVSGSMKLELAQYREMAAFAQFGSDLDASTQKLLNRGSKLTELLKQKQYSPMTVAEQVISVFCGVKGYLDDVELKDIASFETKIIAKCKSEKPEIIEAISNTGKLEEDSEKALVELIKQHKESSK

SEQ ID NO: 174615 - protein, 323 aa, Unknown
  Bacterial polypetide isolated from the Sargasso Sea
MKKGNITQVIGAVVDVKFDGELPEILTALECNNAGNRLVLEVAQHLGESSVRTIAMDATEGLKRGDEVTDTGSPIKVPVGPETLGRIINVIGEPIDEKGEVKNKENWPIHRPAPTFNDQSTETEILVTGIKVIDLLAPYAKGGKIGLFGGAGVGKTVLIMELINNVAKAHGGFSVFAGVGERTREGNDLYHEMIDSGVIKPDGEGSKAALVYGQMNEPPGARARVALTGLTVAEYFRDQEGQDVLFFVDNIFRFTQAGSEVSALLGRIPSAVGYQPTLATDMGNLQERITTTNKGSITSVQAIYVPADDLTDPAPATSFAHLD

SEQ ID NO: 174616 - protein, 472 aa, Unknown
  Bacterial polypetide isolated from the Sargasso Sea
MRKGKITQIIGAVVDVKFEGELPEILTALECDNSGNRLVLEVAQHLGESSVRTIAMDATEGLKRGDEVTDTGAPIKVPVGPETLGRIINVIGEPIDEKGEVKTKENWPIHRSAPEFNDQSTETEILVTGIKVVDLLAPYAKGGKIGLFGGAGVGKTVLIMELINNVAKAHGGFSVFAGVGERTREGNDLYHEMIESGVIKPEGTGSKAALVYGQMNEPPGARARVALSGLTVAEYFRDQEGQDVLFFVDNIFRFTQAGSEVSALLGRIPSAVGYQPTLATDMGNLQERITTTNKGSITSVQAIYVPADDLTDPAPATSFSHLDATTVLSRQIAEIGIYPAVDPLDSTSRILDPRIVGDEHYRVAREVQKILQTYKSLQDIIAILGMDELSEEDKLVVARARKIQRFLSQPFFVAEVFTGSPGKLVDLESTIKGFDSICKGEYDHLPEAAFYMVGTIEEAIEKAEKMAKDAAA

SEQ ID NO: 174617 - protein, 234 aa, Unknown
  Bacterial polypetide isolated from the Sargasso Sea
MEINPSEVTKILKEQIKQFGDKAEVSEVGQVLSVGDGIARIYGLDNVQAGEMVEFSDGSKGMALNLESENVGVVIFGDDRAVKEGDTVKRTGAIVDTPVGKELLGRVVDGLGNPIDGKGALDKEIKRSRVEVKAPGIIPRKSVSEPMQTGLKSIDSLVPIGRGQRELIIGDRQTGKTAVAIDAIINQKKINESGDEKQKLYCVYVAVGQKRSTVRQIEKTLEEAGAMEYTTMCR

SEQ ID NO: 174618 - protein, 445 aa, Unknown
  Bacterial polypetide isolated from the Sargasso Sea
MVKIRPDEISSVIRQQIEQYTQEAQVVNVGTVLQVGDGIARIYGLEKVMSGELLEFQDGTIGVALNLEADNVGAVLMGDGLKIQEGDSVKATGKIAQVPVGEAFLGRVVDALARPIDGRGDIKADGVRLIESPAPGIIARRSVYEPLQTGLVSIDAMIPIGRGQRELIIGDRQTGKTAVATDTIINQKGGDVICVYVAIGQKASSVAQIVTTLSNAGAMDYTIIVAENADSPATLQYLAPYTGASLAEYFMYTGRATLIIYDDLSKQAQAYRQMSLLLKRPPGREAYPGDVFYLHSRLLERAAKLSDALGEGSMTALPIIETQGGDVSAYIPTNVISITDGQVFLSADLFNSGIRPAINVGISVSRVGSAAQIKAMKQVAGTLKLELAQFAELEAFSQFASDLDQATQNQLARGARLRELLKQAQSQPLSVDQQVATIYTGTQGY

SEQ ID NO: 174619 - protein, 236 aa, Unknown
  Bacterial polypetide isolated from the Sargasso Sea
MNFLYDISAVEIGQHFYWSLGGFQMHGQVLINSWIVLGLIIAFAVTTTRDLKPVPEGGQNLAEFVVEYIRDIAKTQVGSDYLEWTPFIGTLFLFIFVSNWSGALIPWKLIELPHGELGAPTNDINTTVALALLTSLTYFYAGLKKKGLEYFGKYVQPTPILLPINVLEDFTKPLSLSFRLFGNILADELVVAVLVSLVPLVIPVPLIFLGLFTSGIQALIFATLAGAYIGEALEGH

SEQ ID NO: 174620 - protein, 168 aa, Unknown
  Bacterial polypetide isolated from the Sargasso Sea
ISITDGQIFLETELFNQGIRPAINVGLSVSRVGSSAQTKAMKKVSGSMKLELAQYREMAAFAQFGSDLDASTQQLLNRGSKLTELLKQKQYSPMTVAEQVISVFCGVKGYLDDIDLKDIAEFETKIIEKCKSDKPEIIDSIQSSGKLEEDKEKLLIEVITQLKQNFKS

SEQ ID NO: 174621 - protein, 465 aa, Unknown
  Bacterial polypetide isolated from the Sargasso Sea
MSNGIVTQIIGAVIDVEFDKDNIPKVYEALMVDDSGTTLEVQQQLGDGVVRTIAMGATEGLKRGLVATRTNAPISVPVGPETLGRIVDVLGNPIDEKGPIGEKQKMPIHRKPPTYTDQSVSNDILETGIKVIDLMCPFAKGGKIGLFGGAGVGKTVNMMELINNIALQHSGLSVFAGVGERTREGNDFYYEMQESGVVNIDNLGESKVAMVYGQMNEPPGNRLRVALTGLTMAESFRDEGKDVLLFIDNIYRYTLAGVEVSALLGRMPSAVGYQPTLAEEMGALQERITSTKTGSITSIQAVYVPADDLTDPSPATTFAHLDATVVLSRQISELGIYPAVDPLDSTSRQLDPFVVGDEHYEVAQGVQKILQRYNELKDIIAILGMDELSEEDKGLVARARKAQRFLSQPFFVAEIFTGTPGKYVSLEDTIRAFKGILNGDYDDLPEQAFYMVGTIEEAVEKAKTL

SEQ ID NO: 174622 - protein, 514 aa, Unknown
  Bacterial polypetide isolated from the Sargasso Sea
MSQLNPSEISSVLKEKIAGLDLSAERKNEGIVVSVSDGIVRIHGMGDVMYGEVIEFENGTKGMALNLEQDSVGAVVLGDYLEIIEGQKAVCTGKVLEVPVGEALLGRVVNTLGTPIDGKGEIQAESAAPVEVVAPGVIARQSVDQPVQIGLKAVDAMVPIGRGQRELIIGDRQTGKTAVAIDAIINQKGTGIKCIYVAIGQKQSTVANVVKKLEEHGAMEHTIVVSATAADPAPMQYLSAYAGCTMGEYFRDKGEDALIVYDDLSKQAVAYRQVSLLLKRPPGREAYPGDVFYLHSRLLERAARVNADYVEKITGGKVKGKTGSLTALPIIETLAGDVSAFVPTNVISITDGQIYLETELFNSGIRPAINPGLSVSRVGGSAQTKIMKKLAGGVRTALAQYRELAAFSQFASDLDEATKQQLANGRAFTELLKQKQYAPMSVAQQALSLFAADRGYMADIEVEKILDFEEALHGYLTAEKGELEQQINTTGDWNDDIENQFKELVEDFKKTQTF

SEQ ID NO: 174623 - protein, 111 aa, Unknown
  Bacterial polypetide isolated from the Sargasso Sea
YRVAREVQKILQTYKSLQDIIAILGMDELSEEDKLVVARARKIQRFLSQPFFVAEVFTGSPGKLVDLESTIKGFDAICKGEYDHLPEAAFYLVGTIEEAIEKAEKLAKDVA

SEQ ID NO: 174624 - protein, 465 aa, Unknown
  Bacterial polypetide isolated from the Sargasso Sea
AGEMVEFQDNSKGMALNLESDNVGIVIFGDDKAIKEGDTVKRTGAIVDVPVGKELLGRVVDALGNPIDGKENLDKNLKRKRVEVKAPGIIPRKSVGEPMQTGLKAIDSLIPVGRGQRELIIGDRQTGKTAVAVDTIINQKKINESEDEKKKLYCIYVAIGQKRSTVAQIVKTLQDAGAMDYTIVVSATASDPAPLQFLAPYTGCTFGEFFRDNGMHALIIYDDLSKQAVAYRQMSLLLRRPPGREAYPGDVFYLHSRLLERAAKLNDDNGGGSLTALPIIETQAGDVSAYIPTNVISITDGQIFLETELFNQGIRPAVNVGLSVSRVGSAAQTKAMKKVAGSIKLELAQYREMAAFAQFGSDLDASTQKLLNRGSKLTELLKQDQYSPMTVAEQVVSVFSGVKGYLDTVENSEIRSFEKGLLELIKSDKPEILESIQKSGKIEEDTEKLLSEVITNYKKSNFEKK

SEQ ID NO: 174625 - protein, 309 aa, Unknown
  Bacterial polypetide isolated from the Sargasso Sea
IANVVAKLEEYGAMEHTIVVSAAAADPAAMQYLSAYSGCAMGENFRDTGQDALIVYDDLSKQAVAYREISLLLRRPPGREAFPGDVFYLHSRLLERAARVNAEYVEKITKGKVKGKTGSLTALPIIETQAGDVSAFVPTNVISITDGQIFLETDLFNSGIRPAIDPGLSVSRVGGAAQTKIIKKLSGGIRTDLAQYRELAAFSQFASDLDDATKEQLEHGKRITELLKQKQYSPMSVADQAMSLYAADKGYMKDVDIDKVGDFESALLAYFESEKSDLKKQINDTGDWDDDIENQFKELVEDFKKTQTY

SEQ ID NO: 174626 - protein, 134 aa, Unknown
  Bacterial polypetide isolated from the Sargasso Sea
YPAVDPLDSTSLILDPQVVGDDHYRVAREVQRVLQTYKSLQDIIAILGMDELSEEDKLTVARARKIEKFLSQPFFVAEIFTGSPGKYVDLEDTIKSFDGLVKGEYDHMPEAAFYMVGGMDEAIEKAKKLEVEAA

SEQ ID NO: 174627 - protein, 511 aa, Unknown
  Bacterial polypetide isolated from the Sargasso Sea
MEIKAAEISSVIKDQISNFETKADVAEVGTVLSVGDGIARVYGLDQVQAGEMVEFPGGVKGMALNLEMDNVGVSIFGDDTGIKEGDTVKRTGEIVDVPVGKELLGRVVDGLGNPIDGKGPINSKDRRRIELKAPGIIPRQSVSEPMQTGIKALDALVPIGRGQRELIIGDRQTGKTAVAIDTILNQKTVNESNNEKEKLYCIYVAIGQKRSTVAQIVKTLEDNGAMEYTIVVSATASEPAPLQFLSAYTGCTMGEFFRDNGMHALIVYDDLSKQAVAYRQMSLLLRRPPGREAYPGDVFYIHSRLLERAAKMSDEHGGGSLTALPVIETQAGDLSAYIPTNVISITDGQIFLETNLFFAGIRPAINVGLSVSRVGSAAQTKAMKKIAGPVKLELAQYREMAAFAQFASDLDASTKQLLDRGARLVEILKQGQYSPLTVPEQVVSIYAGVRGYLDKINVNDVVRFESEVMSEVRTNHSDLLESLANEKELSEENDEKLKSILDGFVDKFLNS

SEQ ID NO: 174628 - protein, 364 aa, Unknown
  Bacterial polypetide isolated from the Sargasso Sea
MANNLTGKISQVLGAVVDIEFDGELPAIMNALEVDNNGNRLMLEVAQHLGENAVRTIAMDVTDGLVRGQTATDTGAPISMPVGPETLGRIMNVVGEPVDERGEIGTKKTYPIHRSAPEFVDQSTETEVLVTGIKVVDLLAPYARGGKIGLFGGAGVGKTVLIMELINNIAKAHGGYSVFAGVGERTREGNDLYHEMIESGIIDLKGKDSKVALVYGQMNEPPGARARVALSGLTQAEYFRDEEGQDVLFFVDNIFRFTQAGSEVSALLGRIPSAVGYQPTLATDMGALQERITTTKKGSITSVQAIYVPADDLTDPAPATSFSHLDATTVLNRAISEKGIYPAVDPLDSTSRILDPQVVGDDHY

SEQ ID NO: 174629 - protein, 356 aa, Unknown
  Bacterial polypetide isolated from the Sargasso Sea
KSNRPIHAKAPSFEEQSTEADVLETGIKVIDLLCPFAKGGKVGLFGGAGVGKTVTVMELIRNIAAEHDGFSVFAGVGERTREGNDFYHEMMESNVLDKVALVYGQMNEPPGNRLRVALTGLTIAENFRDEGRDVLMFIDNIYRYTLAGTEVSALLGRMPSAVGYQPNLAEEMGVLQERITSTKTGSITSIQAVYVPADDLTDPSPATTFAHLDATVVLARSIAELGIYPAVDPLDSNSRQLDPGIVGQEHYDTARSVQQVLQRYKELQDIIAILGMDELSEEDKLTVQRARKIQRFLSQPFFVAEVFTGSPGQYVSLRDSIKAFQGIVAGEYDDLPEQAFYMVGTIEEAVEKAKSM

SEQ ID NO: 174630 - protein, 472 aa, Unknown
  Bacterial polypetide isolated from the Sargasso Sea
MSENIGRVVKIAGPVVDVAFPQDELPEITFALEVDVEIDGNTSTIVLEVAQHLGEGRVRAISMQGTDGLRRGAEVTDTGAPISVPVGQETLGHIFNVWGETLDVETSSIGVKQKWPIHRKPPPYEDVTAQNEMFETGIKVIDLLMPYVQGGKIGLFGGAGVGKTVLIQEMINRVATQHGGVSVFAGVGERTREGNDLFREMQESGVIDKTALVFGQMDEPPGVRLRVALSALTMAEYFRDEEKQDVLLFIDNIFRFSQAGSEVSTLLGRMPSAVGYQPTLADEMGFLQERITSLKGRSITSLQAVYVPADDITDPAPHTAFAHLDARTVLSRSIADLGIYPAVDPLDSSSRILDPGVVGDEHYETAREVQRVLQRYNDLQDIIAILGIDELSEEDKQIVGRARRIQRFLSQPMFVAEQFTGIEGKFVSIKDSVEAFKTILSGELDSVPEQAFYMTGGLDEVMSKAKELEENL

SEQ ID NO: 174631 - protein, 505 aa, Unknown
  Bacterial polypetide isolated from the Sargasso Sea
MSEFNIDAKQISDSLKETLGDWQDSVKDDLVGYVSAVADGVARVKGLENVMASELLEFPGGLVGVALNLEEDSIGVVLMGDSNHIEEGMPVKQTGEVLSIGVGDGFLGRVIDPLGNPIDGKGPIEFTERRRLELQAPSVVERQPVGEPLQTGIKAIDSMIPIGRGQRELIIGDRQIGKTAVAVDTIINQKDTDVKCIYVAIGQKSSTVAEVVERFEQEGVLDKVVIVNAPASAAAALQMYAPYAGSAIGQHWMYNGEHGLIVFDDLSKQAIAYRQISLLLRRPPGREAYPGDVFYLHSRLLERCAKVSEELGGGSLTGLPIIETKAGDVSAFIPTNVISITDGQIYLESELFYSGVRPAVNPGTSVSRVGGAAQTKAMKKVSGPLRINLAQFRELEAFAEFGSDLDAASQAQLDRGRRVVELLKQPQYQPVPMEEQVISLYAVTEGFLDVVDPADIPQTELDLIDFVKTRHSDVINSIKTTGELPEEELKTAVEAFVSTLEKKEE

SEQ ID NO: 174632 - protein, 472 aa, Unknown
  Bacterial polypetide isolated from the Sargasso Sea
MRKGQITQIIGAVVDVKFEGELPEILTALECDNGGNRLVLEVAQHLGESSVRTIAMDATEGLKRGDEVTDTAAPIKVPVGPETLGRIINVIGEPIDERGKVKSSDNWPIHRAAPEFNDQSTETEILVTGIKVIDLLAPYAKGGKIGLFGGAGVGKTVLIMELINNVAKAHGGFSVFAGVGERTREGNDLYHEMIDSGVIKTDGEGSKAALVYGQMNEPPGARARVALTGLTVAEYFRDQEGQDVLFFVDNIFRFTQAGSEVSALLGRIPSAVGYQPTLATDMGNLQERITTTNKGSITSVQAIYVPADDLTDPAPATSFAHLDATTVLSRQIAEIGIYPAVDPLDSTSRILDPRIVGDEHYRVAREVQKVLQTYKSLQDIIAILGMDELSEEDKLVVARARKIQRFLSQPFFVAEVFTGSPGKLVDLESTIKGFDAICKGEYDHLPEAAFYMVGTIEEAVQKAESLANEAAA

SEQ ID NO: 174633 - protein, 419 aa, Unknown
  Bacterial polypetide isolated from the Sargasso Sea
MEINPSEVTKILKEQIKKFGDKAEVTEVGQVLSVGDGIARIYGLDNVQAGEMVEFSDGSKGMALNLESENVGVVIFGDDRAVKEGDTVKRTGAIVDTPVGKELLGRVVDGLGNPIDGKGALDKSLIRSRVEVKAPGIIPRKSVSEPMQTGLKSIDSLVPIGRGQRELIIGDRQTGKTAVAIDAIINQKKINESGDEKKKLYCIYVAVGQKRSTVRQIEKTLEEAGAMEYTTIVAATASDAAPLQFLAPYTGCTMGEYFRDNGMHALIIYDDLSKQAVAYRQMSLLLRRPPGREAYPGDVFYLHSRLLERAAKLSDEHGGGSLTALPIIETQGGDVSAFIPTNVISITDGQIFLETELFNQGIRPAINVGLSVSRVGSSAQTKAMKKVSGSMKLELAQYREMAAFRTIWFRPRCIYSEIT

SEQ ID NO: 174634 - protein, 249 aa, Unknown
  Bacterial polypetide isolated from the Sargasso Sea
MYFSPLEQFTIISLIPCHLGNFYFSFTNSALFFLLSTGAFVFLCSLVFTKGGTLVPTPWQSLIESIYEFVVSLVSEQIGKKGVQYFPFVFTLFTFLLLSNLIGMIPYSFTTTSHFIITFTLSFCVFIAMTLIGFQTHGLHFFSFLLPPGAPLVLAPGLVVIELVSYCFRGISLGVRLFANMMAGHTLVKILSGFAWTMLSLSGVLKLAAAIPFLVVFALMFLEVGVACLQAYVFTILTCIYLNDAIHLH

SEQ ID NO: 174635 - protein, 493 aa, Unknown
  Bacterial polypetide isolated from the Sargasso Sea
MSQKIGKVSQIIGPVVDVSFDTANTELPKIYDSLEIKKADGSVLVLEVQSHVGEDMVRTISMDSTDGLQRGADVVSTGNPIQMPIGKDIYGRLFNVIGDAIDGMEDLPKSGKSGLPIHREAPPFEQLSTSTEVLFTGIKVIDLIEPYAKGGKIGLFGGAGVGKTVLIQELINNIAKGHGGLSVFAGVGERTREGNDLLREMLESGIIDYGKEFMESMENGGWDLSKVDKKALENSKATFVFGQMNEPPGARARVALSGLTVAEYFRDGSGDGQGKDVLFFVDNIFRFTQAGSEVSALLGRMPSAVGYQPTLATEMGAMQERITSTKKGSITSVQAVYVPADDLTDPAPATTFSHLDATTVLSRKIAELGIYPAVDPLDSTSRILTPEILGDDHYNCAQRVKEMLQKYKELQDIIAILGMEELSEEDKLVVSRARRVQRFLSQPFHVAEQFTGIPGVLVDIKDTIKGFNMIMDGELDHLPEAAFNLKGTIVGSN

SEQ ID NO: 174636 - protein, 230 aa, Unknown
  Bacterial polypetide isolated from the Sargasso Sea
MSQKIGKVSQIIGPVVDVSFDTANTELPKIYDSLEIKKADGSVLVLEVQSHVGEDMVRTISMDSTDGLQRGADVVSTGNPIQMPIGKDIYGRLFNVIGDAIDGMEDLPKSGKSGLPIHREAPPFEQLSTSTEVLFTGIKVIDLIEPYAKGGKIGLFGGAGVGKTVLIQELINNIAKGHGGLSVFAGVGERTREGNDLLREMLESGIIDYGKEFMESMENGGWDLSKVIKK

SEQ ID NO: 174637 - protein, 462 aa, Unknown
  Bacterial polypetide isolated from the Sargasso Sea
MSDTGVIKQIIGAVIDVEFDKAQIPNIYDALVVGENNLVLETQQQLGDGIVRTVAMGTTEGLKRGLNVENTKAPISVPVGEATLGRIMNVLGDPIDMKGEVKTKERMPIHRKPPEYVDLADSNEILETGIKVIDLVCPFAKGGKVGLFGGAGVGKTVNMMELIRNIAIEHSGYSVFAGVGERTREGNDFYHEMTDSNVLDKVSLVYGQMNEPPGNRLRVALTGLTMAEKFRDEGRDVLLFVDNIYRYTLAGVEVSALLGRMPSAVGYQPTLAEEMGVLQERITSTKTGSITSIQAVYVPADDLTDPSPATTFAHLDATVVLSRRIAELGIYPAVDPLDSTSRQLDPLVVGQEHYEVAQRVQGVLQRYKELKDIIAILGMDELSDEDKNTVSRARKVEKFLSQPFFVAEVFTGAPGKYVSVKDTIQGFKEILDGVHDDVPEQAFYMVGSIEEVLEKAKTVKSD

SEQ ID NO: 174638 - protein, 515 aa, Unknown
  Bacterial polypetide isolated from the Sargasso Sea
MTTKINPSEISSIIKKKIDDYKGAATEANVGEVLSTADGIVQIYGLEDAMYGELLDFGEGTYGLALNLETDSVGAVVLGDSGHIKEGQKVKTTGRILEVPVGEGLKGRVLDALGRPLDGKGEVKSKHNAPIEVVAPGVIDRQSVDQPVQTGIKSIDVMVPIGRGQRELIIGDRQTGKTAIAVDTIVNQKNSDITCVYVAIGQKQSTVATVVRQLEEADALKNTIVVAATAAESASLQFLAPYSGCTMGEYFRDIGEDALIIYDDLSKHAIAYRQISLLLKRPPGREAFPGDIFYLHSRLLERASRVNADYVERVTDGKVKGKTGSLTALPIIETQASDVSAFIPTNVISITDGQIFLETDLFNSGIRPAINPGISVSRVGGAAQTKIMKKLGGGVKLALAQFRELESFSQFASDLDDATREQLENGQRITELLKQKQFSPRSVACVSIVLYAIENKYLTNIEKEKMQSFEDNLRTYFKSKHKDVWEEVNKTGDWNDDLEKKYKAILDSFVKEGSW

SEQ ID NO: 174639 - protein, 324 aa, Unknown
  Bacterial polypetide isolated from the Sargasso Sea
MSNGLVTQIIGAVIDVEFDKENIPQVYEALLIDESGTTLEVQQQLGDGVVRTIAMGATEGLKRDLSVSRTNAPISVPVGPETLGRIMDVLGNPIDEKGPIGEKEKMPIHKKPPSYTDQSASNEILETGIKVIDLMCPFAKGGKVGLFGGAGVGKTVNMMELINNIALQHSGLSVFAGVGERTREGNDFYYEMQESGVVNIEKLGESKVSMVYGQMNEPPGNRLRVALTGLTIAEKFRDEGKDVLLFIDNIYRYTLAGVEVSALLGRMPSAVGYQPTLAEEMGALQERITSTKTGSITSIQAVYVPADDLTDPSPATTFAHLDAT

SEQ ID NO: 174640 - protein, 486 aa, Unknown
  Bacterial polypetide isolated from the Sargasso Sea
MVATPSTSSQTKGVVRQVIGPVLDVEFPAGKLPKILNALRIEAKNPAGQDIALTAEVQQLLGDHRVRAVAMSGTDGLVRGMEAIDTGAPISVPVGEATLGRIFNVLGEPVDEQGPVNTKDTAPIHRAAPKLTDLETKPKVFETGIKVIDLLAPYRQGGKVGLFGGAGVGKTVLIQELINNIAKEHGGVSVFGGVGERTREGNDLYEEFKESGVINADDLTQSKVALCFGQMNEPPGARMRVGLSALTMAEHFRDVNKQDVLLFVDNIFRFVQAGSEVSALLGRMPSAVGYQPTLGTDVGELQERITSTLEGSITSIQAVYVPADDLTDPAPATTFAHLDATTVLARALAAKGIYPAVDPLDSTSTMLQPSVVGDEHYKTARAVQSTLQRYKELQDIIAILGLDELSEEDRLTVDRARKIEKFLSQPFFVAEIFTGMSGKYVKLEDTIAGFNMILSGELDDLPEQAFYLVGNIDEVKAKAEKIKSEK

SEQ ID NO: 174641 - protein, 134 aa, Unknown
  Bacterial polypetide isolated from the Sargasso Sea
MAISLKVLAPNKNVYQGEAEEVILPSTTGQLGILPGHISLVTAIDIGVLRLRMNSQWKSIALMGGFAEIESDEVIVLVNNAEIGSEINVQNAEQDLKEAKLAISKFSENEKNPEKIKALKEVSKAEARIQAAKN

SEQ ID NO: 174642 - protein, 472 aa, Unknown
  Bacterial polypetide isolated from the Sargasso Sea
MSKGIITQVIGAVVDVKFEGELPEILTALECKNGDNRLVLEVAQHLGESTVRTIAMDATEGLKRGDEVVNTNAPIQVPVGPETLGRIINVIGEPIDERGEVKTKESWPIHRAAPEFNDQSTETEILVTGIKVIDLLAPYAKGGKIGLFGGAGVGKTVLIMELINNVAKAHGGFSVFAGVGERTREGNDLYHEMMDSGVIKKDGPGSKAALVYGQMNEPPGARARVALTGLTVAEYFRDQEGQDVLFFVDNIFRFTQAGSEVSALLGRIPSAVGYQPTLATDMGNLQERITTTNKGSITSVQAIYVPADDLTDPAPATSFAHLDATTVLSRQIAEIGIYPAVDPLDSTSRILDPRVVGDEHYRVARDVQRILQSYKSLQDIIAILGMDELSEEDKLVVARARKIQRFLSQPFFVAEVFTGSPGKLVDLESTIKGFDAICKGEYDHLPEAAFYMVGTIEEAIEKAQKMEKEAAA

SEQ ID NO: 174643 - protein, 511 aa, Unknown
  Bacterial polypetide isolated from the Sargasso Sea
MEINPSEVTKILKEQIKNFGDKAEVTEVGQVLSVGDGIARIYGLDNVEAGEMVEFSDGSKGMALNLESENVGVVIFGDDRNIKEGDVVKRTGNIVDTPVGKELLGRVVDGLGNPIDGKGALDKSVQKSRVEVKAPGIIPRQSVNEPMQTGLKSIDSLVPIGRGQRELIIGDRQTGKTAVAVDAIINQKKINESGDEKQKLYCIYVAVGQKRSTVRQIQKTLEEAGAMEYTTIVAATASDSAPLQFLAPYTGCAMGEYFRDNGMHALIIYDDLSKQAVAYRQMSLLLRRPPGREAYPGDVFYLHSRLLERAAKLSDEHGGGSLTALPIIETQGGDVSAFIPTNVISITDGQIFLETELFNQGIRPAINVGLSVSRVGSSAQTKAMKKVSGSMKLELAQYREMAAFAQFGSDLDASTQQLLNRGSKLTELLKQKQYSPMTVAEQVISVFCGVKGYLDDIDLKDVAGFESKIIEKCKSEKPEIIESIQSSGKLEEDKEKLLVELIAQLKETLKS

SEQ ID NO: 174644 - protein, 290 aa, Unknown
  Bacterial polypetide isolated from the Sargasso Sea
MASLDDLKKRIASVKSTQKITKAMKMVAAAKLRKAQESAEKGRPYSEKMNNVILNLSSGISDKENAPKLLAGTGQDKVHLCVVMTSDRGLCGGFNSNIIKKAKSYFSKILDENKELKIITVGSKGNDQLKRIYGDKIIENISFKESKNANYFDADKVGRTIIEKFEAGEFDICTIFYNKFKNVITQIPQAQQIIPLNDEGSENSSDESYEFEPDEDEILSNLLPKNISTQIFKAMLENSASEQGSRMSAMDNATRNAGEMVDKLTIEYNRSRQAAITKELIEIISGAESL

SEQ ID NO: 174645 - protein, 298 aa, Unknown
  Bacterial polypetide isolated from the Sargasso Sea
MEELNPSEISQVIKQKIDALDTSAKPSNEGTVVFLADGIARIHGLGEVMNGELIEFDHGVMGMALNLERDSVGAVILGDYKLLAEGSSAKCTGRILEVPVGEALLGRVVDSLGNPIDGKGEVKTTETAPVEKVAPGVISRKSVDQPVQLGIKAVDSMVPIGRGQRELIIGDRQTGKTAIAIDAIINQKDTGVKCIYVAVGQKQSSIAQVVRTLEEYGAMENTIVVVAAAADPAPMQYIAPFSACSMGEYFRDRGEDALIIYDDLSKQAVAYRQMSLLLRRPPGREAYPGDVFYLHSRL

SEQ ID NO: 174646 - protein, 460 aa, Unknown
  Bacterial polypetide isolated from the Sargasso Sea
MSKGTVIQIIGAVIDVEFPKENLPKIYDALTVDENGLVLEVQQQLGDGVVRTIAMGPSEGLKRGVDVTNTENPISVPVGEETLGRIMNVLGEPIDEKGDVAAKKSMPIHRNPPSYEDQAETTELLETGIKVIDLICPFAKGGKVGLFGGAGVGKTVNIQELIRNIAYEHSGYSVFAGVGERTREGNDMYHEMIEGGVLDKVALVYGQMNEPPGNRLRVALSGLTMAENFRDEGRDVLLFVDNIYRYTLAGTECSALLGRMPSAVGYQPTLAEEMGVLQERIASTKTGSITSVQAVYVPADDLTDPSPATTFAHLDANVVLSRQIASLGIYPAVDPLDSNSRQLEPGIVGQEHYDVANAVKQQLNRYKELKDIIAILGMDELSEEDKLVVARARKIERFLSQPFFVAEVFTNAPGKYVPLSETIRGFKGIVNGDYDDIPEQAFLMAGGIDEVVEKAKSEAA

SEQ ID NO: 174647 - protein, 198 aa, Unknown
  Bacterial polypetide isolated from the Sargasso Sea
MSKGIITQVIGAVVDVKFDGELPEILTALECKNGDNRLVLEVAQHLGETTVRTIAMDATEGLKRGDEVINTNAPIQVPVGPETLGRIINVIGEPIDERGEVKTKESWPIHRAAPEFNDQSTETEILVTGIKVIDLLAPYAKGGKIGLFGGAGVGKTVLIMELINNVAKAHGGFSVFAGVGERTREGNDLYHEMMDSGV

SEQ ID NO: 174648 - protein, 486 aa, Unknown
  Bacterial polypetide isolated from the Sargasso Sea
MKSAQVLSVGDGIARIYGLDNVQAGEMVEFADGSKGMALNLESENVGVVIFGDDRNIKEGDVVKRTGNIVDTPVGKELLGRVVDGLGNPIDGKGALDKSVKKTRVEVKAPGIIPRQSVSEPMQTGLKSIDSLVPIGRGQRELIIGDRQTGKTAVAVDAIINQKKINESGDEKQKLYCIYVAVGQKRSTVRQIQKTLEEAGAMEYTTIVAATASDSAPLQFLAPYTGCAMGEYFRDNGMHALIIYDDLSKQAVAYRQMSLLLRRPPGREAYPGDVFYLHSRLLERAAKLSDEHGGGSLTALPIIETQGGDVSAFIPTNVISITDGQIFLETELFNQGIRPAINVGLSVSRVGSSAQTKAMKKVSGSMKLELAQYREMAAFAQFGSDLDASTQQLLNRGSKLTELLKQKQYSPMTVAEQVISVFCGVKGYLDDIDLKDIAEFETKIIEKCKSDKPEIIDSIQSSGKLEEDKEKLLIEVINQLKQNFKS

SEQ ID NO: 174649 - protein, 314 aa, Unknown
  Bacterial polypetide isolated from the Sargasso Sea
MEINPSEVTKILKEQIKNFGEKTEVTEVGQVLSVGDGIARIYGLDNVQAGEMVEFADGSKGMALNLESENVGVVIFGDDRNIKEGDVVKRTGNIVDTPVGKELLGRVVDGLGNPIDGKGALDKSVKKTRVEVKAPGIIPRQSVSEPMQTGLKSIDSLVPIGRGQRELIIGDRQTGKTAVAVDAIINQKKINESGDEKQKLYCIYVAVGQKRSTVRQIQKTLEEAGAMEYTTIVAATASDSAPLQFLAPYTGCAMGEYFRDNGMHALIIYDDLSKQAVAYRQMSLLLRRPPGREAYPGDVFYLHSRLLERAAKLS

SEQ ID NO: 174650 - protein, 502 aa, Unknown
  Bacterial polypetide isolated from the Sargasso Sea
MTGKISQIMGAVVDVAFEDGHLPNIMNALSVDRGDEGILVLEVAQHLGDNMVRTVAMDSTDGLTRGVEVIDSGSPITVPVGQETLGRLFDVLGNVIDGKGDLKTDKKNPIHRPAPKHEELTTSTEILVTGIKVVDLMEPYTKGGKTGLFGGAGVGKTVLIQELIRNIATEHGGYSVFAGVGERTREGNDLYNEMTESGVIDKTTMVFGQMNEPPGARLRVALSGLAMAEFFRDDEGRDVLLFVDNIFRFTQAGSEVSALLGRMPSAVGYQPTLSTEMGELQERITSTKKGSITSVQAVYVPADDLTDPAPATAFAHLDATSVLERKIAELGIYPAVDPLASTSRILDPRIIGDRHYDVARNVEGVLQKYKDLQDIIAILGMDELSDEDKLTVSRARKIQKFFSQPFFVAEQFTGTPGRYVELEDTVSGFEAILNGEADDIPENAFSYVGSIDEAFDKSKDVKSGSSSDESKKENKPIDEDGEQGKEEAETEELSTEKNSDQE

SEQ ID NO: 174651 - protein, 449 aa, Unknown
  Bacterial polypetide isolated from the Sargasso Sea
MEIKTDNITALLQEQIKKFDLSVDVSEVGEVIEIGDGVARVSGLEKVMSSELVELPNDVYGMALNLEDDNVGVVLFGESSHVKEGDLAKRTGKVVEVPVGSSMLGRVVNPLGQPVDGKGAIETKDFLPIERKALGVMSRSPVNQPLQTGIKAVDSMIPIGRGQRELIIGDRQTGKTAVAVDAIINQKYTHETDSPVYCIYVAIGQKASTVASIVAELEANGAMDYTTVVSSSASDEAPLQYIAPYSGCAMGEHFRDNGKHALIIYDDLSKQAVAYRQMSLILRRPPGREAFPGDVFYLHSRLLERASKLSEDLGGGSLTALPIIETQEGDVSAYIPTNVISITDGQIYLEKNLFNSGVRPAIDVGISVSRVGGNAQIKAMKGVAGTLRLDLAQYRELEAFAKFGSDLDKNTQAQLTRGERMVEILKQGQYVPMSVEKQVAIIFAVSKGY

SEQ ID NO: 174652 - protein, 288 aa, Unknown
  Bacterial polypetide isolated from the Sargasso Sea
MAAGKEIRGKIKSVENTKKITKAMEMVAASKMRKAQDRMRAARPYSEKIRNIAANLGKANPEYVHPFMKVNDAKTAGVIVITTDKGLCGGMNTNVLRAVTTKLRELQGAGVSTEAVAIGNKGLGFLNRVGAKVVSHVTGLGDTPHLDKLIGPVKVLLDAYAEGKINAVYLSYTKFINTMKQESVVEQLLPLSSEQMQAEKTEHGWDYIYEPDAQSVIDELLVRYVESLIYQAVAENMASEQSARMVAMKAATDNAGSVIGELKLVYNKTRQAAITKELSEIVAGAAAV

SEQ ID NO: 174653 - protein, 257 aa, Unknown
  Bacterial polypetide isolated from the Sargasso Sea
MAQVQGKIVQCIGAVVDVEFPRDQMPKVYDALKLEGSALTLEVQQQLGDGVVRTIALGSSDGLRRGIMVTNTGNPITVPVGKATLGRIMDVLGNPIDERGPVGQELTASIHRKAPAYDELSPSQELLETGIKVIDLVCPFAKGGKVGLFGGAGVGKTVNMMELINNIAKAHSGLSVFAGVGERTREGNDFYHEMADSGVVNLENLGESKVAMVYGQMNEPPGNRLRVALTGLTIAESFRDEGRDVLFFVDNIYRYTL

SEQ ID NO: 174654 - protein, 316 aa, Unknown
  Bacterial polypetide isolated from the Sargasso Sea
MANLKEIRDRIVSVKNTRKITEAMRLVAAAKVRRAQDQVLKSRPFADKLARVLENIQSRVQFEAVDSPLLSKREVKSISLVCITADRGLCGGYNTNIIKKVEIRYAELVKQGYQPNLILVGKKAIGYFQNRKDRYVIKSTFKELEQVPTVKDSEGVTNEILAEFLSENSDRVEIIYTKFITLVSCAPVVQTLLPLDPQGIAEENDEIFRLTTKDSKLLVEKSNIEKSDSEKLPSDIVFEQSPDQLLDSLLPLYLQNQVLRALQESAASELACRMTAMNNASDNAKELASTLNLTYNKARQAAITQEILEVVGGSAV

SEQ ID NO: 174655 - protein, 511 aa, Unknown
  Bacterial polypetide isolated from the Sargasso Sea
MEINPSEVTKILKEQIKNFGEKTEVTEVGQVLSVGDGIARIYGLDNVQAGEMVEFADGSKGMALNLESENVGVVIFGDDRNIKEGDVVKRTGNIVDTPVGKELLGRVVDGLGNPIDGKGALDKSVKKTRVEVKAPGIIPRQSVSEPMQTGLKSIDSLVPIGRGQRELIIGDRQTGKTAVAVDAIINQKKINESGDEKQKLYCIYVAVGQKRSTVRQIQKTLEEAGAMEYTTIVAATASDSAPLQFLAPYTGCAMGEYFRDNGMHALIIYDDLSKQAVAYRQMSLLLRRPPGREAYPGDVFYLHSRLLERAAKLSDEHGGGSLTALPIIETQGGDVSAFIPTNVISITDGQIFLETELFNQGIRPAINVGLSVSRVGSSAQTKAMKKVSGSMKLELAQYREMAAFAQFGSDLDASTQQLLNRGSKLTELLKQKQYSPLTVAEQVVSVFCGVKGYLDDIDLKDIAEFETKIIEKCKSDKPEIIDSIQSSGKLEEDKEKLLIEVITQLKQNFKS

SEQ ID NO: 174656 - protein, 153 aa, Unknown
  Bacterial polypetide isolated from the Sargasso Sea
MASLDDLKKRIASVKSTQKITKAMKMVAAAKLRKAQESAEKGRPYSEKMNNVILNLSSGISDKENAPKLLSGTGNDKVHLCVVMTSDRGLCGGFNSNIIKKAKSYFLKILSEGKELKIITVGSKGNDQLKRMYGDKIIENISFKESKNANYFD

SEQ ID NO: 174657 - protein, 285 aa, Unknown
  Bacterial polypetide isolated from the Sargasso Sea
ADPAPMQYLSAYAGCTMGEYFRDKGEDALIVYDDLSKQAVAYRQVSLLLKRPPGREAYPGDVFYLHSRLLERAARVNADYVEQITGGKVKGKTGSLTALPIIETLAGDVSAFVPTNVISITDGQIYLETELFNSGVRPAINPGLSVSRVGGSAQTKIMKKLAGGVRTALAQYRELAAFSQFASDLDDATKQQLANGKAFTELLKQKQYAPMSVAQQALSLFAADRGFMADVEVEKILDFEEALHGYLTSEKGDLEEQINSTGDWNDDIEAQFTALVEDFKKTQTY

SEQ ID NO: 174658 - protein, 230 aa, Unknown
  Bacterial polypetide isolated from the Sargasso Sea
MVATPSTSSQTKGVVRQVIGPVLDVEFPAGKLPKILNALRIEAKNPAGQDIALTAEVQQLLGDHRVRAVAMSGTDGLVRGMEAIDTGAPISVPVGEATLGRIFNVLGEPVDEQGPVNTKDTAPIHRSAPKLTDLETKPKVFETGIKVIDLLAPYRQGGKVGLFGGAGVGKTVLIQELINNIAKEHGGVSVFGGVGERTREGNDLYEEFKESGVINADDLTQSKVALCLDR

SEQ ID NO: 174659 - protein, 465 aa, Unknown
  Bacterial polypetide isolated from the Sargasso Sea
MANIGKISQIMGAVVDVTFEDGNLPEIMNALHVEREDEGDLILEVAQHLGESTVRTVAMDSTDGLVRGVDVKDSGKPISVPVGPETLGRLFDVTGNVIDGKGKVSAKKEYPIHRSAPKHEDLSTSTEMLVTGIKVVDMMEPYTRGGKTGLFGGAGVGKTVLIQELIRNIATEHGGYSVFAGVGERTREGNDLYNEMTESGVIEKTTMVFGQMNEPPGARLRVALSGLTMAEYFRDDEGRDVLLFIDNIFRFTQAGSEVSALLGRMPSAVGYQPTLGTEMGDLQERITSTKKGSITSVQAVYVPADDLTDPAPATAFAHLDATSVLERKIAELGIYPAVDPLASTSRILDPRVIGDNHYNTAREVQNILQKYKDLQDIIAILGMDELSDDDKLSVSRARKIQRFMSQPFFVAEQFTNVEGRYVELDDTIAGFKAILNGDVDEYSENAFSYVGTIDEAIEKGKKLAA

SEQ ID NO: 174660 - protein, 342 aa, Unknown
  Bacterial polypetide isolated from the Sargasso Sea
MSINPSEITKILKEQIKNFGDKAEVTEVGKVLTVGDGIARIYGLDNVQAGEMVEFDDGSKGMALNLESDNVGVVIFGDDRKIKEGDTVKRTGSIVDVPVGKDLLGRVVDGLGNPIDGKGNLNDKAQRKRVEVKAPGIIPRQSVSEPMQTGLKAIDSLIPIGRGQRELIIGDRQTGKTAVAIDTIINQKEINESNDEKKKLYCVYVAIGQKRSTVAQIVKTLEDAGAMKYTTIVSATASDSAPLQFLAPYTGCTIGEYFRDNGMHALIIYDDLSKQAVAYRQMSLLLRRPPGREAYPGDVFYLHSRLLERAAKLSDANGGGSLTALPIIETQQVTFLLIFQQM

SEQ ID NO: 174661 - protein, 462 aa, Unknown
  Bacterial polypetide isolated from the Sargasso Sea
MKFNTDEIASVLREEIDRYQTGIDVREVGQVLEVGDGIARVWGLSGVMAGEMVEFPGGVTGLAFNLEENSVGVIILGDYLKVNEGDEVRSTGKLLSVPVGDAVIGRVLDPLGNPLDGKGPITTDKRRPVETLAPGVADRQPVREPLQTGIKAIDAMTPIGRGQRELIIGDRKTGKTAIGIDAIINQKHSGVKCFYVAVGQKDSSVAVAIDVLRKHGAMDYTTVIVAGGSTAAPLQYIAPYSGTAMAEEFMYNGEHALIVYDDLSKQATAYRQLSLLMRRPPGREAYPGDVFYAHSRLLERSAKLSDEHGGGSLTSLPIIETLEGEVSAYIPTNVISITDGQIYLQPDLFFAGQRPAMNVGISVSRVGGAAQTKAMKKVSGGLRLDLASFRELEAFAQLGTDLDAATQSRLDRGYCMVELLKQGQYQPLDIVDQILSIYAGTRGHLDNVKREEVSAWEAGFLT

SEQ ID NO: 174662 - protein, 235 aa, Unknown
  Bacterial polypetide isolated from the Sargasso Sea
AYPGDVFYLHSRLLERAAKIINNDKLASEMNDLPDSLKKEVKGGGSLTALPIIETQEGDVSAYIPTNVISITDGQIFLESNLFNSGIRPAINVGISVSRVGGSAQIKSMKKICGTLKLDQAAFRELEAFSKFGSDLDAATQLVIDRGRTNQEILKQNQYSPLRVEEQIAVIYCSSNGFFDGVDLKNISKLETEYLDVVNSKHKNLLDELADGKVNEKSLEKLGEVANKVASNYKS

SEQ ID NO: 174663 - protein, 292 aa, Unknown
  Bacterial polypetide isolated from the Sargasso Sea
MPSLDDLKKRIKSVKSTQKITKAMKMVAAAKLRKAQESAERGRPYSKKMQSIILNLTKSINDPENAPRLLVGTGKDKTYLCVVLTADRGLCGGFNSNICKLAKTKFKQILNEGKELKIISVGSKGLDQIKREYGKYIIKKFSFKEKKKISFNEAEIIGSEIINLFKKNEFDKCILFFNNFKNVITQIPQAQQIIPAENQLSEKKDENTMSYEFEPEEDEILEDLLPKNISTQVFKAFLENAASEQGSRMTAMDNATRNAGELVDKLTINYNRSRQASITKELIEIISGAESL

SEQ ID NO: 174664 - protein, 215 aa, Unknown
  Bacterial polypetide isolated from the Sargasso Sea
DVFYLHSRLLERAAKLNDKSGGGSLTALPIIETQAGDVSAYIPTNVISITDGQIFLETELFNQGIRPAVNVGLSVSRVGSAAQTKAMKKVAGSIKLELAQYREMAAFAQFGSDLDASTQKLLNRGAKLTELLKQDQYSPMTVAEQVISVFTGVKGYLDDVELGKIKKFEKNIIEKIKSEKPEIIESILSSGKLDENIEKLLAQTIEEYKKGNNNA

SEQ ID NO: 174665 - protein, 465 aa, Unknown
  Bacterial polypetide isolated from the Sargasso Sea
MSNGTVTQIIGAVIDVEFDKDNIPKVYEALMVDESGTTLEVQQQLGDGVVRTIAMGATEGLKRGLSASRTNAPISVPVGPETLGRIVDVLGNPIDEKGPIGEKSKMPIHRKPPSYTDQSASNEVLETGIKVIDLMCPFAKGGKIGLFGGAGVGKTVNMMELINNIALQHSGLSVFAGVGERTREGNDFYYEMQESGVVNIDNLGESKVAMVYGQMNEPPGNRLRVALTGLTMAESFRDEGKDVLLFIDNIYRYTLAGVEVSALLGRMPSAVGYQPTLAEEMGALQERITSTKTGSITSIQAVYVPADDLTDPSPATTFAHLDATVVLSRQISELGIYPAVDPLDSTSRQLDPFVVGDDHYDVAQGVQKILQRYNELKDIIAILGMDELSEEDKGLVARARKAQRFLSQPFFVAEIFTGTPGKYVSLEDTIKAFKGILNGDYDHLPEQAFYMVGTIEEAVEKAKTL

SEQ ID NO: 174666 - protein, 326 aa, Unknown
  Bacterial polypetide isolated from the Sargasso Sea
MSGLNPSEISSVLKDKISGLDLKAETKNEGTIVNVSDGIIRIHGMGDVMYGELVEFENGVFGLALNLEQDSVGVVVLGDYLGLSEGQKVTCTGKILEVPVGEEMLGRVVDALGNPIDGKGELKTKQTAPIEVVAPGVIARQSVDQPVQIGLKSIDAMVPIGRGQRELIIGDRQTGKTAVAIDAIINQKGTGIKCIYVAIGQKQSTIANVVAKLEEYGAMEHTIVVSAAAADPAAMQYLSAYSGCAMGEYFRDTGQDALIVYDDLSKQAVAYREISLLLRRPPGREAFPGDVFYLHSRLLERAARVNAEYVEKITEGKVKGKTGSLT

SEQ ID NO: 174667 - protein, 228 aa, Unknown
  Bacterial polypetide isolated from the Sargasso Sea
MSTGKIVQVMGPVVDVEFETENLPQIFSALEIKLDGDSKLICEVQQHLGESTVRTVSMGSTDGLYRGMDVKDLGETISTPVGKGVLGRIINVTGDPVDEAGPIKTNERWSIHREAPTFADQETDAQMLVTGVKVMDLLCPFLKGGKIGLFGGAGVGKTVVIMELIRNIAAEHGGFSVFAGVGERTREGNDLWNEMKESGVLDKTSLVYGQMNEPPGARARVALTGLTV

SEQ ID NO: 174668 - protein, 261 aa, Unknown
  Bacterial polypetide isolated from the Sargasso Sea
FCCKLRRAEDHIKEATPYAQKLKSIVSSLSSRFEDEEQDTSLGSLFRNSSGKRTGVILVTSDRGLCGGFNSNLSKALLQQLIDEGVECAEFAIFGRKGNDFFKRTPHKILVNYAGSSPDQHLNLVKEVVSDFTRRFENGELDQVLLAYNHFVSVISQIPMIEPLLPIKPIEKEIVDKREILFEPSPEEILQTLLKKYVQNQVYVSWLDTIAGEHAARMTSMDAATKNAGEIIDKLQLHYNRTRQAAITGELIEIISGAESL

SEQ ID NO: 174669 - protein, 509 aa, Unknown
  Bacterial polypetide isolated from the Sargasso Sea
MEIQPAEISAILKKKIKDFGKDAEVSEIGQVLSVGDGIARVYGLDNIEAGEMVEFPGEIKGMALNLEEDNVGVVIFGDDTDIKEGDTVKRTGAIVEVPIGKELLGRVVDALGNPIDGKGPINSSESKRVDIKAPGIIPRKSVNEPMQTGLKAIDSLIPIGRGQRELIIGDRQTGKTAIAVDAILNQKEVNKSDDESQKLYCIYVAIGQKRSSVAQLVKTLEENGAMEYSIVVAATASEPAPLQYLAPFTGCTMGEYFRDNSMHALVVYDDLSKQAVAYRQMSLLLRRPPGREAYPGDVFYLHSRLLERAAKLNDDNGGGSLTALPIIETQANDLSAYIPTNVISITDGQIFLETDLFFQGIRPAVNVGLSVSRVGSSAQIKAMKQVAGSIKGELAQYREMAAFAQFGSDLDASTQKLLARGERLTELLKQKQFSPISTNEQVVLLFAGVNGYMDDIAVNQIGDFEEGLLSHIRENYAQILETINATKSLDDETEATLKNAVEEFAASFK

SEQ ID NO: 174670 - protein, 213 aa, Unknown
  Bacterial polypetide isolated from the Sargasso Sea
MDSKSNGKITQVTGAVVDVQFDGDLPEILNALETDNNGQKLILEVASHLGENIVRTIAMDSTEGLVRGQEVNDTGNPIKVPVGEATLGRIMNVVGEPIDDGGSVDSKESRPIHTSAPPYVEQSTETEILVTGIKVVDLLAPYSKGGKIGLFGGAGVGKTVLIQELINNVAQAHGGYSVFAGVGERTREGNDLYHEMIEAGVNKEGGGNGSKMC

SEQ ID NO: 174671 - protein, 513 aa, Unknown
  Bacterial polypetide isolated from the Sargasso Sea
MDINPSEITKILKEQIKNLGDKAEVSEIGKVLSVGDGIARVYGLDNVQAGEMVVFQDNSKGMALNLENDNVGIVIFGDDKSIKEGDTVKRTGAIVDVPVGKELLGRVVDALGNPIDGKENLDKNIKRKRVEVKAPGIIPRKSVGEPMQTGLKAIDSLIPVGRGQRELIIGDRQTGKTAVAVDTIINQKKINESDDEKKKLYCIYVAIGQKRSTVAQIVKTLQDAGAMDYTIVVSATASDPAPLQFLAPYTGCTFGEFFRDNGMHALIIYDDLSKQAVAYRQMSLLLRRPPGREAYPGDVFYLHSRLLERAAKLNDDNGGGSLTALPIIETQAGDVSAYIPTNVISITDGQIFLETELFNQGIRPAVNVGLSVSRVGSAAQTKAMKKVAGSIKLELAQYREMAAFAQFGSDLDASTQKLLNRGSKLTELLKQDQYSPMTVAEQVVTVYCGVKGYLDTIENNQIRSFEKGLLDLIKNEKPEILESIQNTGKIEENTEKLLTEVITNYKKTNFEKK

SEQ ID NO: 174672 - protein, 171 aa, Unknown
  Bacterial polypetide isolated from the Sargasso Sea
MPSLDDLRKRISSVKSTQKITKAMKMVAAAKLRKAQEMAEKGRPYSDKMDLIIQNLSKAINDPSNAPKLLVGTGEDKTHLCVVMTADRGLCGGFNTNICKLAKKYFDEAIKSSKNLKIITVGTKGLDQLKRDYSQYIIKRINLKDKKKLSFLDAEEIGKQIVELLKIRIDK

SEQ ID NO: 174673 - protein, 373 aa, Unknown
  Bacterial polypetide isolated from the Sargasso Sea
EVLYTGIKVIDFIEPYNKGGKIGLFGGAGVGKTVLIQELINNIAKAYSGLSVFAGVGERTREGNDLLREMIEAGIVDYGEEFKKSMEEGGWDLSKVDKKKLKKSKAAFVFGQMNEPPGARARVALSGLTLAEYYRDGDGKGKGRDILFFIDNIFRFTQAGSEVSALLGRMPSAVGYQPTLATEMGAMQERITSTKKGSITSVQAVYVPADDLTDPAPATTFSHLDAQSVLSRKLAAIGIYPSIDPLDSTSRILTEEVVGEEHYTCAQRVKELLQRYKELQDIIAILGMDELSDEDKEVVHRARRVQRFLSQPFHVAEPFTGIKGELVDIKDTIKGFNMIMNGDLDHLPEAAFNLKGTIEQAIEAGEKMIAKVK

SEQ ID NO: 174674 - protein, 471 aa, Unknown
  Bacterial polypetide isolated from the Sargasso Sea
MRKGKITQIIGAVVDVKFDGELPEILTALECDNAGNRLVLEVAQHLGESSVRTIAMDATEGLKRGDEVTDTGSPIQVPVGPETLGRIINVIGEPIDEKGDVKTKENWPIHRSAPEFNDQSTETEILVTGIKVIDLLAPYAKGGKIGLFGGAGVGKTVLIMELINNVAKAHGGFSVFAGVGERTREGNDLYHEMIDSGVIKPEGDGSKAALVYGQMNEPPGARARVALTGLTVAEYFRDQEGQDVLFFVDNIFRFTQAGSEVSALLGRIPSAVGYQPTLATDMGNLQERITTTNKGSITSVQAIYVPADDLTDPAPATSFAHLDATTVLSRQIAEIGIYPAVDPLDSTSRILDPRIVGDEHYRVAREVQRILQTYKSLQDIIAILGMDELSEEDKLVVARARKIQRFLSQPFFVAEVFTGSPGKLVDLDATIKGFDAICKGEYDHLPEAAFYMVGTIEEAIEKAKKMEKDAA

SEQ ID NO: 174675 - protein, 308 aa, Unknown
  Bacterial polypetide isolated from the Sargasso Sea
CVYVAVGQKRSTVRQIEKTLEEAGAMEYTTIVAATASDAAPLQFLAPYTGCAMGEFFRDNGMHALIIYDDLSKQAVAYRQMSLLLRRPPGREAYPGDVFYLHSRLLERAAKLSDEHGGGSLTALPIIETQGGDVSAFIPTNVISITDGQIFLETELFNQGIRPAINVGLSVSRVGSSAQTKAMKKVSGSMKLELAQYREMAAFAQFGSDLDASTQKLLNRGSKLTELLKQKQYSPMTVAQQVISVFCGVKGYLDDIELKDIAEFENKILEKCKSEKPEIIDSLGSGKLDEDTEKLLIELITNLKKNLN

SEQ ID NO: 174676 - protein, 291 aa, Unknown
  Bacterial polypetide isolated from the Sargasso Sea
MASLDDLKKRIVSVKSTQKITKAMKMVAAAKLKRAQDNAEKGRPYSEKMNNIILNLSNGISDKENAPKLLSGTGDEKTHLCVILTSDRGLCGGFNTNIVKKAKSYFDKIEKDGKILKIVTVGSKGNDQLKRIYGEKIIEKISFKDSKNINFFDADKVGKMIIEMFEKKEFDVCTIFYNKFKNVITQIPQAQQIIPLKTSESEGNSSEDNYEFEPEEDEILSNLLPKNISTQIFKAMLENSASEQGSRMSAMDNATRNAGEMVDKLTIEYNRSRQAAITKELIEIISGAESL

SEQ ID NO: 174677 - protein, 221 aa, Unknown
  Bacterial polypetide isolated from the Sargasso Sea
MHSRLLERAARVNSEYVEKLTNGEVKGKTGSLTALPIIETQAGDVSAFVPTNVISITDGQIFLETDLFNSGVRPAINPGISVSRVGGAAQTKIIKKLGGGVRLALAQFRELASFAQFASDLDDATKEQLAHGQRITELLKQKQYAPLSVAQQAITLFAADRGYLKEVDVEKLGAFENALHSFFTADYSDLESRINETGDWDDDIEKQFVKVLESFLKTQTY

SEQ ID NO: 174678 - protein, 176 aa, Unknown
  Bacterial polypetide isolated from the Sargasso Sea
MSIQASEISSILKDQIKNFGQEAEVAEVGRVLSVGDGIARVYGLDNVQAGEMVEFPGGIQGMALNLEADNVGVVIFGSDRDIKEGDVVKRTNSIVDVPVGPSLLGRVVDGLGNPLDGKGPIKSKDRSVADVKAPGIIPRKSVHEPMATGLKSVDAMIPIGRGQRELIIGDRQTGKT

SEQ ID NO: 174679 - protein, 473 aa, Unknown
  Bacterial polypetide isolated from the Sargasso Sea
MSKNGKIIQVIGAVVDVQFDGDLPEILTALEVDNSGNKLVLEVAQHLGENSVRTIAMDSTEGLKRGDVVQNTGAPISVPVGPETLGRIINVIGQPIDQKGEVKTKEKWPIHREAPKFTDQSTETEILETGIKVIDLLAPYSKGGKIGLFGGAGVGKTVIIMELINNIAKAHGGFSVFAGVGERTREGNDLYHEMIESGVIKPEGKGSKAALVYGQMNEPPGARARVGLTGLTVAEYFRDKEGQDVLFFVDNIFRFTQAGSEVSALLGRIPSAVGYQPTLATDMGNLQERITTTGKGSITSVQAIYVPADDLTDPAPATSFSHLDATTVLSRQIAELGIYPAVDPLDSTSRILDPRIVGEEHYRVAREVQKILQTYKSLQDIIAILGMDELSEEDKLTVARARKIQRFLSQPFFVAEVFTGTPGKLVNLDSTIKSFDAICKGEYDHLPEAAFYMVGSIEEAIEKAEKMAKEAAA

SEQ ID NO: 174680 - protein, 345 aa, Unknown
  Bacterial polypetide isolated from the Sargasso Sea
MGDRQTGKTAVAIDTIINQKKINESDDEKKKLYCIYVAIGQKRSTVAQIVKTLQDAGAMDYTIVVSATASDPAPLQFLAPYTGCTFGEFFRDNGMHALIIYDDLSKQAVAYRQMSLLLRRPPGREAYPGDVFYLHSRLLERSAKLNDDNGGGSLTALPIIETQAGDVSAYIPTNVISITDGQIFLETELFNQGIRPAVNVGLSVSRVGSAAQTKAMKKVAGSIKLELAQYREMAAFAQFGSDLDASTQKLLNRGSKLTELLKQDQYSPMTVAEQVVSVYSGVKGYLDTIENNQIRSFEKGLLDLIKNEKPEILESIQKSGKIEEDTEKLLIEVITNYKKSNFEKK

SEQ ID NO: 174681 - protein, 292 aa, Unknown
  Bacterial polypetide isolated from the Sargasso Sea
MPSLDDLRKRIASVKSTQKITKAMKMVAAAKLRKAQEMAEKGRPYSDKMDLIIQNLSKAINDPSNAPKLLVGTGEDKIHLCVVMTADRGLCGGFNTNICKLAKKYFDEAIKSSKNLKIITVGTKGLDQLKREYGKYIIKKINLKDKKKLTFLDAEEIGKQIVDLFKNKEFDKCFIFYNKFKNVISQIPQQQQVIPAKIEEKDKKQEEMSSYEFEPEEDEILDDLLPKNISTQIFKAFLENSASEQGSRMTAMDNATRNAGDLVDKLTINYNRSRQASITKELIEIISGAESL

SEQ ID NO: 174682 - protein, 511 aa, Unknown
  Bacterial polypetide isolated from the Sargasso Sea
MEIKAAEISSVIKDQIANFETKADVAEVGTVLSVGDGIARVYGLDQVQAGEMVEFPGGIKGMALNLEMDNVGVSIFGDDTGIKEGDTVKRTGEIVDVPVGKELLGRVVDGLGNPIDGKGPIQSSEKRRIELKAPGIIPRQSVSEPMQTGIKALDALVPVGRGQRELIIGDRQTGKTAVAIDTILNQKSVNQSDNEKEKLYCIYVAIGQKRSTVAQIVKTLEDNGAMEYTIVVSATASEPAPLQFLSAYTGCTMGEYFRDNGMHALIVYDDLSKQAVAYRQMSLLLRRPPGREAYPGDVFYIHSRLLERAAKMSDEHGGGSLTALPIIETQAGDLSAYIPTNVISITDGQIFLETNLFFAGIRPAINVGLSVSRVGSAAQTKAMKKIAGPVKLELAQYREMAAFAQFASDLDASTKQLLDRGARLVEILKQGQYSPLTVSEQVVSIYAGVRGYLDKVAVGDVVKFEAEVLNEIRTKHSDLLDAIANEKELSKENDDKLKSILDDLVGKFASN

SEQ ID NO: 174683 - protein, 161 aa, Unknown
  Bacterial polypetide isolated from the Sargasso Sea
DPAPATSFSHLDATTVLSRQIAELGIYPAVDPLDSTSRILDPRVVGDEHYRVAREVQRILQAYKSLQDIIAILGMDELSEEDKLTVARARKIQRFLSQPFFVAEVFTGSPGKLVDLESTIKGFDAICKGEHDNLPEAAFYMVGSIEEVIEKAEKLEKGNKS

SEQ ID NO: 174684 - protein, 247 aa, Unknown
  Bacterial polypetide isolated from the Sargasso Sea
MRKGKITQVIGAVVDVKFEGELPEILTALECNNAGNRLVLEVAQHLGESSVRTIAMDATEGLKRGDDVSDTGAPIKVPVGPETLGRIINVIGEPIDEKGKVQNKENWPIHRSAPEFNDQSTETEILVTGIKVIDLLAPYAKGGKIGLFGGAGVGKTVLIMELINNVAKAHGGFSVFAGVGERTREGNDLYHEMIDSGVIKTDGPGSKAALVYGQMNEPPGARARVALTGLTVAEYFRDQEGQDVLFF

SEQ ID NO: 174685 - protein, 291 aa, Unknown
  Bacterial polypetide isolated from the Sargasso Sea
MASLDDLKKRISSVKSTQKITKAMKMVAAAKLRKAQESAEKGRPYSDKMNNIILNLSGSITDKENASKLLIGTGEEKVYLCVVLTSDRGLCGGFNSNIIKKAKTYFNKIQAENKKLKIITVGSKGYDQLKRLYRENIIEKISFKESKNANYFDAEKVGKIIIDRFEKKEFDVCTIFYNKFKNVITQIPQEQQIIPLKSQNENKDETIVSYEFEPEEDEILSNLLPKNISTQIFKAMLENSASEQGSRMSAMDNATRNAGEMVDKLTIEYNRSRQAAITKELIEIISGAESL

SEQ ID NO: 174686 - protein, 77 aa, Unknown
  Bacterial polypetide isolated from the Sargasso Sea
SEEDKLAVARARKVERFLSQPFTVAEVFTGSPGKYVKLEDTIKSFKGILAGDYDDLPEQAFYMVGTIEEAVEKAKTL

SEQ ID NO: 174687 - protein, 511 aa, Unknown
  Bacterial polypetide isolated from the Sargasso Sea
MEINPSEVTKILKQQINKFGDKAEISEVGQVLSVGDGIARIYGLDNVQAGEMVEFSDGSKGMALNLESDNVGVVIFGEDRSIKEGDTVKRTGAIVDTPVGKELLGRVVDGLGNPIDGKGNLDKSVKRSRVEVKAPGIIPRKSVSEPMQTGLKSIDSLVPIGRGQRELIIGDRQTGKTAVAIDAIINQKKINDSDDEKQKLYCVYVAIGQKRSTVRQIEKTLEEAGAMEYTTIVAATASDAAPLQFLAPYTGCAMGEYFRDNGMHALIIYDDLSKQAVAYRQMSLLLRRPPGREAYPGDVFYLHSRLLERAAKLSDEHGGGSLTALPIIETQGGDVSAFIPTNVISITDGQIFLETELFNQGIRPAINVGLSVSRVGSSAQTKAMKKVSGSMKLELAQYREMAAFAQFGSDLDASTQKLLNRGSKLTELLKQKQYSPMTVAEQVISVFCGVKGHLDDVDQKNIAEFENKIIEKCRSEKPEILDSIASSGKLEEDSEKSLTEVITELKKNFNS

SEQ ID NO: 174688 - protein, 417 aa, Unknown
  Bacterial polypetide isolated from the Sargasso Sea
MEINPSEVTKILKEQIKKFGDKAEVTEVGQVLSVGDGIARIYGLDNVQAGEMVEFSDGSKGMALNLESENVGVVIFGDDRAVKEGDTVKRTGAIVDTPVGKELLGRVVDGLGNPIDGKGALDKSLKRSRVEVKAPGIIPRKSVSEPMQTGLKSIDSLVPIGRGQRELIIGDRQTGKTAVAIDAIINQKKINESGDEKKKLYCIYVAVGQKRSTVRQIEKTLEEAGAMEYTTIVAATASDAAPLQFLAPYTGCTMGEYFRDNGMHALIIYDDLSKQAVAYRQMSLLLRRPPGREAYPGDVFYLHSRLLERAAKLSDEHGGGSLTALPIIETQGGDVSAFIPTNVISITDGQIFLETELFNQGIRPAINVGLSVSRVGSSAQTKAMKKVSGSMKLELAQYREMAAFAQFGSDLDASTQK

SEQ ID NO: 174689 - protein, 486 aa, Unknown
  Bacterial polypetide isolated from the Sargasso Sea
MVSTPSTSSQTKGVVRQVIGPVLDVEFPAGKLPKILNALRIEAKNPAGQDIALTAEVQQLLGDHRVRAVAMSGTDGLVRGMEAIDTGAPISVPVGEATLGRIFNVLGEPVDEQGPVNTKDTAPIHRSAPKLTDLETKPKVFETGIKVIDLLAPYRQGGKVGLFGGAGVGKTVLIQELINNIAKEHGGVSVFGGVGERTREGNDLYEEFKESGVINADDLTQSKVALCFGQMNEPPGARMRVGLSALTMAEHFRDVNKQDVLLFVDNIFRFVQAGSEVSALLGRMPSAVGYQPTLGTDVGELQERITSTLEGSITSIQAVYVPADDLTDPAPATTFAHLDATTVLARALAAKGIYPAVDPLDSTSTMLQPSVVGDEHYKTARAVQSTLQRYKELQDIIAILGLDELSEEDRLTVDRARKIEKFLSQPFFVAEIFTGMSGKYVKLEDTIAGFNMILSGELDDLPEQAFYLVGNIDEVKAKAEKIKSEK

SEQ ID NO: 174690 - protein, 402 aa, Unknown
  Bacterial polypetide isolated from the Sargasso Sea
MKKGKITQVIGAVVDVKFDGELPEILTALECNNAGNRLVLEVAQHLGESSVRTIAMDATEGLKRGDEVTDTGSPIKVPVGPETLGRIVNVIGEPIDEKGEVKTKESWPIHRAAPEFNDQSTETEILVTGIKVVDLLAPYAKGGKIGLFGGAGVGKTVIIMELINNIAKAHGGFSVFAGVGERTREGNDLYHEMIESGVIKPEGPGSKAALVYGQMNEPPGARSRVALTGLTVAEYFRDQEGQDVLFFVDNIFRFTQAGSEVSALLGRIPSAVGYQPTLATDMGNLQERITTTNKGSITSVQAIYVPADDLTDPAPATSFAHLDATTVLSRQIAELGIYPAVDPLDSTSRILDPRIVGDEHYRVAREVQKILQTYKSLQDIIAILGMDELSEEDKLIVARARK

SEQ ID NO: 174691 - protein, 219 aa, Unknown
  Bacterial polypetide isolated from the Sargasso Sea
TGEEKTHLCVVMTSDRGLCGGFNTNIIKKAKQYFQKILKENKILKIITVGSKGYDQLKRQYKENIIEKISFKDSKNINYFDADKVGKIIIDRFEKKEFDVCAIFYNQFKNVITQIPQEQQIIPLKSNEEKETSSNDSYEFEPEEDEILSNLLPKNISTQIFKAMLENSASEQGSRMSAMDNATRNAGEMVDKLTIQYNRSRQAAITKELIEIISGAESL

SEQ ID NO: 174692 - protein, 513 aa, Unknown
  Bacterial polypetide isolated from the Sargasso Sea
MQINPSEVTKILKEQIKKFGEKAEISEVGQVLSVGDGIARVYGLDNVQAGEMVEFSGGIKGMALNLENDNVGVVIFGDDRSIKEGDVVKRTGAIVDAPVGKNLLGRVVDALGNPIDGKGDLNKKIERKRVDVKAPGIIPRQSVNQPMQTGLKAIDSLIPVGRGQRELIIGDRQTGKTAVAIDTIINQKEINKSGKEKDKLYCIYVAIGQKRSTVAQIVKSLEEAGAMEYTTIVSATASDPAPLQFLAPYTGCTMGEYFRDNGMHALIIYDDLSKQAVAYRQMSLLLRRPPGREAYPGDVFYLHSRLLERAAKLNDDNGGGSLTALPIIETQAGDVSAYIPTNVISITDGQIFLGTELFNQGIRPAVNVGLSVSRVGSAAQTKAMKKVAGSIKLELAQYREMAAFAQFGSDLDASTQKLLNRGSKLTELLKQDQYSPMTVAEQVVTIYAGVKGYLDSIEISQIRSFEKGLLELVKNEKPELLDSIQKSGKIDENIDKTLSEIITNFKKNNFEKK

SEQ ID NO: 174693 - protein, 349 aa, Unknown
  Bacterial polypetide isolated from the Sargasso Sea
IGRGQRELIIGDRQTGKTAIAIDTILNQKSINESNDESKKLYCVYVAVGQKRSTVAQLVKVLQDRNALDYSIIVAATASDPAPLQFLAPYSGCAMAEYFRDNGMHALIIYDDLSKQSVAYRQMSLLLRRPPGREAFPGDVFYLHSRLLERSAKMSDEVGGGSMTALPVVETQGGDVSAYIPTNVISITDGQIFLETELFFKGIRPAINVGLSVSRVGSAAQLKAMKQVSGSLKLELAQYREVAAFAQFGSDLDAATQYLLNRGSRLTEVLKQGQFVPMSVEQQVVVIFAATKGYLDSLEVSQIASYEEGLLKTVDSSLLQTIKSEGSLSDQTMSKLAELCDKFTKQFKA

SEQ ID NO: 174694 - protein, 276 aa, Unknown
  Bacterial polypetide isolated from the Sargasso Sea
EYYRDMGYDVVLVADSTSRWAEALREMSGRLEEMPAEEGYPSYLASRLAEFYERAGRVRASGSPERDGSVSLVGAVSPSGGDFTEPVTTHTMRFIKTFWALDAKLAYSRHYPSINWMNSYSGYLADIAKWWSENISDDWLKLRGETYGILQREDTLKEIVRLLGPEALPDEEKLILEVARMIKIGILQQNSFDDVDTYCSPEKQFKLMKLLVDFYNQGQQALKDGAALADIRAMPVIASLLKARMEVKDDEMDKLEKVQNEMAEQFKNVTGVKVSN

SEQ ID NO: 174695 - protein, 279 aa, Unknown
  Bacterial polypetide isolated from the Sargasso Sea
MSQLNPSEISSVLKEKIAGLDLSAERKNEGVIVSVSDGIVRIHGMGEVMYGELIEFENGVFGLALNLEQDSVGAVVLGDYLDLIEGQKATCTGKILEVPVGNELLGRVVDALGNPIDGGGEINAPLTAPVEVVAPGVIARQSVDQPVQTGLKAIDAMVPIGRGQRELIIGDRQTGKTAVAIDTIINQKGTGIKCIYVAIGQKQSTIANVVRKLEEYDALAHTIIVSASASDPAAMQYLSAYSGCAMGEFFRDRGEDALIVYDDLSKQAVAYRQISLLLK

SEQ ID NO: 174696 - protein, 331 aa, Unknown
  Bacterial polypetide isolated from the Sargasso Sea
MDIRAAEISTILKDQIENFGADAEVTEVGKVLSVGDGIARVYGLDQIQAGEMVEFPGGIAGMALNLERDNVGVVIFGSDKTIKEGDVVKRTGSIVDVPIGKGLLGRVVDGLGNPIDGKGALKNVKRSRVETKAPGIMPRESVSEPMQTGLKAIDSLIPVGRGQRELIIGDRQTGKTAIAIDTFLNQKSTNDKAGKDDTKKLFCIYVAVGQKRSTVAQIVKTLEERGALEYSIVVAATASDPAPMQFLAPYSAAAMGEFFRDNGMHAVVVYDDLSKQAVAYRQMSLLLRRPPGREAYPGDVFYLHSRLLERAAKLNGENGSGSLTALPIIET

SEQ ID NO: 174697 - protein, 465 aa, Unknown
  Bacterial polypetide isolated from the Sargasso Sea
MEINPSEVTQILKEQIKKFGDKAEVTEVGQVLSVGDGIARIYGLDNVQAGEMVEFSDGSKGMALNLESENVGVVIFGDDRAVKEGDTVKRTGAIVDTPVGKELLGRVVDGLGNPIDGKGALDKSLKRSRVEVKAPGIIPRKSVSEPMQTGLKSIDSLVPIGRGQRELIIGDRQTGKTAVAIDAIINQKKINESGDEKKKLYCIYVAVGQKRSTVRQIEKTLEEAGAMEYTTIVAATASDAAPLQFLAPYTGCTMGEYFRDNGMHALIIYDDLSKQAVAYRQMSLLLRRPPGREAYPGDVFYLHSRLLERAAKLSDEHGGGSLTALPIIETQGGDVSAFIPTNVISITDGQIFLETELFNQGIRPAINVGLSVSRVGSSAQTKAMKKVSGSMKLELAQYREMAAFAQFGSDLDASTQKLLNRGSKLTELLKQNQYSPMTVAEQVISVFCGVRGHLDDIEQKGYFKF

SEQ ID NO: 174698 - protein, 146 aa, Unknown
  Bacterial polypetide isolated from the Sargasso Sea
MASLDDLKKRISSVKSTQKITKAMKMVAAAKLRRAQESAEKGRPYSDKMNSIILNLSNGISDIENAPKLLSGNGEDKVHLCVVMTSDRGLCGGFNTNIIKKAKQYFQKVLDEGKTLKIITVGAKGYDQLKRLYGDNIIERISLRTL

SEQ ID NO: 174699 - protein, 277 aa, Unknown
  Bacterial polypetide isolated from the Sargasso Sea
ESGIIDLKGKDSKVALVYGQMNEPPGARARVALSGLTQAEYFRDEEGQDVLFFVDNIFRFTQAGSEVSALLGRIPSAVGYQPTLATDMGALQERITTTKKGSITSVQAIYVPADDLTDPAPATSFSHLDATTVLNRAISEKGIYPAVDPLDSTSRILDPQVVGDDHYRVAREVQRVLQTYKSLQDIIAILGMDELSEEDKLTVARARKIEKFLSQPFFVAEVFTGSAGKYVDLEDTIKSFDGLVKGEYDHMPEAAFYMVGGIDEAIEKAKKLEAEAA

SEQ ID NO: 174700 - protein, 170 aa, Unknown
  Bacterial polypetide isolated from the Sargasso Sea
MEINPSEVTKILKEQIKNFGEKAEISEVGQVLSVGDGIARIYGLDNVQAGEMVEFSDGSKGMALNLESENVGVVIFGDDRNIKEGDVVKRTGSIVDTPVGKELLGRVVDGLGNPIDGKGALDKGVKKSRVEVKAPGIIPRQSVSEPMQTGLKSIDSLVPIGRGQRELIIG

SEQ ID NO: 174701 - protein, 183 aa, Unknown
  Bacterial polypetide isolated from the Sargasso Sea
MTALKTEQNIGRITQIIGPVIDAVFPPNKMPNIYNSVVIEGKNEVGEPIKCVAEVQQLLGDNVVRAVSMSATDGLMRGMTVVDTGSALAVPVGKNTLGRIFNVLGEPVDELGNVETPEGTLPIHRPAPAFVDLDTNLSIFETGIKVVDLLAPYRRGGKIGLFGGAGVGKTVLIMELIVRPILA

SEQ ID NO: 174702 - protein, 474 aa, Unknown
  Bacterial polypetide isolated from the Sargasso Sea
MANNLTGKISQVLGAVVDVEFDGELPAIMNALEVDNNGTRLMLEVAQHLGENAVRTIAMDTTDGLVRGQTATDTGSPISMPVGPETLGRIMNVVGEPVDERGEIGTTKTYPIHRPAPEFVDQSTETEVLVTGIKVVDLLAPYARGGKIGLFGGAGVGKTVLIMELINNIAKAHGGYSVFAGVGERTREGNDLYHEMIESGIIDLKGKDSKVALVYGQMNEPPGARARVALSGLTQAEYFRDEEGQDVLFFVDNIFRFTQAGSEVSALLGRIPSAVGYQPTLATDMGALQERITTTKKGSITSVQAIYVPADDLTDPAPATSFSHLDATTVLNRAISEKGIYPAVDPLDSTSRILDPQVVGNDHYRVAREVQRVLQTYKSLQDIIAILGMDELSEEDKLTVARARKIEKFLSQPFFVAEIFTGSPGKYVDLEDTIKSFDGLVKGEYDHMPEAAFYMVGGMDEAIEKAKKLEAEAA

SEQ ID NO: 174703 - protein, 195 aa, Unknown
  Bacterial polypetide isolated from the Sargasso Sea
MSQLNPSEISSVLKEKIAGLDLSAERKNEGIVVSVSDGIVRIHGMGDVMYGEVIEFENGTKGMALNLEQDSVGAVVLGDYLEIIEGQKAVCTGKVLEVPVGEGLLGRVVNTLGTPIDGKGEIKAESSSPVEVVAPGVIARQSVDQPVQIGLKAVDAMVPIGRGQRELIIGDRQTGKTAVAIDAIINQKGTGIKCI

SEQ ID NO: 174704 - protein, 190 aa, Unknown
  Bacterial polypetide isolated from the Sargasso Sea
MGAMQERITSTKNGSITSVQAVYVPADDLTDPAPATTFAHLDATTVLSRKIAELGIYPAVDPLDSTSRILTPEILGDDHYNCAQRVKELLQRYKELQDIIAILGMEELSEEDKLAVARARRVQRFLSQPFHVAEQFTGIPGALVDIKDTIKGFNMIMDGELDHIPEAAFNLKGTIEEAIEAGEKMLAETK

SEQ ID NO: 174705 - protein, 393 aa, Unknown
  Bacterial polypetide isolated from the Sargasso Sea
MSQLNPSEISSVLKEKISGLDLSAERKNEGIIVSVSDGIVRIHGMGDVMYGELIEFENGVLGLALNLEQDSVGAVVLGDYLGLIEGQKAVCTGKILEVPVGEELLGRVVDALGNPIDGKGEIKTESTAPVEVVAPGVIARQSVDQPVQIGLKAVDAMVPIGRGQRELIIGDRQTGKTAVAVDAIINQKGTGIKCIYVAIGQKQSTVVNVVKKLEEHGALEHTIIVSASASDPAPMQYLSAYSGCSMGEYFRDKGEDALIVYDDLSKQAVAYRQVSLLLKRPPGREAYPGDVFYLHSRLLERAARVNADYVEKVTNGKVKGKTGSLTALPIIETQAGDVSAFVPTNVISITDGQIFLETDLFNSGIRPAINPGISVSRVGGAAQTKIMKKLSGG

SEQ ID NO: 174706 - protein, 290 aa, Unknown
  Bacterial polypetide isolated from the Sargasso Sea
MASLDDLKKRIASVKSTQKITKAMKMVAAAKLRKAQESAEKGRPYSEKMNNVILNLSSGISDKENAPKLLAGTGQDKVHLCVVMTSDRGLCGGFNSNITKKAKSYFSKILDENKELKIITVGSKGNDQLKRTYGDKIIENISFKESKNANYFDADKVGKIIIEKFEAGEFDVCTIFYNKFKNVITQIPQAQQIIPLNDEGNENSSDESYEFEPDEDEILSNLLPKNISTQIFKAMLENSASEQGSRMSAMDNATRNAGEMVDKLTIEYNRSRQAAITKELIEIISGAESL

SEQ ID NO: 174707 - protein, 409 aa, Unknown
  Bacterial polypetide isolated from the Sargasso Sea
LLGRVVDGLGNPIDGKGPIQSSEKRRIELKAPGIIPRQSVSEPMQTGIKALDALVPVGRGQRELIIGDRQTGKTAVAIDTILNQKSVNQSGNEKEKLYCIYVAIGQKRSTVAQIVKTLEDNGAMEYTIVVSATASEPAPLQFLSAYTGCTMGEYFRDNGMHALIVYDDLSKQAVAYRQMSLLLRRPPGREAYPGDVFYIHSRLLERAAKMSDEHGGGSLTALPIIETQAGDLSAYIPTNVISITDGQIFLETNLFFAGIRPAINVGLSVSRVGSAAQTKAMKKIAGPVKLELAQYREMAAFAQFASDLDASTKQLLDRGARLVEILKQGQYSPLTVSEQVVSIYAGVRGYLDKVAVGDVVKFETEVLNEIRTKHSDLLDAITNEKELSKENDDKLKSILDDLVGKFASN

SEQ ID NO: 174708 - protein, 458 aa, Unknown
  Bacterial polypetide isolated from the Sargasso Sea
MSTGNIVQVIGAVVDVEFPKEAIPSVYDALSLKDGDLVFEVQQQLGDGIVRTIAMGASEGLKRGLEVENTGAPISVPVGQETLGRVLDVLGNPIDEKGPVGAKSSRPIHAKAPSFDEQSTEADVLETGIKVIDLLCPFAKGGKVGLFGGAGVGKTVTVMELIRNIAAEHDGFSVFAGVGERTREGNDFYHEMMESNVLDKVALVYGQMNEPPGNRLRVALTGLTIAENFRDEGRDVLMFIDNIYRYTLAGTEVSALLGRMPSAVGYQPNLAEEMGVLQERITSTKTGSITSIQAVYVPADDLTDPSPATTFAHLDATVVLARSIAELGIYPAVDPLDSNSRQLDPGIVGQEHYDTARSVQQVLQRYKELQDIIAILGMDELSEEDKLTVQRARKIQRFLSQPFFVAEVFTGSPGQYVSLRDSIKAFQGIVAGEYDDLPEQAFYMVGTIEEAVEKAKSM

SEQ ID NO: 174709 - protein, 286 aa, Unknown
  Bacterial polypetide isolated from the Sargasso Sea
MANEKEIRTKIGSVKNTQKITKAMEMVAASKMRRTQETMKKALPYADKIRAVIGHIYKANPDYKHPFLEKREVKTAGYIVVSSDRGLCGGLNVNMFRGLIAKLKENNSNQIDSKLCLVGAKAVQFFRSVDVDVIAAASHLGEEPQVEDLVGAIKTMLDEYNEGKIDQLFIVHNDFVNTMTQKPEIKTLLPIDPEDSEQMQEHWDYIYEPDSKELLDYILMRYIESQVYRAVVENVACEMAAKMVAMKSATDNAGKLIDQLELDYNKARQAAITQEISEIVGGAAAV

SEQ ID NO: 174710 - protein, 391 aa, Unknown
  Bacterial polypetide isolated from the Sargasso Sea
MQKIKPAEISALLKQQLDSANIHSEFDEIGTVLEVGDGIARVYGLSNAEYGELVSFENGLQGMVLNLEEDHVGVVLFGSSREIQEGQTVKRTKQIASIKVGDGILGRVVDTLGNPIDGKGPIKGELFEMPIERKAPGVIYRQPVNEPLQTGIKSIDAMIPIGRGQRELVIGDRQTGKTTVCIDTILNQKEFYDAGVPVFCIYVAIGQKASTVAGITKTLEEKGALAYTVVVAANASDPAPMQVYAPFAGACIGEYFRDTGRPALIIYDDLSKQAVAYREVSLLLRRPPGREAYPGDVFYLHSRLLERSAKVVEDDKVAKDMNDLPETLKSKVKGGGSLTALPIIETQAGDVSAYIPTNVISITDGQIFLESDLFNSGGRPAINVGISVSRV

SEQ ID NO: 174711 - protein, 212 aa, Unknown
  Bacterial polypetide isolated from the Sargasso Sea
FYLHSRLLERAAKLSDDHGGGSLTALPIIETQGGDVSAFIPTNVISITDGQIFLETELFNQGIRPAINVGLSVSRVGSSAQTKAMKKVSGSMKLELAQYREMAAFAQFGSDLDASTQKLLNRGSKLTELLKQKQYSPMTVSEQVISIFCGVKGHLDDIEQKNIADFENKIIEKCKSEKPEILDSIKTSGKLEEDFEKSLTEAITELKKNFKS

SEQ ID NO: 174712 - protein, 158 aa, Unknown
  Bacterial polypetide isolated from the Sargasso Sea
MASLDDLKKRISSVKSTQKITKAMKMVAASKLRRAQENAEKGRPYSDKMNNIILNLSKSISDKENSPKLLIGSGEDKVHLCVVMTSDRGLCGGFNTNIIKKAKSYFQKILDEGKNLKIITVGSKGYDQLKRVYKNNIIEKISFKESKYTNYFDADKVE

SEQ ID NO: 174713 - protein, 315 aa, Unknown
  Bacterial polypetide isolated from the Sargasso Sea
MEINPSEVTKILKEQIKKFGDKAEVTEVGQVLSVGDGIARIYGLDNVQAGEMVEFSDGSKGMALNLESDNVGVVIFGDDRAVKEGDTVKRTGAIVDTPVGKELLGRVVDGLGNPIDGKGALDKSIKKSRVEVKAPGIIPRKSVNEPMQSGLKSVDSLVPIGRGQRELIIGDRQTGKTAVAIDTIINQKKINESNDEKQKLYCIYVAIGQKRSTVRQIEKSLEEAGAMEYTTIVAATASDAAPLQFLAPYTGCAMGEYFRDNGMHALIIYDDLSKQAVAYRQMSLLLRRPPGREAYPGDVFYLHSRLLERAAKLSD

SEQ ID NO: 174714 - protein, 291 aa, Unknown
  Bacterial polypetide isolated from the Sargasso Sea
MASLDDLKKRIMSVKSTQKITKAMKMVAAAKLKRAQESAEKGRPYSEKMNNIILNLSLGIADKESAPKLLSGSGKNQIHLCVVMTSDRGLCGGFNANIIKKAKNYFSDVTKEGKEIKIITVGSKGNDQLKRLYGDKIIENISFKESKNANFFDAEKVGKIIIEKFDKEEFDICTIFFNQFKNVITQIPQAQQIIPLNAVNENQENLNESYEFEPDEDEILNNLLPKNISTQIFKAMLENSASEQGARMSAMDNATRNAGEMVDKLTIEYNRSRQAAITKELIEIISGAESL

SEQ ID NO: 174715 - protein, 379 aa, Unknown
  Bacterial polypetide isolated from the Sargasso Sea
MSGLNPSEISSVLKDKISGLDLKAETKNEGTIVNVSDGIIRIHGMGDVMYGELVEFENGVFGLALNLEQDSVGVVVLGDYLGLSEGQKVTCTGKILEVPVGEEMLGRVVDALGNPIDGKGELKTKQTAPIEVVAPGVIARQSVDQPVQIGLKSIDAMVPIGRGQRELIIGDRQTGKTAVAIDAIINQKGTGIKCIYVAIGQKQSTIANVVAKLEEYGAMEHTIVVSAAAADPAAMQYLSAYSGCAMGEYFRDTGQDALIVYDDLSKQAVAYREISLLLRRPPGREAFPGDVFYLHSRLLERAARVNAEYVEKITEGKVKGKTGSLTALPIIETQAGDVSAFVPTNVISITDGQIFLETDLFNSGVRPAIDPGLSVSRVG

SEQ ID NO: 174716 - protein, 90 aa, Unknown
  Bacterial polypetide isolated from the Sargasso Sea
ILGMDELSEEDKLVVARARKIQRFLSQPFFVAEVFTGSPGKLVDLDSTIKGFDAICKGEYDHLPEAAFYMVGTIEEAIEKAKKMEQEAAA

SEQ ID NO: 174717 - protein, 252 aa, Unknown
  Bacterial polypetide isolated from the Sargasso Sea
VDSPLLSKREVKSIDLVCITADRGLCGGYNTNIIKKVEIRYAELLKQGFQPNLILVGKKAIGYFQNRKDRYLIKSTFKELEQVPTVKDSEGITNEILAEFLSENSDRVEIIYTKFITLVSCAPVVQTLLPLDPQGIAEENDEIFRLTTKDSKLLVEKSNMEKSDSEKLPSDIVFEQSPDQLLVSLLPLYLQNQVLRALQESAASELACRMTAMNNASDNAKELASTLNLTYNKARQAAITQEILEVVGGSAV

SEQ ID NO: 174718 - protein, 524 aa, Unknown
  Bacterial polypetide isolated from the Sargasso Sea
MQKFKPAEVSALLKKQLDSADIQSSFDEIGTVLEVGDGIARVYGLTNAQYGELVAFENGLQGMVLNLEEDHVGVVLFGPSKEIKEGDNVKRTNQIASIKVGEGILGRVVDTLGNPIDGKGPIEGELFDMPIERKAPGVIYRQPVNEPLQTGIKSIDAMIPIGRGQRELVIGDRQTGKTTVCIDTILNQKEFYDAGEPVFCIYVAIGQKASTVASIAKTLEDKGALAYTVIVAANASDPAPMQVFAPFSGACIGEYFRDTGRPALIIYDDLSKQAVAYREVSLLLRRPPGREAYPGDVFYLHSRLLERSAKVVNDDKVASGMNDLPDSLKSKVKGGGSLTALPIIETQAGDVSAYIPTNVISITDGQIFLESDLFNSGVRPAINVGISVSRVGGSAQIKSMKKVAGTLKLDQAQYRELEAFSKFGSDLDAATLNVIEKGRRNVEILKQNQNDPFQVEDQVAIIYAGSQNLLKDVPVEKVKAFEETFLQELRKNHKKLLSELKAGKISDKETDEIKKVAEKIAKSF

SEQ ID NO: 174719 - protein, 293 aa, Unknown
  Bacterial polypetide isolated from the Sargasso Sea
MPSLDDLRKRISSVKSTQKITKAMKMVAAAKLRKAQEMAEKGRPYSDKMDTIIQNLSKSINDPSNAPRLLVGTGDSKTHLCIVMTADRGLCGGFNTNICKLAKNRFKKILQSSKNLKIITVGSKGLDQLKRDYSKHIIKKINFKDKKQLSFEDADIIGKEIVELFKNNEFDTCTIFYNKFKNVMTQIPQAQQIIPTKRQEVSKQKNEEFSSYEFEPEEDEILDDLLPKNISTQIYKGFLENSASEQGSRMTAMDNATRNAGDLVEKLTINYNRSRQAAITKELIEIISGAESL

SEQ ID NO: 174720 - protein, 513 aa, Unknown
  Bacterial polypetide isolated from the Sargasso Sea
MQLNPSEISELIKSRIQGLEASADVRNQGTVISVTDGIVRIHGLSDVMQGEMLEFPGNTFGLALNLERDSVGAVILGEYEHISEGDIVKTTGRILEVPVGPELVGRVVDALGNPIDGKGPVNAKLTDAIEKIAPGVIWRKSVSQPVQTGIKSIDAMVPIGRGQRELIIGDRQCGKTAVALDAIINQKGKDLICIYVAIGQKASSIMNVVRKLEETGAMEYTIVVAASASDSAAMQYLAPYAGCTMGEYFRDRGQDALIIYDDLTKQAWAYRQISLLLRRPPGREAYPGDVFYLHSRLLERAARVSEEYVEKFTNGEVKGKSGSLTALPVIETQAGDVTAFVPTNVISITDGQIFLETDLFNAGIRPAINAGVSVSRVGGAAQTKVVKKLSGGIRTDLAQYRELAAFAQFASDLDEATRKQLERGRRVTELLKQPQYQPLQVWELAVSLYAANNGYLDDLDVKQVLSFEKGLRENLKTSHADLIKRIEDTKDLSKDDEGALRSAIESFKKSGAY

SEQ ID NO: 174721 - protein, 241 aa, Unknown
  Bacterial polypetide isolated from the Sargasso Sea
MFFNSLLTNFAALEVGQHLYWQIGNIRLHGQVFLTSWILLGALLVFISLGTKKMENDPKGLQNLLEFLWDYIRDLARTQIGEKVYRDWMPFIGTLFLFVFVSNWGGALIPWRLIKLPSGELGAPTADINTTIALALLVSLSYFYAGLSNKGWRYFEYYVHPTPIMLPFKILEDFTKPLSLSFRLFGNILADELVVGVLVFLVPLILPIPVMFLGLFTSAIQALIFATLAAYYIGEAVEEHH

SEQ ID NO: 174722 - protein, 84 aa, Unknown
  Bacterial polypetide isolated from the Sargasso Sea
MVSIRPDEISSILKQQITDYDQSVSVSNVGTVLQIGDGIARIYGLDQVMAGELLEFEDGTEGIALNLEDDNVGAVLMGEALGVK

SEQ ID NO: 174723 - protein, 511 aa, Unknown
  Bacterial polypetide isolated from the Sargasso Sea
MEINPSEVTKILKEQIKKYGDKAEISEVGQVLSVGDGIARIYGLDNVQAGEMVEFSDGSKGMALNLESDNVGVVIFGDDRAVKEGDTVKRTGAIVDTPVGKELLGRVVDGLGNPIDGKGNLDKGVKRSRVEVKAPGIIPRKSVSEPMQTGLKSIDSLVPIGRGQRELIIGDRQTGKTAVAIDAIINQKKINESDNEKEKLYCIYVAIGQKRSTVRQIEKTLEEAGAMEYTTIVAATASDAAPLQFLAPYTGCAMGEYFRDNGMHALIIYDDLSKQAVAYRQMSLLLRRPPGREAYPGDVFYLHSRLLERAAKLSDEHGGGSLTALPIIETQGGDVSAFIPTNVISITDGQIFLETELFNQGIRPAINVGLSVSRVGSSAQTKAMKKVSGSMKLELAQYREMAAFAQFGSDLDASTQKLLNRGSKLTELLKQKQYSPMTVAEQVISVYCGVKGYLDDIDQKDIAEFENKIIEKCKSQKPEILDSIKSSGKLEDDIEKLLNEVITELKQNFKA

SEQ ID NO: 174724 - protein, 70 aa, Unknown
  Bacterial polypetide isolated from the Sargasso Sea
RARKVQRFLSQPFFVAETFTGTSGEYVDIKETIRGFREILDGKHDELPEQAFYMVGTIEQVLEKASKMAS

SEQ ID NO: 174725 - protein, 253 aa, Unknown
  Bacterial polypetide isolated from the Sargasso Sea
MSTGKIVQVMGPVVDVEFETEDLPQIFSALEIKLDGDSKLICEVQQHLGESTVRTVSMGSTDGLYRGMDVKDLGETISTPVGKGVLGRIINVTGDPVDEAGPIKTDKRWSIHRDAPTFADQETDAQMLVTGVKVMDLLCPFLKGGKIGLFGGAGVGKTVVIMELIRNIAAEHGGFSVFAGVGERTREGNDLWNEMKESGVLDKTSLVYGQMNEPPGARARVALTGLTVAEYFRDEEAADVLMFIDNIFRFTQA

SEQ ID NO: 174726 - protein, 265 aa, Unknown
  Bacterial polypetide isolated from the Sargasso Sea
MKMVSAAKLRRAEDHIREATPYAQKLKSIVSSLSTRFEGEEQDKGFGSLFRNSSGKRTGVILVTSDRGLCGGFNSNLSKALLQQLIDEGVECAEFAIFGRKGNDFFKRTPHKILVNHSGTPPDQHLNLVNEVVGDFTQRFENGELDQVLLAYNHFVSVISQIPVIEPLLPIKPIETETVDKREILFEPSPEEILQTLLKKYVQNQVYVSWLDTIAGEHAARMTSMDAATKNAGEIIDKLQLHYNRTRQAAITGELIEIISGAESL

SEQ ID NO: 174727 - protein, 472 aa, Unknown
  Bacterial polypetide isolated from the Sargasso Sea
MSKGIITQVIGAVVDVKFEKELPEILTALECKNGDNRLVLEVAQHLGESTVRTIAMDATEGLKRGDEVTNTNAPIQVPVGPETLGRIINVIGEPIDEKGEVKTKESWPIHRPAPEFNDQSTETEILVTGIKVIDLLAPYAKGGKIGLFGGAGVGKTVLIMELINNVAKAHGGFSVFAGVGERTREGNDLYHEMMESGVIKPDGPGSKAALVYGQMNEPPGARARVALTGLTVAEYFRDQEGQDVLFFVDNIFRFTQAGSEVSALLGRIPSAVGYQPTLATDMGNLQERITTTNKGSITSVQAIYVPADDLTDPAPATSFAHLDATTVLSRQIAEIGIYPAVDPLDSTSRILDPRIVGDEHYRVAREVQKILQTYKSLQDIIAILGMDELSEEDKLVVARARKIQRFLSQPFFVAEVFTGSPGKLVDLDSTIKGFAAICKGDYDHLPEAAFYMVGTIEEAIEKGEKMEKEAAA

SEQ ID NO: 174728 - protein, 436 aa, Unknown
  Bacterial polypetide isolated from the Sargasso Sea
MSQLNPSEISSVLKEKIAGLDLSAERKNEGIVVSVSDGIVRIHGMGDVMYGEVIEFENGTKGMALNLEQDSVGAVVLGDYLEIIEGQKAVCTGKVLEVPVGEAMLGRVVNTLGAPIDGKGEINAEHSSPVEVVAPGVIARQSVDQPVQIGLKAVDAMVPIGRGQRELIIGDRQTGKTAVAIDAIINQKGTGIKCIYVAIGQKQSTVANVVRKLEEHGAMEHTIVVSATAADPAPMQYLSAYAGCTMGEYFRDKGEDALIVYDDLSKQAVAYRQVSLLLKRPPGREAYPGDVFYLHSRLLERAARVNADYVEQVTGGKVKGKTGSLTALPIIETLAGDVSAFVPTNVISITDGQIYLETELFNSGVRPAINPGLSVSRVGGSAQTKIMKKLAGGVRTALAQYRELAAFSQFASDLDDATKQQLANGKAFTELLKQKQ

SEQ ID NO: 174729 - protein, 280 aa, Unknown
  Bacterial polypetide isolated from the Sargasso Sea
EMIESGVIKTDGKGSKAALVYGQMNEPPGARARVALTGLTVAEYFRDKEGQDVLFFVDNIFRFTQAGSEVSALLGRIPSAVGYQPTLATDMGNLQERITSTDKGSITSVQAIYVPADDLTDPAPATSFSHLDATTVLSRQIAEIGIYPAVDPLDSTSRILDPRIVGEEHYRVARDVQRILQAYKSLQDIIAILGMDELSEEDKLTVARARKIQRFLSQPFFVAEVFTGSPGKLVDLDSTIKGFDAICKGEYDHLPEAAFYMVGGIEEVQEKADKLTKDSK

SEQ ID NO: 174730 - protein, 472 aa, Unknown
  Bacterial polypetide isolated from the Sargasso Sea
MRKGKITQIIGAVVDVKFDGELPEILTALECDNGGNRLVLEVAQHLGESSVRTIAMDATEGLKRGDEVIDTGAPIKVPVGPETLGRIINVIGEPIDEKGIVKSKENWPIHRAAPEFNDQSTETEILVTGIKVVDLLAPYAKGGKIGLFGGAGVGKTVLIMELINNVAKAHGGFSVFAGVGERTREGNDLYHEMIESGVIKPDGTGSKAALVYGQMNEPPGARARVALSGLTVAEYFRDQEGQDVLFFVDNIFRFTQAGSEVSALLGRIPSAVGYQPTLATDMGNLQERITTTNKGSITSVQAIYVPADDLTDPAPATSFSHLDATTVLSRQIAEIGIYPAVDPLDSTSRILDPRIVGDEHYRVAREVQKILQTYKSLQDIIAILGMDELSEEDKLVVARARKIQRFLSQPFFVAEVFTGSPGKLVDLESTIKGFDAICKGDYDHLPEAAFYMVGTIEEAIEKAEKMAKEAAA

SEQ ID NO: 174731 - protein, 509 aa, Unknown
  Bacterial polypetide isolated from the Sargasso Sea
INPSEVTKILKEQIKKFGDKTEVSEVGQVLSVGDGIARIYGLDNVQAGEMVEFSDGSKGMALNLESDNVGVVIFGDDKAVKEGDNVKRTGAIVDTPVGKELLGRVVDGLGNPIDGKGALDKGAKRSRVEVKAPGIIPRKSVSEPMQTGLKSIDSLVPIGRGQRELIIGDRQTGKTAVAIDAIINQKKINESNDEKQKLYCVYVAIGQKRSTVRQIEKTLEEAGAMEYTTIVAATASDAAPLQFLAPYTGCAMGEYFRDNGMHALIIYDDLSKQAVAYRQMSLLLRRPPGREAYPGDVFYLHSRLLERAAKLGDEHGGGSLTALPIIETQGGDVSAFIPTNVISITDGQIFLETELFNQGIRPAINVGLSVSRVGSSAQTKAMKKVSGSMKLELAQYREMAAFAQFGSDLDASTQKLLNRGSKLTELLKQKQYSPMTVAEQVISVYCGVKGHLDDIEQKNIAEFEKKIIDKCKSEKPEILDSIKSSGKLEENIEKLLTEIITELKKNFKS

SEQ ID NO: 174732 - protein, 292 aa, Unknown
  Bacterial polypetide isolated from the Sargasso Sea
MASLDELKKRISSVKSTQKITKAMKMVAAAKLRRAQESAEKGRPYSDKMNNIILNLSNNVTDIENSPRLLAGTGESKVYLCVVMTSDRGLCGGFNTNIIKKAKSYFQKITSEGKTLKIITVGSKGYDQLKRVYKDNIIEKISFKESKNANYYDADKVGKIIINKFEKKEFDVCTIFYNQFKNVITQIPQEQQIIPLKSSKRVEENSAQDNYEFEPEEDEILNNLLPKNISTQIFKAMLENSASEQGSRMSAMDNATRNAGEMVDRLTIEYNRSRQAAITKELIEIISGAESL

SEQ ID NO: 174733 - protein, 430 aa, Unknown
  Bacterial polypetide isolated from the Sargasso Sea
TDGLTRGIDVGDSGSPISVPVGQETLGRLFDVLGNVIDGKGDLKTDKKNPIHRPAPKHEELATSTEILVTGIKVVDLMEPYTKGGKTGLFGGAGVGKTVLIQELIRNIATEHGGYSVFAGVGERTREGNDLYNEMTESGVIDKTTMVFGQMNEPPGARLRVALSGLAMAEFFRDDEGRDVLLFVDNIFRFTQAGSEVSALLGRMPSAVGYQPTLSTEMGELQERITSTKKGSITSVQAVYVPADDLTDPAPATAFAHLDATSVLERKIAELGIYPAVDPLASTSRILDPRIIGDRHYSVARNVQGVLQKYRDLQDIIAILGMDELSDEDKLTVSRARKIQKFFSQPFFVAEQFTGTPGRYVELEDTVSGFEAILNGEADEIPENAFSYVGSIDEAFDKSKDVKSDKSKDNPKQEEYSIEEDSVPAEESTE

SEQ ID NO: 174734 - protein, 238 aa, Unknown
  Bacterial polypetide isolated from the Sargasso Sea
MEINPSEVTKILKEQIKNFGEKAEISEVGQVLSVGDGIARIYGLDNVQAGEMVEFSDGSKGMALNLESENVGVVIFGDDRNIKEGDVVKRTGSIVDTPVGKELLGRVVDGLGNPIDGKGALDKGVKKSRVEVKAPGIIPRQSVSEPMQTGLKSIDSLVPIGRGQRELIIGDRQTGKTAVAIDAIINQKKINESGDEKQKLYCIYVAVGQKRSTVRQIQKTLEEAGAMEYTTIVAATAS

SEQ ID NO: 174735 - protein, 99 aa, Unknown
  Bacterial polypetide isolated from the Sargasso Sea
MASLDDLKKRIASVKSTQKITKAMKMVAAAKLKRAQESAEKGRPYSEKMNNVILNLSNGISDKENAPKLLSGTGKDKTHLCVVMTSDRGLCGGFNSNII

SEQ ID NO: 174736 - protein, 511 aa, Unknown
  Bacterial polypetide isolated from the Sargasso Sea
MEINPSEVTKILKEQIKNFGDKAEITEVGQVLSVGDGIARIYGLDNVQAGEMVEFSDGSKGMALNLESENVGVVIFGDDRNIKEGDIVKRTGDIVDTPVGKELLGRVVDGLGNPIDGKSALDKSVKKSRVEVKAPGIIPRQSVSEPMQTGLKSIDSLVPIGRGQRELIIGDRQTGKTAVAIDAIINQKKINESGDEKQKLYCIYVAVGQKRSTVRQIQKTLEEAGAMEYTTIVAATASDSAPLQFLAPYTGCAMGEFFRDNGMHALIIYDDLSKQAVAYRQMSLLLRRPPGREAYPGDVFYLHSRLLERAAKLSDEHGGGSLTALPIIETQGGDVSAFIPTNVISITDGQIFLGTELFNQGIRPAINVGLSVSRVGSSAQTKAMKKVSGSMKLELAQYREMAAFAQFGSDLDASTQQLLNRGSKLTELLKQKQYSPMTVAEQVISVFCGVKGYLDDIELKDISDFESKIIEKCKSEKAEIIDSILASGKLEDDKEKLLVEVITQLKENFKS

SEQ ID NO: 174737 - protein, 106 aa, Unknown
  Bacterial polypetide isolated from the Sargasso Sea
KFKKVLQTYKSLKDIIAILGMDELSEEDKLTVARARKIQRFLSQPFFVAEVFTGSPGKLVDLQATIKGFDAICKGEYDHLPEAAFYMVGTIEEAIEKAEKMAKDAA

SEQ ID NO: 174738 - protein, 283 aa, Unknown
  Bacterial polypetide isolated from the Sargasso Sea
MSKNIGKVSKVIGAVVDVEFSSKESTLPEIYDSLEIKREDGTILVLEVQSHIGENIVRTISMDSTDGLSRGTEAVATGNPIQMPIGKEVYGRLFNVVGDPIDGLEVLPKINDDGMSIHRQAPDFDQLSTSTEVLFTGIKVIDLIEPYAKGGKIGLFGGAGVGKTVLIQELINNIAKGHGGLSVFAGVGERTREGNDLLREMIESGIINYGDDFKKSMEAGEWDLSKVDKKALLESKATFVFGQMNEPPGARARVALSGLTVAEYFRDGGADGQGKDVLFFVDN

SEQ ID NO: 174739 - protein, 143 aa, Unknown
  Bacterial polypetide isolated from the Sargasso Sea
MQINPSEVTKLLKEQIKRFGEKAEVSEIGKVLSVGDGIARVYGLDNVQAGEMVEFDDGSKGMALNLENDNVGVVIFGDDRQIKEGDTVKRTNSIVDVPVGKELLGRVVDGLGNPIDGKGNLPTKTQRKRVEVKAPRDYSKTIS

SEQ ID NO: 174740 - protein, 455 aa, Unknown
  Bacterial polypetide isolated from the Sargasso Sea
MEINPSEVTKILKEQIKKFGDKAEVTEVGQVLSVGDGIARIYGLDNVQAGEMVEFSDGSKGMALNLESDNVGVVIFGDDRAVKEGDTVKRTGAIVDTPVGKELLGRVVDGLGNPIDGKGALDKGIKRSRVEVKAPGIIPRKSVNEPMQSGLKSVDSLVPIGRGQRELIIGDRQTGKTAVAIDTIINQKKINESNDEKQKLYCIYVAIGQKRSTVRQIEKSLEEAGAMEYTTIVAATASDAAPLQFLAPYTGCAMGEYFRDNGMHALIIYDDLSKQAVAYRQMSLLLRRPPGREAYPGDVFYLHSRLLERAAKLSDEHGGGSLTALPIIETQGGDVSAFIPTNVISITDGQIFLETNLFNQGIRPAINVGLSVSRVGSSAQTKAMKKVSGSMKLELAQYREMAAFAQFGSDLDASTQKLLNRGSKLTELLKQKQYSPMTVAEQVISVFCGVKGIFR

SEQ ID NO: 174741 - protein, 140 aa, Unknown
  Bacterial polypetide isolated from the Sargasso Sea
MAAMTVHLDVVSAEQNLFSGLVESIQVSGSEGELGVNAGHAPLLTALKPGMVRLVKQFGEEELIYIAGGTLEVQPNIVTVLADTAVRGEDLDEQAAEQAKRDAEAQMAKGASSELDYNQAAMQLAEAVAQLRVIQQLRKK

SEQ ID NO: 174742 - protein, 264 aa, Unknown
  Bacterial polypetide isolated from the Sargasso Sea
VALVYGQMNEPPGARARVALSGLTQAEYFRDEEGQDVLFFVDNIFRFTQAGSEVSALLGRIPSAVGYQPTLATDMGALQERITTTKKGSITSVQAIYVPADDLTDPAPATSFSHLDATTVLNRAISEKGIYPAVDPLDSTSRILDPQVVGDDHYRVAREVQRVLQTYKSLQDIIAILGMDELSEEDKLTVARARKIEKFLSQPFFVAEVFTGSPGKYVELEDTIKSFDGLVKGEYDHMPEAAFYMVGGIDEAIEKSKKLESEAA

SEQ ID NO: 174743 - protein, 258 aa, Unknown
  Bacterial polypetide isolated from the Sargasso Sea
NERTPGARARVGLTGLTVAEYFRDKEGQDVLFFVDNIFRFTQAGSEVSALLGRIPSAVGYQPTLATDMGNLQERITTTGKGSITSVQAIYVPADDLTDPAPATSFSHLDATTVLSRQIAELGIYPAVDPLDSTSRILDPRIVGDEHYRVARQVQKVLQTYKSLQDIIAILGMDELSEEDKLTVARARKIQRFLSQPFFVAEVFTGTPGKLVNLESTIKGFDAICKGEYDHLPEAAFYMVGTIDEAIEKAEKMAKEAAA

SEQ ID NO: 174744 - protein, 416 aa, Unknown
  Bacterial polypetide isolated from the Sargasso Sea
KSTGKIASVPVGEAMQGRVVNPLGQPIDGKGEIPTSDTRLIEEMAPGIIKRRSVHEPMQTGITSIDAMIPVGRGQRELIIGDRQTGKSAIAIDTIINQKGQDVVCVYVAIGQKSASVANIVEVLRERGALDYTVVVSAGASEPAALQYLAPYTGAAIAEHFMYQGKATLVIYDDLTKQAQAYRQMSLLLKRPPGREAYPGDVFYLHSRLLERAAKLSDAMGGGSMTALPIIETQAGDVSAYIPTNVISITDGQIFLSADLFNSGLRPAINVGISVSRVGGAAQTKAIKKIAGTLKLELAQFDELAAFSQFASDLDEATQQQLERGKRLRELLKQPQFSPLNLAEQVAVVYAGVKGLIDEVPVEDVTKFATELREYLKLNKAEFIEEILKEKKLNDGLESTLKEVINEVKSSMLATV

SEQ ID NO: 174745 - protein, 430 aa, Unknown
  Bacterial polypetide isolated from the Sargasso Sea
MSKGIITQVIGAVVDVKFEGELPEILTALECKNGDNRLVLEVAQHLGETTVRTIAMDATEGLKRGDEVINTNAPIQVPVGPETLGRIINVIGEPIDERGEVKTKESWPIHRAAPEFNDQSTETEILVTGIKVIDLLAPYAKGGKIGLFGGAGVGKTVLIMELINNVAKAHGGFSVFAGVGERTREGNDLYHEMMDSGVIKKDGPGSKAALVYGQMNEPPGARARVALTGLTVAEYFRDQEGQDVLFFVDNIFRFTQAGSEVSALLGRIPSAVGYQPTLATDMGNLQERITTTNKGSITSVQAIYVPADDLTDPAPATSFAHLDATTVLSRQIAEIGIYPAVDPLDSTSRILDPRVVGDEHYKVARDVQKILQSYKSLQDIIAILGMDELSEEDKLVVARARKIQRFLSQPFFVAEVFTGSPGKLVDLEST

SEQ ID NO: 174746 - protein, 364 aa, Unknown
  Bacterial polypetide isolated from the Sargasso Sea
GLKRGLTASRTNAPISVPVGPETLGRIVDVLGNPIDEKGPIGEKSKMPIHRKPPSYTDQSASNEVLETGIKVIDLMCPFAKGGKIGLFGGAGVGKTVNMMELINNIALQHSGLSVFAGVGERTREGNDFYYEMQESGVVNIDNLGESKVAMVYGQMNEPPGNRLRVALTGLTMAESFRDEGKDVLLFIDNIYRYTLAGVEVSALLGRMPSAVGYQPTLAEEMGALQERITSTKTGSITSIQAVYVPADDLTDPSPATTFAHLDATVVLSRQISELGIYPAVDPLDSTSRQLDPFVVGDDHYEVAQGVQKILQRYNELKDIIAILGMDELSEEDKGLVARARKAQKVLSQPFFVAEIFTGTPRKV

SEQ ID NO: 174747 - protein, 507 aa, Unknown
  Bacterial polypetide isolated from the Sargasso Sea
MDINTDNITALLKEQIAKFEGSVDVSEVGEIISVGDGVARVSGLENVMSSELVELPNDTFGMALNLEEDNVGLVLFGDSSLVKEGDLAKRTGRVVEVPVGDAMVGRVVDPLGQAMDGKGSINSKDSLPIERKALGVMARHPVKQPLQTGIKPIDSMVPIGRGQRELIIGDRQTGKTAIAVDTIINQKYTHETNEPVFCIYVAIGQKASTVASIVSELEEAGAMDYTTVVAANASDAAPLQFIAPYSGCAMGEYFRDNGKHALIIYDDLSKQAVAYRQMSLVLRRPPGREAYPGDVFYLHSRLLERASKLSEELGGGSLTALPIIETQEGDVAAYIPTNVISITDGQIYLETNLFNSGVRPAIDVGLSVSRVGGNAQVKAMKSIAGTLRLDLAQFRELEAFAKFGSDLDKSTLAQLTRGERMVEILKQKQYSPMDIDKQIAIIFAGAKGHLDDIPLDKVSDFESALFDYLDANNSKELEKLRVEGDMSEEMSDILDKSISQFKEGFIA

SEQ ID NO: 174748 - protein, 472 aa, Unknown
  Bacterial polypetide isolated from the Sargasso Sea
MAKGDKGKVVQVIGTVVDVEFDQNNLPEIFNALELENEGERLVLEVEQHVGNSWARCLALGPTEGLARGVEVTDSGAAVSVPVGEPSLGRLFNVVGDPIDNGEPISKDAVRWPIHRRPPSFDQQSGSVELLETGIKVLDLITPFAKGGKIGAYGGAGVGKTVIITELIRNIAQEHSGVSVFAGVGERSREGNDLWHEMQDYGVLGSTALVFGQMNEPAGSRARIALTGLTMAEYFRDEQKQDVLLFVDNIYRYVLAGMEVSALLGRMPSAVGYQPTLSTEMGDLEERITTTVDGSITSFQAVYVPADDYTDPGIVTTFGHLDANVSLDRALAAQFLFPAVDPLASNSRILEPAIVGEDHYNAARGVQQVLQRYKDLQDVIAILGIDELSEEDQLTVARARKIQRFLTQPFFVGEVFTGIPGKYVPIAETVKGFLEIIEGKHDDLPEQAFYMVGNIEEAVQKGEEMKQQIENN

SEQ ID NO: 174749 - protein, 439 aa, Unknown
  Bacterial polypetide isolated from the Sargasso Sea
ANAKGRVTQVIGAVVDVQFDDHLPEILNALNTDNNGKTLVLEVAQHLGENTVRTIAMDATEGLVRGQEVVDTAGPISVPVGNATLGRIVNVVGEPVDEQGPVKSDEYRAIHQPAPEFAEQSTESEVLVTGIKVIDLLAPYSKGGKIGLFGGAGVGKTVLIMELINNIAKVHSGFSVFAGVGERTREGNDLYHEMIESNVIKPDNLEESQVALVYGQMNEPPGARARVALTGLTLAEQFRDQSGTDVLFFVDNIFRFTQAGSEVSALLGRIPSAVGYQPTLATDMGAMQERITSTKNGSITSIQAVYVPADDLTDPAPATTFAHLDATTVLSRAISELGIYPAVDPLDSSSRLMDPAVVGEEHYDVARSVQGILQRYKSLQDIIAILGMDELSEEDKLTVARARKIQRFLSQPFDVAKVFTGSDGVQVPLEDTISSFKAV

SEQ ID NO: 174750 - protein, 510 aa, Unknown
  Bacterial polypetide isolated from the Sargasso Sea
MEINPSEVTKILKEQIKKFGDKAEITEVGQVLSVGDGIARVYGLDNVQAGEMVEFADGSKGMALNLESENVGVVIFGDDKAIKEGDTVKRTGEIVDTPVGKELLGRVVDGLGNPIDGKGALDKNVKKSRVEVKAPGIIPRKSVSEPMQSGLKAIDSLVPIGRGQRELIIGDRQTGKTAVAVDTIINQKKINESGDEKQKLYCIYVAIGQKRSTVRQIQKTLEEAGAMEYTTIVAATASDAAPLQFLAPYTGCAMGEFFRDNGMHALIIYDDLSKQAVAYRQMSLLLRRPPGREAYPGDVFYLHSRLLERAAKLGDEHGGGSLTALPIIETQAGDVSAYIPTNVISITDGQIFLETNLFNQGIRPAINVGLSVSRVGSAAQTKAMKKVSGSMKLELAQYREMAAFAQFGSDLDASTQKLLNRGSKLTELLKQKQFSPMTVAEQVVSVFCGVRGYLDDIDQKDISDFENKILQKCKSDKPEILDSISSSGKLEENAEKMLIDLINEFKKGLK

SEQ ID NO: 174751 - protein, 291 aa, Unknown
  Bacterial polypetide isolated from the Sargasso Sea
MASLDDLKKRILSVKSTQKITKAMKMVAAAKLKRAQENAEKGRPYSEKMNNIILNLSNGISDKENAPKLLAGTGNDKVHLCVVLTSDRGLCGGFNSNIIKKAKAYFTKITSEGKNLKIITVGSKGYDQLKRQYNDKIVNKISFKESKNINFFDAEKVSKIIIESFQKNEFDVCTIFYNKFKNVITQIPQAQQIIPLKSSETGNENEKDNYEFEPEEDEILGNLLPKNISTQIFKAMLENSASEQGSRMSAMDNATRNAGEMVDKLTIQYNRSRQAAITKELIEIISGAESL

SEQ ID NO: 174752 - protein, 111 aa, Unknown
  Bacterial polypetide isolated from the Sargasso Sea
MRKGKITQIIGAVVDVKFDGELPEILTALECKNGDNRLVLEVAQHLGETSVRTIAMDATEGLKRGDEVTDTGAPIKVPVGPETLGRIVNVIGEPIDEKGEIKTKENWPIHR

SEQ ID NO: 174753 - protein, 454 aa, Unknown
  Bacterial polypetide isolated from the Sargasso Sea
MEIKTDQLTQLLREQIEKHDSSVDISEVGEVLEVGDGVARVSGLENVMSSELVELPNGVFGMALNLEEDNVGLVLFGESRLVKEGDLAKRTGRVVEVPVGDAMLGRVVNPLGQPIDGKGPINTEHSLPIERKALGVMARSPVNEPLQTGIKAVDSMIPIGRGQRELIIGDRQTGKTAVAIDAIINQKYTHNTENPVYCIYVAIGQKASTVAALVQELESNGAMEYTTVVAANASDPAPMQYIAPYAGAAMGEFFRDNGKHGLIVYDDLSKQAVAYRQMSLVLRRPPGREAFPGDVFYLHSRLLERASKLSEELGGGSLTALPIIETQEGDVSAYIPTNVISITDGQIYLETNLFNSGIRPAIDVGLSVSRVGGNAQIKAMKSVAGTLRLDLAQYRELEAFAKFGSDLDKATLSQLTRGERMVEILKQNQYVLMDVEKQIAIIFAASKGQLDDLD

SEQ ID NO: 174754 - protein, 290 aa, Unknown
  Bacterial polypetide isolated from the Sargasso Sea
MASLDDLKKRIASVKSTQKITKAMKMVAAAKLRKAQESAEKGRPYSEKMNNVILNLSTGISDKENAPKLLSGTGNEKVHLCVVMTSDRGLCGGFNSNIIKKAKSFFSKILDQGKELKIITVGSKGNDQLKRAYGDRIIENISFKESKNANYFDADKVGKKVIEKFEAGEFDVCTIFYNRFKNVITQIPQAQQIIPLNNDAEENTSDESYEFEPDEDEILTNLLPKNISTQIFKAMLENSASEQGSRMSAMDNATRNAGEMVDKLTIEYNRSRQAAITKELIEIISGAESL

SEQ ID NO: 174755 - protein, 237 aa, Unknown
  Bacterial polypetide isolated from the Sargasso Sea
KAVAYRQMSLLLRRPPGREAYPGDVFYLHSRLLERAAKLSEEHGGGSLTALPIIETQGGDVSAFIPTNVISITDGQIFLETELFNQGIRPAINVGLSVSRVGSSAQTKAMKKVSGSMKLELAQYREMAAFAQFGSDLDASTQQLLNRGSKLTELLKQKQYSPMTVAEQVISVFCGVKGYLDNIDLKDVAEFESKIIEKCKSDKPEIIEAIQSSGKLEEDKEKLLVEVITQLQSNFKS

SEQ ID NO: 174756 - protein, 418 aa, Unknown
  Bacterial polypetide isolated from the Sargasso Sea
MSGLNPSEISSVLKDKISGLDLKAETKNEGTIVNVSDGIIRIHGMGDVMYGELVEFENGVFGLALNLEQDSVGVVVLGDYLGLSEGQKVTCTGKILEVPVGEEMLGRVVDALGNPIDGKGELKTKQSAPIEVVAPGVIARQSVDQPVQIGLKSIDAMVPIGRGQRELIIGDRQTGKTAVAIDAIINQKGTGIKCIYVAIGQKQSTIANVVAKLEEYGAMEHTIVVSAAAADPAAMQYLSAYSGCAMGEYFRDTGQDALIVYDDLSKQAVAYREISLLLRRPPGREAFPGDVFYLHSRLLERAARVNAEYVEKITEGKVKGKTGSLTALPIIETQAGDVSAFVPTNVISITDGQIFLETDLFNSGVRPAIDPGLSVSRVGGAAQTKIIKKLSGGIRTDLAQYRELAAFSQFASDLDDAT

SEQ ID NO: 174757 - protein, 268 aa, Unknown
  Bacterial polypetide isolated from the Sargasso Sea
MKMVAAAKLRKAQESAEKERPYSEKMNNVILNLSSGISDKENAPKLLSGTGNDKVHLCVVMTSDRGLCGGFNSNIIKKAKSYFSKILSEGKELKIITVGSKGNDQLKRMYGDKIIENISFKESKNANYFDADKVGKIVIDKFENSEFDICTIFYNQFKNVITQIPQAQQIIPLNSEDSEDNTSEESYEFEPDEDEILSNLLPKNISTQIFKAMLENSASEQGSRMSAMDNATRNAGEMVDKLTIQYNRSRQAAITKELIEIISGAESL

SEQ ID NO: 174758 - protein, 152 aa, Unknown
  Bacterial polypetide isolated from the Sargasso Sea
MSKGIITQVIGAVVDVKFEGELPEILTALECKNGDNRLVLEVAQHLGETTVRTIAMDATEGLKRGDEVINTNAPIQVPVGPETLGRIINVIGEPIDERGEVKTKESWPIHRAAPEFNDQSTETEILVTGIKVIDLLAPYAKGGKIGLFGGAG

SEQ ID NO: 174759 - protein, 513 aa, Unknown
  Bacterial polypetide isolated from the Sargasso Sea
MATKASEISELIKQQIKNFEHEAKSSDVGTVVSVTDGITRIHGLNDVQYGEMIEFPGDTFGLALNLEQDSVGAVVLGDYTHISEGAQVKTTNRILEVPVGEGLLGRVVDSLGTPLDGKGAVSSDQTAPIEKVAPGVISRQSVDQPVQTGLKSIDAMVPIGRGQRELIIGDRQTGKTAVAVDTIINQKGTGIKCIYVAVGQKNSSVANVVKKLDEEGALEHTIIVNAAASDSAAMQYIAPYSGCAMGEYFRDKGEDALIIFDDLTKQAWAYRQVSLLLKRPPGREAYPGDVFYLHSRLLERAARVNAEYVEKETGGKVKGQTGSLTALPIIETQAGDVSAFVPTNVISITDGQIYLESDLFNAGIRPAINAGLSVSRVGGAAQTKIIKKLGGGVRLALAQYRELAAFAQFASDLDEATRKQLERGQRVTELMKQKQYAPLTVAEMAVSLYAANEGYLDDVPADKIVDFEIALHANFVDSASDLAQKINDTGDYNDEIEAELKKFVEDFKATGTY

SEQ ID NO: 174760 - protein, 151 aa, Unknown
  Bacterial polypetide isolated from the Sargasso Sea
MANEKEIRTKIGSVKNTQKITKAMEMVAASKMRRTQETMKKALPYADKIRAVIGHIYKANPDYKHPFLEKREVKTAGYIVVSSDRGLCGGLNVNMFRGLIAKLKENKSNQIDSKLCLVGAKAVQFFRSVDVDVVAAASHLGEEPQVEDLVG

SEQ ID NO: 174761 - protein, 334 aa, Unknown
  Bacterial polypetide isolated from the Sargasso Sea
MPKVERSDCFGGAGVGKTVIIMELINNIAKAHGGFSVFAGVGERTREGNDLYHEMIESGVIKPEGTGSKAALVYGQMNEPPGARARVALTGLTVAEYFRDQEGQDVLFFVDNIFRFTQAGSEVSALLGRIPSAVGYQPTLATDMGNLQERITTTNKGSITSVQAIYVPADDLTDPAPATSFSHLDATTVLSRQIAELGIYPAVDPLDSTSRILDPRVVGDEHYRVARSVQKILQTYKSLQDIIAILGMDELSEDDKLTVARARKIQRFLSQPFFVAEVFTGSPGKLVDLESTIKGFDAICKGEYDHLPEAAFYMVGTIEEAIEKAEKMAKDAAA

SEQ ID NO: 174762 - protein, 426 aa, Unknown
  Bacterial polypetide isolated from the Sargasso Sea
VKEGDLAKRTGQVVEVPVGDAMVGRVVDPLGQAMDGKGSITSKDSLPIERKALGVMARHPVKQPLQTGIKPIDSMVPIGRGQRELIIGDRQTGKTAIAVDTIINQKYTHSTSDPVYCIYVAIGQKASTVASIVSELEDAGAMEYTTVVAANASDAAPLQFIAPYSGCAMGEYFRDNGKHALIIYDDLSKQAVAYRQMSLVLRRPPGREAYPGDVFYLHSRLLERASKLSDELGGGSLTALPIIETQEGDVAAYIPTNVISITDGQIYLETNLFNSGVRPAIDVGLSVSRVGGNAQVKAMKSIAGTLRLDLAQFRELEAFAKFGSDLDKSTLAQLTRGERMVEILKQKQYSPMNIDKQIAIIFAGTKGHLDDIPLDKVSDFESALFDYLDANNSKELEQLRSEGVMSEEMSDVLNKSISQFKDGFTV

SEQ ID NO: 174763 - protein, 241 aa, Unknown; identical to SEQ ID NO: 174721
  Bacterial polypetide isolated from the Sargasso Sea

SEQ ID NO: 174764 - protein, 136 aa, Unknown
  Bacterial polypetide isolated from the Sargasso Sea
GIYPAVDPLDSTSRILTPEILGDEHYNCAQLVKELLQRYKDLQDIIAILGMEELSEEDKLAVARARRVQRFLSQPFHVAEQFTGIPGALVDIKDTIKGFNMIMDGELDHIPEAAFNLKGTIEEAIEAGEKMLAETK

SEQ ID NO: 174765 - protein, 383 aa, Unknown
  Bacterial polypetide isolated from the Sargasso Sea
MSNGTVIQIIGAVIDVEFPKENLPKIYDALTVDETGLVLEVQQQLGDGVVRTIAMGASEGLKRGVSVTNTENPISVPVGEATLGRIMNVLGEPIDEKGDVAATSTMPIHRNPPSYEDQAETTELLETGIKVIDLICPFAKGGKVGLFGGAGVGKTVNIQELIRNIAYEHSGYSVFAGVGERTREGNDMYHEMIEGGVLDKVALVYGQMNEPPGNRLRVALSGLTMAENFRDEGRDVLLFVDNIYRYTLAGTECSALLGRMPSAVGYQPTLAEEMGVLQERIASTKTGSITSVQAVYVPADDLTDPSPATTFAHLDANVVLSRQIASLGIYPAVDPLDSNSRQLEPAIVGQEHYDVANAVKQQLNRYKELKDIIAILGMDELSE

SEQ ID NO: 174766 - protein, 157 aa, Unknown
  Bacterial polypetide isolated from the Sargasso Sea
MRKGNITQIIGAVVDVKFDGELPEILTALECDNGGNRLVLEVAQHLGESSVRTIAMDATEGLKRGDEVTDTGAPIKVPVGPETLGRITNVIGEPIDEKGEVKTKESWPIHRSAPEFNDQSTETEILVTGIKVVDLLAPYAKGGKIGLFGGAGVGKPY

SEQ ID NO: 174767 - protein, 279 aa, Unknown
  Bacterial polypetide isolated from the Sargasso Sea
MSKNGKIIQVIGAVVDVQFEGDLPEILTALEVDNSGNKLVLEVAQHLGENSVRTIAMDSTEGLKRGDVVQNTGAPISVPVGPETLGRIINVIGQPIDQKGEVKTKEKWPIHREAPKFTDQSTETEILETGIKVIDLLAPYSKGGKIGLFGGAGVGKTVIIMELINNIAKAHGGFSVFAGVGERTREGNDLYHEMIESGVIKPEGKGSKAALVYGQMNEPPGARARVGLTGLTVAEYFRDKEGQDVLFFVDNIFRFTPAGSEVSALLGRIPSAVGYQPTL

SEQ ID NO: 174768 - protein, 112 aa, Unknown
  Bacterial polypetide isolated from the Sargasso Sea
MANNLTGKISQVLGAVVDVEFDGELPAIMNALELDNDGTRLLLEVAQHLGENAVRTIAMDTTDGLVRGQTVTDTGAPISMPVGPETLGRIMNVVGEPVDERGAIGTTKTYPI

SEQ ID NO: 174769 - protein, 473 aa, Unknown
  Bacterial polypetide isolated from the Sargasso Sea
MSKKGIITQVIGAVVDVKFDGALPEILTALQCDNGGNKLILEVAQHLGESSVRTIAMDSTEGLKRGDEALDTGAPIQVPVGPETLGRIINVIGEPIDEKGDVKTKESWPIHRQAPTFNDQSTETEILVTGIKVIDLLAPYAKGGKIGLFGGAGVGKTVIIMELINNIAKAHGGFSVFAGVGERTREGNDLYHEMIESGVIKPEGKGSKAALVYGQMNEPPGARARVALTGLTVAEYFRDQEGQDVLFFVDNIFRFTQAGSEVSALLGRIPSAVGYQPTLATDMGNLQERITTTNKGSITSVQAIYVPADDLTDPAPATSFSHLDATTVLSRQIAELGIYPAVDPLDSTSRILDPRIVGEEHYKVARSVQKILQTYKSLQDIIAILGMDELSEEDKLTVARARKIQRFLSQPFFVAEVFTGSPGKLVDLDSTIKGFDAICKGEYDHLPEAAFYMVGTIEEAVQKAEKMAKEAAA

SEQ ID NO: 174770 - protein, 131 aa, Unknown
  Bacterial polypetide isolated from the Sargasso Sea
DPLDSTSRILDPRIVGDEHYRVAREVQKVLQTYKSLQDIIAILGMDELSEEDKLVVARARKIQRFLSQPFFVAEVFTGSPGKLVDLESTIKGFDAICKGEYDHLPEAAFYMVGTIEEAIKKAESLANEAAA

SEQ ID NO: 174771 - protein, 338 aa, Unknown
  Bacterial polypetide isolated from the Sargasso Sea
DLLALYARGGKIGLFGGAGVGKTVLIMELINNIAKAHGGYSVFAGVGERTREGNDLYHEMIESGIIDLKGKDSKVALVYGQMNEPPGARARVALSGLTQAEYFRDEEGQDVLFFVDNIFRFTQAGSEVSALLGRIPSAVGYQPTLATDMGALQERITTTKKGSITSVQAIYVPADDLTDPAPATSFSHLDATTVLNRAISEKGIYPAVDPLDSTSRILDPQVVGDDHYRVAREVQRVLQTYKSLQDIIAILGMDELSEEDKLTVARARKIEKFLSQPFFVAEVFTGSPGKYVDLEDTIKSFDGLVKGEYDHMPEAAFYMVGGIDEAIEKAKKLEAEAA

SEQ ID NO: 174772 - protein, 472 aa, Unknown
  Bacterial polypetide isolated from the Sargasso Sea
MKKGKITQVIGAVVDVSFDGDLPEILTALECKNGENKLVLEVAQHLGESSVRTIAMDATEGLKRGDEVIDTGSPIKVPVGPETLGRIINVVGDPIDEKGEVKTKESWPIHRAAPEFNDQSTETEILVTGIKVVDLLAPYAKGGKIGLFGGAGVGKTVIIMELINNIAKAHGGFSVFAGVGERTREGNDLYHEMIESGVIKPEGPGSKAALVYGQMNEPPGARSRVALTGLTVAEYFRDQEGQDVLFFVDNIFRFTQAGSEVSALLGRIPSAVGYQPTLATDMGNLQERITTTNKGSITSVQAIYVPADDLTDPAPATSFSHLDATTVLSRQIAELGIYPAVDPLDSTSRILDPRIVGDEHYRVAREVQKVLQTYKSLQDIIAILGMDELSEEDKLTVARARKIQRFLSQPFFVAEVFTGSPGKLVDLESTIKGFDAICKGEYDHLPEAAFYMVGTIEEAIEKAEKMAKEAAA

SEQ ID NO: 174773 - protein, 292 aa, Unknown
  Bacterial polypetide isolated from the Sargasso Sea
MASLDDLKKRITSVKSTQKITKAMKMVAAAKLRRAQENAEKGRPYSDKMHNIILNLSNGISDKENAPKLLKGSGNDKIHLCVVLTSDRGLCGGFNSNIIKKAKSYFQKILNEGKSLKIITVGSKGYDQLKRVYSDKIIEKISFKDSKNVNYLDAEKVGKIIIDNFYKNEFDVCTIFYNQFKNVITQIPQEQQIIPLKASESKKDSSVEDNYEFEPEEDEILSNLLPKNISTQIFKAMLENSASEQGSRMTAMDNATRNAGEMVDKLTIQYNRSRQAAITKELIEIISGAESL

SEQ ID NO: 174774 - protein, 511 aa, Unknown
  Bacterial polypetide isolated from the Sargasso Sea
MDINPSEVTKILKEQIKKVGEKAEISEVGQVLSVGDGIARIYGLDNVQAGEMVEFSDGSKGMALNLESDNVGVVIFGEDRAIKEGDTVKRTGAIVDTPVGKELLGRVVDGLGNPIDGKGALDKGVKRSRVEVKAPGIIPRKSVNEPMQTGLKSVDSLVPIGRGQRELIIGDRQTGKTAVAIDAIINQKKINESDDEKQKLYCVYVAIGQKRSTVRQIEKTLEEAGAMEYTTIVAATASDAAPLQFLAPYTGCAMGEYFRDNGMHALIIYDDLSKQAVAYRQMSLLLRRPPGREAYPGDVFYLHSRLLERAAKLSDEHGGGSLTALPIIETQGGDVSAFIPTNVISITDGQIFLETNLFNQGIRPAINVGLSVSRVGSSAQTKAMKKVSGSMKLELAQYREMAAFAQFGSDLDASTQKLLNRGSKLTELLKQKQYSPMTVAEQVISVFCGVRGYLDNIEQKNIAEFETKIIEKCKSEKPEILSAISSSGKLEENTEKLLVETITELKKNFNS

SEQ ID NO: 174775 - protein, 458 aa, Unknown
  Bacterial polypetide isolated from the Sargasso Sea
MSTGNIVQVIGAVVDVEFPKEAIPSVYDALTLKDGELVFEVQQQLGDGIVRTIAMGASEGLKRGLEVENTGAPISVPVGQETLGRVLDVLGNPIDEKGPVGAKANRPIHAKAPTFEEQSTEADVLETGIKVIDLLCPFAKGGKVGLFGGAGVGKTVTVMELIRNIAAEHDGFSVFAGVGERTREGNDFYHEMMESNVLDKVALVYGQMNEPPGNRLRVALTGLTIAENFRDEGRDVLMFIDNIYRYTLAGTEVSALLGRMPSAVGYQPNLAEEMGVLQERITSTKTGSITSIQAVYVPADDLTDPSPATTFAHLDATVVLARSIAELGIYPAVDPLDSNSRQLDPGVVGQEHYDTARSVQQVLQRYKELQDIIAILGMDELSEEDKLTVQRARKIQRFLSQPFFVAEVFTGSPGQYVSLRDSIKAFQGIVAGDYDDLPEQAFYMVGTIEEAVEKAKSM

SEQ ID NO: 174776 - protein, 471 aa, Unknown
  Bacterial polypetide isolated from the Sargasso Sea
MRKGNITQVIGAVVDVKFDGELPEILTALECNNAGNRLVLEVAQHLGESSVRTIAMDATEGLKRGDEVKDTGAPIKVPVGPETLGRIINVIGEPIDEKGDVKNKENWPIHRPAPTFNDQSTETEILVTGIKVIDLLAPYAKGGKIGLFGGAGVGKTVLIMELINNVAKAHGGFSVFAGVGERTREGNDLYHEMIDSGVIKPEGEGSKAALVYGQMNEPPGARARVALTGLTVAEYFRDQEGQDVLFFVDNIFRFTQAGSEVSALLGRIPSAVGYQPTLATDMGNLQERITTTNKGSITSVQAIYVPADDLTDPAPATSFAHLDATTVLSRQIAELGIYPAVDPLDSTSRILDPRIVGDEHYRVAREVQKVLQTYKSLQDIIAILGMDELSEEDKLVVARARKIQRFLSQPFFVAEVFTGSPGKLVDLESTIKGFDAICKGEYDHLPEAAFYMVGTIEEAIEKAEKLAKDVA

SEQ ID NO: 174777 - protein, 212 aa, Unknown
  Bacterial polypetide isolated from the Sargasso Sea
MDINPSEITKILKEQIKNLGEKTEVSEIGKVLSVGDGIARVYGLDNVQAGEMVEFKDGSKGMALNLESDNVGIVIFGDDKSIKEGDTVKRTGTIVDVPVGKELLGRVVDALGNPIDGKEALKKGIKRKRVEVKAPGIIPRKSVNEPMQTGLKAIDSLIPIGRGQRELIIGDRQTGKTAVAIDTIINQKKINESSDEKKKLYCIYVAIGQKRS

SEQ ID NO: 174778 - protein, 352 aa, Unknown
  Bacterial polypetide isolated from the Sargasso Sea
MDIKTNEIGDLLRSQIKNINENVDVNEVGEVLEIGDGVARTSGLGSVMSSELVEFPNNVFGMALNLEEENVGAVLFGDSSLVKEGDTVKRTGKVVEVPVGKELLGRVVDPLGQPMDGKGPINAKETLPIERKALGVMQRFPVKEPLQTGLKSIDSMIPIGRGQRELIIGDRQTGKSAIAIDAIINQKSTHSSDSPVYCVYVAVGQKASTVAKLVAELEANGAMEYTTVVVANASDPAPLQYIAPYSGCAMGEYYRDNGMHGLIVYDDLSKQATAYRQMSLVLRRPPGREAFPGDVFYLHSRLLERASKLSEDLGSGSLTALPVIETQEGDVSAYIPTNVISITDGQIYLDTN

SEQ ID NO: 174779 - protein, 511 aa, Unknown
  Bacterial polypetide isolated from the Sargasso Sea
MEINPSEVTKILKEQIKKFGDKAEVTEVGQVLSVGDGIARIYGLDNVQAGEMVEFSDGSKGMALNLESENVGVVIFGDDKAVKEGDTVKRTGAIVDTPVGKELLGRVVDGLGNPIDGKGALDKSLKRSRVEVKAPGIIPRKSVSEPMQTGLKSIDSLVPIGRGQRELIIGDRQTGKTAVAIDAIINQKKINESGDEKKKLYCIYVAVGQKRSTVRQIEKTLEEAGAMEYTTIVAATASDAAPLQFLAPYTGCTMGEYFRDNGMHALIIYDDLSKQAVAYRQMSLLLRRPPGREAYPGDVFYLHSRLLERAAKLGDEHGGGSLTALPIIETQGGDVSAFIPTNVISITDGQIFLETELFNQGIRPAINVGLSVSRVGSSAQTKAMKKVSGSMKLELAQYREMAAFAQFGSDLDASTQKLLNRGSKLTELLKQNQYSPMTVAEQVISVFCGVRGHLDDIEQKDISSFENKIIEKCKAEKPDIIESITASGKLEDDKEKELNEIILQLKKDFNS

SEQ ID NO: 174780 - protein, 291 aa, Unknown
  Bacterial polypetide isolated from the Sargasso Sea
MASLDDLKKRISSVKSTQKITKAMKMVAAAKLRRAQESAEKGRPYSDKMNNIILNLSNGISDIDNAPKLLSGTGEDKVHLCIVMTSDRGLCGGFNTNIIKKAKLYFQKILDEGKTLKIITVGTKGYDQLKRLYGDNIIERISFKESKNVNYFDAEKVGKIVIEKFDKNEFDVCAIFYNQFKNVITQIPQEQQIIPLKTSEKEENSSEDNYEFEPEEDEILSNLLPKNISTQIFKAMLENSASEQGSRMSAMDNATRNAGEMVDKLTIEYNRSRQAAITKELIEIISGAESL

SEQ ID NO: 174781 - protein, 460 aa, Unknown
  Bacterial polypetide isolated from the Sargasso Sea
MSNQGGVQYSKIAEIKGPLVIVDGVDNAAFDELVEIETTEGERRLGKVLEVGNGKAVVQVFEGTTGLSVSGTNAKFVGKVMEMPVSDQVLGRVFDGLGRAKDGLPEPVAESFLDINGAPMNPEQREYPKDFIQTGVSVIDGMLTLVRGQKLPIFSGSGMSHNILAAQIARQAAIIGTDDSFAVVFAAIGVQYSEAEYFKRSLEESGALKRSVLFLNLADDPAIERIITPRVALTVAEYLAYDLGMHVLVILTDMTNYAEALREISAAREEVPGRKGYPGYLYTDLSTIYERAGRLRGKKGSVTQVPILTMPSDDITHPIPDLTGYITEGQLVLGRDLFRQGVYPPINILMSLSRIMKDGIGEGSTRADHQEISNQNYDAYSRAQEVRALAGIVGKAGLTPVDLNYMNFGDEFEKKFLTQAIDENRTIEETLGLQWNCVSKLPKNELTKVKDKYVDQYYKE

SEQ ID NO: 174782 - protein, 592 aa, Unknown
  Bacterial polypetide isolated from the Sargasso Sea
MVAQGKIVWISGPAVKADGMADAKMYETVSVGESKLIGEVIRLTGDVAFIQVYESTSGLKPGEPVVGTGNPLSVLLGPGIIGQIYDGIQRPLKDLAAKSGSFIGRGITTTPVDMEKQYHFTPSVAVGDEVEAGNIIGTVPETSLIEHKILVPPDHKGGKITNIVSEGDYALETEIATVEKDGQSFPLKMYHKWPVRQPRPYLKRYDPTVPLLTGQRVIDTFFPLAKGGTGSIPGAFGTGKTVTLHQIAKWADSQVVVYIGCGERGNEMTEVLVEFPELKDPRTGKPLMDRTVLVANTSNMPVAAREASIYTGVTIAEYYRDMGYDVVLVADSTSRWAEALREMSGRLEEMPAEEGYPSYLASRLAEFYERAGRVRARGSPERDGSVSLVGAVSPSGGDFTEPVTTHTMRFIKTFWALDASLAYSRHYPSINWMNSYSGYLADIAKWWSENISQDWLSLRSETYGILQREDTLKEIVKLLGPEALPDEEKLILEVARMIKIGILQQNSFDDVDTYCSPEKQFKLMKLQVDFYNKGQQALKDGASLADIRSMDVISLLLKARMDVKDDEMPKLDKIETDMAEQFKSITGVKVQN

SEQ ID NO: 174783 - protein, 57 aa, Unknown
  Bacterial polypetide isolated from the Sargasso Sea
PFFVAEVFTGSPGKYVSLEDSIKGFNGILNGDYDDLPEQAFYMVGTIEEAVEKAKTM

SEQ ID NO: 174784 - protein, 360 aa, Unknown
  Bacterial polypetide isolated from the Sargasso Sea
ETLGRIINVIGEPIDERGEVKTKETWPIHRAAPEFNDQSTETEILVTGIKVIDLLAPYAKGGKVGLFGGAGVGKTVLIMELINNVAKAHGGFSVFAGVGERTREGNDLYHEMIESGVIKKDGDGSKAALVYGQMNEPPGARARVALTGLTVAEYFRDQEGQDVLFFVDNIFRFTQAGSEVSALLGRIPSAVGYQPTLATDMGNLQERITTTNKGSITSVQAIYVPADDLTDPAPATSFAHLDATTVLSRQIAEIGIYPAVDPLDSTSRILDPRIVGDEHYRVARDVQKILQSYKSLQDIIAILGMDELSEEDKLVVARARKIQRFLSQPFFVAEVFTGSPGKLNDLESTIKGFDAICKGE

SEQ ID NO: 174785 - protein, 382 aa, Unknown
  Bacterial polypetide isolated from the Sargasso Sea
IGPVLDVEFPAGKLPKILNALRIEAKNPAGQDIALTAEVQQLLGDHRVRAVAMSGTDGLVRGMEAIDTGAPISVPVGEATLGRIFNVLGEPVDEQGPVNTKDTAPIHRAAPKLTDLETKPKVFETGIKVIDLLAPYRQGGKVGLFGGAGVGKTVLIQELINNIAKEHGGVSVFGGVGERTREGNDLYEEFKESGVINADDLTQSKVALCFGQMNEPPGARMRVGLSALTMAEHFRDVNKQDVLLFVDNIFRFVQAGSEVSALLGRMPSAVGYQPTLGTDVGELQERITSTLEGSITSIQAVYVPADDLTDPAPATTFAHLDATTVLARALAAKGIYPAVDPLDSTSTMLQPSVVGDEHYKTARAVQSTLQRYKELQDIIAIL

SEQ ID NO: 174786 - protein, 325 aa, Unknown
  Bacterial polypetide isolated from the Sargasso Sea
MSSENLGQVIQVLGPVIDVEFVTEELPPINTALKLTNPLISEATWNLTIEVAQQIGSKRVRCIAMDTTDGIKRGEKVLDTGMPISIPVGKNALGRMMNVIGEPIDGVGPIESESLSPIHKPAPSFQEQSTKTEVFETGIKVIDLLAPFLKGGKIGLFGGAGVGKTVLLMELINNVAKEYGGYSFFAGVGERTREGNDLYMEMKESGVLKNTGLVFGQMNEPPGARARVALTGLTQAEHFRDQEGQDVLLFVDNIFRFTQAGSEVSALLGRIPSAVGYQPTLATDLGALQERITSTVKGSITSVQAIYVPADDLTDPAPATTFAHL

SEQ ID NO: 174787 - protein, 221 aa, Unknown
  Bacterial polypetide isolated from the Sargasso Sea
MRKGKITQIIGAVVDVKFDGELPEILTALECSNAGNRLVLEVAQHLGESSVRTIAMDATEGLKRGDEVTDTASPIKVPVGPETLGRIVNVIGEPIDEKGEVKTKESWPIHRAAPEFNDQSTETEILVTGIKVVDLLAPYAKGGKIGLFGGAGVGKTVIIMELINNIAKAHGGFSVFAGVGERTREGNDLYHEMIESGVIKPEGPGSKAALVYGQMNEPPRS

SEQ ID NO: 174788 - protein, 234 aa, Unknown
  Bacterial polypetide isolated from the Sargasso Sea
SHLAHANSEYKHPYLNKRDEIKRIGLIIVSTDRGLCGGLNANMFRMLLKNIQSWEQEGKEVDLCVIGTKAAGFFGSIGANIVGQVTHIGDEPSLEELLGTIMIMLNAYKEERIDELYLVSNQFVNSMVQTPTMEQLIPGKPDEKEKYASHWDYIYEPDAEEVLDGFLSRYIESQVYAGVIENISCEMAARMVAMKSATENAGALIDELQLIYNKARQAAITQELSEIVAGAAAV

SEQ ID NO: 174789 - protein, 358 aa, Unknown
  Bacterial polypetide isolated from the Sargasso Sea
NQPLQTGIKAVDSMIPIGRGQRELIIGDRQTGKTAVAIDTIINQKYTHQTDQPVYCIYVAIGQKASTVASIVSELESNGAMEYTTVVAANASDEAPLQYIAPYSGCAMGEYYRDNGKHGLIVYDDLSKQAVAYRQMSLVLRRPPGREAFPGDVFYLHSRLLERASKLSSELGGGSLTALPIIETQEGDVSAYIPTNVISITDGQIYLEKNLFNSGIRPAIDVGISVSRVGGNAQIKAMKGVAGTLRLDLAQYRELEAFAKFGSDLDKSTQAQLTRGERMVEVLKQGQYMPMDVEKQISIIFAASKGFLDNIDVEKVSVYENDLFDYLDANNSEDLKAIVSEGLISDSVEKNLEKAISE

SEQ ID NO: 174790 - protein, 459 aa, Unknown
  Bacterial polypetide isolated from the Sargasso Sea
MVEGKIVQCIGAVIDVEFPPGHIPKIYDALVLEGSDLTLEVQQQLGDGVVRTICLGSSDGLRRGLMVKNTGHPISVPVGRATLGRIMDVLGRPIDEAGPIDSEHTRSIHQKAPAFEELSPSTELLETGIKVIDLICPFAKGGKVGLFGGAGVGKTVNMMELINNIAKEHGGYSVFAGVGERTREGNDFYHEMKDSNVLDKVTLVYGQMNEPPGNRLRVALTGLTIAEYFRDEGLDVLFFVDNIYRFTLAGTEVSALLGRMPSAVGYQPTLAEEMGKLQERITSTRTGSITSVQAVYVPADDLTDPSPATTFGHLDATVVLSRDIASLGIYPAVDPLDSTSRQIDPNVIGEEHYSITRGVQQTLQRYKELRDIIAILGMDELAPEDKLAVARARKIQRFLSQPFHVAEVFTGTPGKYVSLKETIRGFKMIVDGECDSLPEQAFYMVGTIDEAFEKARKMK

SEQ ID NO: 174791 - protein, 378 aa, Unknown
  Bacterial polypetide isolated from the Sargasso Sea
MPVSEQVLGRVFDGLGRAKDGLPEPVADSFLDINGAPMNPEQREYPKDFIQTGVSVIDGMLTLVRGQKLPIFSGSGMSHNILAAQIARQAAIIGTDDSFAVVFAAIGVQYSEAEYFKRSLEESGALKRSVLFLNLADDPAIERIITPRVALTVAEYLAYDLGMHVLVILTDMTNYAEALREISAAREEVPGRKGYPGYLYTDLSTIYERAGRLRGKKGSVTQVPILTMPSDDITHPIPDLTGYITEGQLVLGRDLFRQGVYPPINILMSLSRIMKDGIGEGSTRADHQEISNQNYDAYSRAQEVRALAGIVGKAGLTPVDLNYMNFGDEFEKKFLTQAIDENRTIEETLGLQWSCVSKLPKNELTKVKDKYVDQYYKE

SEQ ID NO: 174792 - protein, 507 aa, Unknown
  Bacterial polypetide isolated from the Sargasso Sea
MEIKTDQLTQLLREQIEKFDGSVDISEVGEVIEVGDGVARVSGLENVMSSELVELPNGVFGMALNLEEDNVGLVLFGESRLVKEGDLAKRTGRVVEVPVGDAMLGRVVNPLGQPIDGKGAINTEHSLPIERKALGVMARHPVKEPLQTGIKAIDSMIPIGRGQRELIIGDRQTGKTAVAIDTIINQKYTHNTDDPVYCIYVAIGQKASTVAALVKELEDNGAMEYTTVVAANASDPAPMQYIAPYAGAAMGEYFRDNGKHALIVYDDLSKQAVAYRQMSLVLRRPPGREAFPGDVFYLHSRLLERASKLSTDLGGGSLTALPIIETQEGDVSAYIPTNVISITDGQIYLETNLFNSGIRPAIDVGLSVSRVGGNAQIKAMKSVAGTLRLDLAQYRELEAFAKFGSDLDQATLAQLTRGERMVEILKQNQYVPVDVEKQVAIIFAASKGHLDDLPVEQISDFESGLFEYLDANAKDSLDSIVSEGTISDETAEKLEKAIKDYKGGFNA

SEQ ID NO: 174793 - protein, 291 aa, Unknown
  Bacterial polypetide isolated from the Sargasso Sea
MASLDDLKKRIASVKSTQKITKAMKMVAAAKLRRAQESAEKGRPYSEKMNNVILNLSSGISDKENAPKLLSGTGNDKVHLCVVMTSDRGLCGGFNSNIIKKAKSYFSKILSEGKELKIITVGSKGNDQLKRMYGDKIIENISFKESKNANYFDADKVGKIVIDKFESSEFDICTIFYNQFKNVITQIPQAQQIIPLNSEDSEENSSEESYEFEPDEDEILSNLLPKNISTQIFKAMLENSASEQGSRMSAMDNATRNAGEMVDKLTIQYNRSRQAAITKELIEIISGAESL

SEQ ID NO: 174794 - protein, 288 aa, Unknown
  Bacterial polypetide isolated from the Sargasso Sea
PCSMQVYAPFAGAAIGEYFRDTGRPALIIYDDLSKQAVAYREVSLLLRRPPGREAYPGDVFYLHSRLLERSAKVINDDDIAKNMNDLPEPLKPVVKGGGSLTALPIIETQAGDVSAYIPTNVISITDGQIFLESDLFNSGVRPAINVGISVSRVGGSAQIKSMKKVAGTLKLDQAQFRELQAFAKFGSDLDPVTLGVIEKGMRNVEILKQAQNDPFTVEDQVAIIYLGSKNLLKSVPVDKVKEFEKKFLELMNLKYRKTLDSIKEGKLTDDVITALEKVGAEISSSYE

SEQ ID NO: 174795 - protein, 486 aa, Unknown
  Bacterial polypetide isolated from the Sargasso Sea
MVATPSTSSQTKGVVRQVIGPVLDVEFPAGKLPKILNALRIEAKNPAGQDIALTAEVQQLLGDHRVRAVAMSGTDGLVRGMEAIDTGAPISVPVGEATLGRIFNVLGEPVDEQGPVKTKDTAPIHRAAPKLTDLETKPKVFETGIKVIDLLAPYRQGGKVGLFGGAGVGKTVLIQELINNIAKEHGGVSVFGGVGERTREGNDLYEEFKESGVINADDLTQSKVALCFGQMNEPPGARMRVGLSALTMAEHFRDVNKQDVLLFVDNIFRFVQAGSEVSALLGRMPSAVGYQPTLGTDVGELQERITSTLEGSITSIQAVYVPADDLTDPAPATTFAHLDATTVLARALAAKGIYPAVDPLDSTSTMLQPSVVGDEHYKTARAVQSTLQRYKELQDIIAILGLDELSEEDRLTVDRARKIEKFLSQPFFVAEIFTGMSGKYVKLEDTIAGFNMILSGELDDLPEQAFYLVGNIDEVKAKAEKIKSEK

SEQ ID NO: 174796 - protein, 334 aa, Unknown
  Bacterial polypetide isolated from the Sargasso Sea
YAKGGKIGLFGGAGVGKTVLIMELINNVAKAHGGFSVFAGVGERTREGNDLYHEMMDSGVIKPDGDGSKAALVYGQMNEPPGARARVALTGLTVAEYFRDQEGQDVLFFVDNIFRFTQAGSEVSALLGRIPSAVGYQPTLATDMGNLQERITTTNKGSITSVQAIYVPADDLTDPAPATSFAHLDATTVLSRQIAEIGIYPAVDPLDSTSRILDPRIVGEEHYRVAREVQKVLQTYKSLQDIIAILGMDELSEEDKLTVARARKIQRFLSQPFFVAEVFTGSPGKLVELESTIKGFDAICKGEYDHLPEAAFYMVGTIEEAIEKAEKMAKEAAA

SEQ ID NO: 174797 - protein, 501 aa, Unknown
  Bacterial polypetide isolated from the Sargasso Sea
MVSIRPDEISAILKQQIEDYDKSVSVSNVGTVLTVGDGIARVYGLQQAMAGELLEFEDGTEGIALNLEDDNVGAVLMGEGYGIQEGSTVKATGKIASVPVGEAMLGRVVNSLGRAIDGKGEIATSETRLIESMAPGIIQRKSVHEPMQTGITAIDAMIPVGRGQRELIIGDRQTGKTAIAIDTILNQKDQDMICVYVAVGQKAASVANVVEVLRERGALDYSVIVAANASEPAALQYLAPYTGASIAEYFMYKGKATLVIYDDLSKQAAAYRQMSLLLRRPPGREAYPGDVFYCHSRLLERAAKLSDAMGKGSMTALPIIETQAGDVSAYIPTNVISITDGQIFLSSDLFNSGLRPAINVGISVSRVGGAAQTKAIKKIAGTLKLELAQFAELAAFSQFASDLDASTQQQLERGKRLRELLKQPQFSPLILAEQVAIVYAGVKGFIDAVPVDKVVDFSRELREYLKSNKPEFITEIQEKKVMSPEAEAILKDAISEVVSTL

SEQ ID NO: 174798 - protein, 243 aa, Unknown
  Bacterial polypetide isolated from the Sargasso Sea
MADTASNNIGSVSQVLGAVVDVQFEGELPNIMNALECDNGGNRLVLEVAQHLGESTVRTIAMDTTEGLVRGQEVSDTGTPIQMPVGPETLGRILNVIGEPIDERGPLNTTKKLPIHREAPEFTDQSTETDVLVTGIKVVDLLAPYSRGGKIGLFGGAGVGKTVLIMELINNVAKAHGGYSVFAGVGERTREGNDLYHEMMESGVIQPDGESKAALVYGQMNEPPGARARVGLSGLTLAEYFRD

SEQ ID NO: 174799 - protein, 180 aa, Unknown
  Bacterial polypetide isolated from the Sargasso Sea
VFALLGRIPSAVGYQPTLATDMGNLQERITTTNKGSITSVQAIYVPADDLTDPAPATSFSHLDATTVLSRQIAEIGIYPAVDPLDSTSRILDPRIVGDEHYRVAREVQKVLQTYKSLQDIIAILGMDELSEEDKLIVARARKIQRFLSQPFFVAEVFTGSPGKLVDLESTIKGFDAICKG

SEQ ID NO: 174800 - protein, 180 aa, Unknown
  Bacterial polypetide isolated from the Sargasso Sea
NKGSITSVQAIYVPADDLTDPAPATSFAHLDATTVLSRQIAEIGIYPAVDPLDSTSRILDPRIVGDEHYRVAREVQKVLQTYKSLQDIIAILGMDELSEEDKLVVARARKIQRFLSQPFFVAEVFTGSPGKLVDLESTIKGFDAICKGEYDHLPEAAFYMVGTIEEAIQKAENLANEAAA

SEQ ID NO: 174801 - protein, 352 aa, Unknown
  Bacterial polypetide isolated from the Sargasso Sea
MKTEILVTGIKVIDLLAPYAKGGKIGLFGGAGVGKTVLIMELINNVAKAHGGFSVFAGVGERTREGNDLYHEMMDSGVIKKDGPGSKAALVYGQMNEPPGARARVALTGLTVAEYFRDQEGQDVLFFVDNIFRFTQAGSEVSALLGRIPSAVGYQPTLATDMGNLQERITTTNKGSITSVQAIYVPADDLTDPAPATSFAHLDATTVLSRQIAEIGIYPAVDPLDSTSRILDPRVVGDEHYKVARDVQKILQSYKSLQDIIAILGMDELSEEDKLVVARARKIQRFLSQPFFVAEVFTGSPGKLVDLESTIKGFDAICKGEYDHLPEAAFYMVGTIEEAIEKAKKMEKEAAA

SEQ ID NO: 174802 - protein, 191 aa, Unknown
  Bacterial polypetide isolated from the Sargasso Sea
MRKGKITQIIGAVVDVKFEGELPEILTALECDNGGNRLVLEVAQHLGESSVRTIAMDATEGLKRGDEVTDTAAPIKVPVGPETLGRIINVIGEPIDEKGDVKSSDNWPIHRAAPEFNDQSTETEILVTGIKVIDLLAPYAKGGKIGLFGGAGVGKTVLIMELINNVAKAHGGFSVFAGVGERTREGNDLYH

SEQ ID NO: 174803 - protein, 405 aa, Unknown
  Bacterial polypetide isolated from the Sargasso Sea
DALGRPIDGKGEVKSNHNSPIEVVAPGVIDRKSVDQPVQTGIKSIDVMVPIGRGQRELIIGDRQTGKTAIAIDTIIRQKDSGITSVYVAIGQKQSTVATVVRQLEEADALKNTIVVSASAAESAALQFLAPYSGCTMGEYFRDKGEDALIIYDDLSKHAVAYRQISLLLKRPPGREAFPGDIFYLHSRLLERASRVNEDYVERLTEGKVKGKTGSLTALPIIETQASDVSAFIPTNVISITDGQIFLETDLFNSGIRPAINVGISVSRVGGAAQTKIIKKLGGTVKLALAQFRELESFSQFASDLDDATKEQLENGQRITELFKQTQFAPRSVACIAIVLYAIENKYLTDVEKDKMQSFEENLRTHFKSNYGDVWEEVNKTGDWNDGLDKKFKKIVSSFMKEGSW

SEQ ID NO: 174804 - protein, 280 aa, Unknown
  Bacterial polypetide isolated from the Sargasso Sea
ASVKSTQKITKAMKMVAAAKLRRAQESAEKGRPYSEKMNNIILNLSNGISDKENAPKLLSGSGNNKIHLCVVMTSDRGLCGGFNSNIIKKAKSYFTKLSKDGKDLKIITVGSKGNDQLKRTYGDKIIANISFKESKHANYFDAEKVSKMIIEKFEAEEFDVCTIFYNQFKNVITQIPQAQQIIPLNIENSEEKKSEDSYEFEPDEDEILSNLLPKNISTQIFKAMLENSASEQGSRMSAMDNATRNAGEMVDKLTIEYNRSRQAAITKELIEIISGAESL

SEQ ID NO: 174805 - protein, 402 aa, Unknown
  Bacterial polypetide isolated from the Sargasso Sea
MSRPKGKITQVMGAVVDVQFDNHLPEILNALETKNDGQKLILEVAQHLGENTVRTIAMDSSEGLVRGAIVEDAGAPISVPVGNPTLGRILNVVGEPVDEQGPIKAKELRPIHQPAPEFSEQSTDTELLTTGIKVIDLLAPYSKGGKVGLFGGAGVGKTVLIMELINNIAKVHSGFSVFAGVGERTREGNDLYHEMIESGVINPKKLEESKVSLVYGQMNEPPGARARVGLTGLTLAEQFRDQSGTDVLFFVDNIFRFTQAGSEVSALLGRIPSAVGYQPTLATDMGALQERITSTKAGSITSVQAIYVPADDLTDPAPATSFAHLDATTVLSRAISELGIYPAVDPLDSNSRLMDPLIVGEEHYQVARDVQGILQRYKSLQDIIAILGMDELSEEDKLTVAR

SEQ ID NO: 174806 - protein, 249 aa, Unknown
  Bacterial polypetide isolated from the Sargasso Sea
MASLDDLKKRISSVKSTQKITKAMKMVAAAKLRRAQESAERGRPYSQKMNNIILNLSSGISDKENAPKLLAGTGEDKVHLCVVMTADRGLCGGFNSNIIKKAKSYFQKLSDSGKELKIITVGSKGYDQLKRAYKDNIIENISFKESKNANYFDADKVGKILIQKFEQKEFDVCTIFYNQFKNVITQIPQEQQIIPLKINEEEKSSDENYEFEPDEDEILGNLLPKNISTQIFKAMLENSASEQGSRMSA

SEQ ID NO: 174807 - protein, 434 aa, Unknown
  Bacterial polypetide isolated from the Sargasso Sea
MEINPSEVTKILKEQIKNFGDKAEVTEVGQVLSVGDGIARIYGLDNVQAGEMVEFADGSKGMALNLESENVGVVIFGDDRNIKEGDVVKRTGSIVDTPVGKELLGRVVDGLGNPIDGKGSLSKTVKKTRVEVKAPGIIPRQSVSEPMQTGLKSIDSLVPIGRGQRELIIGDRQTGKTAVAVDAIINQKKINESGDEKQKLYCIYVAVGQKRSTVRQIQKTLEEAGAMEYTTIVAATASDSAPLQFLAPYTGCAMGEYFRDNGMHALIIYDDLSKQAVAYRQMSLLLRRPPGREAYPGDVFYLHSRLLERAAKLSDEHGGGSLTALPIIETQGGDVSAFIPTNVISITDGQIFLETELFNQGIRPAINVGLSVSRVGSSAQTKAMKKVSGSMKLELAQYREMAAFAQFGSDLDASTQQLLNRGSKLTELLKQKQY

SEQ ID NO: 174808 - protein, 258 aa, Unknown
  Bacterial polypetide isolated from the Sargasso Sea
MGEYFRDNGMHALIIYDDLSKQAVAYRQMSLLLRRPPGREAYPGDVFYLHSRLLERAAKLSDEHGGGSLTALPIIETQGGDVSAFIPTNVISITDGQIFLETELFNQGIRPAINVGLSVSRVGSSAQTKAMKKVSGSMKLELAQYREMAAFAQFGSDLDASTQQLLNRGSKLTELLKQKQYSPLTVAEQVVSVFCGVKGYLDDIELKDVAEFESKIIERCKSEKPEIIEGIQNSGKLEDDKEKMLIEVITQLKGTFKS

SEQ ID NO: 174809 - protein, 158 aa, Unknown
  Bacterial polypetide isolated from the Sargasso Sea
MASLDDLKKRIASVKSTQKITKAMKMVAAAKLRKAQESAEKGRPYSEKMNNIILNLSNGIPDKENTSKLLSGTGNDKVHLCVVMTSDRGLCGGFNSNIIKKAKSYFSKISAEGKEFKIITVGSKGNDQLKRVYGEKIIENISFKESKNANYFDADKVG

SEQ ID NO: 174810 - protein, 466 aa, Unknown
  Bacterial polypetide isolated from the Sargasso Sea
MSGEMVEFPNNTFGMALNLERDSVGAVVLGDYQHLSEGDKVKCTGKILQVPVGDELMGRVVNSLGEPIDGKGEINAKNSSPIEKIAPGVIERQSVDQPVQTGLKSIDSMVPIGRGQRELIIGDRQTGKTALAIDAIINQKGTGIKCVYVAIGQKNSSVSNVVKKLEEHGAMEHTIVVASTASESAAMQFIAPYSGCAMGEYFRDSGQDALIIYDDLSKQAVAYRQVSLLLRRPPGREAFPGDVFYLHSRLLERAARVNADYVEKMTEGKVKGKTGSLTALPVIETQAGDVSAFVPTNVISITDGQIFLETSLFNSGLRPAINAGLSVSRVGGAAQTKLIKKLGGGIRLALAQYRELAAFSQFASDLDDQTRKQLERGERVMELMKQPQYSPLKISEMGVVLFAVNEGFLDEIEVNKVKDFEKSLLSFANSEYNDFMNNMESSGDFNDEIEKGLKEMLDKFVSTQTW

SEQ ID NO: 174811 - protein, 323 aa, Unknown
  Bacterial polypetide isolated from the Sargasso Sea
KIGLFGGAGVGKTVNMMELINNIALQHSGLSVFAGVGERTREGNDFYYEMQESGVVNIDNLGESKVAMVYGQMNEPPGNRLRVALTGLTMAESFRDEGKDVLLFIDNIYRYTLAGVEVSALLGRMPSAVGYQPTLAEEMGALQERITSTKTGSITSIQAVYVPADDLTDPSPATTFAHLDATVVLSRQISELGIYPAVDPLDSTSRQLDPFVVGDDHYEVAQGVQKILQRYNELKDIIAILGMDELSEEDKGLVARARKAQRFLSQPFFVAEIFTGTPGKYVSLEDTIKAFKGILNGDYDHLPEQAFYMVGTIEEAVEKAKTL

SEQ ID NO: 174812 - protein, 368 aa, Unknown
  Bacterial polypetide isolated from the Sargasso Sea
SDRWAIHRDAPQFVDQATETEILVTGIKVVDLLAPYSRGGKIGLFGGAGVGKTVIIMELINNIAKAHGGYSVFAGVGERTREGNDLYHEMLESGVNTLEGKDSKCALVFGQMNEPPGARARVALTGLTVAEYFRDMEGQDVLFFVDNIFRFTQAGSEVSALLGRIPSAVGYQPTLATDMGSLQERITSTNKGSITSVQAIYVPADDLTDPAPATSFAHLDATTVLSRQIAELGIYPAVDPLDSTSRILDPRIVGEEHYRVARNVQSVLQTYKSLQDIIAILGMDELSEEDKLTVSRARKIQRFMSQPFFVAEVFTGTPGIYVELDDTIKGFDAICKGEYDHLPEAAFYMVGTIEEAIKKSEKMAVEAA

SEQ ID NO: 174813 - protein, 449 aa, Unknown
  Bacterial polypetide isolated from the Sargasso Sea
IGAVVDVEFPKEAIPSVYDALTLKDGDLVFEVQQQLGDGIVRTIAMGASEGLKRGLEVENTGAPISVPVGQETLGRVLDVLGNPIDEKGPVGAKSNRPIHAKAPSFEEQSTEADVLETGIKVIDLLCPFAKGGKVGLFGGAGVGKTVTVMELIRNIAAEHDGFSVFAGVGERTREGNDFYHEMMESNVLDKVALVYGQMNEPPGNRLRVALTGLTIAENFRDEGRDVLMFIDNIYRYTLAGTEVSALLGRMPSAVGYQPNLAEEMGVLQERITSTKTGSITSIQAVYVPADDLTDPSPATTFAHLDATVVLARSIAELGIYPAVDPLDSNSRQLDPGIVGQEHYDTARSVQQVLQRYKELQDIIAILGMDELSEEDKLTVQRARKIQRFLSQPFFVAEVFTGSPGQYVSLRDSIKAFQGIVAGDYDDLPEQAFYMVGTIEEAVEKAKSM

SEQ ID NO: 174814 - protein, 180 aa, Unknown
  Bacterial polypetide isolated from the Sargasso Sea
MEGSITSIQAVYVPADDLTDPAPATTFAHLDATTVLSRGLASKGIYPAVDPLDSTSTMLQPAVVGDEHYKTARAVQSTLQRYKELQDIIAILGLDELSEDDRLTVDRARKVEKFLSQPFFVAEIFTGMPGQYVKLDETIKGFQMILSGELDDLPEAAFYLVGNIDQVKAKAEKIRSEAKG

SEQ ID NO: 174815 - protein, 468 aa, Unknown
  Bacterial polypetide isolated from the Sargasso Sea
MKHYNYRGNQMSEGIVVQVIGAVIDVEFSRENLPKVYDALSIEESGLVLEVQQQLGDGVVRTIAMGQTEGLKRGTKVVNTGDAVTVPVGEKTLGRILNVLGDPIDGKGDVGEEERMPIHRDPPSYEEQAESSEILETGIKVIDLMCPFAKGGKVGLFGGAGVGKTVNMMELIRNIAYETSGYSVFAGVGERTREGNDFYLEMTESQVLDKVALVYGQMNEPPGCRMRVALSGLTIAEKFRDEGRDVLLFIDNIYRYTLAGVECSSLLGRMPSAVGYQPTLAEEMGVLQERITSTKTGSITSVQAIYVPADDLTDPSPATTFAHLDATVVLSRQIASLGIYPAVDPLDSTSRQLDPNIVGQEHYEVAKGVQQVLQRYLELKDIIAILGMDELSDEDKQTVNRARRIEKYLSQPFFVAEIFTNSPGKFVSIKDTVRGFKGILDGEYDDLPEQAFLMVGAIEEVVEKAKTL

SEQ ID NO: 174816 - protein, 306 aa, Unknown
  Bacterial polypetide isolated from the Sargasso Sea
VAVGQKRSTVAQIVKTLEENGALDYSIIVAATASDPAPMQFLAPYSAASMGEYFRDNGMHAVIVYDDLSKQAVAYRQMSLLLRRPPGREAYPGDVFYLHSRLLERAAKMNKDNGSGSLTALPVIETQGGDVSAFIPTNVISITDGQIFLETELFYKGVRPAVNVGLSVSRVGSAAQIKAMKQVAGTIKLDLAQYREMAAFAQFASDLDASTRQLLARGERLTELLKQSQYDPLAVEEQVAVIFAGVNGYLDKISVSQIGDFERSLLQNLRSSGVSIIDSIKKEKALNEKSEKELIKIIENLLKNYN

SEQ ID NO: 174817 - protein, 328 aa, Unknown
  Bacterial polypetide isolated from the Sargasso Sea
MEINPSEVTKILKEQIKKFGDKAEVTEVGQVLSVGDGIARIYGLDNVQAGEMVEFADGSKGMALNLESDNVGVVIFGDDRAVKEGDTVKRTGAIVDTPVGKELLGRVVDGLGNPIDGKGTLDKGIKRSRVEVKAPGIIPRKSVSEPMQSGLKSVDSLVPIGRGQRELIIGDRQTGKTAVAIDTIINQKKINESNDEKQKLYCIYVAIGQKRSTVRQIEKSLEEAGAMEYTTIVAATASDAAPLQFLAPYTGCAMGEYFRDNGMHALIIYDDLSKQAVAYRQMSLLLRRPPGREAYPGDVFYLHSRLLERAAKLSDEHGGGSLTALPHY

SEQ ID NO: 174818 - protein, 293 aa, Unknown
  Bacterial polypetide isolated from the Sargasso Sea
MSDSLGRVVKIAGPVVDVAFAQDSLPEITNALEVDVEIDGSKSTIVLEVAQHLGEGRVRAISMQGTDGLRRGAEVSDTGAPISVPVGQETLGHIFNVWGETLDVETSSIGVKQKWPIHRQPPPYEEVTAQNEMFETGIKVIDLLMPYVQGGKIGLFGGAGVGKTVLIQEMINRVATQHGGVSVFAGVGERTREGNDLFREMQESGVIDKTALVFGQMDEPPGVRLRVALSALTMAEYFRDEEKQDVLLFIDNIFRFSQAGSEVSTLLGRMPSAVGYQPTLADEMGFLQERITC

SEQ ID NO: 174819 - protein, 108 aa, Unknown
  Bacterial polypetide isolated from the Sargasso Sea
MPQLRHGPSTDAVQATLSRGFASNPSAGSVTQVIGAVVDVQFEGELPSILSALEVQGHEIRLVLEVAQHLGENTVRTIAMDTTEGLVRGQPVLNMGSPIQVRFRSDEK

SEQ ID NO: 174820 - protein, 465 aa, Unknown
  Bacterial polypetide isolated from the Sargasso Sea
MPKNGKISQVMGAVVDVVFEDGHLPDIYNALTVDRGEEGTLVLEVAQHLGDSVVRTVAMDTTDGLVRGHVVEDSGEPISVPVGEKTLGRLFDVLGNTIDQKGDCKTENRNPIHRPAPKHEDLATSTEALVTGIKVVDLMEPYTRGGKTGLFGGAGVGKTVLIQELIRNIATEHGGYSVFAGVGERTREGNDLYAEMTESGVIDKTTMVFGQMNEPPGARLRVALSGLAMAEFFRDDEGRDVLLFIDNIFRFTQAGSEVSALLGRMPSAVGYQPTLSTEMGDLQERITSTKKGSITSVQAVYVPADDLTDPAPATAFAHLDATSVLERKIAELGIYPAVDPLASTSRILDPRIIGEKHYNVARDVQSVLQQYKDLQDIIAILGMDELSDTDKLTVARARKIQKFMSQPFFVAEQFTGTPGRYVSLEDTVSGFDAILKGEVDELPENAFAYVGTIDEAIEKHKKSAA

SEQ ID NO: 174821 - protein, 513 aa, Unknown
  Bacterial polypetide isolated from the Sargasso Sea
MSISATEISDLIKKKIKELDLDTEERTEGTVVGLADGVARIHGLGDVMQGEMIEFPGNTYGLALNLERDSVGAVIMGSYEHISEGDVVKCTKRILEVPVGEALLGRVVDALGNPIDGKGEIDTKESSPIEKIAPGVIARKSVSQPVQTGLKSIDSMVPIGRGQRELIIGDRQTGKTAVAIDAIINQKGTGVKCIYVAIGQKASSINVVIRKLEEHGAMEHTIVVAATASESAAMQYIAPYGGCAMGEYFRDLGEDALIIYDDLTKQAWAYRQVSLLLKRPPGREAYPGDVFYLHSRLLERASRINEDYVEKITNGKVKGKTGSLTALPIIETQAGDVSAFVPTNVISITDGQIFLESDLFNSGFRPAINAGLSVSRVGGAAQTKIIKKLGGGVRLAMAQYRELAAFAQFASDLDEATRKQLERGQRVMELMKQKQYSPLNVAEMGVSLFAVENGYIDDIELEKIGAFEAALHDYMKSEQSTLLDKIGPEGNYDDGIETELKSAIDNFKKNNTW

SEQ ID NO: 174822 - protein, 160 aa, Unknown
  Bacterial polypetide isolated from the Sargasso Sea
FLGTDLFNSGIRPAINVGISVSRVGGAAQTKIIKKLGGTVKLALAQFRELESFSQFASDLDDATKEQLENGQRITELFKQTQFAPRSVACIAIVLYAIENKYLTDVEKDKMQSFEENLRTHFKSNYGDVWEEVNKTGDWNDDLDKKFKEIVSSFMKEGSW

SEQ ID NO: 174823 - protein, 434 aa, Unknown
  Bacterial polypetide isolated from the Sargasso Sea
DNRLVLEVAQHLGETTVRTIAMDATEGLKRGDEVINTNAPIQVPVGPETLGRIINVIGEPIDERGVVKTKESWPIHRAAPEFNDQSTETEILVTGIKVIDLLAPYAKGGKIGLFGGAGVGKTVLIMELINNVAKAHGGFSVFAGVGERTREGNDLYHEMIESGVIKKEGAGSKAALVYGQMNEPPGARARVALTGLTVAEYFRDQEGQDVLFFVDNIFRFTQAGSEVSALLGRIPSAVGYQPTLATDMGNLQERITTTNKGSITSVQAIYVPADDLTDPAPATSFAHLDATTVLSRQIAEIGIYPAVDPLDSTSRILDPRIVGDEHYRVARDVQRILQSYKSLQDIIAILGMDELSEEDKLVVARARKIQRFLSQPFFVAEVFTGSPGKLVDLDSTIKGFDAICKGEYDHLPEAAFYMVGTIEEAIEKAKKMEQ

SEQ ID NO: 174824 - protein, 291 aa, Unknown; identical to SEQ ID NO: 174793
  Bacterial polypetide isolated from the Sargasso Sea

SEQ ID NO: 174825 - protein, 411 aa, Unknown
  Bacterial polypetide isolated from the Sargasso Sea
MDISAAEISKILKEQIADYGSEASVSETGRVLSIGDGIARVYGLDKVQLGEMVEFEGGIRGMALNLESDNVGVVIFGDDRAIKEGDTVKRTKSIVDVPVGKELLGRVVDGLGNPIDGKGPIAKSAKRSRVEVKAPGIMPRKSVHEPMMTGLKAIDSLVPIGRGQRELIIGDRQIGKTAIAIDTFINQKETNDAAGKDDSKKLFCIYVAVGQKRSSVAQIVKTLEEYGAMEYSIVVASTASESAPMQFLAPYTAAAMGEYFRDNGMHAVVVYDDLSKQAVAYRQMSLLLRRPPGREAFPGDVFYLHSRLLERAAKVNDKLGSGSLTALPIIETQAGDLSAFIPTNVISITDGQIFLESELFYRGIRPAVNVGLSVSRVGSAAQTKAMKKVAGSIKLELAQYREMAAFAQFAS

SEQ ID NO: 174826 - protein, 311 aa, Unknown
  Bacterial polypetide isolated from the Sargasso Sea
MSNGVVTQIIGAVIDVEFDRENIPSVYEALNIVGLETVLEVQQQLGDGIVRTIAMGSTEGLKRGLEVVRTNAPISVPVGQETLGRIMDVLGNPIDEKGDIGEKERQPIHKSPPSYTDQAGSNELLETGIKVIDLMCPFAKGGKVGLFGGAGVGKTVNMMELIRNIAIEHSGFSVFAGVGERTREGNDFYHEMTESNVLDKVSLVYGQMNEPPGNRLRVALTGLTIAEKFRDEGRDVLLFIDNIYRYTLAGVEVSALLGRMPSAVGYQPTLAGEMGALQERITSTKTGSITSIQAVYVPADDLTDPSPATTF

SEQ ID NO: 174827 - protein, 524 aa, Unknown
  Bacterial polypetide isolated from the Sargasso Sea
MQKIKPAEVSALLKKQLDSADIQSSFDEIGTVLEVGDGIARVYGLTNAQYGELVAFENGLQGMVLNLEEDHVGVVLFGPSKEIKEGDNVKRTNQIASIKVGEGILGRVVDTLGNPIDGKGPIKGELFDMPIERKAPGVIFRQPVNEPLQTGIKSIDAMIPIGRGQRELVIGDRQTGKTTVCIDTILNQKEFYDAGEPVFCIYVAIGQKASTVAAIAKTLEDKGALAYTVIVAANASDPAPMQVFAPFSGACIGEYFRDTGRPALIIYDDLSKQAVAYREVSLLLRRPPGREAYPGDVFYLHSRLLERSAKVVNDDKVASGMNDLPDSLKSKVKGGGSLTALPIIETQAGDVSAYIPTNVISITDGQIFLESDLFNSGVRPAINVGISVSRVGGSAQIKSMKKVAGTLKLDQAQYRELEAFSKFGSDLDAATLNVIEKGRRNVEILKQNQNDPFQVEDQVAIIYAGSQNLLKDVPVEKVKAFEEAFLQELRKNYKKLLSELKAGKISDKETDEIKKVTEKIAKSF

SEQ ID NO: 174828 - protein, 352 aa, Unknown
  Bacterial polypetide isolated from the Sargasso Sea
MDELNPSEISQVIRQKIDALDTTSAPSNEGTIVFLADGIARIHGLGEVMNGELIEFEHGVMGMALNLERDSVGAVVLGDYKLLSEGGSAKCTGRILEVPVGEAMLGRVVDALGNPIDGKGEIKAESSSPVEKVAPGVISRKSVDQPVQLGIKAIDSMVPIGRGQRELIIGDRQTGKTAIAIDAIINQKETGIRCVYVAVGQKQSSIAQVVRTLEKYGVMDNTIVVAAAAADPAPMQYIAPFSACSMGEYFRDKGEDALIVYDDLSKQAVAYRQMSLLLRRPPGREAYPGDVFYLHSRLLERAARVSEDYVEKYTDGKVKGKTGSLTALPIIETQAGDVSAFVPTNVISITDG

SEQ ID NO: 174829 - protein, 481 aa, Unknown
  Bacterial polypetide isolated from the Sargasso Sea
MDIRAAEISTILKDQIENFGVDAEVTEVGKVLSVGDGIARVYGLDQIQAGEMVEFPGSIAGMALNLERDNVGVVIFGSDKTIREGDVVKRTGSIVDVPIGKGLLGRVVDALGNPIDGKGALKNVKRSRVETKAPGIMPRESVSEPMQTGLKAIDSLIPVGRGQRELIIGDRQTGKTAIAIDTFLNQKSTNDKAGKDDTKKLFCIYVAVGQKRSTVAQIVKTLEERGALEYSIVVAATASDPAPMQFLAPYSAAAMGEFFRDNGMHAVVVYDDLSKQAVAYRQMSLLLRRPPGREAYPGDVFYLHSRLLERAAKLNGDNGSGSLTALPIIETQGGDVSAFIPTNVISITDGQIFLETELFYKGIRPAVNVGLSVSRVGSSAQIKAMKQVAGTIKLDLAQYREMAAFAQFASDMDASTRQLLSRGERLTELLKQPQYSPMDVEEQVAVIFAGVKGYLDQIPTQKIGEFEQSLIQKLNTKGSNI

SEQ ID NO: 174830 - protein, 316 aa, Unknown
  Bacterial polypetide isolated from the Sargasso Sea
MANLKEIRDRIVSVKNTRKITEAMRLVAAAKVRRAQDQVLKSRPFADKLARVLENIQSRVQFEAVDSPLLSKREVKRITLVCITADRGLCGGYNTNIIKKVEIRYAELVKQGYQPNLILVGKKAIGYFQNRKDRYVIKTTFKELEQVPTVKDSEGVTNEILAEFLSENSDRVEIIYTKFITLVSCAPVVQTLLPLDPQGIAEENDEIFRLTTKDSKLLVEKSNIEKSESEKLPSDIVFEQSPDQLLDSLLPLYLQNQVLRALQESAASELACRMTAMNNASDNAKELASTLNLTYNKARQAAITQEILEVVGGSAV

SEQ ID NO: 174831 - protein, 430 aa, Unknown
  Bacterial polypetide isolated from the Sargasso Sea
VAQHLGENEVRTIAMDSTDGLVRGMEVIQTGAPITVPVGPETLGRILNVIGDPVDDGKPVKSKTSLPIHRDAPEYVDQSTSADILVTGIKVVDLLAPYAKGGKIGLFGGAGVGKTVLIMELINNVAKAHGGYSVFAGVGERTREGNDLFHEMVESGVIVPDGPGSKAALVYGQMNEPPGARARVALTGLTLAEYFRDQEGQDVLFFVDNIFRFTQAGSEVSALLGRIPSAVGYQPTLATDMGALQERITTTTKGSITSVQAIYVPADDLTDPAPATSFAHLDATTVLSRQIAEIGIYPAVDPLDSTSRMLDPRIVGDEHYAVARKVQEVLQQYKSLQDIIAILGMDELSEEDKLVVNRARKIQRFLSQPFHVAEVFTGSPGVLVPLEDTIKGFKGIADGEYDDLPEAAFYMVGTIEEAMEKAKKLAKDAA

SEQ ID NO: 174832 - protein, 376 aa, Unknown
  Bacterial polypetide isolated from the Sargasso Sea
IINVTGDPVDEAGPIKTDERWSIHREAPTFADQETDAQMLVTGVKVMDLLCPFLKGGKIGLFGGAGVGKTVVIMELIRNIAAEHGGFSVFAGVGERTREGNDLWNEMKESGVLDKTSLVYGQMNEPPGARARVALTGLTVAEYFRDEEAADVLMFIDNIFRFTQAGSEVSALLGRIPSAVGYQPTLSTEMGNLQERITSTNKGSITSVQAIYVPADDLTDPAPATTFSHLDATVVLSRAITELGIYPAVDPLDSTSRILSADVLGDDHYSVAHEVQILLQRYKDLQDIIAILGMDELSEEDKVVVSRARKVQRFLSQPFFVAETFTGTSGEYVDIKDTIKGFREILDGKHDDLPEQAFYMVGTIEQVMEKAKKLSN

SEQ ID NO: 174833 - protein, 514 aa, Unknown
  Bacterial polypetide isolated from the Sargasso Sea
MEELNPSEISQVIKQKIDALDTASTPSNEGTIVFLADGIARIHGLGEVMNGELIEFEHGVMGMALNLEVDSVGAVILGDYKLLAEGGSAKCTGRILEVPVGEALMGRVVDALGNPIDGKGEVQTDQTAPVEKVAPGVISRKSVDQPVQLGIKAVDSMVPIGRGQRELIIGDRQTGKTAIAIDAIINQKDTGVKCIYVAIGQKQSSIAQVVRTLEQYGAMENTIVVVAAAADPAPMQYIAPFAACSMGEYFRDRGEDALIIYDDLSKQAVAYRQMSLLLRRPPGREAYPGDVFYLHSRLLERAARVNEEYVENHTNGEVKGKTGSLTALPIIETQAGDVSAFVPTNVISITDGQIFLESSLFSSGLKPAMDPGISVSRVGGAAQVPIIKKLGGGIKTALAQYRELEAFAQFASDLDEASKEQLEHGVRVTELTKQDQFSPMSVAEMGLMLYTANEGYLRQVEVEKIKDFEKSLIAYMNSEHKDLMDKVSETGEYGDDIQNAFKEALDKFMETQTW

SEQ ID NO: 174834 - protein, 287 aa, Unknown
  Bacterial polypetide isolated from the Sargasso Sea
MRKGQITQIIGAVVDVKFDGELPEILTALECDNGGNRLVLEVAQHLGESSVRTIAMDATEGLKRGDVVKDTAAPIKVPVGPETLGRIINVIGEPIDERGEVKSSDNWPIHRAAPEFNDQSTETEILVTGIKVIDLLAPYAKGGKIGLFGGAGVGKTVLIMELINNVAKAHGGFSVFAGVGERTREGNDLYHEMIDSGVIKTDGEGSKAALVYGQMNEPPGARARVALTGLTVAEYFRDQEGQDVLFFVDNIFRFTQAGSEVSALLGRIPSAVGYQPTLATDMGNLQE

SEQ ID NO: 174835 - protein, 95 aa, Unknown
  Bacterial polypetide isolated from the Sargasso Sea
LQDIIAILGMEELSEEDKLVVSRARRVQRFLSQPFHVAEQFTGIPGVLVDIKDTIKGFNMIMDGELDHLPEAAFNLKGTIEEAIEAGEKMIAEAK

SEQ ID NO: 174836 - protein, 288 aa, Unknown
  Bacterial polypetide isolated from the Sargasso Sea
VFAGVGERTREGNDFYHEMTDSNVLDKVSLVYGQMNEPPGNRLRVALTGLTMAEKFRDEGRDVLLFVDNIYRYTLAGVEVSALLGRMPSAVGYQPTLAEEMGVLQERITSTKTGSITSIQAVYVPADDLTDPSPATTFAHLDATVVLSRRIAELGIYPAVDPLDSTSRQLDPLVVGQEHYEVAQRVQGVLQRYKELKDIIAILGMDELSDEDKNTVSRARKVEKFLSQPFFVAEVFTGAPGKYVSVKDTIQGFKEILDGVHDDVPEQAFYMVGSIEEVLEKAKTVKSD

SEQ ID NO: 174837 - protein, 472 aa, Unknown
  Bacterial polypetide isolated from the Sargasso Sea
MSKGIITQVIGAVVDVKFDGELPEILTALECKNGNNRLVLEVAQHLGETTVRTIAMDATEGLKRGDEVINTNAPIQVPVGPETLGRIINVIGEPIDERGEVKTKESWPIHRGAPEFNDQSTETEILVTGIKVIDLLAPYAKGGKIGLFGGAGVGKTVLIMELINNVAKAHGGFSVFAGVGERTREGNDLYHEMIESGVIKQDGPGSKAALVYGQMNEPPGARARVALTGLTVAEYFRDQEGQDVLFFVDNIFRFTQAGSEVSALLGRIPSAVGYQPTLATDMGNLQERITTTNKGSITSVQAIYVPADDLTDPAPATSFAHLDATTVLSRQIAEIGIYPAVDPLDSTSRILDPRIVGDEHYRVARDVQRILQSYKSLQDIIAILGMDELSEEDKLVVARARKIQRFLSQPFFVAEVFTGSPGKLVDLDSTIKGFDAICKGEYDHLPEAAFYMVGTIEEAIEKAKKMEQEAAA

SEQ ID NO: 174838 - protein, 290 aa, Unknown
  Bacterial polypetide isolated from the Sargasso Sea
MASLDDLKKRIASVKSTQKITKAMKMVAAAKLRRAQESAERGRPYSEKMNNIILNLSSGISDKENAPKLLSGTGENKVHLCVVMTSDRGLCGGFNSNIIKKAKSYFSKILNEGKQLKIITVGSKGNDQLKRVYGDKIIENISFKESKNANYFDADKVGRIIIEKFEAGEFDICTIFYNQFKNVITQLPQAQQIIPLNNEEDHNNSDESYEFEPDEDEILSNLLPKNISTQIFKAMLENSASEQGSRMSAMDNATRNAGEMVDKLTIEYNRSRQAAITKELIEIISGAESL

SEQ ID NO: 174839 - protein, 511 aa, Unknown
  Bacterial polypetide isolated from the Sargasso Sea
MEINPSEVTKILKEQIKNFGEKAEVAEVGQVLSVGDGIARIYGLDNVQAGEMVEFADGSKGMALNLESENVGVVIFGDDRNVKEGDVVKRTGNIVDTPVGKELLGRVVDGLGNPIDGKGPFDKNIKKTRVEVKAPGIIPRQSVNEPMQTGLKSIDSLVPIGRGQRELIIGDRQTGKTAVAVDAIINQKKINESGDEKQKLYCIYVAVGQKRSTVRQIQKTLEEAGAMEYTTIVAATASDSAPLQFLAPYTGCAMGEYFRDNGMHALIIYDDLSKQAVAYRQMSLLLRRPPGREAYPGDVFYLHSRLLERAAKLSDEHGGGSLTALPIIETQGGDVSAFIPTNVISITDGQIFLETELFNQGIRPAINVGLSVSRVGSSAQTKAMKKVSGSMKLELAQYREMAAFAQFGSDLDASTQQLLNRGSKLTELLKQKQYSPLTVAEQVISVFCGVKGYLDDIDLKDVSEFESKIINKCKSDKPEIIEAIQSTGKLDEDKEKLLVEVITQLKGTFKS

SEQ ID NO: 174840 - protein, 472 aa, Unknown
  Bacterial polypetide isolated from the Sargasso Sea
MSKGIITQVIGAVVDVKFDGELPEILTALECKNGDNRLVLEVAQHLGETTVRTIAMDATEGLKRGDEVTNTNAPIQVPVGPETLGRIINVIGEPIDERGEVKTKESWPIHRAAPEFNDQSTETEILVTGIKVIDLLAPYAKGGKIGLFGGAGVGKTVLIMELINNVAKAHGGFSVFAGVGERTREGNDLYHEMIESGVIKKEGAGSKAALVYGQMNEPPGARARVALTGLTVAEYFRDQEGQDVLFFVDNIFRFTQAGSEVSALLGRIPSAVGYQPTLATDMGNLQERITTTNKGSITSVQAIYVPADDLTDPAPATSFAHLDATTVLSRQIAEIGIYPAVDPLDSTSRILDPRIVGDEHYRVARDVQRILQSYKSLQDIIAILGMDELSEEDKLVVARARKIQRFLSQPFFVAEVFTGSPGKLVDLDSTIKGFDAICKGEYDHLPEAAFYMVGTIEEAIEKAKKMEQEAAA

SEQ ID NO: 174841 - protein, 473 aa, Unknown
  Bacterial polypetide isolated from the Sargasso Sea
MSEINQGKVVQVMGAVVDVKFDDHLPAILDALQVEQDGKKLVLEVAQHLGENSVRTIAMDTTEGLKRGQSVESTGAPISVPVGEETLGRIINVVGEPVDQKGDLKASKTRPIHQNAPEFVDQSTEKEILVTGIKVVDLLCPYSKGGKIGLFGGAGVGKTVLIMELINNIAKAHGGYSVFAGVGERTREGNDLYWEMIESGVNKEGGGDGSKCSLVYGQMNEPPGARARVALSGLSVAEHFREEGQDVLFFVDNIFRFTQAGSEVSALLGRIPSAVGYQPTLAIDMGNLQERITSTNKGSITSVQAIYVPADDLTDPAPATSFAHLDATTVLSRAISEKGIYPAVDPLDSNSRILEADIVGEEHYNVARDVQEILQKYKSLQDIIAILGMDELSEEDKLTVARARKIERFFSQPFHVAEVFTGSPGILVDINDTIKGFKGLCNGDYDHLPEAAFYMVGTIEDAIKKGEELAKEE

SEQ ID NO: 174842 - protein, 506 aa, Unknown
  Bacterial polypetide isolated from the Sargasso Sea
MVSIRPDEISAILKKQIEDYDKSVSVSNVGSVLQVGDGIARVYGLQEAMAGELLEFEDGTEAIALNLEDDNVGAVLMGEGLGVQEGSTVKATGKIASVPVGEATLGRVVNSLGQPIDGKGDIAATEMRLIESMAPGIIQRKSVHEPMQTGITAIDAMIPVGRGQRELIIGDRQTGKTAIAIDTILNQKDQDMICVYVAVGQKAASVANVVEVLRERGALDYTVVVAANASEPAALQYLAPYTGASIAEYFMYKGKATLVIYDDLSKQAAAYRQMSLLLRRPPGREAYPGDVFYLHSRLLERAAKLSDAMGKGSMTALPIIETQAGDVSAYIPTNVISITDGQIFLSSDLFNSGLRPAINVGVSVSRVGGAAQTKAIKKIAGTLKLELAQFDELAAFSQFASDLDAATQKQLGRGKRLRELLKQPQFSPLILAEQVAIVYAGVKGLIDDVPVESIVDFSRELREYLKSNKPEFINEIQEKKVMSPEAEAILKDAINEVVSNLVASAS

SEQ ID NO: 174843 - protein, 265 aa, Unknown
  Bacterial polypetide isolated from the Sargasso Sea
FRDKGEDALIVYDDLSKQAVAYRQVSLLLKRPPGREAYPGDVFYLHSRLLERAARVNADYVEQITGGEVKGKTGSLTALPIIETLAGDVSAFVPTNVISITDGQIYLETELFNSGIRPAINPGLSVSRVGGSAQTKIMKKLAGGVRTALAQYRELAAFSQFASDLDEATKQQLANGRAFTELLKQKQYAPMSVAQQALSLFAADRGYMADIEVEKILDFEEALHGYLTAEKGELEQQINSTGDWNDDIENQFKELVEDFKKTQTF

SEQ ID NO: 174844 - protein, 358 aa, Unknown
  Bacterial polypetide isolated from the Sargasso Sea
EIKTEMTAPVEVVAPGVIARQSVDQPVQIGLKAVDAMVPIGRGQRELIIGDRQTGKTAVAVDAIINQKGTGIKCIYVAIGQKQSTVVNVVKKLEEHGALEHTIIVSASASDPAPMQYLSAYSGCSMGEYFRDKGEDALIVYDDLSKQAVAYRQVSLLLKRPPGREAYPGDVFYLHSRLLERAARVNADYVEKATNGKVKGKTGSLTALPIIETQAGDVSAFVPTNVISITDGQIFLETDLFNSGIRPAINPGISVSRVGGAAQTKIMKKLSGGVRTALAQYRELAAFSQFASDLDDATKAQLARGIRITELIKQKQYSPMSVAQQSLSIFAADRGYMDDVEVEKIGSFEEGIAWLLYI

SEQ ID NO: 174845 - protein, 374 aa, Unknown
  Bacterial polypetide isolated from the Sargasso Sea
GIKSIDAMIPIGRGQRELVIGDRQTGKTTVCIDTILNQKEFYDAGEPVFCIYVAIGQKASTVAGIAKTLEEKGALDYTVIVAANASDPAPMQVFAPFSGACIGEYFRDTGRPALIIYDDLSKQAVAYREVSLLLRRPPGREAYPGDVFYLHSRLLERSAKVVNDDKVASGMNDLPASLKSKVKGGGSLTALPIIETQAGDVSAYIPTNVISITDGQIFLESDLFNSGVRPAINVGISVSRVGGSAQIKSMKKVAGTLKLDQAQYRELEAFSKFGSDLDAATLNVIEKGRRNVEILKQNQNDPFQVEDQVAIIYAGSQNLLKEVPVEKVKAFEEAFLQELRKNNKKLLAELKSGKISDKETDEIKKVAEKVAKSF

SEQ ID NO: 174846 - protein, 371 aa, Unknown
  Bacterial polypetide isolated from the Sargasso Sea
MSKGIITQVIGAVVDVMFDGELPEILTALECKNGDNRLVLEVAQHLGETTVRTIAMDATEGLKRGDEVTNTNAPIQVPVGPETLGRIINVIGEPIDERGEVKTKESWPIHRAAPEFNDQSTETEILVTGIKVIDLLAPYAKGGKIGLFGGAGVGKTVLIMELINNVAKAHGGFSVFAGVGERTREGNDLYHEMMESGVIKQDGPGSKAALVYGQMNEPPGARARVALTGLTVAEYFRDQEGQDVLFFVDNIFRFTQAGSEVSALLGRIPSAVGYQPTLATDMGNLQERITTTNKGSITSVQAIYVPADDLTDPAPATSFAHLDATTVLSRQIAEIGIYPAVDPLDSTSRILDPRIVGDEHYKVARDYKKYY

SEQ ID NO: 174847 - protein, 288 aa, Unknown
  Bacterial polypetide isolated from the Sargasso Sea
REGNDLYHEMIESGVIKPDGAGSKAALVYGQMNEPPGARARVALSGLTVAEYFRDQEGQDVLFFVDNIFRFTQAGSEVSALLGRIPSAVGYQPTLATDMGNLQERITTTNKGSITSVQAIYVPADDLTDPAPATSFSHLDATTVLSRQIAELGIYPAVDPLDSTSRILDPRIVGDEHYRVAREVQKVLQTYKSLQDIIAILGMDELSEEDKLTVARARKIQRFLSQPFFVAEVFTGSPGKLVELEATIKGFDAICKGEYDHLPEAAFYMVGTIEEAIEKAEKMSKDAA

SEQ ID NO: 174848 - protein, 361 aa, Unknown
  Bacterial polypetide isolated from the Sargasso Sea
AAPVFNDQSTETEILVTGIKVIDLLAPYAKGGKIGLFGGAGVGKTVLIMELINNVAKAHGGFSVFAGVGERTREGNDLYHEMMESGVIKQDGPGSKAALVYGQMNEPPGARARVALTGLTVAEYFRDQEGQDVLFFVDNIFRFTQAGSEVSALLGRIPSAVGYQPTLATDMGNLQERITTTNKGSITSVQAIYVPADDLTDPAPATSFAHLDATTVLSRQIAEIGIYPAVDPLDSTSRILDPRIVGDEHYKVARDVQKILQSYKSLQDIIAILGMDELSEEDKLVVARARKIQRFLSQPFFVAEVFTGSPGKLVDLESTIKGFDAICKGEYDHLPEAAFYMVGTIEEAIEKAEKMKKEAAA

SEQ ID NO: 174849 - protein, 256 aa, Unknown
  Bacterial polypetide isolated from the Sargasso Sea
SGALKRSVLFLNLADDPAIERIITPRVALTVAEYLAYDLGMHVLVILTDMTNYAEALREISAAREEVPGRKGYPGYLYTDLSTIYERAGRLRGKKGSVTQVPILTMPSDDITHPIPDLTGYITEGQLVLGRDLFRQGVYPPINILMSLSRIMKDGIGEGSTRADHQEISNQNYDAYSRAQEVRALAGIVGKAGLTPVDLNYMNFGDEFEKKFLTQAIDENRTIEETLGLQWNCVSKLPKNELTKVKDKYVEQYYKE

SEQ ID NO: 174850 - protein, 117 aa, Unknown
  Bacterial polypetide isolated from the Sargasso Sea
QLDPLVIGNEHYDVARNVQNMLQKYKELKDIIAILGMDELSEEDKLVVARARKIQRFLSQPFFVAEVFTGSQGKYVSLKETIKGFKAIADGEYDHLPEQAFYMIGAIEEAEERAKEL

SEQ ID NO: 174851 - protein, 297 aa, Unknown
  Bacterial polypetide isolated from the Sargasso Sea
MPSLKDIKNQINSVGSTKKITSAMKMVAASKLRRSQEKAEAARPYSSRLEEMLVSLASSVASGDGIIKLLTGTGNDQNYVIIPVSADRGLCGGFNSSINRETFKLVKSLEKDGKKVELMPVGKKSRDFFNRVMKDQILESFVDLNVSQSGYDSALQVSNKLQELFFEGKFDKCILVFNKFKSVISQEVTQQQLIPLDVSNSPKEENPDDNVVKAIYDYEPDEETILKDLLPKNVSIQIFKVLLESDAGEHGARMAAMDNATRNAGEMIDSLTLKYNRTRQAFITKELIEIISGAESV

SEQ ID NO: 174852 - protein, 145 aa, Unknown
  Bacterial polypetide isolated from the Sargasso Sea
LSRQIAELGIYPAVDPLDSTSRILDPRILGEEHYRVARQVQKILQTYKSLQDIIAILGMDELSEEDKLTVARARKIQRFLSQPFFVAEVFTGTPGKLVSLDATIKGFDSICKGEYDHLPEAAFYMVGTIEEAIAKAEKMAKEAAA

SEQ ID NO: 174853 - protein, 392 aa, Unknown
  Bacterial polypetide isolated from the Sargasso Sea
SSDQTAPIEKVAPGVISRLSVDQPVQTGLKSIDAMVPIGRGQRELIIGDRQTGKTAVAVDTIINQKGTGIKCIYVAVGQKNSSVANVVKKLEEEGALEHTIIVNAAASDSAAMQYIAPYSGCAMGEYFRDKGEDALIIFDDLTKQAWAYRQVSLLLKRPPGREAYPGDVFYLHSRLLERAARVNAEYVEKETGGKVKGQTGSLTALPIIETQAGDVSAFVPTNVISITDGQIYLESDLFNAGIRPAINAGLSVSRVGGAAQTKIIKKLGGGVRLALAQYRELAAFAQFASDLDEATRKQLERGQRVTELMKQKQYAPLTVAEMAVSLYAANEGYLDDVPADKIVDFEAALHANFVESASDLAQKINDTGDYNDEIETELKKFVEDFKATGTY

SEQ ID NO: 174854 - protein, 95 aa, Unknown
  Bacterial polypetide isolated from the Sargasso Sea
MANEKEIRTKIGSVKNTQKITKAMEMVAASKMRRTQETMKKALPYADKIRAVIGHIYKANPDYKHPFLEKREVKTTGYIVVSSDRGLCGGLNVNM

SEQ ID NO: 174855 - protein, 511 aa, Unknown
  Bacterial polypetide isolated from the Sargasso Sea
MEINPSEVTKILKEQIKKFGDKAEVTEVGQVLSVGDGIARIYGLDNVQAGEMVEFSDGSKGMALNLESENVGVVIFGDDKAVKEGDTVKRTGAIVDTPVGKELLGRVVDGLGNPIDGKGALDKSVKRSRVEVKAPGIIPRKSVSEPMQTGLKSIDSLVPIGRGQRELIIGDRQTGKTAVAIDAIINQKKINESGDEKIKLYCIYVAVGQKRSTVRQIEKTLEEAGAMEYTTIVAATASDAAPLQFLAPYTGCAMGEYFRDNGMHALIIYDDLSKQAVAYRQMSLLLRRPPGREAYPGDVFYLHSRLLERAAKLGDEHGGGSLTALPIIETQGGDVSAFIPTNVISITDGQIFLETELFNQGIRPAINVGLSVSRVGSSAQTKAMKKVSGSMKLELAQYREMAAFAQFGSDLDASTQKLLNRGSKLTELLKQNQYSPMTVAEQVISVFCGVKGHLDDIDQKDIASFENKIIEKCKAEKSDIIDSISSSGKLEDDKEKELNEIILELKKDFKS

SEQ ID NO: 174856 - protein, 374 aa, Unknown
  Bacterial polypetide isolated from the Sargasso Sea
MKKGKITQIIGAVVDVKFEGDLPEILTALECKNGDNRLVLEVAQHLGESSVRTIAMDATEGLKRGDEVLDTGAPIKVPVGPETLGRIVNVIGEPIDEKGEVKTKESWPIHRAAPEFNDQSTETEILVTGIKVVDLLAPYAKGGKIGLFGGAGVGKTVLIMELINNVAKAHGGFSVFAGVGERTREGNDLYHEMIESGVIKPEGTGSKAALVYGQMNEPPGARARVALSGLTVAEYFRDQEGQDVLFFVDNIFRFTQAGSEVSALLGRIPSAVGYQPTLATDMGNLQERITTTNKGSITSVQAIYVPADDLTDPAPATSFSHLDATTVLSRQIAELGIYPAVDPLDSTSRILDPRIVGDEHYRVAKRSSKNFTNI

SEQ ID NO: 174857 - protein, 101 aa, Unknown
  Bacterial polypetide isolated from the Sargasso Sea
MQREVQKILQTYKSLQDIMQILGMDELSEEDKLTVARARKIQRFLSQPFFVAEVFTGSPGKLVDLESTIKGFDAICKGEYDHLPEAAFYMVGTIEEVIEKA

SEQ ID NO: 174858 - protein, 293 aa, Unknown
  Bacterial polypetide isolated from the Sargasso Sea
MASLDDLKKRISSVKSTQKITKAMKMVAAAKLRRAQESAEKGRPYSEKMNNIILNLSNGISDIENAPKLLSGTGEDKVHLCVVMTSDRGLCGGFNTNIIKKAKIFFQKILDEGKTLKIITVGSKGYDQLKRVYGDNIIERISFKDSKNVNYFDADKVGKLVIEKFEKKEFDVCTIFYNQFKNVITQIPQEQQIIPLKISEKKKDDSLSEDTYEFEPEEDEILSNLLPKNISTQIFKAMLENAASEQGSRMSAMDNATRNAGEMVDKLTIEYNRSRQAAITKELIEIISGAESL

SEQ ID NO: 174859 - protein, 273 aa, Unknown
  Bacterial polypetide isolated from the Sargasso Sea
MEINPSEVTKILKEQIKKFGDKAEVTEVGQVLSVGDGIARIYGLDNVQAGEMVEFADGSKGMALNLESENVGVVIFGDDKAVKEGDTVKRTGAIVDTPVGKELLGRVVDGLGNPIDGKGALDKGVKKSRVEVKAPGIIPRKSVNEPMQTGLKSVDSLVPIGRGQRELIIGDRQTGKTAVAIDTIINQKKINESNDEKLKLYCVYVAIGQKRSTVRQIEKTLEEAGAMEYTTIVAATASDAAPLQFLAPYTGCAMGEYFRDNGMHALIIYDDLS

SEQ ID NO: 174860 - protein, 323 aa, Unknown
  Bacterial polypetide isolated from the Sargasso Sea
GAGVGKTVLIMELINNVAKAHGGFSVFAGVGERTREGNDLYHEMIDSGVIKTDGEGSKAALVYGQMNEPPGARARVALTGLTVAEYFRDQEGQDVLFFVDNIFRFTQAGSEVSALLGRIPSAVGYQPTLATDMGNLQERITTTNKGSITSVQAIYVPADDLTDPAPATSFAHLDATTVLSRQIAEIGIYPAVDPLDSTSRILDPRIVGDEHYRVAREVQKVLQTYKSLQDIIAILGMDELSEEDKLVVARARKIQRFLSQPFFVAEVFTGSPGKLVDLESTIKGFDAICKGEYDHLPEAAFYMVGTIEEAIQKAESLANEAAA

SEQ ID NO: 174861 - protein, 513 aa, Unknown
  Bacterial polypetide isolated from the Sargasso Sea
MQLNSTEISDLIKQRIEQFEVVSESRNEGTIVAVSDGIIRIHGLADVMQGEMIELPGSRFAIALNLERDSVGAVVMGPYADLAEGVKVKTTGRILEVPVGRGLLGRVVNTLGEPIDGKGAIDNDGFSPVEVIAPGVIERKSVDQPVQTGYKAVDAMIPIGRGQRELIIGDRQTGKTAMAIDAIINQRDSGIKCVYVAVGQKASTIANVVRKLEEHGALANTIVVVATASEAAALQYLAPYSGCAMGEYFRDRGEDALIVYDDLSKQAVAYRQISLLLKRPPGREAYPGDVFYLHSRLLERASRVNEEYVEKFTKGAVTGQTGSLTALPIIETQAGDVSAFVPTNVISITDGQIFLETDLFNSGLRPAVNPGISVSRVGGAAQTKIIKKLSGGIRTALAQYRELAAFSQFASDLDDATRAQLEHGVRVTELMKQKQYAPMSVAAQAVSIFAAEKGYLKGVELKKVGDFEAALLSYMNSEHAALIKLINETGDYNADIEAELKAGLDKFVATQTW

SEQ ID NO: 174862 - protein, 286 aa, Unknown
  Bacterial polypetide isolated from the Sargasso Sea
MAGAKEIKTKIASVKNTQKITSAMEMVAASKMRRAQERMAASRPYAESMRKVIGHVAQGSLEYKHPYLEVREAKRVGYIVVATDRGLCGGLNVNLFKKVVSDVKSWKEQGAEFEFCPIGARSVQFFKSFGGQVSAHASGLGDAPKLADLIGTVRVMLDAYNEGKLDRLYVVFNKFVNTMTQTPVIEQLLPLPKSEDDEVAHRWDYIYEPDPKALLDTLLVRYVESQVYQGVVENIASEQAARMVAMKAATDNAGTLIDDLQLVYNKARQAAITQELSEIVSGASAV

SEQ ID NO: 174863 - protein, 463 aa, Unknown
  Bacterial polypetide isolated from the Sargasso Sea
MSTGTVVQVIGAVVDVEFPQDAVPQVYDALKITGEGSCNGLVLEVQQQLGGGVVRTIAMGTSDGLRRGLEVVNSGSPISVPVGTATLGRIMNVLGDPIDEAGAIGEEERYVIHRSAPSYEEQSNTTELLETGIKVIDLVCPFAKGGKVGLFGGAGVGKTVNMMELINNIAKAHSGLSVFAGVGERTREGNDFYYEMKDSGVLDKVAMVYGQMNEPPGNRLRVALTGLTMAEKFRDEGRDVLLFVDNIYRYTLAGTEVSALLGRMPSAVGYQPTLAEEMGVLQERITSTKTGSITSVQAVYVPADDLTDPSPATTFAHLDATVVLSRQIASLGIYPAVDPLDSTSRQLDPLVVGQEHYDVANGVQTVLQRYKELKDIIAILGMDELSDDDKMTVSRARKIERFLSQPFHVAEVFTGSPGKYVSLKDTIRGFKGILSGEFDHIPEQAFYMVGSIDEAVEKANKKK

SEQ ID NO: 174864 - protein, 373 aa, Unknown
  Bacterial polypetide isolated from the Sargasso Sea
MDINPSEVTKILKEQIKKFGDKAEISEVGQVLSVGDGIARVYGLDNVQAGEMVEFSDGSRGMALNLESENVGVVIFGDDKAIKEGDTVKRTGAIVDTPVGKELLGRVVDGLGNPIDGKGALDKSIKKSRVEIKAPGIIPRQSVNEPMQSGLKAIDSLVPIGRGQRELIIGDRQTGKTAVAVDTIINQKKINESGDEKQKLYCIYVAIGQKRSTVRQIQKTLEEAGAMDYTTIVAATASDAAPLQFLAPYTGCAMGEFFRDNGMHALIIYDDLSKQAVAYRQMSLLLRRPPGREAYPGDVFYLHSRLLERAAKLSNEHGGGSLTALPIIETQAGDVSAYIPTNVISITDGQIFLETNLFNQGIRPAINVGLSVS

SEQ ID NO: 174865 - protein, 460 aa, Unknown
  Bacterial polypetide isolated from the Sargasso Sea
MSNQGGVQYSKIAEIKGPLVIVDGVDNAAFDELVEIETLDGEKRLGKVLEVGNGKAVVQVFEGTTGLSVSGTNAKFVGKVMEMPVSEQVLGRVFDGLGRAKDGLPEPVADSFLDINGAPMNPEQREYPKDFIQTGVSVIDGMLTLVRGQKLPIFSGSGMSHNILAAQIARQAAIIGTDDSFAVVFAAIGVQYSEAEYFKRSLEESGALKRSVLFLNLADDPAIERIITPRVALTVAEYLAYDLGMHVLVILTDMTNYAEALREISAAREEVPGRKGYPGYLYTDLSTIYERAGRLRGKKGSVTQVPILTMPSDDITHPIPDLTGYITEGQLVLGRDLFRQGVYPPINILMSLSRIMKDGIGEGSTRADHQEISNQNYDAYSRAQEVRALAGIVGKAGLTPVDLNYMNFGDEFEKKFLTQAIDENRTIEETLGLQWNCVSKLPKNELTKVKDKYVEQYYKE

SEQ ID NO: 174866 - protein, 590 aa, Unknown
  Bacterial polypetide isolated from the Sargasso Sea
MVAQGKIVWISGPAVKADGMADAKMYETVSVGDAKLIGEVIRLTGDVAFIQVYESTSGLKPGEPVVGTGNPLSVLLGPGIIGQIYDGIQRPLKDLASQSGSFIGRGITTTPVDMTKEYHFVPSVAVGDEVQAGSIIGTVPETSLIEHKILVPPDHKGGKITKIVSEGDYALETEIATVEGSDIPLKMYHKWPVRQPRPYLKRYDPTVPLLTGQRVIDTFFPLAKGGTGSIPGAFGTGKTVTLHQIAKWADSQVVVYIGCGERGNEMTEVLVEFPELKDPRTGKPLMDRTVLVANTSNMPVAAREASIYTGVTIAEYYRDMGYDVVLVADSTSRWAEALREMSGRLEEMPAEEGYPSYLASRLAEFYERAGRVQAQGSPERDGSVSLVGAVSPSGGDFTEPVTTHTMRFIKTFWALDASLAYSRHYPSINWMNSYSGYLADIAKWWSENISPDWLNLRSETYGILQREDTLKEIVKLLGPEALPDEEKLILEVARMIKIGILQQNSFDDVDTYCSPEKQFKLMKLQVDFYNQGQQALKDGASLADIRSMEVISSLLKARMDVKDDEMDKLDKLATDMVEQFKSVTGVKVQN

SEQ ID NO: 174867 - protein, 485 aa, Unknown
  Bacterial polypetide isolated from the Sargasso Sea
MSIKASEISSIIRDQINNFESQADISEVGTVLKVGDGVAQVYGLDNVQAGEMVEFTGGVQGMALNLEEDNVGIVIFGDDRGIKEGDTVKRTQKIVEVPVGKGLLGRVVDALGNPIDGKGPIQSSESSRIEVKAPGIIPRQSVSEPMQTGLKALDSLVPVGRGQRELIIGDRQTGKTAVAIDTIINQKEINQSDDESKKLYCIYVAIGQKRSTVAQVVKTLEENGAMEYTIVVAASASDPAPLQFLAPYAGCSMGEFFRDNGMHGLIVYDDLSKQAVAYRQMSLLLRRPPGREAFPGDVFYLHSRLLERAAKMNDENGGGSLTALPVIETQAGDVSAFIPTNVISITDGQIFLETELFFSGIRPAINVGLSVSRVGSAAQTKAMKKVAGKIKLELAQYREMAAFSQFASDLDASTKQLLARGERLTELLKQDQYVPMSVADQVLSLYSGVRGFLDKIDLAKITDFQVKFLEGLRADHSDIFEEINN

SEQ ID NO: 174868 - protein, 291 aa, Unknown
  Bacterial polypetide isolated from the Sargasso Sea
MASLDDLKKRISSVKSTQKITKAMKMVAAAKLRRAQENAEKGRPYSEKMNNIILNLSNGISDKENAPKLLAGTGEEKTHLCVVMTSDRGLCGGFNTNIIKKAKQYFQKILKENKTLKIITVGSKGYDQLKRQYKDNIIEKISFKDSKNINYFDADKVGKIIIDRFEKKEFDVCAIFYNQFKNVITQIPQEQQIIPLKSNEEKEANSDSSYEFEPEEDEILSNLLPKNISTQIFKAMLENSASEQGSRMSAMDNATRNAGEMVDKLTIQYNRSRQAAITKELIEIISGAESL

SEQ ID NO: 174869 - protein, 248 aa, Unknown
  Bacterial polypetide isolated from the Sargasso Sea
MSNGVVTQIIGAVIDVEFDRENIPSVYEALNIVGLETVLEVQQQLGDGIVRTIAMGSTEGLKRGLEVVRTNAPISVPVGQETLGRIMDVLGNPIDEKGDIGEKERQPIHKSPPSYTDQAGSNELLETGIKVIDLMCPFAKGGKVGLFGGAGVGKTVNMMELIRNIAIEHSGFSVFAGVGERTREGNDFYHEMTESNVLDKVSLVYGQMNEPPGNRLRVALTGLTIAEKFRDEGRDVLLFIDNIYRIYT

SEQ ID NO: 174870 - protein, 226 aa, Unknown
  Bacterial polypetide isolated from the Sargasso Sea
APKLLSGSGKEQVHLCVVLTSDRGLCGGFNANIIKKAKSYFAKLNKEGKELKIITVGSKGNDQLKRVYGNKIIENISFKKSKNANYFDAEKVGKIVIEKFEKEEFDICTIFYNQFKNVITQIPQAQQIIPLNTKSDDQNNSEDNYEFEPDEDEILSNLLPKNISTQIFKAMLENSASEQGARMSAMDNATRNAGEMVDKLTIEYNRSRQAAITKELIEIISGAESL

SEQ ID NO: 174871 - protein, 218 aa, Unknown
  Bacterial polypetide isolated from the Sargasso Sea
MANIGKISQIMGAVVDVTFEDGNLPEIMNALHVDREDEGDLILEVAQHLGESTVRTVAMDSTDGLVRGVDAKDSGKPISVPVGPETLGRLFDVTGNVIDGKGKVSAKKEYPIHRSAPKHEDLSTSTEMLVTGIKVVDMMEPYTRGGKTGLFGGAGVGKTVLIQELIRNIATEHGGYSVFAGVGERTREGNDLYNEMTESGVIEKTTMVFGQMNEPPRR

SEQ ID NO: 174872 - protein, 115 aa, Unknown
  Bacterial polypetide isolated from the Sargasso Sea
GDEHYNCAQRVKELLQKYNELQDIIAILGMEELSEEDKLAVARARRVQRFLSQPFHVAEQFTGIPGALVDIKDTIKGFNMIMDGELDHLPEAAFNLKGNIEEAIEAGEKMLSEAK

SEQ ID NO: 174873 - protein, 505 aa, Unknown
  Bacterial polypetide isolated from the Sargasso Sea
MDIKTNEIGDLLRSQIKNINESVDVNEVGEVLEIGDGVARTSGLGSVMSSELVEFPNNVFGMALNLEEENVGAVLFGDSSLVKEGDTVKRTGKVVEVPVGKELLGRVVDPLGQPMDGKGPINAKETLPIERKALGVMQRFPVKEPLQTGLKSIDSMIPIGRGQRELIIGDRQTGKSAIAIDAIINQKSTHSSDSPVYCVYVAVGQKASTVAKLVAELEANGAMEYTTVVVANASDPAPLQYIAPYSGCAMGEYYRDNGMHGLIVYDDLSKQATAYRQMSLVLRRPPGREAFPGDVFYLHSRLLERASKLSEDLGSGSLTALPVIETQEGDVSAYIPTNVISITDGQIYLDTNLFNGGVRPAVDVGLSVSRVGGSAQIKAMKKIAGKLRLDLAQFRELEAFAKFASDLDESTAAQITRGRRMVEILKQNQYVPMTTEKQVAIIYAASQGYLDDIELESVKEFEVGLLEHFESKHSECLKEINSSGDISDDLGEKMNKAIEEFKKSF

SEQ ID NO: 174874 - protein, 472 aa, Unknown
  Bacterial polypetide isolated from the Sargasso Sea
MKKGKITQVIGAVVDVKFDGELPEILTALECKNGDIRLILEVAQHLGESSVRTIAMDATEGLKRGDEVIDTGAPIKVPVGPETLGRIINVVGEPIDEKGEVKTKESWPIHRAAPEFNDQSTETEILVTGIKVIDLLAPYAKGGKIGLFGGAGVGKTVIIMELINNIAKAHGGFSVFAGVGERTREGNDLYHEMMESGVIKPEGSGSKAALVYGQMNEPPGARARVALTGLTVAEYFRDQEGQDVLFFVDNIFRFTQAGSEVSALLGRIPSAVGYQPTLATDMGNLQERITTTNKGSITSVQAIYVPADDLTDPAPATSFSHLDATTVLSRQIAELGIYPAVDPLDSTSRILDPRVVGDEHYRVAREVQKILQTYKSLQDIIAILGMDELSEEDKLTVARARKIQRFLSQPFFVAEVFTGSPGKLVDLESTIKGFDAICKGEYDHLPEAAFYMVGTIEEAIEKAEKMAKEAAA

SEQ ID NO: 174875 - protein, 295 aa, Unknown
  Bacterial polypetide isolated from the Sargasso Sea
MPSLDDLKKRISSVKSTQKITKAMKMVAAAKLRRAQENAEKGRPYSEKMNNIILNLSNGVSDKESAPQLLIGNGEEKIHLCVVLTSDRGLCGGFNTNIIKKAKIYFQKILNENKTLKIITVGSKGYDQLKRAYKENIIENISFKESKNTNYFDADKVGKIIIEKFEKKEFDVCAIFYNQFKNVITQIPQEQQIIPLKNSETKESVSSTSDGDSYEFEPEEDEILGNLLPKNISTQIFKAMLENSASEQGSRMTAMDNATRNAGEMVDKLTIQYNRSRQAAITKELIEIISGAESL

SEQ ID NO: 174876 - protein, 212 aa, Unknown
  Bacterial polypetide isolated from the Sargasso Sea
FYLHSRLLERAAKLSDEHGGGSLTALPIIETQGGDVSAFIPTNVISITDGQIFLETNLFNQGIRPAINVGLSVSRVGSSAQTKAMKKVSGSMKLELAQYREMAAFAQFGSDLDASTQKLLNRGSKLTELLKQNQYTPMTVAEQVVSVFCGVRGYLDDIELKDISEFESKIIEKCKSEKPEIIDAISSSGKLDDNTEKLLVEVIKNLKTNSST

SEQ ID NO: 174877 - protein, 277 aa, Unknown
  Bacterial polypetide isolated from the Sargasso Sea
MSQLNPSEISSVLKEKIAGLDLSAERKNEGIVVSVSDGIVRIHGMGDVMYGEVIEFENGTKGMALNLEQDSVGAVVLGDYLEIIEGQKAVCTGKVLEVPVGEGLLGRVVNTLGIPIDGKGEIKAESSSPVEVVAPGVIARQSVDQPVQIGLKAVDAMVPIGRGQRELIIGDRQTGKTAVAIDAIINQKGTGIKCIYVAIGQKQSTVANVVRKLEEYGAMEHTIVVSATAADPAPNAYLSAYSGCTMGEYFRDKGEDALIVYDDLSKQAVAYRQVSLL

SEQ ID NO: 174878 - protein, 472 aa, Unknown; identical to SEQ ID NO: 174840
  Bacterial polypetide isolated from the Sargasso Sea

SEQ ID NO: 174879 - protein, 291 aa, Unknown
  Bacterial polypetide isolated from the Sargasso Sea
MASLDDLKKRISSVKSTQKITKAMKMVAAAKLRRAQENAEKGRPYSDKMNNIILNLSNGISDIDNAPKLLSGTGEDKVHLCVVMTSDRGLCGGFNTNIIKKAKLYFQKILDEGKTLKIITVGTKGYDQLKRLYGDNIIERISFKDSKNVNYFDADKVGKIVIEKFDKKEFDVCAIFYNQFKNVITQIPQEQQIIPLKTSEKEENSSEDNYEFEPEEDEILSNLLPKNISTQIFKAMLENSASEQGSRMSAMDNATRNAGEMVDKLTIEYNRSRQAAITKELIEIISGAESL

SEQ ID NO: 174880 - protein, 135 aa, Unknown
  Bacterial polypetide isolated from the Sargasso Sea
IAELGLYPAIDPLDSTSRQLDPLVVGQEHYDVARGVQNTLQRYKELRDIIAILGMDELSEEDKLVVARARKIQRFLTQPYFVAKVFTGMDGVFVPLKETLRGFKGIIEGQYDDIPEQAFYNVGTIDQAVEKAKNL

SEQ ID NO: 174881 - protein, 202 aa, Unknown
  Bacterial polypetide isolated from the Sargasso Sea
MASLDDLKKRIVSVKSTQKITKAMKMVAAAKLKRAQENAEKGRPYSEKMNNIILNLADGISDKENAPKLLAGTGQDKIHLCVVLTSDRGLCGGFNSNIIKKAKNYFGKVLGEGKTLKIITVGSKGYDQLKRLYSDKIVEKISFKESKNANYFDAEKVGKIIIESFLKKEFDVCTIFYNKFKNVITQIPQEQQIIPLKSSESE

SEQ ID NO: 174882 - protein, 440 aa, Unknown
  Bacterial polypetide isolated from the Sargasso Sea
MQQLNPSEISDIIKSRIEGLDVKSEAQNEGTIVGVSDGIVRVHGLADAQYGEMIEFEGSLYGMALNLERDSVGIVVLGDYEGLSEGMTARCTGRILEVPTGPELLGRVVDSLGNPIDGKGPIEASSSSPIEKVAPGVIARQSVDQPVQIGLKCVDSLVPIGRGQRELIIGDRQIGKTAVAIDAIINQRSTGIKCIYVAIGQKMSTIANIVRTLEENGAMEYTTVVAASASDPAPLQFISPYSGCAMGEYFRDHGEDALVIYDDLTKQAWAYRQISLLLKRPPGREAYPGDVFYLHSRLLERAARVNAKYVEDYTNGEVKGKTGSLTALPIIETQGGDVSAFVPTNVISITDGQIFLETDNFNAGLRPAMSPGISVSRVGGSAQVPYMKKLSGGVKQALAAYRELAAFSQFASDLDDATKRQLDKGARVTELMKQKQYSPM

SEQ ID NO: 174883 - protein, 385 aa, Unknown
  Bacterial polypetide isolated from the Sargasso Sea
MDINPSEITKILKEQIKNLGDKAEVSEIGKVLSVGDGIARVYGLDNVQAGEMVVFQDNSKGMALNLENDNVGIVIFGDDRSIKEGDTVKRTGAIVDVPVGKELLGRVVDALGNPIDGKENLDKNIKRKRVEVKAPGIIPRKSVGEPMQTGLKAIDSLIPVGRGQRELIIGDRQTGKTAVAVDTIINQKKINESDDEKKKLYCIYVAIGQKRSTVAQIVKTLQDAGAMDYTIVVSATASDPAPLQFLAPYTGCTFGEFFRDNGMHALIIYDDLSKQAVAYRQMSLLLRRPPGREAYPGDVFYLHSRLLERAAKLNDDNGGGSLTALPIIETQAGDVSAYIPTNVISITDGQIFLETELFNQGIRPAVNVGLSVSRVGSAAQTKAMK

SEQ ID NO: 174884 - protein, 285 aa, Unknown
  Bacterial polypetide isolated from the Sargasso Sea
MSTGKIVQVMGPVVDVEFETEELPEIFSALEIKLEGDSRLICEVQQHLGESTVRTVSMGSTDGLYRGMDVKDLGETISTPVGQGVLGRIINVTGDPVDEAGPIKTKERWSIHREAPAFADQDTEAQMLVTGVKVMDLLCPFLKGGKIGLFGGAGVGKTVVIMELIRNIAAEHGGFSVFAGVGERTREGNDLWNEMKESGVLDKTSLVYGQMNEPPGARARVALTGLTVAEYFRDEEAADVLMFIDNIFRFTQAGSEVSALLGRIPSAVGYQPTLSTEMGNLQERI

SEQ ID NO: 174885 - protein, 142 aa, Unknown
  Bacterial polypetide isolated from the Sargasso Sea
MAEMISFHLDVVSAEGKLFSGRVQSAQVSGSEGELGLRHGHAPLLTAIKPGLVRLVKQNGTEEVLYISGGMLEVQPEAVTVLADTAIRADDLDEAKAQEAKRAAEERIHSSHGDIDYAQAATELAKAMAQLRVIDIVKKNYR

SEQ ID NO: 174886 - protein, 484 aa, Unknown
  Bacterial polypetide isolated from the Sargasso Sea
MATATASDKKNGKVTQVIGSTFDVEFPESTLPAIYNAVRIDADHKGIKLELVGEVQQHLGGGKVRCVALGSTDGLIRGQEVVDTGSPVSVPVGPATLGRVFNMLGEPIDNGGEVDADERWSIHRDAPPISELSTKTELFETGIKVIDLLTPFVRGGKAGLFGGAGLGKTVILTELIARIASAHGGNSVFAGVGERTREGTDLWLEMQDAKIGDTGRSVIEQTCMVFGQMNEPPGARLRVALSALTMAEYFRDTTGTDTLLFVDNIFRFSQAGSEVSALLGRMPSAVGYQPTLATEMGALQERITSTEKGAITSVQAVYVPADDPTDPAPATAFGNLDAFIYLERSISEKGIYPAVDPLASSSRILDPQYVGERHYNVARRVQTTLQRYRELQDIIAILGVDELSEEDKLVVHRARRMERFLSQPFLVAEVFTGKPGEITSLEDTIRSFEEIADGKWDHLPEPAFMYVGPIEQAEEQAKKMEQKA

SEQ ID NO: 174887 - protein, 424 aa, Unknown
  Bacterial polypetide isolated from the Sargasso Sea
MRKGKITQIIGAVVDVKFEGELPEILTALECDNSGNRLVLEVAQHLGESSVRTIAMDATEGLKRGDEVTDTGAPIKVPVGPETLGRIVNVIGEPIDEKGEVKTKESWPIHRSAPEFNDQSTETEILVTGIKVVDLLAPYAKGGKIGLFGGAGVGKTVLIMELINNVAKAHGGFSVFAGVGERTREGNDLYHEMIESGVIKPEGSGSKAALVYGQMNEPPGARARVALSGLTVAEYFRDQEGQDVLFFVDNIFRFTQAGSEVSALLGRIPSAVGYQPTLATDMGNLQERITTTNKGSITSVQAIYVPADDLTDPAPATSFSHLDATTVLSRQIAEIGIYPAVDPLDSTSRILDPRIVGDEHYRVAREVQKVLQTYKSLQDIIAILGMDELSEEDKLIVARARKIQRFLSQPFFVAEVFTGSPGKL

SEQ ID NO: 174888 - protein, 291 aa, Unknown
  Bacterial polypetide isolated from the Sargasso Sea
MASLDDLKKRISSVKSTQKITKAMKMVAASKLRRAQENAEKGRPYSDKMNNIILNLSNSISDKENSPKLLTGSGEDKIHLCVVMTSDRGLCGGFNTNIIKKAKAYFQKILKEGKNLKIITVGSKGYDQLKRIYKDNIIEKISFKESKYANYFDADKVGKIIIDKFEKKEFDVCTIFYNQFKNVITQIPQEQQIIPLKTSESEGSSSEDNYEFEPEEDEILSNLLPKNISTQIFKAMLENSASEQGSRMSAMDNATRNAGEMVDKLTIQYNRSRQAAITKELIEIISGAESL

SEQ ID NO: 174889 - protein, 215 aa, Unknown
  Bacterial polypetide isolated from the Sargasso Sea
DVFYIHSRLLERAAKMSDEHGGGSLTALPIIETQAGDLSAYIPTNVISITDGQIFLETNLFFAGIRPAINVGLSVSRVGSAAQTKAMKKIAGPVKLELAQYREMAAFAQFASDLDASTKQLLDRGARLVEILKQGQYSPLTVSEQVISIYAGVRGYLDKVAVGDVVRFESEILSEIRTNHADLLDAIANEKELSKENDDKLKSILDNLVEKFTSN

SEQ ID NO: 174890 - protein, 371 aa, Unknown
  Bacterial polypetide isolated from the Sargasso Sea
MSNGVVTQIIGAVIDVEFDRENIPNVYEALNIVGLETVLEVQQQLGDGIVRTIAMGSTEGLKRGLEVVRTNAPISVPVGQETLGRIMDVLGNPIDEKGDIGEKERQPIHKSPPSYTDQAGSNELLETGIKVIDLMCPFAKGGKVGLFGGAGVGKTVNMMELIRNIAIEHSGFSVFAGVGERTREGNDFYHEMTESNVLDKVSLVYGQMNEPPGNRLRVALTGLTIAEKFRDEGRDVLLFIDNIYRYTLAGVEVSALLGRMPSAVGYQPTLAGEMGALQERITSTKTGSITSIQAVYVPADDLTDPSPATTFAHLDATVVLSRNIAELGIYPAVDPLDSTSRQLDPLVVGEEHYKRTQAIQGVLQRYKELKD

SEQ ID NO: 174891 - protein, 350 aa, Unknown
  Bacterial polypetide isolated from the Sargasso Sea
MRKGKITQIIGAVVDVKFDGELPEILTALECDNSGNRLVLEVAQHLGESSVRTIAMDATEGLKRGDEVIDTGAPIKVPVGPETLGRIINVIGEPIDEKGKVKTKESWPIHRAAPEFNDQSTETEILVTGIKVVDLLAPYAKGGKIGLFGGAGVGKTVLIMELINNVAKAHGGFSVFAGVGERTREGNDLYHEMIESGVIKPDGAGSKAALVYGQMNEPPGARARVALSGLTVAEYFRDQEGQDVLFFVDNIFRFTQAGSEVSALLGRIPSAVGYQPTLATDMGNLQERITTTNKGSITSVQAIYVPADDLTDPAPATSFSHLDATTVLSRQIAEIGIYPAVDPLDSTSRI

SEQ ID NO: 174892 - protein, 268 aa, Unknown
  Bacterial polypetide isolated from the Sargasso Sea
MKMVAASKLRRAQESAEKGRPYSEKMNNIILNLSNNVSDKENSPKLLVGSGEDKIHLCIVMTSDRGLCGGFNTNIIKKAKSYFQKILNEGKTLKIITVGSKGYDQLKRTYKDNIIEKISFKESKYINFFDADKVGKIIIGRFEKKEFDVCTIFYNQFKNVITQIPQEQQIIPLKTSKSDKNSSEDNYDFEPEEDEILSNLLPKNISTQIFKAMLENSASEQGSRMSAMDNATRNAGEMVDKLTIQYNRSRQAAITKELIEIISGAESL

SEQ ID NO: 174893 - protein, 252 aa, Unknown
  Bacterial polypetide isolated from the Sargasso Sea
AEKGRPYSEKMNNVILNLSNGISDKENAPKLLSGTGQEKTHLCVVMTSDRGLCGGFNSNIIKKAKSYFAKILEEGKELKIITVGSKGNDQLKRVYGDKIIENISFKESKNANYFDADKVGKMVIEKFEAGEFDVCTIFYNQFKNVITQIPQAQQIIPLNNEGEENSSEESYEFEPDEDEILSNLLPKNISTQIFKAMLENSASEQGSRMSAMDNATRNAGEMVDKLTIEYNRSRQAAITKELIEIISGAESL

SEQ ID NO: 174894 - protein, 461 aa, Unknown
  Bacterial polypetide isolated from the Sargasso Sea
MSQGKVVQIIGAVVDIDFPQESVPGIYDALNVTSGDLAGLVLEVQQQLGGGTVRAIALGSTDGLRRGEAVSNTGKAIHVPVGKATLGRIMNVLGEPIDEAGPIGEDERMPIHRAAPSYEDQAASNALLETGIKVIDLVCPFAKGGKVGLFGGAGVGKTVNMMELIRNIAIEHSGYSVFAGVGERTREGNDFYHEMNDSNVLDKVSLVYGQMNEPPGNRLRVALTGLTMAEKFRDEGRDVLFFVDNIYRYTLAGTEVSALLGRMPSAVGYQPTLAEEMGVLQERITSTKTGSITSVQAVYVPADDLTDPSPATTFSHLDATVVLSRNIASLGIYPAIDPLDSTSRQLDPLVIGKEHYDTARGVQSVLQRYKELKDIIAILGMDELSDEDRTVVYRARKIQRFLSQPFFVAEVFTGSPGKYVPLKETIRGFKGILDGEFDHMPEQAFYMVGSIDEAIEKAKKL

SEQ ID NO: 174895 - protein, 286 aa, Unknown
  Bacterial polypetide isolated from the Sargasso Sea
MAGAKEIKSKIGSINNTRKITSAMEKVAVSKMRRAQERVAHSRPYAEGMRKVIGNIANGNIEYRHPYLTERPVKNVGYIVISTDRGLCGGLNTNEFKRVALELKSWKEQGAQAQIAVIGNKATAFFKRFGGKVLAQQTGPGDNPRLADVIGSVQVMLKAYEEGRIDRLFLVFNKFVNTMKQEPVIEQLLPLPKADVTAKSHSWDYIYEPDPKVILDKLLSRYVESQVYQGVVENAASEQAARMVAMKAATDNAGSLMDDLKLVYNKARQAAITQELSEIVGGAAAV

SEQ ID NO: 174896 - protein, 362 aa, Unknown
  Bacterial polypetide isolated from the Sargasso Sea
EGACHAPEKLPIHRKPPKYEDQKGGNEILETGIKVIDLICPFSRGGKVGLFGGAGVGKTVTMLELIRNIAVEHSGLSVFAGVGERTREGNDFYYEMEEAGVLDKISLVFGQMNEPPGNRLRVALTGLTLAEKFRDDGRDVLLFVDNIYRYTLAGTEVSALLGRMPSAVGYQPNLAEEMGTLQERITTTKTGSVTSIQAVYVPADDLTDPSPATTFAHLDSTVTLSRAITDLGIYPAVDPLDSTSQQLDPLIVGEEHYNVAQEVMQVLQRLNELKDIIAILGMDELSEEDKQLVYRARKIQKFFSQPFFVAEQFSGSPGTYVSRDDTVRSFKAILNGEHDDLPEDAFMMVGSIEDAVEKAKTL

SEQ ID NO: 174897 - protein, 148 aa, Unknown
  Bacterial polypetide isolated from the Sargasso Sea
AINVGLSVSRVGSAAQTKAMKKIAGPVKLELAQYREMAAFAQFASDLDASTKQLLDRGARLVEILKQGQYSPLTVSEQVVSIYAGVRGYLDKVAVNDVVRFETEVLNEMRSSHSDLLEAIANEKELSKDNDDKLKSILDTIVEKFTSN

SEQ ID NO: 174898 - protein, 507 aa, Unknown
  Bacterial polypetide isolated from the Sargasso Sea
MNIRAEEISKIIQQQVENFDKTATKSEVGTVLEVGDGIARVFGLDNVQAGELVEFPGSVTGMTLNLQEDNVGVVIFGNDRAIKEGDEVKRTERIAEIPVGEGLLGRVVDPLGNPIDGKGPIESSDNRLIETIAPGIVARKSVHQPMQTGLKAIDSMVPIGRGQRELIIGDRQTGKTAIAIDTIINQKGGDMICIYVGIGQKRSTMAQIVQRLENEGAMEHTIVVSSTASEPAPLQFLAPYSGVSIGEYFRDQGKHVLCVYDDLSKQAVAYRQLSLLLRRPPGREAYPGDVFYLHSRLLERACKLNDELGAGSLTALPIIETQAGDVSAYIPTNVISITDGQIFLSTDLFNSGIRPAINVGLSVSRVGGAAQVKAMKQVAGTLRLDLAQYREKEAFAQFGSDLDQATQKQLARGQRLVEILKQAQYQPMPWVDQAISIFAATNGFLDDQPINKLSKFESEFLTFIQTKKADLRKSIEEKEMIDETAEKDLKSALNEFAEAFSAENSTA

SEQ ID NO: 174899 - protein, 510 aa, Unknown
  Bacterial polypetide isolated from the Sargasso Sea
MEINPSEVTKILKEQIKNFGEKAEVSEVGQVLSVGDGIARIYGLNNVQAGEMVEFSDGSKGMALNLESDNVGVVIFGDDKAVKEGDIVKRTGAIVDTPVGKELLGRVVDGLGNPIDGKGALDKGIKRSRVEIKAPGIIPRKSVSEPMQTGLKSIDSLVPIGRGQRELIIGDRQTGKTAVAIDAIINQKKINESGDEKQKLYCVYVAIGQKRSTVRQIEKTLQEAGAMEYTTIVAATASDAAPLQFLAPYTGCTMGEYFRDNGMHALIIYDDLSKQAVAYRQMSLLLRRPPGREAYPGDVFYLHSRLLERAAKLSDEHGGGSLTALPIIETQGGDVSAFIPTNVISITDGQIFLETELFNQGIRPAINVGLSVSRVGSSAQTKAMKKVSGSMKLELAQYREMAAFAQFGSDLDASTQKLLNRGSKLTELLKQRQYSPMTVAEQVISVFCGVRGHLDDIEQKDISNFETKIIEKCKSEKPEIINSINASGKLEEDSEKALTELIVELKKNFN

SEQ ID NO: 174900 - protein, 472 aa, Unknown
  Bacterial polypetide isolated from the Sargasso Sea
MRKGKITQIIGAVVDVKFEGELPEILTALECDNSGNRLVLEVAQHLGESSVRTIAMDATEGLKRGDEVKDTGAPIKVPVGPETLGRIVNVIGEPIDEKGEVKTKESWPIHRSAPEFNDQSTETEILVTGIKVVDLLAPYAKGGKIGLFGGAGVGKTVLIMELINNVAKAHGGFSVFAGVGERTREGNDLYHEMIESGVIKPEGSGSKAALVYGQMNEPPGARARVALSGLTVAEYFRDQEGQDVLFFVDNIFRFTQAGSEVSALLGRIPSAVGYQPTLATDMGNLQERITTTNKGSITSVQAIYVPADDLTDPAPATSFSHLDATTVLSRQIAEIGIYPAVDPLDSTSRILDPRIVGDEHYRVAREVQKVLQTYKSLQDIIAILGMDELSEEDKLIVARARKIQRFLSQPFFVAEVFTGSPGKLVDLESTIKGFDAICKGEYDHLPEAAFYMVGTIEEAIEKAEKMAKEAAA

SEQ ID NO: 174901 - protein, 237 aa, Unknown
  Bacterial polypetide isolated from the Sargasso Sea
SSFNSISDKENSPKLLTGSGEDKIHLCVVMTSDRGLCGGFNTNIIKKAKAYFQKIIKEGKNLKIITVGSKGYDQLKRIYKENIIEKISFKESKYANYFDADKVGKIIIDKFEKKEFDVCTIFYNQFKNVITQIPQEQQIIPLKTSESEGSSSEDNYEFEPEEDEILSNLLPKNISTQIFKAMLENSASEQGSRMSAMDNATRNAGEMVDKLTIQYNRSRQAAITKELIEIISGAESL

SEQ ID NO: 174902 - protein, 291 aa, Unknown
  Bacterial polypetide isolated from the Sargasso Sea
MASLDDLKKRISSVKSTQKITKAMKMVAAAKLRRAQENAEKGRPYSDKMNNIILNLSNGISDIENAPKLLSGTGEDKVHLCVVMTSDRGLCGGFNTNIIKKAKLYFQKILDEGKTLKIITVGTKGYDQLKRLYGDKIIERISFKESKNINYFDADKVGKIVIEKFEKKEFDVCAIFYNQFKNVITQIPQEQQIIPLNTSEKEENSSEDNYEFEPEEDEILSNLLPKNISTQIFKAMLENSASEQGSRMSAMDNATRNAGEMVDKLTIEYNRSRQAAITKELIEIISGAESL

SEQ ID NO: 174903 - protein, 511 aa, Unknown
  Bacterial polypetide isolated from the Sargasso Sea
MEIKAAEISSVIKDQIANFETKADVAEVGTVLSVGDGIARVYGLDQVQAGEMVEFPGGIKGMALNLEMDNVGVSIFGDDTGIKEGDTVKRTGEIVDVPVGKELLGRVVDGLGNPIDGKGPIQSSEKRRIELKAPGIIPRQGVSEPMQTGIKALDALVPVGRGQRELIIGDRQTGKTAVAIDTILNQKSVNQSNNEKDKLYCIYVAIGQKRSTVAQIVKTLEDNGAMEYTIVVSATASEPAPLQFLSAYTGCTMGEFFRDNGMHALIVYDDLSKQAVAYRQMSLLLRRPPGREAYPGDVFYIHSRLLERAAKMSDEHGGGSLTALPIIETQAGDLSAYIPTNVISITDGQIFLETNLFFAGIRPAINVGLSVSRVGSAAQTKAMKKIAGPVKLELAQYREMAAFAQFASDLDASTKQLLDRGARLVEILKQGQYSPLTVSEQVVSIYAGVRGYLDKVAVNDVVRFETEVLNEMRSSHTDLLEAIANEKELSKDNDDKLKSILDNLVEKFTSN

SEQ ID NO: 174904 - protein, 297 aa, Unknown
  Bacterial polypetide isolated from the Sargasso Sea
MPSLKDIKTQINSVGSTKKITSAMKMVAASKLRRSQEKAEAARPYSSRLEEMLASLASSAASGEGIIKLLTGTGNDQNYIVVPVSADRGLCGGFNSSINRETFKLVKSLESDGKSVQLMPVGKKSRDFFNRVMKNQIAESFVDLNISNSGYESALKVSNKLQELYFDSKFDKCIIVFNKFKSAISQEVTQQQLIPLDVSDSSEEENAETTAAKAIYDYEPDEETILKDLLPKNVSIQIFKVLLESDAGEHGARMAAMDNATRNAGEMIDSLTLKYNRTRQAFITKELIEIISGAESV

SEQ ID NO: 174905 - protein, 359 aa, Unknown
  Bacterial polypetide isolated from the Sargasso Sea
MQTGLKSIDSLVPIGRGQRELIIGDRQTGKTAVAVDAIINQKKINESGDEKQKLYCIYVAVGQKRSTVRQIQKTLEEAGAMEYTTIVAATASDSAPLQFLAPYTGCTMGEYFRDNGMHALIIYDDLSKQAVAYRQMSLLLRRPPGREAYPGDVFYLHSRLLERAAKLSDEHGGGSLTALPIIETQGGDVSAFIPTNVISITDGQIFLETELFNQGIRPAINVGLSVSRVGSSAQTKAMKKVSGSMKLELAQYREMAAFAQFGSDLDASTQQLLNRGSKLTELLKQKQYSPMTVPEQVISVFCGVKGYLDDIDLKDVAEFESKIIEKCKSDKPEIIESILSSGKLEEDKEKLLVEVITQI

SEQ ID NO: 174906 - protein, 291 aa, Unknown
  Bacterial polypetide isolated from the Sargasso Sea
MASLDDLKKRISSVKSTQKITKAMKMVAAAKLRRAQESAEKGRPYSDKMNNIILNLSNGISDIDNAPKLLSGTGEDKVHLCVVMTSDRGLCGGFNTNIIKKAKLYFQKILDEGKTLKIITVGTKGYDQLKRLYGDNIIERISFKESKNINYFDADKVGKIVIEKFEKKEFDVCAIFYNQFKNVITQIPQEQQIIPLKTSEKDENSSEDNYEFEPEEDEILSNLLPKNISTQIFKAMLENSASEQGSRMSAMDNATRNAGEMVDKLTIEYNRSRQAAITKELIEIISGAESL

SEQ ID NO: 174907 - protein, 142 aa, Unknown
  Bacterial polypetide isolated from the Sargasso Sea
VFCIRVGSSAQTKAMKKVSGSMKLELAQYREMAAFAQFGSDLDASTQKLLNRGSKLTELLKQNQYSPMTVAEQVISVFCGVRGHLDDIEQKDISSFESKIIEKCKSEKPDIIESITASGKLEDDKEKELNEIILQLKKDFNS

SEQ ID NO: 174908 - protein, 241 aa, Unknown
  Bacterial polypetide isolated from the Sargasso Sea
MFFNSLLTNFAALEVGQHLYWQIGNIRLHGQVFLTSWILLGALIVFISLGTKKMENDPKGLQNLLEFLWDYIRDLARTQIGEKVYRDWMPFIGTLFLFVFVSNWGGALIPWRLIKLPSGELGAPTADINTTIALALLVSLSYFYAGLSNKGWRYFEYYVHPTPIMLPFKILEDFTKPLSLSFRLFGNILADELVVGVLVFLVPLILPIPVMFLGLFTSAIQALIFATLAAYYIGEAVEEHH

SEQ ID NO: 174909 - protein, 472 aa, Unknown
  Bacterial polypetide isolated from the Sargasso Sea
MRKGKITQIIGAVVDVSFEGELPEILTALECKNAGNRLVLEVAQHLGESSVRTIAMDSTEGLKRGDEVTDTGAPIKVPVGPETLGRIINVIGEPIDEKGDVKSKENWPIHRAAPEFNDQSTETEILVTGIKVIDLLAPYAKGGKIGLFGGAGVGKTVLIMELINNVAKAHGGFSVFAGVGERTREGNDLYHEMIDSGVIKPEGKGSKAALVYGQMNEPPGARARVALTGLTVAEYFRDQEGQDVLFFVDNIFRFTQAGSEVSALLGRIPSAVGYQPTLATDMGNLQERITTTNKGSITSVQAIYVPADDLTDPAPATSFAHLDATTVLSRQIAEIGIYPAVDPLDSTSRILDPRIVGDEHYRVAREVQKVLQTYKSLQDIIAILGMDELSEEDKLIVARARKIQRFLSQPFFVAEVFTGSPGKLVDLDSTIKGFDAICKGEYDHLPEAAFYMVGTIEEAIEKAKKMEKEAAA

SEQ ID NO: 174910 - protein, 291 aa, Unknown
  Bacterial polypetide isolated from the Sargasso Sea
MASLDDLKKRITSVKSTQKITKAMKMVAAAKLRKAQESAEKGRPYSDKMHNIILNLSKNINDKENAPKLLAGSGKDNVHLCVVMTSDRGLCGGFNSNITKKAKSYFKKILDSGKELKIVTVGSKGFDQLKRAYKEHIIENISFKESKNVNYFDADKVGKMIIEKFEKGEFDVCTIFFNKFKNVITQIPQEQQIIPLKSEKSDDKNDVMNYEFEPEEDEILNNLLPKNISTQIFKAMLENSASEQGSRMSAMDNATRNAGEMVEKLTIEYNRSRQAAITKELIEIISGAESL

SEQ ID NO: 174911 - protein, 511 aa, Unknown
  Bacterial polypetide isolated from the Sargasso Sea
MDINPSEVTKILKEQIKKFGDKSEVTEIGQVLSVGDGIARIYGLDNVQAGEMVEFADGSKGMALNLESDNVGVVIFGDDRAVKEGDTVKRTGAIVDTPVGKELLGRVVDGLGNPIDGKGALDKSIKRSRVEVKAPGIIPRKSVSEPMQTGLKSIDSLVPIGRGQRELIIGDRQTGKTAVAIDAIINQKKINESGDEKQKLYCIYVAIGQKRSTVRQIEKTLEEAGAMEYTTIVAATASDAAPLQFLAPYTGCAMGEYFRDNGMHALIIYDDLSKQAVAYRQMSLLLRRPPGREAYPGDVFYLHSRLLERAAKLGDEHGGGSLTALPIIETQAGDVSAYIPTNVISITDGQIFLETELFNQGIRPAINVGLSVSRVGSSAQTKAMKKVSGSMKLELAQYREMAAFAQFGSDLDASTQKLLNRGAKLTELLKQKQYSPMTVAEQVISVFCGVKGHLDDIQQKDISKFEKDIIEKCKSEQPDLINSIISSGKLEEDNEKKLTSIILDLKKNFDK

SEQ ID NO: 174912 - protein, 126 aa, Unknown
  Bacterial polypetide isolated from the Sargasso Sea
MASLDDLKKRISSVKSTQKITKAMKMVAASKLRKAQENAEKGRPYSEKMNNIILNLSNNISDKENSPKLLTGSGESKVHLCVVMTSDRGLCGGFNTNIIKKAKSYFQKIIEEGKNLKIITVGSKRL

SEQ ID NO: 174913 - protein, 325 aa, Unknown
  Bacterial polypetide isolated from the Sargasso Sea
TGIKCIYVAIGQKQSTIANVVAKLEEYGAMEHTIVVSAAAADPAAMQYLSAYSGCAMGEYFRDTGQDALIVYDDLSKQAVAYREISLLLRRPPGREAFPGDVFYLHSRLLERAARVNAEYVEKITEGKVKGKTGSLTALPIIETQAGDVSAFVPTNVISITDGQIFLETDLFNSGVRPAIDPGLSVSRVGGAAQTKIIKKLSGGIRTDLAQYRELAAFSQFASDLDDATKEQLEHGKRITELLKQKQYSPMSVADQAMSLYAADKGYMKDVDIDKVGDFESALLAYFESEKSDLKKQINDTGDWDDDIENQFKELVEDFKKTQTY

SEQ ID NO: 174914 - protein, 488 aa, Unknown
  Bacterial polypetide isolated from the Sargasso Sea
MAAAAKASTGTKGIVRQVIGPVLDVEFPAGKLPRIYNALRIEGKNTAGQTIALTAEVQQLLGDHRIRAVAMSGTDGLVRGMDAIDTGAPISVPVGEGTLGRIMNVLGEPVDEQGPVKTETTSPIHRGAPKLTELETKPQVFETGIKVIDLLAPYRQGGKVGLFGGAGVGKTVLIQELINNIAKEHGGVSVFGGVGERTREGNDLYEEFKDSGVINAEDLSKSKVALCYGQMNEPPGARMRVGLSALTMAEHFRDVNKQDVLLFVDNIFRFVQAGSEVSALLGRMPSAVGYQPTLGTDVGELQERITSTLEGSITSIQAVYVPADDLTDPAPATTFAHLDATTVLSRGLASKGIYPAVDPLDSTSTMLQPAVVGDEHYKTARSVQSTLQRYKELQDIIAILGLDELSEDDRLTVDRARKVEKFLSQPFFVAEIFTGMPGQYVKLEETIKGFQMILAGELDDLPEAAFYLVGNIDQVKAKAEKIRSEAKG

SEQ ID NO: 174915 - protein, 210 aa, Unknown
  Bacterial polypetide isolated from the Sargasso Sea
VSTLLGRMPSAVGYQPTLADEMGFLQERITSLKGRSITSLQAVYVPADDITDPAPHTAFAHLDARTVLSRTIADLGIYPAVDPLDSSSRILDPGVVGDDHYNTAREVQRVLQRYNDLQDIIAILGIDELSEEDKQIVGRARRIQRFLSQPMFVAEQFTGIEGKFVSIKDTVEAFKTILSGELDSVPEQAFYMTGGLDEVMSKAKELEESV

SEQ ID NO: 174916 - protein, 284 aa, Unknown
  Bacterial polypetide isolated from the Sargasso Sea
KKRISSVKSTQKITKAMKMVAAAKLRRAQESAEKGRPYSDKMNNIILNLSNGISDIENAPKLLSGSGEDKVHLCVVMTSDRGLCGGFNTNIIKKAKLYFQKILDEGKTLKIITVGTKGYDQLKRLYGDNIIEKISFKDSKNVNYFDADKVGKIVIEKFEKKEFDVCAIFYNQFKNVITQIPQEQQIIPLKASENEENSSEDNYEFEPEEDEILNNLLPKNISTQIFKAMLENSASEQGSRMSAMDNATRNAGEMVDKLTIEYNRSRQAAITKELIEIISGAESL

SEQ ID NO: 174917 - protein, 150 aa, Unknown
  Bacterial polypetide isolated from the Sargasso Sea
MRKGQITQIIGAVVDVKFDGELPEILTALECDNGGNRLVLEVAQHLGESSVRTIAMDATEGLKRGDEVTDTAAPIKVPVGPETLGRIINVIGEPIDERGEVKSSDNWPIHRAAPEFNDQSTETEILVTGIKVIDLLAPYAKGGKIGLFGG

SEQ ID NO: 174918 - protein, 511 aa, Unknown
  Bacterial polypetide isolated from the Sargasso Sea
MEINPSEVTKILKEQIKKFGDKAEVTEVGQVLSVGDGIARIYGLDNVQAGEMVEFSDGSKGMALNLESENVGVVIFGDDKSVREGDTVKRTGAIVDTPVGKELLGRVVDGLGNPIDGKGALDKSVKRSRVEVKAPGIIPRKSVSEPMQTGLKSIDSLVPIGRGQRELIIGDRQTGKTAVAIDAIINQKKINESGDEKKKLYCIYVAVGQKRSTVRQIEKTLEEAGAMEYTTIVAATASDAAPLQFLAPYTGCAMGEYFRDNGMHALIIYDDLSKQAVAYRQMSLLLRRPPGREAYPGDVFYLHSRLLERAAKLSDEHGGGSLTALPIIETQGGDVSAFIPTNVISITDGQIFLETELFNQGIRPAINVGLSVSRVGSSAQTKAMKKVSGSMKLELAQYREMAAFAQFGSDLDASTQKLLNRGSKLTELLKQNQYSPMTVAEQVISIFCGVKGHLDDIEQKDISSFENKIIEKCKAEKPEIIEGITTSGKLDDEHEKILNEIILQLKKDFNA

SEQ ID NO: 174919 - protein, 475 aa, Unknown
  Bacterial polypetide isolated from the Sargasso Sea
MTTNNKGTISQVIGAVVDVRFEENLPPILAALECKVGDKTVILEVAQHLGESTVRTIAMESTDGMTRGDDVVDTGNQIQVPVGPETLGRIMNVVGEPVDERGEIKSTDKWSIHRDAPDFVDQATETEILVTGIKVVDLLAPYSRGGKIGLFGGAGVGKTVIIMELINNIAKAHGGYSVFSGVGERTREGNDLYHEMIESGVIDLEGKESKCALVYGQMNEPPGARARVALTGLTVAEYFRDMEGQDVLFFVDNIFRFTQAGSEVSALLGRIPSAVGYQPTLATDMGSLQERITSTNKGSITSVQAIYVPADDLTDPAPATSFAHLDATTVLSRQIAELGIYPAVDPLDSTSRILDPRVVGDEHYRVARNVQAVLQTYKSLQDIIAILGMDELSEEDKLTVARARKIQRFMSQPFFVAEVFTGTPGKYVELEDTIKGFDAICKGEYDHLPEAAFYMVGTIEEAIQKAEKMAEEAAA

SEQ ID NO: 174920 - protein, 508 aa, Unknown
  Bacterial polypetide isolated from the Sargasso Sea
MDIQPSEISKILKEEIKNFGSDSEITEVGQVLSIGDGIARIYGLDNVQAGEMVMFDDGTRGMALNLEDDNVGVVLFGSDANIKEGDTVKRTNSIVDVPVGKELLGRVVDALGNPIDGKGNIESQNRSRIEVKAPGIIPRKSVSEPMQTGLKAIDSLIPIGRGQRELIIGDRQTGKTAIAIDTIINQKSINESGDETKKLYCIYVGIGQKRSSIAQTVKALEDAGAMEYTTVVAATASDAAPLQFLAPYTGCSMGEYFRDNGMHALIIYDDLSKQAVAYRQMSLLLRRPPGREAFPGDVFYLHSRLLERAAKMNDENGGGSLTALPVIETQANDVSAFIPTNVISITDGQIFLETELFNQGIRPAVNVGLSVSRVGSAAQTKAMKKVAGSIKLELAQYREMAAFAQFGSDLDASTQKLLNRGSKLTELLKQNQYSPMTIAEQVVSIFTGVNGYLDDLELNQIRDFEKDLFELIKSSHSDIIESINSSGDLNDDTSSKLTSIIEEFKKNR

SEQ ID NO: 174921 - protein, 294 aa, Unknown
  Bacterial polypetide isolated from the Sargasso Sea
MPSLDDLKKRIGSVKSTQKITKAMKMVAAAKLRRAQESAESSRPYSETMEDLISSISSGYSPTSNERNLLTGDNKDSIHMLILFTSERGLCGGFNSIVTKSLRDKVASLEESGKQVKIICVGKKGYDIIKRQHEEKIVEVVDMRSVKSASYQDAKNIADKIIKMYFDEEFDKCSIFYNKFKSVISQIPTEQQIVPIDIPENESDTTKNDNTFFEFEPGESEILDELLPLNFTIQIFKALLESAASEQGARMSAMDNASRNASDMIDNLTLFYNRSRQAVITKELIEIISGAEAV

SEQ ID NO: 174922 - protein, 145 aa, Unknown
  Bacterial polypetide isolated from the Sargasso Sea
TVLARALAAKGIYPAVDPLDSTSTMLQPSVVGDEHYKTARAVQSTLQRYKELQDIIAILGLDELSEEDRLTVDRARKIEKFLSQPFFVAEIFTGMSGKYVKLEDTIAGFNMILSGELDDLPEQAFYLVGNIDEVKAKAEKIKSEK

SEQ ID NO: 174923 - protein, 580 aa, Unknown
  Bacterial polypetide isolated from the Sargasso Sea
MSTENGVIYRISGPVVTATGIAPRMYEVVRVGNEGLMGEVIELHGEQSVIQVYEETSGIEPGEPVIRTGQTLSVQLGPGLLTQIYDGIQRPLPKLEETMGVFITRGVDADGLDLTKEWEFVPTVKVGDELSAGHVIGTVQETETIEHRVMVPPGKEGVVKTIESGSFNITQTVCKLEDGSEIAMMQEWPVRHPRPFVQKYAPDVPLMTGQRILDFLFPLAKGGTAGIPGPFGSGKTVTQQQLAKWSDAQIVVYIGCGERGNEMTEVLDEFPHLIDPNTNKPLMNRTVMIANTSNMPVAAREASVYTGVTIAEYFRDMGYNVALMADSTSRWAEAMREISSRLEEMPGEEGYPAYLSSRLAEFYERAGRVETLSGEDGSVSVIGAVSPPGGDISEPVSQGTLRIVKVFWGLDAGLARQRHFPAINWLSSYSLYPQALDQWYRDNIATDFPEVRTEISTLLQIEAELQEIVQLVGSDALPIDQQLTLEVARMIREFFLQQNAFHDVDTYSDLKLQYDMAKAILNFQEEGKKAIAGGAQLEDVVNVPARTDLMRGRFEEGYDGRIEGLVAEMSKQIAASMEEN

SEQ ID NO: 174924 - protein, 464 aa, Unknown
  Bacterial polypetide isolated from the Sargasso Sea
MSGKEYRTITDVKGPLVFLNKTEPVSYNEIVQLRLSDGSIKNGQVLDTSDDQVIVQVFEGTASVDRQTGVKFLGDVFKLPVSKGLIGRILDGAGRPRDGGPEIVADDMADIIGAAINPYSRQSPESFIQTGISAIDACTSLVRGQKLPIFSASGLPHNDIALQIARQAKLVGSDDDFVVVFCAMGITAEEYNFFVHDLERTGALENAALFVNLADDPAVERLITPRLALTAAEYLAFEHDYHVLVIYTDMTNYCESLRQIGAAREEVPGRRGYPGYMYTDLAMLYERAGLVKGKKGSITQFPILTMPGDDITHPIPDLSGYITEGQIVISRELHQKGIYPPINVLPSLSRLMNAGIGPGKTREDHKSVSDQLYAAYAQGKELRGLVAIVGEDALNERDLQLLKFADIFEDKFLRQSRDEDRSIDEGTLDLAWNLLSNIDTKFLVRLDQKWIDKYHPGEKKGEEE

SEQ ID NO: 174925 - protein, 229 aa, Unknown
  Bacterial polypetide isolated from the Sargasso Sea
MLPKLLVGTGEEKVHLCIVLTADRGLCGGFNTNIIKKAKSYFEKIISENKTLKIITVGSKGYDQLKRQYKSYIVENISFKESKNINYFDADKVGKIIIEKFEKNEFDVCAIFYNKFKNVITQIPQEQQIVPLNEDKDDKDDSGNDNDYEFEPDEDEILSNLLPKNISTQIFKAMLENSASEQGSRMTAMDNATRNAGELVDRLTIEYNRSRQAAITKELIEIISGAESL

SEQ ID NO: 174926 - protein, 375 aa, Unknown
  Bacterial polypetide isolated from the Sargasso Sea
KGEVKTKEKWPIHREAPKFTDQSTETEILETGIKVIDLLAPYSKGGKIGLFGGAGVGKTVIIMELINNIAKAHGGFSVFAGVGERTREGNDLYHEMIESGVIKPEGKGSKAALVYGQMNEPPGARARVGLTGLTVAEYFRDKEGQDVLFFVDNIFRFTQAGSEVSALLGRIPSAVGYQPTLATDMGNLQERITTTGKGSITSVQAIYVPADDLTDPAPATSFSHLDATTVLSRQIAELGIYPAVDPLDSTSRILDPRIVGEEHYRVAREVQKILQTYKSLQDIIAILGMDELSEEDKLTVARARKIQRFLSQPFFVAEVFTGTPGKLVNLDSTIKSFDAICKGEYDHLPEAAFYMVGSIEEAIAKAEKMAKEAAA

SEQ ID NO: 174927 - protein, 458 aa, Unknown
  Bacterial polypetide isolated from the Sargasso Sea
MSTGNIVQVIGAVVDVEFPKEAIPSVYDALTLKDGELVFEVQQQLGDGIVRTIAMGASEGLKRGLEVENTGAPISVPVGQETLGRVLDVLGNPIDEKGPVGAKANRPIHAKAPTFEEQSTEADVLETGIKVIDLLCPFAKGGKVGLFGGAGVGKTVTVMELIRNIAAEHDGFSVFAGVGERTREGNDFYHEMMESNVLDKVALVYGQMNEPPGNRLRVALTGLTIAENFRDEGRDVLMFIDNIYRYTLAGTEVSALLGRMPSAVGYQPNLAEEMGVLQERITSTKTGSITSIQAVYVPADDLTDPSPATTFAHLDATVVLARSIAELGIYPAVDPLDSNSRQLDPGIVGQEHYDTARSVQQVLQRYKELQDIIAILGMDELSEEDKLTVQRARKIQRFLSQPFFVAEVFTGSPGQYVSLRDSIKAFQGIVAGDYDDLPEQAFYMVGTIEEAVEKAKSM

SEQ ID NO: 174928 - protein, 286 aa, Unknown
  Bacterial polypetide isolated from the Sargasso Sea
MANEKEIRTKIGSVKNTQKITKAMEMVAASKMRRTQETMKKALPYADKIRAVIGHIYNANPDYKHPFLEKRDVKTAGYIVVSSDRGLCGGLNVNMFRGLIAELKENKNNQVESKLCLVGAKAVQFFRSVDVDVVAAASHLGEEPQVEDLVGSIKTMLDEYIDGKIDQLFIVHNDFVNTMTQKPEIKTLLPIDPEDREEMQEHWDYIYEPDSKELLDYILMRYIESQVYRAVVENVACEMAAKMVAMKSATDNAGKLIDQLELDYNKARQAAITQEISEIVGGAAAV

SEQ ID NO: 174929 - protein, 514 aa, Unknown
  Bacterial polypetide isolated from the Sargasso Sea
MSQLNPSEISSVLKEKIAGLDLSAERKNEGIVVSVSDGIVRIHGMGDVMYGEVIEFENGTKGMALNLEQDSVGAVVLGDYLEIIEGQKAVCTGKVLEVPVGEELLGRVVNTLGTPIDGKGEIKAEKSLPVEVVAPGVIARQSVDQPVQIGLKAVDAMVPIGRGQRELIIGDRQTGKTAVAVDAIINQKGTGIKCIYVAIGQKQSTVANVVRKLEEYGAMEHTIVVSATAADPAPMQYLSAYAGCTMGEYFRDKGEDALIVYDDLSKQAVAYRQVSLLLKRPPGREAYPGDVFYLHSRLLERAARVNAEYVEQVTGGKVKGKTGSLTALPIIETLAGDVSAFVPTNVISITDGQIYLETELFNSGVRPAINPGLSVSRVGGSAQTKIMKKLAGGVRTALAQYRELAAFSQFASDLDDATKQQLANGKAFTELLKQKQYAPMSVAQQALSLFAADRGYMADVEVEKILAFEEALHGYLTSEKGELEDQINSTGDWNDDIEAKFVELVEDFKKTQTF

SEQ ID NO: 174930 - protein, 465 aa, Unknown
  Bacterial polypetide isolated from the Sargasso Sea
MSSGIVTQIIGAVIDVEFDKDNIPKVYEALMVDESGTTLEVQQQLGDGVVRTIAMGATEGLKRGLSASRTNAPISVPVGPETLGRIVDVLGNPIDEKGPIGEKSKMPIHRKPPTYTDQSASSEVLETGIKVIDLMCPFAKGGKIGLFGGAGVGKTVNMMELINNIALQHSGLSVFAGVGERTREGNDFYYEMQESGVVNIDNLGESKVAMVYGQMNEPPGNRLRVALTGLTMAESFRDEGKDVLLFIDNIYRYTLAGVEVSALLGRMPSAVGYQPTLAEEMGALQERITSTKTGSITSIQAVYVPADDLTDPSPATTFAHLDATVVLSRQISELGIYPAVDPLDSTSRQLDPFVVGDDHYEVAQGVQKILQRYNELKDIIAILGMDELSEEDKGLVARARKAQRFLSQPFFVAEIFTGTPGKYVSLEDTIKAFKGILNGDYDHLPEQAFYMVGTIEEAVEKAKTL

SEQ ID NO: 174931 - protein, 294 aa, Unknown
  Bacterial polypetide isolated from the Sargasso Sea
MEINPSEVTKILKEQIKKFGDKAEVTEVGQVLSVGDGIARIYGLDNVQAGEMVEFSDGSKGMALNLESENVGVVIFGDDKAVKEGDTVKRTGAIVDTPVGKELLGRVVDGLGNPIDGKGALDKSLKRSRVEVKAPGIIPRKSVSEPMQTGLKSIDSLVPIGRGQRELIIGDRQTGKTAVAIDAIINQKKINESGDEKKKLYCIYVAVGQKRSTVRQIEKTLEEAGAMEYTTIVAATASDAAPLQFLAPYTGCTMGEYFRDNGMHALIIYDDLSKQAVAYRQMSLLLRRPPGREA

SEQ ID NO: 174932 - protein, 509 aa, Unknown
  Bacterial polypetide isolated from the Sargasso Sea
MEIQPAEISAILKKKIKDFGKDAEVSEIGQVLSVGDGIARVYGLDNIEAGEMVEFPGEIKGMALNLEEDNVGVVIFGDDTDIKEGDTVKRTGAIVEVPIGKELLGRVVDALGNPIDGKGPINSSESKRVDIKAPGIIPRKSVNEPMQTGLKAIDSLIPIGRGQRELIIGDRQTGKTAIAVDAILNQKEVNKSDNESEKLYCIYVAIGQKRSSVAQLVKTLEENGAMEYSIVVAATASEPAPLQYLAPFTGCTMGEYFRDNSMHALVVYDDLSKQAVAYRQMSLLLRRPPGREAYPGDVFYLHSRLLERAAKLNEDNGGGSLTALPIIETQANDLSAYIPTNVISITDGQIFLETDLFFQGIRPAVNVGLSVSRVGSSAQIKAMKQVAGSIKGELAQYREMAAFAQFGSDLDASTQKLLARGERLTELLKQKQFSPISTNEQVVLLFAGVNGYMDDIAVNQIGDFEEGLLNHIRNNYIQILETITSTKSLDEETEATLKSAVEEFTASFN

SEQ ID NO: 174933 - protein, 294 aa, Unknown
  Bacterial polypetide isolated from the Sargasso Sea
MANLKELRNRISSVSSTQKITKAMQMVAASKLRRAQENVETARPYSDKLGDILKNLSASFSGQDNAPELLAGNGNDKSHLLIIATSERGLCGGFNTSIVKLAKEHILQLKEEGKEVKLIIIGKKGKELLQRDFGQEIIDIYDFSEVKDLGFIEAEKVAENILSLFEEGKFDICSLYFAKFESVLSQVPVCQKLIPFDIESEVNEEKDIENICYEYEPDEEDILKELLPKNLSVQILRALLENVASEFGARLTAMDNATRNASDMIDDLTITYNRSRQASITSELIEIISGAEAL

SEQ ID NO: 174934 - protein, 266 aa, Unknown
  Bacterial polypetide isolated from the Sargasso Sea
MSGLNPSEISSVLKDKISGLDLKAETKNEGTIVNVSDGIIRIHGMGDVMYGELVEFENGVFGLALNLEQDSVGVVVLGDYLGLSEGQKVTCTGKILEVPVGEEMLGRVVDALGNPIDGKGELKTKQTAPIEVVAPGVIARQSVDQPVQIGLKSIDAMVPIGRGQRELIIGDRQTGKTAVAIDAIINQKGTGIKCIYVAIGQKQSTIANVVAKLEEYGAMEHTIVVSAAAADPAAMQYLSAYSGCAMGKYFRDTGQDALIVYDDCQS

SEQ ID NO: 174935 - protein, 511 aa, Unknown
  Bacterial polypetide isolated from the Sargasso Sea
MEINPSEVTKILKEQINKFGDKAEVSEVGQVLSVGDGIARIYGLDNVQAGEMVEFSDGSKGMALNLESDNVGVVIFGDDRAVKEGDTVKRTGAIVDTPVGKELLGRVVDGLGNPIDGKGALDKGVKKSRVEVKAPGIIPRKSVSEPMQTGLKSIDSLVPIGRGQRELIIGDRQTGKTAVAIDAIINQKKINESDDEKQKLYCVYVAIGQKRSTVRQIEKTLEEAGAMEYTTIVAATASDAAPLQFLAPYTGCAMGEYFRDNGMHALIIYDDLSKQAVAYRQMSLLLRRPPGREAYPGDVFYLHSRLLERAAKLSEDHGGGSLTALPIIETQGGDVSAFIPTNVISITDGQIFLETELFNQGIRPAINVGLSVSRVGSSAQTKAMKKVSGSMKLELAQYREMAAFAQFGSDLDASTQKLLNRGSKLTELLKQKQYSPMTVAEQVISVFCGVKGHLDDVEQKNIAEFENKIIAKCKSEKPEILDSITSSGKLEEDLEKSLTEVITELKKNFKT

SEQ ID NO: 174936 - protein, 134 aa, Unknown
  Bacterial polypetide isolated from the Sargasso Sea
MPSLDDLKKRIKSVKSTQKITKAMKMVAAAKLRKAQENAEKGRPYSKKMQNIILNLTRSISDPKNAPKLLSGTGNDKTYLCVVLTADRGLCGGFNTNICKLAKTSFKKILNEQKNLKIITVGSKGFDQIKREYG

SEQ ID NO: 174937 - protein, 309 aa, Unknown
  Bacterial polypetide isolated from the Sargasso Sea
NMMELINNIATEHSGLSVFAGVGERTREGNDFYFEMQESGVVNVDKPQESKVAMVYGQMNEPPGNRLRVALTGLTIAEKFRDEGRDVLLFIDNIYRYTLAGVEVSALLGRMPSAVGYQPTLAEEMGALQERITSTKTGSITSIQAVYVPADDLTDPSPATTFAHLDATVVLSRQIAELGIYPAVDPLDSTSRQLDPLVVGQDHYEVAQGVQGVLQRYRELKDIIAILGMDELSEEDKLAVARARKVERFLSQPFFVAEVFTGSPGQYVSLEDTIKAFKGILAGDYDDLPEQAFYMVGKIEEAVEKAKTL

SEQ ID NO: 174938 - protein, 423 aa, Unknown
  Bacterial polypetide isolated from the Sargasso Sea
MSQLNPSEISSVLKEKIAGLDLSAERKNEGIVVSVSDGIVRIHGMGDVMYGEVIEFENGTKGMALNLEQDSVGAVVLGDYLEIIEGQKAVCTGKVLEVPVGEAMLGRVVNTLGTPIDGKGEINAEGSAPVEVVAPGVIARQSVDQPVQIGLKAVDAMVPIGRGQRELIIGDRQTGKTAVAIDAIINQKGTGIKCIYVAIGQKQSTVANVVRKLEEYGAMEHTIVVSATAADPAPMQYLSAYAGCTMGEYFRDKGEDALIVYDDLSKQAVAYRQVSLLLKRPPGREAYPGDVFYLHSRLLERAARVNADYVEQVTGGKVKGKTGSLTALPIIETLAGDVSAFVPTNVISITDGQIYLETELFNSGVRPAINPGLSVSRVGGSAQTKIMKKLAGGVRTALAQYRELAAFSQFASDLDDATKQQLA

SEQ ID NO: 174939 - protein, 457 aa, Unknown
  Bacterial polypetide isolated from the Sargasso Sea
IVVSVSDGIVRIHGMGDVMYGEVIEFENGTKGMALNLEQDSVGAVVLGDYLEIIEGQKAVCTGKVLEVPVGEAMLGRVVNTLGVPIDGKGEINAEHSSPVEVVAPGVIARQSVDQPVQIGLKAVDAMVPIGRGQRELIIGDRQTGKTAVAIDAIINQKGTGIKCIYVAIGQKQSTVANVVRKLEEYGAMEHTIVVSATAADPAPMQYLSAYAGCTMGEYFRDKGEDALIVYDDLSKQAVAYRQVSLLLKRPPGREAYPGDVFYLHSRLLERAARVNAEYVEQVTGGKVKGKTGSLTALPIIETLAGDVSAFVPTNVISITDGQIYLETELFNSGVRPAINPGLSVSRVGGSAQTKIMKKLAGGVRTALAQYRELAAFSQFASDLDDATKQQLANGKAFTELLKQKQYAPMSVAQQALSLFAADRGYMADVEVEKILDFEEALHGYLTSEKGDLEEQI

SEQ ID NO: 174940 - protein, 290 aa, Unknown
  Bacterial polypetide isolated from the Sargasso Sea
MASLDDLKKRIASVKSTQKITKAMKMVAAAKLRRAQESAEKGRPYSEKINNVILNLSTGISDKENAPKLLSGTGNDKVHLCVVMTSDRGLCGGFNSNIIKKAKSYFSKILDEGKELKIITVGSKGNDQLRRVYGNKIIENISFKESKNANYFDADKVGKKIIEKFEASEFDICTIFYNQFKNVITQIPQAQQIIPLNNDVKKNGSDETYEFEPDEDEILNNLLPKNISTQIFKAMLENSASEQGSRMSAMDNATRNAGEMVDKLTIEYNRSRQAAITKELIEIISGAESL

SEQ ID NO: 174941 - protein, 293 aa, Unknown
  Bacterial polypetide isolated from the Sargasso Sea
MPNLKELKNRISSVKSTRKITSAMKMVAASKLRRAQELAESSRVYADSLSFILSSLAGNTKNSSDLPEILTGRENSKISLLIINSSDRGLCGGFNSNLFRNAKKWISDQQGQGKSVKIMTVGKKASSFYKKTDLDIVASFEDLNSNDRQLQVSEEIKNKIMELFENNEIDEVSILFNKFVSAISQEPTYQSLIPLSNEETSEDESEANNAIFEFEPDKNELLEYLVPRNFLTQIYRSVLESSASEHAARMTSMDNATRNAGDMIDRLTLTYNRTRQAFITKELIEIISGAEAV

SEQ ID NO: 174942 - protein, 183 aa, Unknown
  Bacterial polypetide isolated from the Sargasso Sea
MSQIRPDEISSIIRDQLSNSKSSTQLEEVGTVLQIGDGVARIYGLTNAQAGEIIEFENGTKGLVLNLEEDNVGSVLMGDYSDLKEGDSVKRTKEIASIKVGDGMCGRVVDTLGNPVDGKGAIKGKLYDMPLERKAPGVIYREPVSEPLQTGIKAIDSMIPIGRGQRELIIGDRQTGKTAVAID

SEQ ID NO: 174943 - protein, 297 aa, Unknown
  Bacterial polypetide isolated from the Sargasso Sea
MPSLKDIKTQINSVVSTKKITTAMKMVAASKLRRSQEKAVAARPYSSRLEEMLSSLASSAVSGEGIIKLLSGTGNDKSYMVVPVSADRGLCGGFNSSINRETFKLVQSLQKDGKNVQLMPVGKKSRDFFIRVMKDQIVESFIDLNVSNNGYESAQQVSNKLQDLYFDGKFDKCILVFNKFKSAITQEVTQQQLIPLDVSDSSKEDKEGNNAAKAIYDYEPDEETILNDLLPKNVSIQIFKVLLESDAGEHGARMAAMDNATRNAGEMIDGLTLKYNRTRQAFITKELIEIISGAESI

SEQ ID NO: 174944 - protein, 212 aa, Unknown
  Bacterial polypetide isolated from the Sargasso Sea
MEIKTDQLTQLLREQIEKHDGSVDISEVGEVLEVGDGVARVSGLENVMSSELVELPNGVFGMALNLEEDNVGLVLFGESRLVKEGDLAKRTGRVVEVPVGDAMLGRVVNPLGQPIDGKGPINTEHSLPIERKALGVMARSPVNEPLQTGIKAVDSMIPIGRGQRELIIGDRQTGKTAVAIDAIINQKYTHSTDNPVYCIYVAIGQKASTVAA

SEQ ID NO: 174945 - protein, 318 aa, Unknown
  Bacterial polypetide isolated from the Sargasso Sea
VGKTVTIMELINNIAKAHGGFSVFAGVGERTREGNDLYHEMIESGVIKTDGKGSKAALVYGQMNEPPGARARVALTGLTVAEYFRDKEGQDVLFFVDNIFRFTQAGSEVSALLGRIPSAVGYQPTLATDMGNLQERITSTDKGSITSVQAIYVPADDLTDPAPATSFSHLDATTVLSRQIAEIGIYPAVDPLDSTSRILDPRIVGDEHYRVARDVQRILQAYKSLQDIIAILGMDELSEEDKLTVARARKIQRFLSQPFFVAEVFTGSPGKLVDLDSTIKGFDAICKGEFDHLPESAFYMVGSIEEVVEKAEKMNKNN

SEQ ID NO: 174946 - protein, 158 aa, Unknown
  Bacterial polypetide isolated from the Sargasso Sea
DLTDPSPATTFAHLDATVVLSRQIAELGIYPAVDPLDSTSRQLDPLVVGEEHYNVAQGVQGVLQKYKELKDIIAILGMDELSEEDKLAVDRARKVERFLSQPFTVAEVFTGSPGKYVKLEDTIKSFKGILAGDYDDLPEQAFYMVGTIEEAVEKAKTL

SEQ ID NO: 174947 - protein, 474 aa, Unknown
  Bacterial polypetide isolated from the Sargasso Sea
MAKNKSGKITQVIGAVVDVKFDENLPPILNALEVDNNGTRLVLEVAQHLGENTVRCIAMDATEGLVRNMDAIDTGAPITVPVGPETLGRIINVVGDAIDEKKPIKSKKSYPIHRPAPEFVEQATESEILETGIKVVDLLAPYAKGGKIGLFGGAGVGKTVLIMELINNVAKAHGGYSVFAGVGERTREGNDLYNEMIESSVIIPDGPGSKAALVYGQMNEPPGARARVGLTGLTLAEYFRDEEGQDVLFFVDNIFRFTQAGSEVSALLGRIPSAVGYQPTLSTDMGALQERITTTTKGSITSVQAIYVPADDLTDPAPATSFAHLDATTVLSRQISEKGIYPAVDPLDSTSRMLDPRVVGEEHYETARSVQSILQQYKALQDIIAILGMDELSEEDKLTVARARKIERFLSQPFHVAEVFTGSPGKLVSLADTIKGFKGIVNGEYDHLPEAAFYMVGTIEEAVEKGAKLEASAA

SEQ ID NO: 174948 - protein, 79 aa, Unknown
  Bacterial polypetide isolated from the Sargasso Sea
KLVVARARKIQRFLSQPFFVAEVFTGSPGKLVDLDSTIKGFDAICKGEYDHLPEAAFYMVGTIEEAIEKAKKMEQEAAA

SEQ ID NO: 174949 - protein, 409 aa, Unknown
  Bacterial polypetide isolated from the Sargasso Sea
LLGRVVDGLGNPIDGKGALFKSLKRSRVEVKAPGIIPRKSVSEPMQTGLKSIDSLVPIGRGQRELIIGDRQTGKTAVAIDAIINQKKINESGDEKKKLYCIYVAVGQKRSTVRQIEKTLEEAGAMEYTTIVAATASDAAPLQFLAPYTGCTMGEYFRDNGMHALIIYDDLSKQAVAYRQMSLLLRRPPGREAYPGDVFYLHSRLLERAAKLGDEHGGGSLTALPIIETQGGDVSAFIPTNVISITDGQIFLETELFNQGIRPAINVGLSVSRVGSSAQTKAMKKVSGSMKLELAQYREMAAFAQFGSDLDASTQKLLNRGSKLTELLKQNQYSPMTVAEQVISVFCGVRGHLDDIEQKDIASFENKIIEKCKAEKPDIIESITASGKLEDDKEKELSEIIIQLKKDFNS

SEQ ID NO: 174950 - protein, 291 aa, Unknown
  Bacterial polypetide isolated from the Sargasso Sea
MASLDDLKKRISSVKSTQKITKAMKMVAAAKLRRAQESAEKGRPYSDKMNNIILNLSNGISDIENAPKLLSGTGEDKVHLCVVMTSDRGLCGGFNTNIIKKAKQYFQKVLDEGKTLKIITVGTKGYDQLKRLYGDNIIDRISFKESKNVNYFDADKVGKIVIEKFEKKEFDVCTIFYNQFKNVITQIPQEQQIIPLNTSEKDENSLEDNYEFEPEEDEILSNLLPKNISTQIFKAMLENSASEQGSRMSAMDNATRNAGEMVDKLTIEYNRSRQAAITKEKIEIISGAESL

SEQ ID NO: 174951 - protein, 349 aa, Unknown
  Bacterial polypetide isolated from the Sargasso Sea
MKIRAEEISKIIQQQVENFDKTATKSEVGTVLEVGDGIARVFGLDNVQAGELVEFPGSVTGMALNLQEDNVGVVIFGDDRGIKEGDEVKRTERIAEIPVGEGLLGRVVDPLGNPIDGKGPIESSDTRLIETIAPGIVARKSVHQPMQTGLKAIDSMVPIGRGQRELIIGDRQTGKTAIAIDTIINQKGGDVICIYVGIGQKRSTMAQIVQRLENEGAMEHTIVVSSTASEPAPLQFLAPYSGVSIGEYFRDKGGHVLCVYDDLSKQAVAYRQLSLLLRRPPGREAYPGDVFYLHSRLLERSCKLSDELGAGSLTALPIIETQAGDVSAYIPTKVISITDGQIFLSTDLS

SEQ ID NO: 174952 - protein, 410 aa, Unknown
  Bacterial polypetide isolated from the Sargasso Sea
MEINPSEVTKILKEQIKKFGEKTEVTEVGQVLSVGDGIARIYGLDNVQAGEMVEFADGSKGMALNLESENVGVVIFGDDRNIKEGDVVKRTGNIVDTPVGKELLGRVVDGLGNPIDGKGALDKGVKKTRVEVKAPGIIPRQSVSEPMQTGLKSIDSLVPIGRGQRELIIGDRQTGKTAVAVDAIINQKKINETGDEKQKLYCIYVAVGQKRSTVRQIQKTLEEAGAMEYTTIVAATASDSAPLQFLAPYTGCAMGEYFRDNGMHALIIYDDLSKQAVAYRQMSLLLRRPPGREAYPGDVFYLHSRLLERAAKLSEEHGGGSLTALPIIETQGGDVSAFIPTNVISITDGQIFLETELFNQGIRPAINVGLSVSRVGSSAQTKAMKKVSGSMKLELAQYREMAAFAQLDQT

SEQ ID NO: 174953 - protein, 253 aa, Unknown
  Bacterial polypetide isolated from the Sargasso Sea
GARARVGLTGLTVAEYFRDKEGQDVLFFVDNIFRFTQAGSEVSALLGRIPSAVGYQPTLATDMGNLQERITTTGKGSITSVQAIYVPADDLTDPAPATSFSHLDATTVLSRQIAELGIYPAVDPLDSTSRILDPRIVGEEHYRVAREVQKILQTYKSLQDIIAILGMDELSEEDKLTVARARKIQRFLSQPFFVAEVFTGTPGKLVNLDSTIKSFDAICKGEYDHLPEAAFYMVGSIEEAIAKAEKMAKEAAA

SEQ ID NO: 174954 - protein, 148 aa, Unknown
  Bacterial polypetide isolated from the Sargasso Sea
MGATSALVFSCMGAAYGTAKSGVGIASMGVMRPELVMKSIVPVVMAGVLGIYGLIIAVVISTNIDPTSYTLYQGYAHLGSGLACGLSGLSAGMCIGIVGDAGVRANAQQPKLFVGVILILIFAEALALYGMIVGIILSSSASAATGGG

SEQ ID NO: 174955 - protein, 505 aa, Unknown
  Bacterial polypetide isolated from the Sargasso Sea
MVSIRPDEISSILKQQITDYDQSVSVSNVGTVLQIGDGIARIYGLDQVMAGELLEFEDGTEGIALNLEDDNVGAVLMGEALGVQEGSNVKSTGKIASVPVGEAMQGRVVNPLGQPIDGKGEIPTSDTRLIEEMAPGIIKRRSVHEPMQTGITSIDAMIPVGRGQRELIIGDRQTGKSAIAIDTIINQKGQDVVCVYVAIGQKSASVANVVEVLREKGALDYTIVVSAGASEAAALQYLAPYTGAAIAEHFMYQGKATLVIYDDLTKQAQAYRQMSLLLRRPPGREAYPGDVFYCHSRLLERAAKLSDDMGGGSMTALPIIETQAGDVSAYIPTNVISITDGQIFLSADLFNSGLRPAINVGISVSRVGGAAQTKAIKKIAGTLKLELAQFDELAAFSQFASDLDEATQQQLERGKRLRELLKQAQFSPLNLAEQVAVVYAGVKGLIDEVPVEDVTKFAAELREYLKLNKAEFIEEILKEKKLNDSLEATLKEVINEVKSSMLATV

SEQ ID NO: 174956 - protein, 241 aa, Unknown
  Bacterial polypetide isolated from the Sargasso Sea
MFFNSLLTNFAALEVGQHLYWQIGNIRLHGQVFLTSWILLGALLVFISLGTKKMENDPRGLQNLLEFLWDYIRDLARTQIGEKVYRDWMPFIGTLFLFVFVSNWGGALIPWRLIKLPSGELGAPTADINTTIALALLVSLSYFYAGLSNKGWRYFEYYVHPTPIMLPFKILEDFTKPLSLSFRLFGNILADELVVGVLVFLVPLILPIPVMFLGLFTSAIQALIFATLAAYYIGEAVEEHH

SEQ ID NO: 174957 - protein, 208 aa, Unknown
  Bacterial polypetide isolated from the Sargasso Sea
MSSYADALREVSAAREEVPGRRGYPGYMYTDLATIYERAGRIKGRKGSITQLPILTMPNDDITHPIPDLTGYITEGQIYIDRQLHNRQIYPPINVLPSLSRLMKSAIGEGMTRRDHGEVSNQLYANYAIGKDTLAMKAVVGEEALSSDDLLYLEFLDKFERKFINQGNEGRNVYDALDLAWSLLRIFPRELLKRIPAKTLDRHYDRVA

SEQ ID NO: 174958 - protein, 291 aa, Unknown
  Bacterial polypetide isolated from the Sargasso Sea
MASLDDLKKRISSVKSTQKITKAMKMVAAAKLRRAQENAEKGRPYSEKMNNIILNLSSGISDKENAPKLLTGTGEAKTHLCVVLTSDRGLCGGFNTNIIKKAKQYFQKILKENKILKIITVGSKGYDQLKRQYKENIIEKISFKDSKNINYFDADKVGKIIIDRFEKKEFDVCAIFYNQFKNVITQIPQEQQIIPLKSNEEKETSSNDSYEFEPEEDEILSNLLPKNISTQIFKAMLENSASEQGSRMSAMDNATRNAGEMVDKLTIQYNRSRQAAITKELIEIISGAESL

SEQ ID NO: 174959 - protein, 213 aa, Unknown
  Bacterial polypetide isolated from the Sargasso Sea
VFYLHSRLLERAAKLSDEHGGGSLTALPFMETQGGDVSAFIPTNVISITDGQIFLETNLFNQGIRPAINVGLSVSRVGSSAQTKAMKKVSGSMKLELAQYREMAAFAQFGSDLDASTQKLLNRGSKLTELLKQKQYSPMTVAEQVISVFCGVKGYLDDLDLKDISSFEKKIIEKCKSEKPEILEAISKSGKLEEDTENLLVETIKELKQNFNS

SEQ ID NO: 174960 - protein, 270 aa, Unknown
  Bacterial polypetide isolated from the Sargasso Sea
MDINPSEITKILKEQIKNLGDKTEVSEIGKVLSVGDGIARVYGLDNVQAGEMVEFNDGSKGMALNLESDNVGVVIFGDDKAIKEGDTVKRTGAIVDAPVGKELLGRVVDGLGNPIDGKESLKKGIKRKRVEVKAPGIIPRKSVSEPMQTGLKAIDSLIPIGRGQRELIIGDRQTGKTAVAIDTIINQKKINESNDEKKKLYCIYVAIGQKRSTVAQIVKTLQDAGAMEYTIIVSATASDPAPLQFLAPYTGCTFGEYFRDNGMHALIIYD

SEQ ID NO: 174961 - protein, 525 aa, Unknown
  Bacterial polypetide isolated from the Sargasso Sea
MANIKPAEISAIIRNQLTGSKVGPSLDEVGTVLQVGDGIARVYGLSNVQYGELVEFDNGMEGIVLNLEEDNVGVVLLGPSKEIKEGDTVKRTNRIASINVGEGVVGRVVNTLGQPIDGKGKIEGKLYEMPLERKAPGVIYRQPVNEPLQTGIKSIDAMIPIGRGQRELVIGDRQTGKTTVCIDTILNQKEFFDAGEPVYCIYVAIGQKASTVAAIAKVLEEKGALDYTTIVAANASDPAPMQVYAPFAGASIGEFFRDTGRPALIIYDDLSKQAVAYREVSLLLRRPPGREAYPGDVFYLHSRLLERAAKVINDDGIAKNMNDLPEELKPIVKGGGSLTSLPIIETQAGDVSAYIPTNVISITDGQIFLESDLFNSGVRPAINVGISVSRVGGSAQIKSMKKVAGTLKLDQAQFRELEAFAKFGSDLDAVTLGVIEKGKRNVEILKQAQNDPFKVEDQVSIIYLGSKDLLKAVPVEKVKDFEKKFIELLNLKHKKILSQIKEGKLTDEITSTLEKVASELTSSYE

SEQ ID NO: 174962 - protein, 286 aa, Unknown
  Bacterial polypetide isolated from the Sargasso Sea
MANLKEIRNRISSVTSTMKITSAIKMVSAAKLKKAQDAITAMKPYSEKLNELMSSFSGVISSSNISYLSTVRPVKKVLVVAIASNRGFCGAFNSNIVKQAKALKSQEEFSNTQFSFIVIGKKANDVLSKTENIIQNNDEIFDDLSYENSSLIVDQIIDDFADEKYDHVLLIYNSFKNAANQIVKSEQFLPIVNDSETETFQNYIFEPSMEQIVSELVPKSLKIQLFKALRDSFASEHGARMTAMHKATDNATELKEELVLTYNKARQAAITNEILEIVSGAEALKG

SEQ ID NO: 174963 - protein, 272 aa, Unknown
  Bacterial polypetide isolated from the Sargasso Sea
MDNLNPSEISKIIKDRINNLEVSSDESNEGTIVFLSDGIARVHGLSEAMYGELIEFQGGIFGMALNLERDSVGVVIFGDYKQLAEGDTAKCTGKILEVPVGPELVGRVVDALGNPIDGKGPIDSKLTSPVEKVAPGVMTRKPVDEPVQIGLKAVDSMVPIGRGQRELIIGDRQTGKTAIALDAIINQKGTGVTCVYVAVGQKQSSIAAVVRKLEEFGAMEHTIVVAAGAADPAPMQFLAPYSGCSMGEYFRDKGEDALIIYDDLSKQAVAYR

SEQ ID NO: 174964 - protein, 377 aa, Unknown
  Bacterial polypetide isolated from the Sargasso Sea
VDEQGPVNTKDTAPIHRAAPKLTDLETKPKVFETGIKVIDLLAPYRQGGKVGLFGGAGVGKTVLIQELINNIAKEHGGVSVFGGVGERTREGNDLYEEFKESGVINADDLTQSKVALCFGQMNEPPGARMRVGLSALTMAEHFRDVNKQDVLLFVDNIFRFVQAGSEVSALLGRMPSAVGYQPTLGTDVGELQERITSTLEGSITSIQAVYVPADDLTDPAPATTFAHLDATTVLARALAAKGIYPAVDPLDSTSTMLQPSVVGDEHYKTARAVQSTLQRYKELQDIIAILGLDELSEEDRLTVDRARKIEKFLSQPFFVAEIFTGMSGKYVKLDETIAGFNMILSGELDDLPEQAFYLVGNIDEVKAKAEKIKSEK

SEQ ID NO: 174965 - protein, 511 aa, Unknown
  Bacterial polypetide isolated from the Sargasso Sea
MEINPSEVTKILKEQIKNFGEKAEISEVGQVLSVGDGIARIYGLDNVQAGEMVEFSDGSKGMALNLESENVGVVIFGDDRNIKEGDVVKRTGSIVDTPVGKELLGRVVDGLGNPIDGKGALDKGIKKSRVEVKAPGIIPRQSVSEPMQTGLKSIDSLVPIGRGQRELIIGDRQTGKTAVAVDTIINQKKINESGDEKQKLYCIYVAVGQKRSTVRQIQKTLEEAGAMEYTTIVAATASDSAPLQFLAPYTGCAMGEYFRDNGMHALIIYDDLSKQAVAYRQMSLILRRPPGREAYPGDVFYLHSRLLERAAKLSDDHGGGSLTALPIIETQGGDVSAYIPTNVISITDGQIFLETELFNQGIRPAINVGLSVSRVGSAAQTKAMKKVSGSMKLELAQYREMAAFAQFGSDLDASTQQLLNRGSKLTELLKQKQYSPMTVAEQVISVFCGVKGYLDDIDLKDIAEFENKIIERCKSDKPELIESIQSSGKLEEATEKSLIDVITNLKKNFKS

SEQ ID NO: 174966 - protein, 191 aa, Unknown
  Bacterial polypetide isolated from the Sargasso Sea
MASLDDLKKRITSVKSTQKITKAMKMVAAAKLKRAQDSAEKGRPYSEKMNNIILNLSSGISDKETAPKLLSGSGKEQVHLCVVLTSDRGLCGGFNANIIKKAKSYFAKLNKEGKELKIITVGSKGNDQLKRVYGNKIIENISFKNSKNANYFDAEKVGKIIIEKFQKEEFDICTIFYNQFKNVITQIPQAQ

SEQ ID NO: 174967 - protein, 308 aa, Unknown
  Bacterial polypetide isolated from the Sargasso Sea
MSKNIGKVSKVIGAVVDVEFSAKGSSLPEIYDSLEITREDGSILILEVQSHIGENIVRTISMDSTDGLSRGTEAVATGSPIKMPIGKEVYGRLFNVVGDPIDGMEVLPKKDKDGMSIHRKAPDFDQLSTSTEVLFTGIKVIDLIEPYAKGGKIGLFGGAGVGKTVLIQELINNIAKGHGGLSVFAGVGERTREGNDLLREMIESGIINYGDKFLKSMEKGEWDLSKVDKKALLDSKATFVFGQMNEPPGARARVALSGLTVAEYFRDGGADGQGKDVLFFVDNIFRFTQAGSEVSALLGRMPSAVGYQ

SEQ ID NO: 174968 - protein, 212 aa, Unknown
  Bacterial polypetide isolated from the Sargasso Sea
FTQAGSEVSALLGRMPSAVGYQPTLSTEMGDLQERITSTKKGSITSVQAIYVPADDLTDPAPATAFAHLDATSVLERKIAELGIYPAIDPLTSTSRILDPRVIGDRHYNVARSVQATLQQYKDLQDIIAILGMDELSDEDKLVVSRARKMQKFMSQPFFVAEQFTGIEGRYVKLEDSIAGFEAILNGEVDDLPENSFSYVGSIDEAIEKGKK

SEQ ID NO: 174969 - protein, 458 aa, Unknown
  Bacterial polypetide isolated from the Sargasso Sea
MEINPSEVTKILKEQISKFGNKAEVSEVGQVLSVGDGIARIYGLDNVQAGEMVEFSDGSKGMALNLESDNVGVVIFGDDRAVKEGDTVKRTGAIVDTPVGKELLGRVVDGLGNPIDGKGALDKSVKRSRVEVKAPGIIPRKSVSEPMQTGLKSIDSLVPIGRGQRELIIGDRQTGKTAVAIDAIINQKKINESDDEKQKLYCIYVAIGQKRSTVRQIEKTLEEAGAMEYTTIVAATASDAAPLQFLAPYTGCTMGEYFRDNGMHALIIYDDLSKQAVAYRQMSLLLRRPPGREAYPGDVFYLHSRLLERAAKLSDDHGGGSLTALPIIETQGGDVSAFIPTNVISITDGQIFLETELFNQGIRPAINVGLSVSRVGSSAQTKAMKKVSGSMKLELAQYREMAAFAQFGSDLDASTQKLLNRGSKLTELLKQKQYSPMTVAEQVISVFCGVKGYLDDVE

SEQ ID NO: 174970 - protein, 513 aa, Unknown
  Bacterial polypetide isolated from the Sargasso Sea
MATKASEISELIKQQIKNFEHEAKSSDVGTVVSVTDGITRIHGLNDAQYGEMIEFPGDTFGLALNLEQDSVGAVVLGDYTHISEGAEVKTTNRILEVPVGEGLLGRVVDSLGTPLDGKGAIETDQTAPIEKVAPGVISRQSVDQPVQTGLKSIDAMVPIGRGQRELIIGDRQTGKTAVAVDTIINQKGTGIKCIYVAVGQKNSSVANVVKKLEEEGALEHTIIVNAAASDSAAMQYIAPYSGCAMGEYFRDKGEDALIIFDDLTKQAWAYRQVSLLLKRPPGREAYPGDVFYLHSRLLERAARVNAEYVEKETNGKVKGQTGSLTALPIIETQAGDVSAFVPTNVISITDGQIYLESDLFNAGIRPAINAGLSVSRVGGAAQTKIIKKLGGGVRLALAQYRELAAFAQFASDLDEATRKQLERGQRVTELMKQKQYAPLTVAEMAVSLYAANEGYLDDVPADKIVDFESALHASFTDGASDLAQKINDTGDYNEEIEADLKKFVEDFKSTGTY

SEQ ID NO: 174971 - protein, 458 aa, Unknown
  Bacterial polypetide isolated from the Sargasso Sea
MSTGNIVQVIGAVVDVEFPKEAIPSVYDALTLKDGELVFEVQQQLGDGIVRTIAMGASEGLKRGLEVENTGAPISVPVGQETLGRVLDVLGNPIDEKGPVGAKANRPIHAKAPTFEEQSTEADVLETGIKVIDLLCPFAKGGKVGLFGGAGVGKTVTVMELIRNIAAEHDGFSVFAGVGERTREGNDFYHEMMESNVLDKVALVYGQMNEPPGNRLRVALTGLTIAENFRDEGRDVLMFIDNIYRYTLAGTEVSALLGRMPSAVGYQPNLAEEMGVLQERITSTKTGSITSIQAVYVPADDLTDPSPATTFAHLDATVVLARSIAELGIYPAVDPLDSNSRQLDPGIVGQEHYDTARAVQQVLQRYKELQDIIAILGMDELSEEDKLTVQRARKIQRFLSQPFFVAEVFTGSPGQYVSLRDSIKAFQGIVAGDYDDLPEQAFYMVGTIEEAVEKAKSM

SEQ ID NO: 174972 - protein, 286 aa, Unknown
  Bacterial polypetide isolated from the Sargasso Sea
MANEKEIRTKIGSVKNTQKITKAMEMVAASKMRRTQETMKKALPYADKIRAVIGHIYNANPDYKHPFLEKRDVKTAGYIVVSSDRGLCGGLNVNMFRGLIAELKENKNNQVESKLCLVGAKAVQFFRSVDVDVVAAASHLGEEPQVEDLVGSIKTMLDEYIDGKIDQLFIVHNDFVNTMTQKPEIKTLLPIDPEDSDQMQEHWDYIYEPDSKELLDYILMRYIESQVYRAVVENVACEMAAKMVAMKSATDNAGKLIDQLELDYNKARQAAITQEISEIVGGAAAV

SEQ ID NO: 174973 - protein, 395 aa, Unknown
  Bacterial polypetide isolated from the Sargasso Sea
MECKNGDNRLVLEVAQHLGETTVRTIAMDATEGLKRGDEVINTNAPIQVPVGPETLGRIINVIGEPIDERGEVKTKESWPIHRAAPEFNDQSTETEILVTGIKVIDLLAPYAKGGKIGLFGGAGVGKTVLIMELINNVAKAHGGFSVFAGVGERTREGNDLYHEMIESGVIKKEGAGSKAALVYGQMNEPPGARARVALTGLTVAEYFRDQEGQDVLFFVDNIFRFTQAGSEVSALLGRIPSAVGYQPTLATDMGNLQERITTTNKGSITSVQAIYVPADDLTDPAPATSFAHLDATTVLSRQIAEIGIYPAVDPLDSTSRILDPRIVGDEHYRVARDVQRILQSYKSLQDIIAILGMDELSEEDKLVVARARKIQRFLSQPILCCRKYLLGLQE

SEQ ID NO: 174974 - protein, 290 aa, Unknown
  Bacterial polypetide isolated from the Sargasso Sea
MASLDDLKKRIASVKSTQKITKAMKMVAAAKLRRAQESAEKGRPYSEKMNNVILNLSNGISDKENAPKLLSGTGQEKTHLCVVMTSDRGLCGGFNSNIIKKAKSYFAKILDEGKELKIITVGSKGNDQLKRVYGDKIIENISFKESKNANYFDADKVGKMVIEKFEAGEFDVCTIFYNQFKNVITQIPQAQQIIPLNNEGEESSSEESYEFEPDEDEILSNLLPKNISTQIFKAMLENSASEQGSRMSAMDNATRNAGEMVDKLTIEYNRSRQAAITKELIEIISGAESL

SEQ ID NO: 174975 - protein, 118 aa, Unknown
  Bacterial polypetide isolated from the Sargasso Sea
ELAQYREMAAFAQFGSDLDASTQQLLNRGSKLTELLKQKQYSPMTVAEQVISVFCGVKGYLDDIDLKDVAEFESKIIEKCKSDKPEIIESILSSGKLEEDKEKLLVEVITQLKGNFKS

SEQ ID NO: 174976 - protein, 379 aa, Unknown
  Bacterial polypetide isolated from the Sargasso Sea
MRKGKITQIIGAVVDVKFEGELPEILTALECKNGDNRLVLEVAQHLGETSVRTIAMDATEGLKRGDEVVDTGAPIQVPVGPETLGRIINVIGDPIDEKGSVKTKETWPIHRPAPVFNDQSTETEILVTGIKVIDLLAPYAKGGKIGLFGGAGVGKTVLIMELINNVAKAHGGFSVFAGVGERTREGNDLYHEMIDSGVIKPDGDGSKAALVYGQMNEPPGARARVALTGLTVAEYFRDQEGQDVLFFVDNIFRFTQAGSEVSALLGRIPSAVGYQPTLATDMGNLQERITTTNKGSITSVQAIYVPADDLTDPAPATSFSHLDATTVLSRQIAELGIYPAVDPLDSTSRILDPRIVGDEHYRVAREVQKFYKLTNLFQT

SEQ ID NO: 174977 - protein, 257 aa, Unknown
  Bacterial polypetide isolated from the Sargasso Sea
AQDSAEKGRPYSEKMNKIILNLSENISDKENAPKLLTGTGSEKVHLCIILTSDRGLCGGFNSNIIKKAKSFFEKITKEGKTLKIITVGSKGYDQLKRLYKDKIIEKISFKESKNTNYFDAEKVGNMIIELFLKNEFDVCTIFYNKFKNVITQIPQEQQIIPLKSSEPDNSSSESNYEFEPEEDEILSNLLPKNISTQIFKAMLENSASEQGSRMSAMDNATRNAGEMVDKLTIEYNRSRQAAITKELIEIISGAESL

SEQ ID NO: 174978 - protein, 486 aa, Unknown
  Bacterial polypetide isolated from the Sargasso Sea
MVATPSTSAPAKGVVRQVIGPVLDVEFPAGKLPKILNALRIEAKNPAGQDIALTAEVQQLLGDHRVRAVAMSGTDGLVRGMEATDTGAPISVPVGEATLGRIFNVLGEPVDEQGPVNTSDTAPIHRSAPKLTDLETKPKVFETGIKVIDLLAPYRQGGKVGLFGGAGVGKTVLIQELINNIAKEHGGVSVFGGVGERTREGNDLYEEFKESGVINADDLSQSKVALCFGQMNEPPGARMRVGLSALTMAEHFRDVNKQDVLLFVDNIFRFVQAGSEVSALLGRMPSAVGYQPTLGTDVGALQERITSTLEGSITSIQAVYVPADDLTDPAPATTFAHLDATTVLARGLAAKGIYPAVDPLDSTSTMLQPSVVGDEHYKTARAVQSTLQRYKELQDIIAILGLDELSEEDRLTVSRARKIEKFLSQPFFVAEIFTGMSGKYVKLEDTIAGFNMILAGELDDLPEQAFYLVGNIDEVKAKAEKIKEEK

SEQ ID NO: 174979 - protein, 269 aa, Unknown
  Bacterial polypetide isolated from the Sargasso Sea
MSNGTVTQIIGAVIDVEFDKDNIPKVYEALMVDESGTTLEVQQQLGDGVVRTIAMGATEGLKRGLTASRTNAPISVPVGPETLGRIVDVLGNPIDEKGPIGEKSKMPIHRKPPSYTDQSASNEVLETGIKVIDLMCPFAKGGKIGLFGGAGVGKTVNMMELINNIALQHSGLSVFAGVGERTREGNDFYYEMQESGVVNIDNLGESKVAMVYGQMNEPPGNRLRVALTGLTMAESFRDEGKDVLLFIDNIYRYTLAGVEVSALLGRMPS

SEQ ID NO: 174980 - protein, 77 aa, Unknown
  Bacterial polypetide isolated from the Sargasso Sea
TIVARARKIQRFLSQPFFVGEVFTGREGRYVPIKETVRGFKEILEGKHDNLPEQALYMVGTIDEAVENAEKMKSEKN

SEQ ID NO: 174981 - protein, 413 aa, Unknown
  Bacterial polypetide isolated from the Sargasso Sea
IGAVIDVQFEGDLPEILTALEVDNGGNKLILEVAQHLGENSVRTIAMDSTEGLKRGDPVQNTGAPISVPVGPETLGRIINVIGQPIDQKGEVKTKERWPIHREAPKFTDQSTETEILETGIKVIDLLAPYSKGGKIGLFGGAGVGKTVIIMELINNIAKAHGGFSVFAGVGERTREGNDLYHEMIESGVIKPDGKGSKAALVYGQMNEPPGARARVGLTGLTVAEYFRDKEGQDVLFFVDNIFRFTQAGSEVSALLGRIPSAVGYQPTLATDMGNLQERITTTGKGSITSVQAIYVPADDLTDPAPATSFSHLDATTVLSRQIAELGIYPAVDPLDSTSRILDPRIVGEEHYRVARQVQKILQTYKSLQDIIAILGMDELSEEDKLTVARARKIQRFLSQPFFVAEVFTGTPG

SEQ ID NO: 174982 - protein, 393 aa, Unknown
  Bacterial polypetide isolated from the Sargasso Sea
NLPAQILRKRVEVKAPGIIPRQSVNEPMQTGLKAIDSLIPIGRGQRELIIGDRQTGKTAVAVDTIINQKAINESEDEKKKLYCVYVAIGQKRSTVAQIVKTLEDAGAMKYTTVVSATASDSAPLQFLAPYTGCTIGEYFRDNGMHALIIYDDLSKQAVAYRQMSLLLRRPPGREAYPGDVFYLHSRLLERAAKLNEKNGGGSLTALPIIETQAGDVSAYIPTNVISITDGQIFLETELFNQGIRPAVNVGLSVSRVGSAAQTKAMKKVAGSIKLELAQYREMAAFAQFGSDLDVSTQKLLNRGSKLTELLKQNQYSPLTVAEQVVTIFTGVSGYLDDVELNRIKTFETELLDKVKNDQPDILEKINTSGKLEDDVKKKLIELIEGLKQRSNNA

SEQ ID NO: 174983 - protein, 147 aa, Unknown
  Bacterial polypetide isolated from the Sargasso Sea
MPSLDDLKKRIKSVKSTQKITKAMKMVAAAKLKKAQENAEKGRPYSEKLQNIILNLTRSLSDSSNAPKLLGGNGKDKTYLCVVMTADRGLCGGFNSNICKLAKKNFKKFLKDGKEIKIITVGSKGHDQIKTEFGKYIIEKKSFKEKK

SEQ ID NO: 174984 - protein, 392 aa, Unknown
  Bacterial polypetide isolated from the Sargasso Sea
APETLGRIMNVVGEPVDERGDIGTSKSYPIHRLAPEFVDQSTETEVLVTGIKVVDLLAPYARGGKIGLFGGAGVGKTVLIMELINNIAKAHGGYSVFAGVGERTREGNDLYHEMIESGIIDLKGKDSKVALVYGQMNEPPGARARVALSGLTQAEYFRDEEGQDVLFFVDNIFRFTQAGSEVSALLGRIPSAVGYQPTLATDMGALQERITTTKKGSITSVQAIYVPADDLTDPAPATSFSHLDATTVLNRAISEKGIYPAVDPLDSTSRILDPQVVGDDHYRVAREVQRVLQTYKSLQDIIAILGMDELSEEDKLTVARARKIEKFLSQPFFVAEVFTGSPGKYVDLEDTIKSFDGLVKGEYDHMPEAAFYMVGGIDEAIEKAKKLEAEAA

SEQ ID NO: 174985 - protein, 291 aa, Unknown
  Bacterial polypetide isolated from the Sargasso Sea
MASLDDLKKRISSVKSTQKITKAMKMVAAAKLRRAQENAERGRPYSEKMNNIILNLSSSVSDKENAPKLLQGTGQEKTHLCVVLTSDRGLCGGFNSNIIKKAKLFFQKISNENKSLKIITVGSKGYDQLKRQYKNNIIEKLSFKDSKNINYFDANKVGKIIIEKFEKEEFDVCTIFYNQFKNVITQIPQEQQIIPLKTENEKDQTNNESYEFEPEEDEILSNLLPKNISTQIFKAMLENSASEQGSRMSAMDNATRNAGEMVDKLTIEYNRSRQAAITKELIEIISGAESL

SEQ ID NO: 174986 - protein, 292 aa, Unknown
  Bacterial polypetide isolated from the Sargasso Sea
VGPETLGRIVNVIGEPIDEKGEVKTKESWPIHRSAPEFNDQSTETEILVTGIKVVDLLAPYAKGGKIGLFGGAGVGKTVLIMELINNVAKAHGGFSVFAGVGERTREGNDLYHEMIESGVIKPEGTGSKAALVYGQMNEPPGARARVALSGLTVAEYFRDQEGQDVLFFVDNIFRFTQAGSEVSALLGRIPSAVGYQPTLATDMGNLQERITTTNKGSITSVQAIYVPADDLTDPAPATSFSHLDATTVLSRQIAEIGIYPAVDPLDSTSRILDPRIVGDEHYRVAREVQKV

SEQ ID NO: 174987 - protein, 471 aa, Unknown
  Bacterial polypetide isolated from the Sargasso Sea
MRKGKITQIIGAVVDVKFDGELPEILTALECNNSGNRLVLEVAQHLGESSVRTIAMDATEGLKRGDEVIDTGSPIKVPVGPETLGRIVNVIGEPIDEKGEVKTKESWAIHRAAPEFNDQSTETEILVTGIKVVDLLAPYAKGGKIGLFGGAGVGKTVIIMELINNIAKAHGGFSVFAGVGERTREGNDLYHEMIESGVIKPEGPGSKAALVYGQMNEPPGARSRVALTGLTVAEYFRDQEGQDVLFFVDNIFRFTQAGSEVSALLGRIPSAVGYQPTLATDMGNLQERITTTNKGSITSVQAIYVPADDLTDPAPATSFAHLDATTVLSRQIAELGIYPAVDPLDSTSRILDPRIVGDEHYRVAREVQKILQTYKSLQDIIAILGMDELSEEDKLIVARARKIQRFLSQPFFVAEVFTGSPGKLVDLESTIKGFDAICKGEYDHLPEAAFYMVGTIEEAIEKAEKMAKEVA

SEQ ID NO: 174988 - protein, 291 aa, Unknown
  Bacterial polypetide isolated from the Sargasso Sea
MASLDDLKKRISSVKSTQKITKAMKMVAAAKLRKAQENAEKGRPYSKKMNNIILNLSSGISDKENAPKLLSGTGEDKIHLCVVMTSDRGLCGGFNTNITKKAKQYFQKILKENKVLKIITVGSKGYDQLKRQYKENIVEKISFKDSKNINYFDADKVGKIIIDRFEKKEFDVCTIFYNQFKNVITQIPQEQQIIPLKTNEEKETNSDSSYEFEPEEDEILSNLLPKNISTQIFKAMLENSASEQGSRMSAMDNATRNAGEMVDKLTIQYNRSRQAAITKELIEIISGAESL

SEQ ID NO: 174989 - protein, 159 aa, Unknown
  Bacterial polypetide isolated from the Sargasso Sea
SFTDLFNQGIRPAINVGLSVSRVGSSAQTKAMKKVSGSMKLELAQYREMAAFAQFGSDLDASTQKLLNRGSKLTELLKQKQYSPMTVAEQVISVFCGVKGYLDDLELKDISSFENKIIEKCKSEKPEILDSISKSGKLEEDTENLLVETIKELKQNFNS

SEQ ID NO: 174990 - protein, 133 aa, Unknown
  Bacterial polypetide isolated from the Sargasso Sea
MANAKGKITQVIGAVVDVQFEDHLPEILNALTTDNNGKKLVLEVAQHLGENTVRTIAMDASEGLVRGQEVIDTEGPISVPVGNATLGRILNVVGEPVDEQGPVKAKEARAIHQPAPEFNEQSTESEVLVTGIK

SEQ ID NO: 174991 - protein, 143 aa, Unknown
  Bacterial polypetide isolated from the Sargasso Sea
GLSVSRVGSSAQTDSMKSVAGPVKLSLAQYREMAAFAQFGSDLDAATQQLLNRGARLTELMKQPQYSPLTNAEIVCLIYAGTNGYLDKIDVSQVGRFEAGLLSHLRGKHLDLLDYITQDDPKIKGEAAEKISAVLDEFSADFA

SEQ ID NO: 174992 - protein, 472 aa, Unknown
  Bacterial polypetide isolated from the Sargasso Sea
MRKGKITQIIGAVVDVKFDGELPEILTALECKNGGNRLVLEVAQHLGESSVRTIAMDATEGLKRGDEVTDTGAPIKVPVGPETLGRIINVIGEPIDEKGDVKSSEKWPIHRAAPEFNDQSTETEVLVTGIKVIDLLAPYAKGGKIGLFGGAGVGKTVLIMELINNVAKAHGGFSVFAGVGERTREGNDLYHEMIESGVIKPNEAGSKAALVYGQMNEPPGARARVALTGLTVAEYFRDQEGQDVLFFVDNIFRFTQAGSEVSALLGRIPSAVGYQPTLATDMGNLQERITTTNKGSITSVQAIYVPADDLTDPAPATSFAHLDATTVLSRQIAEIGIYPAVDPLDSTSRILDPRIVGDEHYRVAREVQKVLQTYKSLQDIIAILGMDELSEEDKLTVARARKIQRFLSQPFFVAEVFTGSPGKLVDLESTIKGFDAICKGEYDHLPEAAFYMVGTIEEAIEKAEKMAKEAAA

SEQ ID NO: 174993 - protein, 514 aa, Unknown
  Bacterial polypetide isolated from the Sargasso Sea
MQQLNPSEISEIIKQRIDKLDVSVQAKNEGTIVSVMDGIIRIHGLADVMYGEMIEFEGGIYGMALNLERDSVGAVVLGDYLQLKEGQTCKCTGRILEVPVGPELEGRVVDALGKPIDGKGPIDAKLTDPIEKVAPGVIARQGVDQPVQTGLKSIDSMTPIGRGQRELIIGDREVGKTAVAIDTIINQKGKGVKCVYVAVGQKASSISNVVQKLEEHGAMEYTVVVSASASDPASMQFIAPYSGCSMGEYYRDRGEDALIIYDDLTKQAWAYRQISLLLRRPPGREAYPGDVFYLHSRLLERAARVSANYVEKFTEGKVKGKTGSLTALPVIETQAGDVSAFVPTNVISITDGQIFLETDLFNSGIRPAMNPGISVSRVGGAAQTKIIKKLGGGIRIALAQYRELAAFAAFASDLDDATRAQLEHGQRVTELMKQKQYSPLSIAEMGVSLFAANEGFLEDIELNKVLDFESALLAYMNSEHGDLLGKINESGDYDDDIEKAFRAALEKFKSTQTW

SEQ ID NO: 174994 - protein, 327 aa, Unknown
  Bacterial polypetide isolated from the Sargasso Sea
MSSGRIVEIIGAVIDVEFERDSVPQVYDALTVDGTEITLEVQQQLGDGVVRTIALGSTEGLSRGLSVEDTGAPVSVPVGTETLGRIMDVLGRPIDERGPVGEKERMPIHRKAPTYEELATTNELLETGIKVIDLVCPFAKGGKVGLFGGAGVGKTVNMMELINNIATEHSGLSVFAGVGERTREGNDFYHEMQESKVIDLEGESKVSMVYGQMNEPPGNRLRVALTGLTMAEKFRDEGRDVLLFVDNIYRYTLAGTEVSALLGRMPSAVGYQPTLAEEMGALQERITSTKNGSITSIQAVYVPADDLTDPSPATTFAHLDAKVVLSR

SEQ ID NO: 174995 - protein, 286 aa, Unknown
  Bacterial polypetide isolated from the Sargasso Sea
MASGKEIRTKIASIKNTQKITKAMEMVSASKMRKVQDRMKLGKPYSQRIRSVIGHIANSTPEYKHPYFDTRDVKRVGYIVVSTDRGLCGGLNINAFKATVASMKKWSDQGVEIDICTIGARAATFFNNYGGNVVGAVRDIGDAPEVADLIGAVKIMLDKFDGGEIDRLMVVSNDFVNTMTHKPVVNQLIPLQPSEEEELQHHWDYLYEPDAQELLDGLLLRFIESQVYQAVVENNACEQAARMIAMKSASDNAGDLIEELGLAYNKARQAAITQELSEIAGGAAAV

SEQ ID NO: 174996 - protein, 202 aa, Unknown
  Bacterial polypetide isolated from the Sargasso Sea
PSAVGYQPTLADEMGFLQERITSLKGRSITSLQAVYVPADDITDPAPHTAFAHLDARTVLSRSIADLGIYPAVDPLDSSSRILDPGVVGDEHYETAREVQRVLQRYNDLQDIIAILGIDELSEEDKQIVGRARRIQRFLSQPMFVAEQFTGIEGKFVSIKDSVEAFKTILSGELDLVPEQAFYMTGGLDEVMSKAKELEENL

SEQ ID NO: 174997 - protein, 176 aa, Unknown
  Bacterial polypetide isolated from the Sargasso Sea
MEINPSEVTKILKEQIKKFGDKAEVSEVGQVLSVGDGIARIYGLDNVQAGEMVEFSDGSKGMALNLESDNVGVVIFGDDRAIKEGDTVKRTGAIVDVPVGKELLGRVVDALGNPIDGKGSLDKSLKRNRVEVKAPGIIPRKSVSEPMQTGLKAIDSLIPVGRGQRELIIGDRQTGK

SEQ ID NO: 174998 - protein, 291 aa, Unknown
  Bacterial polypetide isolated from the Sargasso Sea
MASLDDLKKRISSVKSTQKITKAMKMVAASKLRRAQESAEKGRPYSDKMNNIILNLSNSITDKENSPKLLVGSGDDKVHLCIVMTSDRGLCGGFNTNIIKKAKLYFQKILDEGKILKIVTVGSKGYDQLKRIYKENIIEKISFKESKNVNYFDADKVGKIIIEKFEKKEFDVCTIFYNQFKNVITQIPQEQQIIPLKTAESEANSSEDNYEFEPEEDEILNNLLPKNISTQIFKAMLENSASEQGSRMSAMDNATRNAGEMVDKLTIQYNRSRQAAITKELIEIISGAESL

SEQ ID NO: 174999 - protein, 154 aa, Unknown
  Bacterial polypetide isolated from the Sargasso Sea
IYSGVRPAIDVGISVSRVGGNAQIKAMKGVAGTLRLDLAQYRELEAFAKFGSDLDKSTQAQLTRGERMVEILKQGQYVPMPVEKQVAIIFAASKGYLDSVPAEKVAEFESSLFDYLEANNSEDLKAIVAEGSISDELSATLEKAISSFAEGFDS

SEQ ID NO: 175000 - protein, 469 aa, Unknown
  Bacterial polypetide isolated from the Sargasso Sea
MDINPSEITKILKEQIKNLGDKAEVSEIGKVLSVGDGIARVYGLDNVQAGEMVEFQDNSKGMALNLESDNVGIVIFGDDKSIKEGDTVKRTGSIVDVPVGKELLGRVVDALGNPIDGKENLEKNIKRKRVEVKAPGIIPRKSVGEPMQTGLKAIDSLIPVGRGQRELIIGDRQTGKTAVAIDTIINQKKINESDDEKKKLYCIYVAIGQKRSTVAQIVKTLQDAGAMDYTIVVSATASDPAPLQFLAPYTGCTFGEFFRDNGMHALIIYDDLSKQAVAYRQMSLLLRRPPGREAYPGDVFYLHSRLLERSAKLNDDNGGGSLTALPIIETQAGDVSAYIPTNVISITDGQIFLETELFNQGIRPAVNVGLSVSRVGSAAQTKAMKKVAGSIKLELAQYREMAAFAQFGSDLDASTQKLLNRGSKLTELLKQDQYSPMTVAEQVVSVYSGVKGYLDTIENNQIRSFEKGY

SEQ ID NO: 175001 - protein, 125 aa, Unknown
  Bacterial polypetide isolated from the Sargasso Sea
DPLDSTSRQLDPLVVGEDHYNTAQAVQGVLQRYKELKDIIAILGMDELSEDDKLVVARARKVERFLSQPFFVAEVFTGSPGKYVSLEDSIKAFKGILNGDYDDLPEQAFYMVGTIEEAVEKAKTL

SEQ ID NO: 175002 - protein, 294 aa, Unknown
  Bacterial polypetide isolated from the Sargasso Sea
MPNLDDLKKRIGSVKSTEKITKAMKMVAAAKLRRAQESAESSRPYSDSMKDLIESISKGYKPSSTDRNLLTGDEKDQIHLLILFTSERGLCGGFNSIVTRTLRDKIENLIDQNKTVKIVCVGKKGYDILKRQYSEMITEVIDMRAVKSITYQDAKNISDKIVKMFFDGEFDKCSIFYNEFKSVISQIPTEQQVIPIEIINDEADEEKKEESFFEFEPGESEILDEILPLNFTVQVFKALLESAASEQGARMSAMDNASRNAGDMIDNLTLFYNRSRQAVITKELIEIISGAEAV

SEQ ID NO: 175003 - protein, 298 aa, Unknown
  Bacterial polypetide isolated from the Sargasso Sea
MPSLKDIKTQINSVGSTKKITSAMKMVAASKLRRSQEKAEEARPYSSRLEEMLSSLASSSASGEGVIKLLSGTGKDENYLIVPVNADRGLCGGFNSSINKESFKLAKSLENQNKKVQLLPVGKKSRDFFNRVMKENIVDSFVDNNVSTSGYESALKISNKIQELFFEGSFDKCILVYNKFKSAISQEVTQQQLIPLDVSSNKDADTDKEEVSDNAIYTYEPDEETILKDLLPKNVSIQIFKVLLESDAGEQGARMAAMDNATRNAGEMIDSLTLKYNRTRQAFITKELIEIISGAESI

SEQ ID NO: 175004 - protein, 119 aa, Unknown
  Bacterial polypetide isolated from the Sargasso Sea
LELAQYREMAAFAQFASDLDASTKQLLERGARLVEILKQGQYSPLTVPEQVVCIYAGVRGFLDKLSVNDVVKFEAELIAEIKSNHSDLLKSISDEKELSKENDDKLKSILDGFVNKFLG

SEQ ID NO: 175005 - protein, 509 aa, Unknown
  Bacterial polypetide isolated from the Sargasso Sea
MTINPSEITKLLKDQIKNFGDKAEVSEIGKVLSVGDGIARVYGLDNVQAGEMVEFEDGSKGMALNLENDNVGVVIFGDDRNIKEGDTIKRTNAIVDVPVGKELLGRVVDGLGNPIDGKGSLSVKNRKRVEVKAPGIIPRQSVNEPMQTGLKSIDSLIPIGRGQRELIIGDRQTGKTAVAIDAIINQKKINESSDEKKKLYCVYVAIGQKRSTVAQITKTLEEAGALKYTTIVAATASDSAPLQFLAPYTGCTIGEYFRDNGMHALIVYDDLSKQAVAYRQMSLLLRRPPGREAYPGDVFYLHSRLLERAAKLSDKNGGGSLTALPIIETQAGDVSAYIPTNVISITDGQIFLETELFNQGIRPAVNVGLSVSRVGSAAQTKAMKKVAGSIKLELAQYREMAAFAQFGSDLDASTQQLLNRGAKLTELLKQDQYSPMTVAEQVISVFTGVKGYLDDLELAKIKKFEKDILNKIISEKSEIIEAIQSSGKLEESTEKLLVEIIEDYKKVNK

SEQ ID NO: 175006 - protein, 187 aa, Unknown
  Bacterial polypetide isolated from the Sargasso Sea
LQERITTTNKGSITSVQAIYVPADDLTDPAPATSFAHLDATTVLSRQIAELGIYPAVDPLDSTSRILDPRIVGDEHYRVAREVQKILQTYKSLQDIIAILGMDELSEEDKLIVARARKIQRFLSQPFFVAEVFTGSPGKLVDLESTIKGFDAISKGEYDHLPEAAFYMVGTIEEAIEKAEKMAKDVA

SEQ ID NO: 175007 - protein, 137 aa, Unknown
  Bacterial polypetide isolated from the Sargasso Sea
GIYPAVDPLDSTSRILDPRIVGDEHYRVAREVQKILQTYKSLQDIIAILGMDELSEEDKLVVARARKIQRFLSQPFFVAEVFTGSPGKLVDLESTIKGFDAICKGEYDHLPEAAFYMVGTIEEAIEKAEKMSKDAAA

SEQ ID NO: 175008 - protein, 504 aa, Unknown
  Bacterial polypetide isolated from the Sargasso Sea
MSKNIGKVSKVIGAVVDVEFSEKGSSLPEIYDSLEITREDGSILILEVQSHIGENIVRTISMDSTDGLSRGTQAVATGSPIKMPIGKEVYGRLFNVVGDPIDGMEVLPKKDKDGMSIHRKAPDFDQLSTSTEVLFTGIKVIDLIEPYAKGGKIGLFGGAGVGKTVLIQELINNIAKGHGGLSVFAGVGERTREGNDLLREMIESGIINYGDKFLKSMEKGEWDLSKVDKKALLDSKATFVFGQMNEPPGARARVALSGLTVAEYFRDGGADGQGKDVLFFVDNIFRFTQAGSEVSALLGRMPSAVGYQPTLATEMGTMQERITSTKKGSITSVQAVYVPADDLTDPAPATTFAHLDATTVLSRKISELGIYPAVDPLDSTSRILTPEILGDEHYNCAQRVKELLQKYNELQDIIAILGMEELSEEDKLAVARARRVQRFLSQPFHVAEQFTGIPGALVDIKDTIKGFNMIMDGELDHLPEAAFNLKGNIEEAIEAGEKMLSEAK

SEQ ID NO: 175009 - protein, 328 aa, Unknown
  Bacterial polypetide isolated from the Sargasso Sea
GHGGLSVFAGVGERTREGNDLLREMIESGIINYGDEFKKSMEAGEWDLSKVDKKALLDSKATFVFGQMNEPPGARARVALSGLTVAEYFRDGGADGQGKDVLFFVDNIFRFTQAGSEVSALLGRMPSAVGYQPTLATEMGTMQERITSTKNGSITSVQAVYVPADDLTDPAPATTFAHLDATTVLSRKIAELGIYPAVDPLDSTSRILTPEILGDDHYNCAQRVKELLQRYKELQDIIAILGMEELSEEDKLAVARARRVQRFLSQPFHVAEQFTGIPGALVDIKDTIKGFNMIMDGELDHIPEAAFNLKGNIEEAIEAGEKMLAETK

SEQ ID NO: 175010 - protein, 462 aa, Unknown
  Bacterial polypetide isolated from the Sargasso Sea
MNNEGKILQITGAVVDVKFDDGNLPEIMNALSIKMKDGSELVLETAQHLGQGVVRTIAMDSTDGLVRGEAVIDSGKPISVPVGQETLGRMFDVLGNPIDQKGDVGTKSTSPIHRSAPKQENLTTSSEMFETGIKVVDLMEPYTRGGKTGLFGGAGVGKTVLIQELIRNIATEHGGFSVFAGVGERTREGNDLYAEMTESGVIDKTALVFGQMNEPPGARLRVGLSALTMAEYFRDDEGRDVLLFVDNIFRFTQAGSEVSALLGRMPSAVGYQPTLSTEMGDLQERITSTKKGSITSVQAIYVPADDLTDPAPATAFAHLDATSVLERKIAELGIYPAIDPLTSTSRILDPRVIGDRHYNVARSVQATLQQYKDLQDIIAILGMDELSDEDKMVVSRARKMQKFMSQPFFVAEQFTGIEGRYVKLEDSIAGFEAILNGEVDDLPENAFSYVGSIDEAIEKGKK

SEQ ID NO: 175011 - protein, 505 aa, Unknown
  Bacterial polypetide isolated from the Sargasso Sea
MDIKTNEIGDLLRSQIKNINENVDVNEVGEVLEIGDGVARTSGLGSVMSSELVEFPNNVFGMALNLEEENVGAVLFGDSSLVKEGDTVKRTGKVVEVPVGKELLGRVVDPLGQPMDGKGPINAKETLPIERKALGVMQRFPVKEPLQTGLKSIDSMIPIGRGQRELIIGDRQTGKSAIAIDAIINQKSTHDSDSPVYCIYVAVGQKASTVAKLVAELEANGAMEYTTVVVANASDPAPLQYIAPYSGCAMGEYYRDNGMHGLIVYDDLSKQATAYRQMSLVLRRPPGREAFPGDVFYLHSRLLERASKLSEDLGSGSLTALPVIETQEGDVSAYIPTNVISITDGQIYLDTNLFNGGVRPAVDVGLSVSRVGGSAQIKAMKKIAGKLRLDLAQFRELEAFAKFASDLDESTAAQITRGRRMVEILKQNQYVPMSTEKQVAIIYAASQGYLDDIDLESVKEFEVGLLEHFDSKHADCLDEISKTGDISDKLGDKMNKAIEGFKKSF

SEQ ID NO: 175012 - protein, 513 aa, Unknown
  Bacterial polypetide isolated from the Sargasso Sea
MATKASEISELIKQQIKNFEHEAKSSDVGTVVSVTDGITRIHGLNDAQYGEMIEFPGDTFGLALNLEQDSVGAVVLGDYTHISEGAEVKTTNRILEVPVGEGLLGRVVDSLGTPLDGKGAIETEQTAPIEKVAPGVISRQSVDQPVQTGLKSIDAMVPIGRGQRELIIGDRQTGKTAVAVDTIINQKGTGIKCIYVAVGQKNSSVANVVKKLEEEGALEHTIIVNAAASDSAAMQYIAPYSGCAMGEYFRDKGEDALIIFDDLTKQAWAYRQVSLLLKRPPGREAYPGDVFYLHSRLLERAARVNADYVEKETNGKVKGQTGSLTALPIIETQAGDVSAFVPTNVISITDGQIYLESDLFNAGIRPAINAGLSVSRVGGAAQTKIIKKLGGGVRLALAQYRELAAFAQFASDLDEATRKQLERGQRVTELMKQKQYAPLTVAEMAVSLYAANEGYLDDVPADKIVDFESALHASFIDGASDLAQKINETGDYNEEIEADLKKFVEDFKSTGTY

SEQ ID NO: 175013 - protein, 171 aa, Unknown
  Bacterial polypetide isolated from the Sargasso Sea
MANEKEIRTKIGSVKNTQKITKAMEMVAASKMRRTQETMKKALPYADKIRAVIGHIYNANPDYKHPFLEKRDVKTAGYIVVSSDRGLCGGLNVNMFRGLIAQLKENKNNQVESKLCLVGAKAVQFFRSVDVDVVAAASHLGEEPQVEDLVGSIKTMLDEYIDGKIDQLFIV

SEQ ID NO: 175014 - protein, 177 aa, Unknown
  Bacterial polypetide isolated from the Sargasso Sea
MASLDDLKKRIASVKSTQKITKAMKMVAAAKLRRAQESAEKGRPYSEKMNNVILNLSNGISDKENAPKLLSGTGQEKTHLCVVMTSDRGLCGGFNSNIIKKAKSYFAKILDEGKELKIITVGSKGNDQLKRVYSDKIIENISFKESKNANYFDADKVGKMVIEKFEAGEFDVCTIFY

SEQ ID NO: 175015 - protein, 472 aa, Unknown
  Bacterial polypetide isolated from the Sargasso Sea
GFMVWIMFKAGEMVEFADGSKGMALNLESENVGVVIFGDDRNVKEGDVVKRTGNIVDTPVGKELLGRVVDGLGNPIDGKGPLDKGIKKSRVEVKAPGIIPRQSVSEPMQTGLKSIDSLVPIGRGQRELIIGDRQTGKTAVAVDAIINQKKINESGDEKQKLYCIYVAVGQKRSTVRQIQKTLEEAGAMEYTTIVAATASDSAPLQFLAPYTGCAMGEYFRDNGMHALIIYDDLSKQAVAYRQMSLLLRRPPGREAYPGDVFYLHSRLLERAAKLSDEHGGGSLTALPIIETQGGDVSAFIPTNVISITDGQIFLETELFNQGIRPAINVGLSVSRVGSSAQTKAMKKVSGSMKLELAQYREMAAFAQFGSDLDASTQQLLNRGSKLTELLKQKQYSPMTVAEQVISVFCGVKGYLDDIDLKDVAEFESKIIEKCKSDKPEIIDSILTSGKLEEDKEKLLVEVITQLKGNFKS

SEQ ID NO: 175016 - protein, 280 aa, Unknown
  Bacterial polypetide isolated from the Sargasso Sea
MSTGNIVQVIGAVVDVEFPKEAIPSVYDALSLKDGDLVFEVQQQLGDGIVRTIAMGASEGLKRGLEVENTGAPISVPVGQETLGRVLDVLGNPIDEKGPVGAKSNRPIHAKAPSFEEQSTEADVLETGIKVIDLLCPFAKGGKVGLFGGAGVGKTVTVMELIRNIAAEHDGFSVFAGVGERTREGNDFYHEMMESNVLDKVALVYGQMNEPPGNRLRVALTGLTIAENFRDEGRDVLMFIDNIYRYTLAGTEVSALLGRMPSAVGYQPNLAEEMGVFKKG

SEQ ID NO: 175017 - protein, 288 aa, Unknown
  Bacterial polypetide isolated from the Sargasso Sea
EGNDLYHEMIESGVILPEGSGSKAALVYGQMNEPPGARARVALSGLTVAEYFRDQEGQDVLFFVDNIFRFTQAGSEVSALLGRIPSAVGYQPTLATDMGNLQERITTTNKGSITSVQAIYVPADDLTDPAPATSFSHLDATTVLSRQIAEIGIYPAVDPLDSTSRILDPRIVGDEHYRVAREVQKILQTYKSLQDIIAILGMDELSEEDKLIVARARKIQRFLSQPFFVAEVFTGSPGKLVELESTIKGFDAICKGEYDHLPEAAFYMVGTIDEAIEKAEKMAKDAAA

SEQ ID NO: 175018 - protein, 471 aa, Unknown
  Bacterial polypetide isolated from the Sargasso Sea
MNKEGIITQLIGAVVDVKFDSDLPEIYTALEANNSGNKLILEVAQHLGENSVRTIAMDSTEGLKRGDKVVNTNAPISVPVGPETLGRIINVIGQPIDEKGAVKTKQKWPIHRPSPKFTEQSTETEILVTGIKVIDLLAPYAKGGKIGLFGGAGVGKTVTIMELINNIAKAHGGFSVFAGVGERTREGNDLYHEMIESGVIKKDGNGSKAALVYGQMNEPPGARARVALTGLTVAEYFRDQEGQDVLFFVDNIFRFTQAGSEVSALLGRIPSAVGYQPTLATDMGNLQERITSTGKGSITSVQAIYVPADDLTDPAPATSFSHLDATTVLSRQIAELGIYPAVDPLDSTSRILDPRIVGEEHYRVAREVQRILQAYKSLQDIIAILGMDELSEEDKLTVARARKIQRFLSQPFFVAEVFTGSPGKLVDLESTIKGFDAICKGEYDHLPEAAFYMVGSIEEVIEKGEKLEKGT

SEQ ID NO: 175019 - protein, 102 aa, Unknown
  Bacterial polypetide isolated from the Sargasso Sea
MASLDDLKKRISSVKSTQKITKAMKMVAAAKLRRAQESAERGRPYSEKMNNIILNLSSGLSDKENAPKLLTGSGEDKVHLCVVMTADRGLCGGFNSNIIKKA

SEQ ID NO: 175020 - protein, 463 aa, Unknown
  Bacterial polypetide isolated from the Sargasso Sea
MSSGKIIQIIGTVVDVEFASDELPKLFDALEVDNSGENLVLEVQQHIGNNWVRCLALGTTDGLARGIEVSNTGEKVTVPVGEATLGRLFDVTGTPLDGLGPVEAESSLPIHRDPPAFEDQNTSVEVLETGIKVFDLITPFPKGGKVGAYGGAGVGKTVVIQELIRNIGAEHQGVSVFAGVGERSREGNDLWHEMQESGVLDSTVLVFGQMNETPGVRARIGLTGLTMAEYFRDERNQDVLLFVDNIYRYILAGMEVSALLGRMPSAVGYQPTLGTEMGALQERITSTKNGSITSFQAIYVPADDYTDPGIVTTFGHLDAVVSLERSLAAQALFPAVDPLASFARILEPNVVGEEHYNTARGVQQVLQRYKDLQDIIAILGIEELSDEDKQVVFRARKIQRFLTQPFFVAEQFTGSPGKYVPVKETVRGFAEILEGKHDDLPEQAFYMVGTIDEAVEKAAQMAE

SEQ ID NO: 175021 - protein, 296 aa, Unknown
  Bacterial polypetide isolated from the Sargasso Sea
MPSLKDIKTQINSVGSTKKITSAMKMVAASKLRRSQEKAEAARPYSSRLEEMLSSLASSAASGEGIIKLLTGTGNDQNYIVVPVSADRGLCGGFNSSINRETFKLVKSLEGNGKKVQLMPVGKKSRDFFNRVMKDQIIESFVDLNVSSTGYESALNISNKLQELYFDGKFDKCILVFNKFKSAISQEVTQQQLIPLDVSNSEKEEEKENSSNAIYDYEPDEETILKDLLPKNVSIQIFKVLLESDAGEQGARMAAMDNATRNAGEMIDSLTLKYNRTRQAFITKELIEIISGAESI

SEQ ID NO: 175022 - protein, 458 aa, Unknown
  Bacterial polypetide isolated from the Sargasso Sea
MSTGNIVQVIGAVVDVEFPKEAIPSVYDALSLKDGDLVFEVQQQLGDGIVRTIAMGASEGLKRGLEVENTGAPISVPVGQETLGRVLDVLGNPIDEKGPVGAKSNRPIHAKAPSFEEQSTEADVLETGIKVIDLLCPFAKGGKVGLFGGAGVGKTVTVMELIRNIAAEHDGFSVFAGVGERTREGNDFYHEMMESNVLDKVALVYGQMNEPPGNRLRVALTGLTIAENFRDEGRDVLMFIDNIYRYTLAGTEVSALLGRMPSAVGYQPNLAEEMGVLQERITSTKTGSITSIQAVYVPADDLTDPSPATTFAHLDATVVLARSIAELGIYPAVDPLDSNSRQLDPGIVGQEHYDTARSVQQVLQRYKELQDIIAILGMDELSEEDKLTVQRARKIQRFLSQPFFVAEVFTGSPGQYVSLRDSIKAFQGIVAGEYDDLPEQAFYMVGTIEEAVEKAKSM

SEQ ID NO: 175023 - protein, 286 aa, Unknown
  Bacterial polypetide isolated from the Sargasso Sea
MANEKEIRTKIGSVKNTQKITKAMEMVAASKMRRTQETMKKALPYADKIRAVIGHIYKANPDYKHPFLEKREVKTAGYIVVSSDRGLCGGLNVNMFRGLIAKLKENKSNQIDSKLCLVGAKAVQFFRSVDVDVIAAASHLGEEPQVEDLVGAIKTMLDEYNEGKIDQLFIVHNDFVNTMTQKPEIKTLLPIDPEDGEQMQEHWDYIYEPDSKELLDYILMRYIESQVYRAVVENVACEMAAKMVAMKSATDNAGKLIDQLELDYNKARQAAITQEISEIVGGAAAV

SEQ ID NO: 175024 - protein, 460 aa, Unknown
  Bacterial polypetide isolated from the Sargasso Sea
EFPGDTFGLALNLEQDSVGAVVLGDYTHISEGAQVKTTNRILEVPVGEGLLGRVVDSLGTPLDGKGAISSDQTAPIEKVAPGVISRQSVDQPVQTGLKSIDAMVPIGRGQRELIIGDRQTGKTAVAVDTIINQKGTGIKCIYVAVGQKNSSVANVVKKLEEEGALEHTIIVNAAASDSAAMQYIAPYSGCAMGEYFRDKGEDALIIFDDLTKQAWAYRQVSLLLKRPPGREAYPGDVFYLHSRLLERAARVNAEYVEKETGGKVKGQTGSLTALPIIETQAGDVSAFVPTNVISITDGQIYLESDLFNAGIRPAINAGLSVSRVGGAAQTKIIKKLGGGVRLALAQYRELAAFAQFASDLDEATRKQLERGQRVTELMKQKQYAPLTVAEMAVSLYAANEGYLDDVPADKIVDFETALHANFVDSASDLAQKINDTGDYNDEIEAELKKFVEDFKATGTY

SEQ ID NO: 175025 - protein, 461 aa, Unknown
  Bacterial polypetide isolated from the Sargasso Sea
TVTQIIGAVIDVEFDKDNIPKVYEALMVDESGTTLEVQQQLGDGVVRTIAMGATEGLKRGLTASRTNAPISVPVGPETLGRIVDVLGNPIDEKGPIGEKSKMPIHRKPPSYTDQSASNEVLETGIKVIDLMCPFAKGGKIGLFGGAGVGKTVNMMELINNIALQHSGLSVFAGVGERTREGNDFYYEMQESGVVNIDNLGESKVAMVYGQMNEPPGNRLRVALTGLTMAESFRDEGKDVLLFIDNIYRYTLAGVEVSALLGRMPSAVGYQPTLAEEMGALQERITSTKTGSITSIQAVYVPADDLTDPSPATTFAHLDATVVLSRQISELGIYPAVDPLDSTSRQLDPFVVGDDHYEVAQGVQKILQRYNELKDIIAILGMDELSEEDKGLVARARKAQRFLSQPFFVAEIFTGTPGKYVSLEDTIKAFKGILNGDYDHLPEQAFYMVGTIEEAVEKAKTL

SEQ ID NO: 175026 - protein, 291 aa, Unknown
  Bacterial polypetide isolated from the Sargasso Sea
MPSLDDLRKRISSVKSTQKITKAMKMVAAAKLRKAQEMAENGRPYSDKMNIIIQNLSKAISDPSNAPKLLVGSGEDKTHLCVVMTADRGLCGGFNTNIVKQAKNYFNKILKESKNLKIITVGTKGLDQLKREYGKYIVKKIDFKNKKKISFKDASLVGDEIVKLFKNNEFDKCIIFYNKFKNVMTQIPQSQQLIPAKKVEDTKTEQESSYDFEPEEDEILEDLLPKNISTQIYKGFLENSASEQGSRMTAMDNATRNAGDLVEKLTINYNRSRQAAITKELIEIISGAESL

SEQ ID NO: 175027 - protein, 215 aa, Unknown
  Bacterial polypetide isolated from the Sargasso Sea
MNQNGKIIQVIGAVVDVQFEGDLPEILTALVADNSGNKLILEVAQHLGENSVRTIAMDSTEGLKRGDQVKNTGSPISVPVGPETLGRIINVIGEPIDQKGEVKTKERWPIHREAPKFTDQSTETEILETGIKVIDLLAPYSKGGKIGLFGGAGVGKTVIIMELINNIAKAHGGFSVFAGVGERTREGNDLYHEMIESGVIKPEGKGSKAALVYGQ

SEQ ID NO: 175028 - protein, 175 aa, Unknown
  Bacterial polypetide isolated from the Sargasso Sea
YSYNVISITDGQIFLGTELFNQGIRPAVNVGLSVSRVGSAAQTKAMKKVAGSIKLELAQYREMAAFAQFGSDLDASTQKLLNRGSKLTELLKQDQYSPMTVAEQVVIIYAGVKGYLDSIDTSEIRSFEKGLLDLVKTENPEIIESIQKTGKIEEDIDKLLTEVITNYKKTNFDKK

SEQ ID NO: 175029 - protein, 300 aa, Unknown
  Bacterial polypetide isolated from the Sargasso Sea
MNNEGKILQITGAVVDVKFDEGHLPKIMNALSIKRDDGTDLVLETAQHLGQGVVRTIAMDSTDGLVRGAKVSDSGKPISVPVGQETLGRMFDVLGNPIDQKGNVGNKATSPIHRSAPAQESLATSSEMFETGIKVVDLMEPYTRGGKTGLFGGAGVGKTVLIQELIRNIATEHGGFSVFAGVGERTREGNDLYAEMTESGVIDKTALVFGQMNEPPGARLRVGLSALTMAEYFRDDEGRDVLLFVDNIFRFTQAGSEVSALLGRMPSAVGYQPTLSTEMGDLQERITSTKKGSITSVQAI

SEQ ID NO: 175030 - protein, 464 aa, Unknown
  Bacterial polypetide isolated from the Sargasso Sea
MSTAALVEGKIVQCIGAVIDVEFPRDSMPKIYDALILDGSELTLEVQQQLGDGVVRTICLGASDGLRRGLTVKNTAKPISVPVGKPTLGRIMDVLGRPIDEAGPIESETTRSIHQKAPAFDELSPSTELLETGIKVIDLICPFAKGGKVGLFGGAGVGKTVNMMELINNIAKEHGGYSVFAGVGERTREGNDFYHEMKDSNVLDKVALVYGQMNEPPGNRLRVALTGLTMAEHFRDEGLDVLFFVDNIYRFTLAGTEVSALLGRMPSAVGYQPTLAEEMGKLQERITSTKKGSITSVQAVYVPADDLTDPSPATTFGHLDATVVLSRDIASLGIYPAVDPLDSTSRQIDPNVIGEEHYSITRRVQQTLQRYKELRDIIAILGMDELSPEDKLSVARARKIQRFLSQPFHVAEVFTGSPGKYVPLKETIRGFKMIVDGECDHLPEQAFYMVGTIDEAFEKAKKIS

SEQ ID NO: 175031 - protein, 291 aa, Unknown
  Bacterial polypetide isolated from the Sargasso Sea
MAGMKEIRGKIKSVQNTRKITKAMEMVAASKMRRAQERMRAARPYADKVRAIAAHMSRANPEYRHPFMVANEGAQTAGIILVTTDKGLCGGLNTNVLRATVQKFKELEEKGQKVEATAIGSKGLGFLNRFGAKVMSQVVHLGDTPHLDKLIGAVKTQLDLYSEGKLSAVYIAYTRFVNTMKQEAVIEQLLPLSSEHFEADDGTPATSWDYIYEPDAQAVVDELLVRYVEALVYQAVAENMASEQSARMVAMKAASDNAKTVISELQLVYNKSRQAAITKELSEIVGGAAAV

SEQ ID NO: 175032 - protein, 141 aa, Unknown
  Bacterial polypetide isolated from the Sargasso Sea
MATIKVDVVSAEEQIFSGEAKFVALPGETGELGILPGHTPLITRIRPGAVRIEVEGGNDEFVFVAGGILEVQPGAVTVLADTAIRGKDLDAAKAEEARKRAEETLQNAKSDLDLAKAQSELATAMAQLEAIQRLAKIRSRH

SEQ ID NO: 175033 - protein, 473 aa, Unknown
  Bacterial polypetide isolated from the Sargasso Sea
MSEINQGKVVQIMGAVVDVKFNDHLPAILDALEIEQDGKKLVLEVAQHLGENSVRTIAMDTTEGLKRGQSVESTGAPISVPVGEETLGRIINVVGEPVDQKGELKATQKRPIHQNAPEFVDQSTEKEILVTGIKVVDLLCPYSKGGKIGLFGGAGVGKTVLIMELINNIAKAHGGYSVFAGVGERTREGNDLYWEMIESGVNKEGGGDGSKCSLVYGQMNEPPGARARVALSGLSVAEHFREEGQDVLFFVDNIFRFTQAGSEVSALLGRIPSAVGYQPTLAIDMGNLQERITSTNKGSITSVQAIYVPADDLTDPAPATSFAHLDATTVLSRAISEKGIYPAVDPLDSNSRILEADIVGEEHYNVAREVQEILQKYKSLQDIIAILGMDELSEEDKLTVARARKIERFFSQPFHVAEVFTGSPGILVDINDTIKGFKGLCNGDYDHLPEAAFYMVGTIEDAIKKGEELAKEE

SEQ ID NO: 175034 - protein, 389 aa, Unknown
  Bacterial polypetide isolated from the Sargasso Sea
IQSSESSRIEVKAPGIIPRQSVSEPMQTGLKALDSLVPIGRGQRELIIGDRQTGKTAVAIDTIINQKEINQSDDESKKLYCIYVAIGQKRSTVAQVVKTLEENGAMEYTIVVAASASDPAPLQFLAPYAGCSMGEFFRDNGMHGLIVYDDLSKQAVAYRQMSLLLRRPPGREAFPGDVFYLHSRLLERAAKMNDENGGGSLTALPVIETQAGDVSAFIPTNVISITDGQIFLETELFFSGIRPAINVGLSVSRVGSAAQTKAMKKVAGKIKLELAQYREMAAFSQFASDLDASTKQLLARGERLTELLKQDQYVPMSVADQVLSLYSGVRGFLDKIEISKITDFQVKFLEGLRADHSDIFDEINNTGNFSDESDKKIEDYLEKFTANYN

SEQ ID NO: 175035 - protein, 324 aa, Unknown
  Bacterial polypetide isolated from the Sargasso Sea
VCPFAKGGKVGLFGGAGVGKTVNMMELIRNIAIEHSGFSVFAGVGERTREGNDFYHEMNESNVLDKVSLVYGQMNEPPGNRLRVALTGLTMAEKFRDEGRDVLFFVDNIYRYTLAGTEVSALLGRMPSAVGYQPTLAEEMGVLQERITSTKTGSITSIQAVYVPADDLTDPSPATTFAHLDATVVLSRDIASLGIYPAVDPLDSTSRQLDPLVIGQEHYDVARGVQTVLQRYKELKDIIAILGMDELSEEDKQVVSRARKIQRFLSQPFFVAEVFTGAPGKYVSLKDTISGFKGILDGEYDHLPEQAFYMVGSIEEALEKAKKA

SEQ ID NO: 175036 - protein, 336 aa, Unknown
  Bacterial polypetide isolated from the Sargasso Sea
ITQVIGAVVDVKFDGDLPEILTALECKNGDNRLVLEVAQHLGESTVRTIAMDATEGLKRGDEVTNTNAPIQVPVGPETLGRIINVIGEPIDEKGEVKTKETWPIHRSAPEFNDQSTETEILVTGIKVIDLLAPYAKGGKIGLFGGAGVGKTVLIMELINNVAKAHGGFSVFAGVGERTREGNDLYHEMIDSGVIKTDGEGSKAALVYGQMNEPPGARARVALTGLTVAEYFRDQEGQDVLFFVDNIFRFTQAGSEVSALLGRIPSAVGYQPTLATDMGNLQERITTTNKGSITSVQAIYVPADDLTDPAPATSFAHLDATTVLSRQIAKIGIYPAC

SEQ ID NO: 175037 - protein, 309 aa, Unknown
  Bacterial polypetide isolated from the Sargasso Sea
VVNVVKKLEEHGALEHTIIVSASASDPAPMQYLSAYSGCSMGEYFRDKGEDALIVYDDLSKQAVAYRQVSLLLKRPPGREAYPGDVFYLHSRLLERAARVNADYVEKATNGKVKGKTGSLTALPIIETQAGDVSAFVPTNVISITDGQIFLETDLFNSGIRPAINPGISVSRVGGAAQTKIMKKLSGGVRTALAQYRELAAFSQFASDLDDATKAQLARGIRITELIKQKQYSPMSVAQQSLSIFAADRGYMDDVEVEKIGSFEEALHGYFTSEKADLEKSINDTGDWNDDIEKQFTEVVEQFKKTQTF

SEQ ID NO: 175038 - protein, 243 aa, Unknown
  Bacterial polypetide isolated from the Sargasso Sea
SCTFRVDDGRKLRDEGRDVLLFVDNIYRYTLAGTECSALLGRMPSAVGYQPTLAEEMGVLQERIASTKTGSITSVQAVYVPADDLTDPSPATTFAHLDANVVLSRQIASLGIYPAVDPLDSNSRQLEPGIVGQEHYDVANAVKQQLNRYKELKDIIAILGMDELSEEDKLVVARARKIERFLSQPFFVAEVFTNSPGKYVPLSETIRGFKGIVNGDYDDIPEQAFLMAGGIDEVVEKAKTEAA

SEQ ID NO: 175039 - protein, 430 aa, Unknown
  Bacterial polypetide isolated from the Sargasso Sea
SCPAFGETSVRTIAMDATEGLKRGDDVIDTGAPIKVPVGPETLGRIVNVIGEPIDEKGEVKTKESWPIHRAAPEFNDQSTETEILVTGIKVVDLLAPYAKGGKIGLFGGAGVGKTVLIMELINNVAKAHGGFSVFAGVGERTREGNDLYHEMIESGVIKPDGEGSKAALVYGQMNEPPGARARVALSGLTVAEYFRDQEGQDVLFFVDNIFRFTQAGSEVSALLGRIPSAVGYQPTLATDMGNLQERITTTNKGSITSVQAIYVPADDLTDPAPATSFSHLDATTVLSRQIAELGIYPAVDPLDSTSRILDPRIVGDEHYRVAREVQKILQTYKSLQDIIAILGMDELSEEDKLTVARARKIQRFLSQPFFVAEVFTGSPGKLVDLEATIKGFDAICKGEYDHLPEAAFYMVGTIEEAIEKAEKMAKDAA

SEQ ID NO: 175040 - protein, 468 aa, Unknown
  Bacterial polypetide isolated from the Sargasso Sea
YLKSKIKNFGDKAEVTEVGQVLSVGDGIARIYGLDNVQAGEMVEFADGSKGMALNLESENVGVVIFGDDRNIKEGDVVKRTGNIVDTPVGKELLGRVVDGLGNPIDGKGSFSKSVKKTRVEVKAPGIIPRQSVSEPMQTGLKSIDSLVPIGRGQRELIIGDRQTGKTAVAVDAIINQKKINESGDEKQKLYCIYVAVGQKRSTVRQIQKTLEEAGAMEYTTIVAATASDSAPLQFLAPYTGCAMGEYFRDNGMHALIIYDDLSKQAVAYRQMSLLLRRPPGREAYPGDVFYLHSRLLERAAKLSDDHGGGSLTALPIIETQGGDVSAFIPTNVISITDGQIFLETELFNQGIRPAINVGLSVSRVGSSAQTKGMKKVSGSMKLELAQYREMAAFAQFGSDLDASTQQLLNRGSKLTELLKQKQFSPMTVAEQVISVFCGVKGYLDDIDLKDVAEFESKIIDRCKSEKP

SEQ ID NO: 175041 - protein, 354 aa, Unknown
  Bacterial polypetide isolated from the Sargasso Sea
GRGQRELIIGDRQTGKTAIALDAIINQKGTGVTCVYVAVGQKQSSIAAVVRKLEEYGAMEHTIIVAAAAADPAPMQFLAPYSGCSMGEYFRDKGEDALIIYDDLSKQAVAYRQISLLLRRPPGREAYPGDIFYLHSRLLERGCRVNEDYVEEQTEGKVKGKTGSLTALPIIETQAGDVSAFVPTNVISITDGQIFLETSYFNKGLLPAMNPGISVSRVGGAAQTPLIKKLGGGVRIALAQFRELEAFAQFASDLDDASREQLELGQKVTELMKQKQYSPMSVSEMGLVLFAVDKGYLKDVELNKIADFESALISYMNSEHKDFMDNLAESGEHSDEILATFTEALDKFKSTQTW

SEQ ID NO: 175042 - protein, 200 aa, Unknown
  Bacterial polypetide isolated from the Sargasso Sea
PSAVGYQPTLAEEMGVFQERIASTKTGSITSVQAVYVPADDLTDPSPATTFAHLDANVVLSRQIASLGIYPAVDPLDSNSRQLEPAIVGQEHYDVANAVKQQLNRYKELKDIIAILGMDELSEDDKLVVARARKIERFLSQPFFVAEVFTNAPGKYVPLSETIRGFKGIVNGDYDDIPEQAFYMTGNIDEVVEKAKTEAA

SEQ ID NO: 175043 - protein, 241 aa, Unknown
  Bacterial polypetide isolated from the Sargasso Sea
RRPPGREAYPGDVFYLHSRLLERAAKVISDDNIAKGMNDLPEGLRKKVKGGGSLTALPIIETQAGDVSAYIPTNVISITDGQIFLESDLFNSGVRPAINVGISVSRVGGSAQIKSMKKIAGTLKLDQAAYRELEAFAKFGSDLDAATLNVIEKGKRNVEILKQSVNDPFKIEDQIASIFVGTNNLISNVPVSKVREFETMYLETLSSKHKAVLQDLKSGNLTDKVISTLENVAKETSKLFE

SEQ ID NO: 175044 - protein, 164 aa, Unknown
  Bacterial polypetide isolated from the Sargasso Sea
DGQIYLETELFNSGIRPAINPGLSVSRVGGSAQTKIMKKLAGGVRTALAQYRELAAFSQFASDLDDATKQQLANGKAFTELLKQKQYAPMSVAQQALSLFAADRGYMADVDVEKILDFEEALHGYLTSEKGELEEQINSTGDWNDDIESQFKDLVEDFKKTQTF

SEQ ID NO: 175045 - protein, 450 aa, Unknown
  Bacterial polypetide isolated from the Sargasso Sea
MALNLESDNVGVVIFGDDRAVKEGDTVKRTGAIVDTPVGKELLGRVVDGLGNPIDGKGALDKGIKRSRVEVKAPGIIPRKSVNEPMQSGLKSVDSLVPIGRGQRELIIGDRQTGKTAVAIDTIINQKKINESNDEKQKLYCIYVAIGQKRSTVRQIEKSLEEAGAMEYTTIVAATASDAAPLQFLAPYTGCAMGEYFRDNGMHALIIYDDLSKQAVAYRQMSLLLRRPPGREAYPGDVFYLHSRLLERAAKLSDEHGGGSLTALPIIETQGGDVSAFIPTNVISITDGQIFLETNLFNQGIRPAINVGLSVSRVGSSAQTKAMKKVSGSMKLELAQYREMAAFAQFGSDLDASTQKLLNRGSKLTELLKQKQYSPMTVAEQVISVFCGVKGYLDDLELKDISSFERKIIEKCKSEKPEILEAISKSGKLEEDTENLLVETIKELKQNFNS

SEQ ID NO: 175046 - protein, 347 aa, Unknown
  Bacterial polypetide isolated from the Sargasso Sea
TKNEGTIVNVSDGIIRIHGMGDVMYGELVEFENGVFGLALNLEQDSVGVVVLGDYLGLSEGQKVTCTGKILEVPVGEEMLGRVVDALGNPIDGKGELKTKQTAPIEVVAPGVIARQSVDQPVQIGLKSIDAMVPIGRGQRELIIGDRQTGKTAVAIDAIINQKGSGIKCIYVAIGQKQSTIANVVAKLEEYGAMEHTIVVSAAAADPAAMQYLSAYSGCAMGEYFRDTGQDALIVYDDLSKQAVAYREISLLLRRPPGREAFPGDVFYLHSRLLERAARVNAEYVEKITEGKVKGKTGSLTALPIIETQAGDVSAFVPTNVISITDGQIFLETDLFNSGVRPAIDPG

SEQ ID NO: 175047 - protein, 408 aa, Unknown
  Bacterial polypetide isolated from the Sargasso Sea
LGRVVDGLGNPIDGKGALDKSVKRSRVEVKAPGIIPRKSVSEPMQTGLKSIDSLVPIGRGQRELIIGDRQTGKTAVAIDAIINQKKINESNDEKQKLYCVYVAIGQKRSTVRQIEKTLEEAGAMEYTTIVAATASDAAPLQFLAPYTGCAMGEYFRDNGMHALIIYDDLSKQAVAYRQMSLLLRRPPGREAYPGDVFYLHSRLLERAAKLSDEHGGGSLTALPIIETQGGDVSAFIPTNVISITDGQIFLETELFNQGIRPAINVGLSVSRVGSSAQTKAMKKVSGSMKLELAQYREMAAFAQFGSDLDASTQKLLNRGSKLTELLKQKQYSPMTVAEQVISVFCGVKGHLDDIEQKNIADFEKKIIEKCRSEKPEIVDSISSSGKLEENTEKSLNEIIIELKKNFNS

SEQ ID NO: 175048 - protein, 404 aa, Unknown
  Bacterial polypetide isolated from the Sargasso Sea
GENLLGRVVDPLGRPLDGRGDIDTSDSLPVEKIAAGVVERKSIDQPVQFGLKIVDAMVPVGRGQRELVIGDRTTGKTSLCVDALINQKDSNIIGIYVAIGQKASKVSQVVTRFEEQGALENTIIVTANASDSAALQYLAPYAGVTMAEYFMAQGKDVLIVYDDLSKHAWAYRQMSLLLRRPPGREAYPGDVFYLHSRLLERAAKLDEKYGGGSITALPIIETQAGDVSGYIPTNVISITDGQLYLEPDLFNSGIRPAVNAGLSVTRVGSSAQRKAMKEVSGSLKGEMAQYDSLKTFAQFGTDDLDAITKQQLARGERLTELLKQNENEPLSFENQVSIFYAANQGALDDVEIEKISDFEKQWYDFVSANLPEVMKSISEEGELSDDSKKSLDGAIKTFKGTFGK

SEQ ID NO: 175049 - protein, 198 aa, Unknown
  Bacterial polypetide isolated from the Sargasso Sea
SAVGYQPTLAEEMGVLQERITSTKSGSITSIQAVYVPADDLTDPSPATTFAHLDATVVLSRNIAELGIYPAVDPLDSTSRQLDPLILGQEHYDTTRAVQGVLQKYKELKDIIAILGMDELSEEDKLAVNRARKIQRYLSQPFYVAETFTGTPGKYVSLSETIKGFQAIVNGDYDHLPEQAFYMIGEISEAEKKADEVK

SEQ ID NO: 175050 - protein, 407 aa, Unknown
  Bacterial polypetide isolated from the Sargasso Sea
LLGRVVDALGNPIDGKGNISSETRSRIEVKAPGIIPRKSVSEPMQTGLKAIDSLIPIGRGQRELIIGDRQTGKTAIAIDTIINQKTINESDDESKKLYCIYVGIGQKRSSIAQTVKTLEDAGAMEYTTVVAATASDAAPLQFLAPYTGCSMGEYFRDNGMHALIIYDDLSKQAVAYRQMSLLLRRPPGREAFPGDVFYLHSRLLERAAKMNDENGGGSLTALPVIETQANDVSAFIPTNVISITDGQIFLETELFNQGIRPAVNVGLSVSRVGSAAQTKAMKKIAGSIKLELAQYREMAAFAQFGSDLDASTQKLLNRGSKLTELLKQNQYSPMTIAEQVVSIFAGVNGYLDDLDLNKIRDFEKDLYELIKSSHADIIEKVNSTGELDDDTSSKLQSIIEEFKKNRS

SEQ ID NO: 175051 - protein, 303 aa, Unknown
  Bacterial polypetide isolated from the Sargasso Sea
AHGGYSVFAGVGERTREGNDLYHEMIESGIIDLKGKDSKVALVYGQMNEPPGARARVALSGLTQAEYFRDEEGQDVLFFVDNIFRFTQAGSEVSALLGRIPSAVGYQPTLATDMGALQERITTTKKGSITSVQAIYVPADDLTDPAPATSFSHLDATTVLNRAISEKGIYPAVDPLDSTSRILDPQVVGDDHYRVAREVQRVLQTYKSLQDIIAILGMDELSEEDKLTVARARKIEKFLSQPFFVAEVFTGSPGKYVELEDTIKSFDGLVKGEYDHMPEAAFYMVGGIDEAIEKSKKLESEAA

SEQ ID NO: 175052 - protein, 169 aa, Unknown
  Bacterial polypetide isolated from the Sargasso Sea
VISITDGQIFLESSLFSSGLKPAMDPGISVSRVGGAAQVPIIKKLGGGIKTALAQYRELEAFAQFASDLDEASKEQLEHGVRVTELTKQDQFSPMSVAEMGLMLYTANEGYLREVEVEKIKDFEKTLLSYMNAEHKDLMDRVSETGEYNEEIEGSFKEALDKFMSTQTW

SEQ ID NO: 175053 - protein, 275 aa, Unknown
  Bacterial polypetide isolated from the Sargasso Sea
MEELNPSEISQVIKQKIDALDTASTPSNEGTIVFLADGIARIHGLGEVMNGELIEFEHGVMGMALNLEVDSVGAVILGDYKLLAEGGSAKCTGRILEVPVGEALMGRVVDALGNPIDGKGEVQTGQTAPVEKVAPGVISRKSVDQPVQLGIKAVDSMVPIGRGQRELIIGDRQTGKTAIAIDAIINQKDTGVKCIYVAIGQKQSSIAQVVRTLEQYGAMENTIVVVAAAADPAPMQYIAPFAACSMGEYFRDRGEDALIIYDDLSKQAVAYRQMS

SEQ ID NO: 175054 - protein, 175 aa, Unknown
  Bacterial polypetide isolated from the Sargasso Sea
AFVPTNVISITDGQIFLESSLFSSGLKPAMDPGISVSRVGGAAQVPIIKKLGGGIKTALAQYRELEAFAQFASDLDEASKEQLEHGVRVTELTKQDQFSPMSVAEMGLMLYTANEGYLRQVEVEKIKDFEKSLIAYMNSEHKDLMDKVSETGEYGDDIQNAFKEALDNFMETQTW

SEQ ID NO: 175055 - protein, 179 aa, Unknown
  Bacterial polypetide isolated from the Sargasso Sea
KGSITSVQAIYVPADDLTDPAPATSFSHLDATTVLSRQIAELGIYPAVDPLDSTSRILDPRIVGDEHYRVAREVQKILQTYKSLQDIIAILGMDELSEEDKLTVARARKIQRFLSQPFFVAEVFTGSAGKLVDLESTIKGFDAICKGEYDHLPEAAFYMVGTIEEAIEKAEKMAKEAAA

SEQ ID NO: 175056 - protein, 422 aa, Unknown
  Bacterial polypetide isolated from the Sargasso Sea
NLEDDNVGLVLFGESSLVKEGDLAKRTGKVVEVPVGEAMLGRVVNPLGQPIDGKGNIDTEEFLAIERKALGVMARSPVKQPLQTGIKAVDSMIPIGRGQRELIIGDRQTGKTAVAIDAIINQKYTHETDTPVYCIYVAIGQKASTVAAIVAELESNGAMEYTTVVAASASEEAPLQYIAPYSGCAMGEYFRDNGKHSLIVYDDLSKQAVAYRQMSLVLRRPPGREAFPGDVFYLHSRLLERASKLSDDLGGGSLTALPIIETQEGDVSAYIPTNVISITDGQIYLEKNLFNSGVRPAIDVGISVSRVGGNAQIKAMKGVAGTLRLDLAQYRELEAFAKFGSDLDKNTQAQLTRGERMVEILKQGQYVPMDVEKQVAIIFAASKGYLDKIPLDKVIDYESGLFDYLEANNKDDLQSIKTEGSI

SEQ ID NO: 175057 - protein, 260 aa, Unknown
  Bacterial polypetide isolated from the Sargasso Sea
NEPPGARARVALSGLTVAEYFRDGSGDGQGKDVLFFVDNIFRFTQAGSEVSALLGRMPSAVGYQPTLATEMGAMQERITSTKKGSITSVQAVYVPADDLTDPAPATTFSHLDATTVLSRKIAELGIYPAVDPLDSTSRILTPEILGDDHYNCAQRVKEMLQKYKELQDIIAILGMEELSEEDKLVVSRARRVQRFLSQPFHVAEQFTGIPGVLVDIKDTIKGFNMIMDGELDHIPEAAFNLKGTIEEAIEAGEKMIADAK

SEQ ID NO: 175058 - protein, 282 aa, Unknown
  Bacterial polypetide isolated from the Sargasso Sea
RHAVFISIFLDAPWGEYFRDKGEDALIVYDDLSKQAVAYRQVSLLLKRPPGREAYPGDVFYLHSRLLERAARVSADYVEQVTKGKVKGKTGSLTALPIIETLAGDVSAFVPTNVISITDGQIYLETELFNSGVRPAINPGLSVSRVGGSAQTKIMKKLAGGVRTALAQYRELAAFSQFASDLDDATKQQLANGKAFTELLKQKQYAPMSVAQQALSLFAADRGYMADVEVEKILDFEEALHGYLTAEKGDLEEKINSTGDWNDEIEAEFKSLVEDFKKTQTF

SEQ ID NO: 175059 - protein, 425 aa, Unknown
  Bacterial polypetide isolated from the Sargasso Sea
AISDSLKSTLGDWKDSVKDDVVGYVSAIADGVARVKGLENVMASELLEFPGGLVGVALNLEEDSIGVVLMGDSNHIEEGNPVKQTGEVLSIGVGDGFLGRVIDPLGNPIDGKGPIEFTERRRLELQAPSVVERQPVGEPLQTGIKAIDSMIPIGRGQRELIIGDRQIGKTAVAVDTIINQKDTDVKCIYVAIGQKSSTVAEVVERFEQEGVLDKVVIVNAPASAAAALQMYAPYAGSAIGQHWMYNGEHGLIVFDDLSKQAIAYRQISLLLRRPPGREAYPGDVFYLHSRLLERCAKVSEELGGGSLTGLPIIETKAGDVSAFIPTNVISITDGQIYLESELFYSGVRPAVNPGTSVSRVGGAAQTKAMKKVSGPLRINLAQFRELEAFAEFGSDLDAASQAQLDRGRRVVELLKQPQYPPVPME

SEQ ID NO: 175060 - protein, 112 aa, Unknown
  Bacterial polypetide isolated from the Sargasso Sea
YRVARDVQRILQSYKSLQDIIAILGMDELCEEDKLVVARARKIQRFLSQPFFVAEVFTGSPGKLVDLDSTIKGFDAICKGEYDHLPEAAFYMVGTIEEAIEKAKKMEQEAAA

SEQ ID NO: 175061 - protein, 471 aa, Unknown
  Bacterial polypetide isolated from the Sargasso Sea
ILKEQINKFGDKAEVSEVGQVLSVGDGIARIYGLDNVQAGEMVEFSDGSKGMALNLESDNVGVVIFGEDKSIKEGDTVKRTGAIVDTPVGKELLGRVVDGLGNPIDGKGVLDKGIKRSRVEVKAPGIIPRKSVSEPMQTGLKSIDSLVPIGRGQRELIIGDRQTGKTAVAIDAIINQKKINESNDEKQKLYCVYVAIGQKRSTVRQIEKTLEEAGAMEYTTIVAATASDAAPLQFLAPYTGCAMGEYFRDNGMHALIIYDDLSKQAVAYRQMSLLLRRPPGREAYPGDVFYLHSRLLERAAKLSDEHGGGSLTALPIIETQGGDVSAFIPTNVISITDGQIFLETELFNQGIRPAINVGLSVSRVGSSAQTKAMKKVSGSMKLELAQYREMAAFAQFGSDLDASTQKLLNRGSKLTELLKQKQYSPLTVAEQVITIFCGVKGYLDDVEQKNISEFEDKILEKCKSEKPENI

SEQ ID NO: 175062 - protein, 110 aa, Unknown
  Bacterial polypetide isolated from the Sargasso Sea
VARDVQKILQSYKSLQDIIAILGMDELSEEDKLVVARARKIQRFLSQPFFVAEVFTGSPGKLVDLESTIKGFDAICKGEYDHLPEAAFYMVGTIEEAIEKAKKMEKEAAA

SEQ ID NO: 175063 - protein, 466 aa, Unknown
  Bacterial polypetide isolated from the Sargasso Sea
TQVIGAVVDVNFDGELPEILTALECKNGDNRLVLEVAQHLGETTVRTIAMDATEGLKRGDEVMNTNAPIQVPVGPETLGRIINVIGEPIDERGEVKTKESWPIHRAAPEFNDQSTETEILVTGIKVIDLLAPYAKGGKIGLFGGAGVGKTVLIMELINNVAKAHGGFSVFAGVGERTREGNDLYHEMMDSGVIKKDGPGSKAALVYGQMNEPPGARARVALTGLTVAEYFRDQEGQDVLFFVDNIFRFTQAGSEVSALLGRIPSAVGYQPTLATDMGNLQERITTTNKGSITSVQAIYVPADDLTDPAPATSFAHLDATTVLSRQIAEIGIYPAVDPLDSTSRILDPRVVGDEHYKVARDVQKILQSYKSLQDIIAILGMDELSEEDKLVVARARKIQRFLSQPFFVAEVFTGSPGKLVDLESTIKGFDAICKGEYDHLPEAAFYMVGTIEEAIEKAKKMEKEAAA

SEQ ID NO: 175064 - protein, 241 aa, Unknown
  Bacterial polypetide isolated from the Sargasso Sea
YDDLSKQAVAYRQMSLLLRRPPGREAFPGDVFYLHSRLLERAAKLNDESGGGSLTALPVIETQANDVSAFIPTNVISITDGQIFLETELFNQGIRPAVNVGLSVSRVGSAAQTKAMKKVAGSIKLELAQYREMAAFAQFGSDLDASTQKLLNRGSKLTELLKQNQYSPMTIAEQVVSIFTGVNGYLDDLELNLIKDFEKDLFELIKSSHGDIIEAINSSGNLEDDVASKLSTIIEEFKKNR

SEQ ID NO: 175065 - protein, 306 aa, Unknown
  Bacterial polypetide isolated from the Sargasso Sea
IAKAHGGYSVFAGVGERTREGNDLYHEMLESGVNTLEGKDSKCALVFGQMNEPPGARARVALTGLTVAEYFRDMEGQDVLFFVDNIFRFTQAGSEVSALLGRIPSAVGYQPTLATDMGSLQERITSTNKGSITSVQAIYVPADDLTDPAPATSFAHLDATTVLSRQIAELGIYPAVDPLDSTSRILDPRIVGEEHYRVARNVQSVLQTYKSLQDIIAILGMDELSEEDKLTVSRARKIQRFMSQPFFVAEVFTGTPGIYVELDDTIKGFDAICKGEYDHLPEAAFYMVGTIEEAIKKSEKMAVEAA

SEQ ID NO: 175066 - protein, 230 aa, Unknown
  Bacterial polypetide isolated from the Sargasso Sea
NPAKELANVQDLTVRGAKLLLINPTDSDAVGNAVKMANQAKIPVITLDRQASKGDVVSHIASDNVLGGKMAGDYIAKKAGEGAKVIELQGIAGTSAARERGEGFKQAVAAHKFNVLASQPADFDRTKGLNVMQNLLTAHPDVKAVFAQNDEMALGALRALQTAGKSDVMVVGFDGTPDGEKAVNSGKLAATIAQLPEQIGVKGVETADKVLKGEKVDASYPVELKLVIKQ

SEQ ID NO: 175067 - protein, 180 aa, Unknown
  Bacterial polypetide isolated from the Sargasso Sea
MADVKMRSIFKSFGNTEVIHGVDLEIKDHEFVVFVGPSGCGKSTLLRLIAGLEDVSQGEIEIEGQRVDHLPPAKRGIAMVFQSYALYPHMNVYQNMSFGLKLAKTDKKITDQKVRDAAEILQITELLERKPKELSGGQRQRVAIGRAIVRDPKVFLFDEPLSNLDAKLRVQMRIELTKLH

SEQ ID NO: 175068 - protein, 267 aa, Unknown
  Bacterial polypetide isolated from the Sargasso Sea
FDNMAFGLKLEKRSKEEINERVQEAARILQIEDYLHRKPKQLSGGQRQRVAIGRAITRKPKVFLFDEPLSNLDAALRVQMRVELAKLHDQLNATMIYVTHDQTEAMTLANDIVVLDEGIVSQKGSPMDLYNDPNNLFVGGFIGSPKMNFISTKITSKSNDKTEVDLMGSSKISIPKTSASASEGDSVQLGIRPEHLIVNQDGDGSWESKVFVVEKLGSGTFLYLEKEGEPLVVETEGDSNIKVGDTVKVGFSASRCHLFDNSQQAFK

SEQ ID NO: 175069 - protein, 237 aa, Unknown
  Bacterial polypetide isolated from the Sargasso Sea
IEDYLKRKPKQLSGGQRQRVAIGRAITRKPKVFLFDEPLSNLDAALRVQMRVELAKLHDQLNATMIYVTHDQTEAMTLADDIVVLDEGIVSQKGSPMELYDNPSNLFVGGFIGSPKMNFISSKVLSANQNSTEVDIFGSSKISIQKTSKDASAGEEVHLGIRPEHLLINQEGDASWESKVFVVEKLGSGTFLYLEKEGEPLVVETEGDSNIKVGDTVKVGFTASRCHLFDKNNQAFT

SEQ ID NO: 175070 - protein, 318 aa, Unknown
  Bacterial polypetide isolated from the Sargasso Sea
CGKSTMLRMIAGLEDINSGTISIDGQVVNDLPPKQRNIAMVFQSYALYPHMTVFDNMAFGLKLEKRSKDEINERVNEAARILQIEDYLKRKPKQLSGGQRQRVAIGRAITRKPKVFLFDEPLSNLDAALRVQMRVELAKLHNELEATMIYVTHDQTEAMTLADDIVVLDTGIVSQKGTPLELYDRPNNMFVGGFIGSPKMNFISTKIISKSGNSTEVDLMGMSKIAVPKMSASSSEGDSVTLGIRPEHLIVNQDSDGSWESKVFVVEKLGSGTFLYLEKDGEPLVVETEGHSNIKVGDTEKVGFQSNRCHLFDSSQQA

SEQ ID NO: 175071 - protein, 361 aa, Unknown
  Bacterial polypetide isolated from the Sargasso Sea
MASIKIDKVNKFFGSTHVIKDVSLDIKSESFTVLVGPSGCGKSTILRMIAGLEEINSGTISIDDKVVNDLPPKERNIAMVFQSYALYPHMTVFDNMAFGLKIEKKSKEEIEQRVMEAAKILQIEEYLERKPKQLSGGQRQRVAIGRAITRKPKVFLFDEPLSNLDAALRVQMRVELAKLHDQLNATMIYVTHDQTEAMTLANDIVVLDQGIVSQKGSPMNLYNNPDNLFVGGFIGSPKMNFIDSKILSKSSKSSEVDIMGTGKLNVPKISDNTQEGDSIKIGIRPEHLILNAKTDSLWESKVFVVEKLGSGTYLYLEKEGDPLVVQTDGDTNIKVGDTVKIGFDPFRCHLFDNKGISFKNS

SEQ ID NO: 175072 - protein, 378 aa, Unknown
  Bacterial polypetide isolated from the Sargasso Sea
MAEVVLNNVRKNYDPAVHKDTLRNINLAIKEGEFIVFVGPSGCGKSTLLRMIAGLEDITSGELTIGGRYMNDVPPVERNVGMVFQSYALYPHMNIYENMAFGLKLKKMDKENIHKRVMRAAEILGLEPLLDRKPKALSGGQRQRVAIGRSIVQQPQVFLFDEPLSNLDAALRVKMRIEIAKLHKELNSTIIYVTHDQVEAMTLANRIVVLSPLKGEATTNLEQFGTPLELYHNPDNKFVAGFIGSPKMNFLAGELVEIGEQECVVKLTTGDTVRARVDARSGAVGDKVELGIRPEHLVPLDHPHADSKVSGVVQVAEHLGAESFVYMDVAGHDFTVKASSDVDVATGQQYSVGIPAEACYLFDAKEQAFPRTAKYIRT

SEQ ID NO: 175073 - protein, 348 aa, Unknown
  Bacterial polypetide isolated from the Sargasso Sea
MSFLELQNITKIYPNGTKAVNETSLNIDNGEFVVFVGPSGCGKSTLLRMIAGLEDITSGEISLDGNIINNIDPSERDVAMVFQNYALYPHMSVFNNMSYGLKNRGISKDEIKNKVNDVAKLLEIDQLLSRKPSMLSGGQRQRVAMGRAIVRNPKIFLFDEPLSNLDAKLRNQMRLEIKKLQRQMGVTSIFVTHDQTEAMTLGDRIVVINNGVVEQVGTPKEIYSKPNTKFVAEFIGSPQMNLFQCKIENGLAKISDMQINLNNSLNIQDACIGVRPDDILISDQGEYSSSANLVEYLGSDMIIYSSVGGQEFSCKLSSKINLKAGDNFKFNISPSVLHIFDNTSGQRV

SEQ ID NO: 175074 - protein, 176 aa, Unknown
  Bacterial polypetide isolated from the Sargasso Sea
MSIRIEQINKKFGDFVAVDNVSLSIQTGELTALLGPSGSGKTSLLRIIAGLEQADSGRIHFDELDISARHVSERGVGFVFQHYALFKHMTVYENVAFGLTVKPKKYRPTPEQIRKKVQHLLELVQLDWTADRYPSQLSGGQRQRIALARALAVEPKVLLLDEPFGALDAKVRAELR

SEQ ID NO: 175075 - protein, 309 aa, Unknown
  Bacterial polypetide isolated from the Sargasso Sea
KLKKSIQVGVQAIQSMNFDIKDGEFVVLVGPSGCGKSTMLRLIAGLEEISKGEIYIDDELVNDKEPADRDIAMVFQNYALYPHMTVYENMAYGLKNRKIKKERINELVNEVAKTLELSDLLLRKPKALSGGQRQRVAMGRAIVREPKVFLFDEPLSNLDAKLRVQMRLEIKQLQERLGVTSIYVTHDQIEAMTLGQRLVLMEKGRIEQIGTPIEVYEYPSSIFVASFIGSPPMNLVKGKMIRKSELELNGGLVIKSESFEDFDIDKQITIGVRPEHIVLNNKAECSIKVNTHNFERQGADSFIYGTVLN

SEQ ID NO: 175076 - protein, 248 aa, Unknown
  Bacterial polypetide isolated from the Sargasso Sea
MFAEGVSRTVEETEAMKTDDVIVSFRGVRKTYDGETLVVKQLDLDIYQGEFLTLLGPSGSGKTTCLMMLAGFEFPTGGEIWLDGTLLNTVPPHKRNIGMVFQNYALFPHLTVEQNVAYPLTVRKLSAEERAHRTNNALKMVRMESFAKRYPAQLSGGQQQRIALARALVFEPKLVLMDEPLGALDKQLREHMQYELKSLHEKLGVTFVYVTHDQGEALTMSDRVAVFDKGIVQQLDTVDRLYESPCNE

SEQ ID NO: 175077 - protein, 239 aa, Unknown
  Bacterial polypetide isolated from the Sargasso Sea
EKKVNQVAELLEIKEFLLRKPGQLSGGQRQRVAMGRAIVRNPKAFLFDEPLSNLDAKLRGQVRIEIKKLQKQMGVTSVFVTHDQVEAMTLGDRLAVINEGVIEQVGSPIEVYEKPATYFVAEFIGTPQMNFINGKIHANKFISDGFECSINNDVKDQEVIFGIRPENLKVSANGSIKIKVDLIEKLGADSIIYGYDKSNNYLCYRENGNTKIKANEEISLEIEDENYHLFDQETKKRLN

SEQ ID NO: 175078 - protein, 130 aa, Unknown
  Bacterial polypetide isolated from the Sargasso Sea
MKKDTTSISLKSCGKTFKDGTKALEEINLDISGGETIVLLGPSGCGKTTLLRIIAGLEEPDKGGQIIFNDEDVSRLQIEKRNVGMVFQSYALFPNMNVKENIGYGLKVRKLDKDQIEKRVSEMLNMMHIS

SEQ ID NO: 175079 - protein, 101 aa, Unknown
  Bacterial polypetide isolated from the Sargasso Sea
MQKETTSITLKSCRKTFKDGTRALEEINLDISGGETVVLLGPSGCGKTTLLRIIAGLEEPDKGGQIIFNEEDVSNLQIEKRNVGMVFQSYALFPNMNVKEM

SEQ ID NO: 175080 - protein, 253 aa, Unknown
  Bacterial polypetide isolated from the Sargasso Sea
MQKETTSISLKSCGKTFKDGTRALEEINLDISGGETVVLLGPSGCGKTTLLRIIAGLEEPDKGGQIIFNDEDVSKLQIEKRNVGMVFQSYALFPNMNVKENIGYGLKVRKLDKGQIDKRVSEMLEMMHITDLSIRNIDQLSGGQRQRVALARAIAVRPRVLLLDEPLTALDAILRDRLRVEIDILLRSLGITAIYVTHDQSEAMALGDRIVVMCNGQISQVGTPRNIYFRPANEFVADFIGTVNRIHVKNLKN

SEQ ID NO: 175081 - protein, 225 aa, Unknown
  Bacterial polypetide isolated from the Sargasso Sea
AEIDRKVEDAAKILNLTVYLDRKPRALSGGQRQRVAIGRAIVRNPECFLFDEPLSNLDAALRVNMRLEITELHQQLDATSIYVTHDQVEAMTMADKIVVLRAGNIEQVGSPLELYRKPANLFVAGFIGSPKMNFVTGKDAEGYKAHTIGVRPEHLTLSTESGTWQGKVVVAEHLGSDTFLHIDVDGIGQLTARANGDFPVRHGDVVYVTPDPERIYRFDDKGLAL

SEQ ID NO: 175082 - protein, 261 aa, Unknown
  Bacterial polypetide isolated from the Sargasso Sea
MAFSLKMRKLDRSLIKEKIDTAAEVLGLTPYLKRYPRALSGGQRQRVAMGRAIVRDPQVFLFDEPLSNLDAKLRVQMRAEIRELHQRLKSTTLYVTHDQIEAMTMADKIVVMQDGYIEQIGTPLELYDRPSNIFVAGFIGSPAMNLIPGITKKSGKSFAAEIYGGKLPLPEIKNLADGQEVLIGVRPEQLIPGKTGIASTVSVVEPTGSETHLIVRSGDQDLISVIRDRSSFSVGEKINLSAEKSFLHVFDAKTSERLNDD

SEQ ID NO: 175083 - protein, 220 aa, Unknown
  Bacterial polypetide isolated from the Sargasso Sea
MLRIDHIAKQYKETPVLRDIDLLVEGGEFVSLLGPSGCGKTTLLRILCGIEQADAGCIVFQGEDITRWPAARRGFGVVFQSYALFPNLTAAQNVAFGLKGQPVAQVQARVQEMLALVGLGAQAQRYPAQLSGGQQQRIALARALAPSPRLLLLDEPLSALDAQVRTELRSEIRQLQRQLGIACVMVTHDQEEALSMADRVVLMHPGAYRAAGLARAALRQ

SEQ ID NO: 175084 - protein, 253 aa, Unknown
  Bacterial polypetide isolated from the Sargasso Sea
PDRRRVAMVFQSYALFPHLCIRENLNLGLRIRGVSPDDQRRRVASILEVMQLGSLAERRPSELSGGQRQRVALARALLRDPLVYLLDEPMSNLDAQLREELRPELKRLVLQGPQPVVYVTHDQQEAMALADRIAVLCNGRIEQIGTPRELYERPATLFVAQFIGRPQMNLLHRETGLIVGIRPEHLRLNREGLPCRLIGREWLGAGQQLLLECSAGTLRMLCDGTVEPGDDLRVSWNSSDEHRFLDGCGTRMA

SEQ ID NO: 175085 - protein, 230 aa, Unknown
  Bacterial polypetide isolated from the Sargasso Sea
LFDVNLDIKDGEFIVLVGPSGCGKSTLLRMIAGLEDINSGEISLGGKVINQLAPRDRDVSMVFQNYALYPHLSVAKNIGFSLRMRKVEKSIIDKKVADAAEMLGLTHLLSRLPRNLSGGERQRVAMGRAIVRDPEVFLFDEPLSNLDAKLRVMMRNQIKEIHYEVKTTTVYVTHDQIEAMTMADKIVVLNGGIVEQVGSPDELYDQPNNTFVASFIGSPTMNQILGKVVS

SEQ ID NO: 175086 - protein, 194 aa, Unknown
  Bacterial polypetide isolated from the Sargasso Sea
MTAQAGNDAFLRFTNVKKTYDHKTLVVKDFNLNVAKGEFITLLGPSGSGKTTCLMMLAGFEDVTSGEILINGRNVTSIAPYARNIGMVFQQYALFPHMTIRENLAYPLKIRKLPKDEIRAKVEEYLALVELQAFGGRYPAQLSGGQRQRVALARALIFAPDIVLMDEPLGALDKKLREQMQFEIKRLHEQLGFT

SEQ ID NO: 175087 - protein, 176 aa, Unknown
  Bacterial polypetide isolated from the Sargasso Sea
THDQEEALEVADNVVLMNRGQVEQVGSPDAVYNTPATPFVYGFLGNVNLFHGRLEEGEGGSVLHVGDSAIAVPSGGVDSSRADQAVAFVRPHEIDLERYAPGAEGIPVTLRRALTLGAIAQLELEREDTDDIIEVSLPIERFRAEGFREGETLVVRPRAIRVFAQGNARPVAQAAV

SEQ ID NO: 175088 - protein, 265 aa, Unknown
  Bacterial polypetide isolated from the Sargasso Sea
ALFPNLTVYQNIAYGLENQKLPKQEIHKRVTDLLELVGLPDQKEKYPTQLSGGQQQRVALSRALATSPGLLLLDEPLSALDARVRSALRLEIRALHKNLGITTILVTHDQEEALSMADRIVVMDQGRIEQVGTPIEIYSNPASPFVADFIGVMNFIFGEVTSPGIVKIGDNTLKCNTENIPEKNNVRVTIRPEDILCHSELIESPNTLEVKVKSLEFLGSFYRLFIFGPNGFGKLMADLSIKQVHEQNITPESKLTIELPQNRLL

SEQ ID NO: 175089 - protein, 287 aa, Unknown
  Bacterial polypetide isolated from the Sargasso Sea
LYGFSNYALYPHMTVEENLGFSLKIAKEEKKEIETRVKEAVQILGLEELRKRKPSQLSGGQRQRVAMGRAIVRRPDAFLFDEPLSNLDAKLRTQMRTEIKKLHQKLKTTVIYVTHDQVEAMTLADRIVIMKDGVIEQIGTPLDLFEKPATKFVATFIGSPSMNMIKATISNQSGKLSMKTDDGISVPVPEHKINSLTEGQIISFGFRAEDIVPLKYGQKPSNSWIMHSKVNLAEPLGTETLIFTNFGHTEIVSRMFTPELVNSNDELEFALNLDRTYLFDDKTDLAI

SEQ ID NO: 175090 - protein, 253 aa, Unknown
  Bacterial polypetide isolated from the Sargasso Sea
ERVNEAATILDISEFLQRKPAQLSGGQRQRVAMGRAIVRRPDVFLFDEPLSNLDAKLRNQMRTEIKRLHQKVSTTIVYVTHDQVEAMTLADRIVIMKDGIIEQIGTPLDLFERPATKFVATFIGSPSMNMISAIIVKHNSKLHMKTEDEILIPVPDQKVKLIREDQKISFGFRAEDIVPLKFGNKPSNFWDMQSTVNLSEPLGTETLIFTNFGNVEIVSRMFTPEQVNSNETLNFSLNLDRTYLFDEGSGFAI

SEQ ID NO: 175091 - protein, 241 aa, Unknown
  Bacterial polypetide isolated from the Sargasso Sea
MTALEIKDLNHYYVKGKNVLNDVNIELEEGEILSILGPSGCGKTTLLRIIAGLEKETSGSILMKDQIISDHFHTVLTENRDVGLVVQERALFPHLTIINNVMFGVSGSKANRHSTAMRLLKLFRVDRYAYNYPNEISSGEQQRVAIARAMAPNPKILLMDEPFGTLDQSLTNQLRVETRKILKDNNITAIIVSHDFDDALSMSDKVIVIEDGTVIQSGSAKDITHISREKSVKFSSIKANT

SEQ ID NO: 175092 - protein, 196 aa, Unknown
  Bacterial polypetide isolated from the Sargasso Sea
MSYLELDNITKIYPNGTKAVNETSLSISEGELMVFVGPSGCGKSTLLRMIAGLEDITGGEIKLDNRVINKVDPSERDVAMVFQNYALYPHMNVFKNLAYGLKNKGESKEEIEKKVNQVAELLEIKEFLLRKPGQLSGGQRQRVAMGRAIVRNPKAFLFDEPLSNLDAKLRGQVRIEIKKLQKQMGVTSVFVTHDQV

SEQ ID NO: 175093 - protein, 189 aa, Unknown
  Bacterial polypetide isolated from the Sargasso Sea
FGALDAKVRKELRSWLRRLHDDLHISTIFVTHDQEEALEVADRIVVLNRGHVEQVGSPQDVYDHPQTSFVYEFLGAANRLHGNVDASGFVVDGAALPVAIKADFSGPAFAYVRPHDLQLYPQASGHREGIVVDVRRVVTLGGSVRVELAGREGNLLEAELDRESWRDLQLAIGDGVTAVPRALRVFPAQ

SEQ ID NO: 175094 - protein, 376 aa, Unknown
  Bacterial polypetide isolated from the Sargasso Sea
MSIRLTNISKKFGQFQALSPLNLDIQEGEMIGLLGPSGSGKTTLLRIIAGLEGADSGQIHFGNRDVTQVHVRDRRVGFVFQNYALFRHMTVADNVAFGLEVIPKKQRPSKAEIQKRVSHLLEMVQLGHLAQRYPEQLSGGQKQRIALARALATQPEVLLLDEPFGALDAKVRKELRRWLRSLHDELKFTSVFVTHDQDEALELSDRVVVMSNGHIEQVNTPIELYAQPNSRFVFDFLGNVNRFEASWQQNRWTNGDAFLVPPEQAPLQQNGALYVRSHELALADKPNSQAHIPFTIVAITPVGAEVRVELAPIGWQSEELWEATFTHHHLQELGLQKGSVVYATPRTGYFFAEQGDGSPIRQSWPFLPPGSLVFDI

SEQ ID NO: 175095 - protein, 344 aa, Unknown
  Bacterial polypetide isolated from the Sargasso Sea
MAKIKFINVEKSFGNNKVIKKFNLEIDDGEFTVLVGPSGCGKSTVLRMISGLEKIDKGTILLNKNIINDLLPSKRDIAMVFQSYALYPHMNVYENMSFGLKMEKISKNNIQKKVNQAAKILKIKHLLDRKPGQLSGGQRQRVAIGRAISRNPKIFLFDEPLSNLDAALRSEMRVEISKLHKKIKTNMIYVTHDQVEAMTLADKMVILNEGRIEQVGSPDEIYNFPNNLFVAEFIGTPKMNIIKINKSNIINNNTLKIFGREYEFKNYKFSNEIYLGIRPEHIHPNHKQEIQFNINIDLIENLGSDKIIYGLFKDNEIRIRTSEEFPQNNTSFSFNKDKVVFFDT

SEQ ID NO: 175096 - protein, 356 aa, Unknown
  Bacterial polypetide isolated from the Sargasso Sea
MAFLEIENLHKAFGANTALHHFDMKIERGEFITFLGPSGCGKTTVLRMIAGFETPTRGTIRLDNKDVTHLRTRQRKVGMVFQSYALFPNMTVADNIGFGLKIAHRPQAEISKRVEEMLQLIKLPHLGARYPWQLSGGQQQRVALARALAGKPQVLLLDEPLSALDAKIRISLRQDIRALQRELGITSIFVTHDQEEALSISDRIVVMNEGRVEQVGSPSEIYNYPRTRFVASFVGTLNILAGHVIDPKSGRMAVDGQELTTTQALPAGDAGKQRMLALRPEAIVLEPAAPGRNTLSAIVEEVNFLGAVVRIRTRVKDAVISLDVFNDPNRGLPERGQPVSLGFSHENLLVLEEGGA

SEQ ID NO: 175097 - protein, 237 aa, Unknown
  Bacterial polypetide isolated from the Sargasso Sea
MDIILELKNIKHSFTRDNEVLKDVSLQVNRGEIITILGPSGCGKTTLLRIIAGLEEQSAGTVSIDNEIVSGHLNHVNTEERNIGLVVQERALFPHLSIVNNVKFGIKGTNKNNTERAMSLLKLFSVERYAKNYPHEISSGEQQRVALARAMAPNPKILLMDEPFGALDKELKVRLRSETNKILRDNLTTTIIVSHDTEDALAMSDRVLIMKDGNFIQNGKPEDVISISSTASQKNLI

SEQ ID NO: 175098 - protein, 363 aa, Unknown
  Bacterial polypetide isolated from the Sargasso Sea
MAPYLSAERIEKRYNDTQVLTDINLSVMKGEMICFLGPSGCGKTTLLRIIAGLETQNAGHIMQDGRDISRLPPQLRDYGIVFQSYALFPNLTVYDNVAYGLVNRRMKRDAIHERVHTLLALVGLPDSHRKHPGQLSGGQQQRIALARALASSPGLLLLDEPLSALDARVRVRLRQEIRALQQRLGVTTIMVTHDQEEALSMADRIVVMNHGVIEQIGTPLEIYRQPASPFVADFIGRVNTIPAEVAQDGTLRAGAVGLDCRHGAARPTQGAAVSVYVRPEDLRIRVPGETADNVLAGRVEKLEFLGAFCRVSFRIDGLDGQEIVADLSYHDVDRTGVQAGARIDLALDREHVRVFPSAKERLQ

SEQ ID NO: 175099 - protein, 356 aa, Unknown
  Bacterial polypetide isolated from the Sargasso Sea
MAEVSIANVRKVYGSTEVIHDLSIKVDDGEFVVLVGPSGCGKSTLLRMVAGLESITAGNISIGGKTVNNLPPSERDIAMVFQNYALYPHKTVEANMAFSLKMRKLDRTLIKEKVDVAAEVLGLTPYLKRYPRALSGGQRQRVAMGRAIVRDPQVFLFDEPLSNLDAKLRVQMRAEIRELHQRLKSTTVYVTHDQIEAMTMADKIVVMQDGYIEQIGTPLELYDRPSNVFVAGFIGSPAMNLIPGVAKKSGSNFSAEIYGGKLPLPKIKNLADGQELLIGVRPEQLIPGKTGIAATVSVVEPTGSETHLIVRSGDQDLISVIRDRSSFSVGETINLSAEKSFLHVFDAKTSERLNDD

SEQ ID NO: 175100 - protein, 351 aa, Unknown
  Bacterial polypetide isolated from the Sargasso Sea
MAKVSLQGVSKFYGKVQAVKKIDLEIIDKEFLVLVGPSGCGKSSSLRMIAGLEEIDEGIIKIGDKEMNNLEPRERNVSMVFQNYALYPHMTVEENLGFSLKIAGLAKKEIEERVHEAAGILDITEFLQRKPSQLSGGQRQRVAMGRAIVRRPDVFLFDEPLSNLDAKLRNQMRTEIKRLHQKVSTTIVYVTHDQVEAMTLADRIVIMKDGIIEQIGTPLDLFERPATKFVATFIGSPSMNMIKASIVKQNNELSMKTNDGIIVPVPKDKQNSVSEGQNISFGFRAEDIVPLKFGQKPSSAWEMQSSVNLAEPLGTETLIFTNFGEIEIVSRMFTPEQVKSNDVLDFALNLD

SEQ ID NO: 175101 - protein, 370 aa, Unknown
  Bacterial polypetide isolated from the Sargasso Sea
MPAPPAPFRRNRKEATRMGITVRNLQKRFGDFTALDNVSLDFPPGELVALLGPSGCGKTTLLRVIAGLEHADAGQVVLQGLDVASVGARDRQVGFVFQHYALFRHMTVFENVAFGLRVKPRRERPSEAAIREKVHELLKLVQLDWLAQRYPSELSGGQRQRIALARALAVEPKVLLLDEPFGALDAKVRKELRGWLRRLHDDLHISTIFVTHDQEEALEVADRIVVLNRGHVEQVGSPQDVYDHPQSAFVYEFLGAANRLPGTVAGRGFVAEGAAAPIEVDADFAGPANAYVRPHDLQLWPVGEEGHRDGIAVDVRRVIPLGGSVRVELEARAGGALEAELDRDAWRALSLQVGDGATAVPRAVRVFPAR

SEQ ID NO: 175102 - protein, 355 aa, Unknown
  Bacterial polypetide isolated from the Sargasso Sea
MSIQVQGLNKHFNQYAALADINLDFHDGELVALLGPSGCGKTTLLRIIAGLEQADSGSVIIRGEDASDLHVRERNVGFVFQHYALFRHMTVFENVAFGLRVKPRSERPAEAAIRARVKELLDLVQLSHVAARYPTQLSGGQRQRVALARALAVQPKVLLLDEPFGALDAQVRKELRRWLRELHDELHVTSLFVTHDQEEALEVADRVVLMNAGKVEQIGTPAEVYDQPASSFVHSFLGSVNLFRGRVAGQGLGIGEQLLGGPISSQLAEGSAAVAYVRPHELEILPADAPGGISATITRLLPMGPRIRVELRGNGDTNGAHFEAELSKEAARAFSPGQGVRLVAKQAQLYPDYQI

SEQ ID NO: 175103 - protein, 155 aa, Unknown
  Bacterial polypetide isolated from the Sargasso Sea
MSIEIRNVSKNFNAFKALNEINLNIQSGELVALLGPSGCGKTTLLRIIAGLETPDSGTIEFHGEDVSNHDVRDRNVGFVFQHYALFRHMTVFDNVAFGLRMKPKGQRPSEEVIKRKVHELLDLVQLDWLGDRYPEQLSGGQRQRIALARALAGSR

SEQ ID NO: 175104 - protein, 368 aa, Unknown
  Bacterial polypetide isolated from the Sargasso Sea
MKSDDVIVSFRGVRKTYDGETLVVKSLDLDIHRGEFLTLLGPSGSGKTTCLMMLAGFEFPTGGEIRLDGELLNNVPPHKRNIGMVFQNYALFPHLTVEQNVAYPLTVRKLPAGERAERVAHALKMVQMERFAKRYPAQLSGGQQQRIALARALVFEPKLVLMDEPLGALDKQLREHMQYELKALHEKLGVTFVYVTHDQGEALTMSDRVAVFDKGIVQQLDTVDRLYESPCNEFVANFIGDSNRLRGTIARVDGEFCEFRLDDGTKLVGRRIGDAAEGAPAVACIRPERMSLAAHGANGHANGAAANQLSGEARSLIYFGDHVRMRCALPGQDECFVKVPLGTGALDAFSPGAPVALAFSPEHLRVFA

SEQ ID NO: 175105 - protein, 376 aa, Unknown
  Bacterial polypetide isolated from the Sargasso Sea
MSIRLTNISKKFGQFQALSPLNLDIQEGEMIGLLGPSGSGKTTLLRIIAGLEGADSGQIHFGNRDVTQVHVRDRRVGFVFQNYALFRHMTVADNVAFGLEVIPKKQRPSKAEIQKRVSHLLEMVQLGHLAQRYPEQLSGGQKQRIALARALATQPEVLLLDEPFGALDAKVRKELRRWLRSLHDELKFTSVFVTHDQDEALELSDRVVVMSNGNIEQVNTPIELYAQPNSRFVFDFLGNVNRFEASWQQNRWTNGDAFLVPPEQTPLQQHGALYVRSHELALADKPNSQAHIPFTIVAITPVGAEVRVELAPIGWQSEELWEATFTHHHLQELGLQKGSVVYATPRTAYFFGEQTDGSPIRQSWPFLPPGSLAFDI

SEQ ID NO: 175106 - protein, 255 aa, Unknown
  Bacterial polypetide isolated from the Sargasso Sea
RNAAKILHIDHLLDRKPKQLSGGQRQRVAIGRAITRKPKVFLFDEPLSNLDAALRVKMRLEFARLHDELKTTMIYVTHDQVEAMTLADKIVVLSAGNVEQVGSPTMLYHAPANRFVAGFIGSPKMNFMEGVVQSVTHDGVTVRYETGETQRVAVEPGAVKQGDKVTVGIRPEHLHVGMADDGVSAKTMAVESLGDAAYLYAESSVAPDGLIARIPPLERHSKGETQRLGATPEHCHLFDSEGKAFQRKIVEVLAA

SEQ ID NO: 175107 - protein, 267 aa, Unknown
  Bacterial polypetide isolated from the Sargasso Sea
MADLTINNVNKFYDKTQVLFDVSLSIKDGEFIVLVGPSGCGKSTLLRMIAGLEDINSGEISLGNKVINQLAPRDRDVSMVFQNYALYPHLSVAKNIGFSLRMRKVEKSIIDKKVADAAEMLGLTHLLSRLPRNLSGGERQRVAMGRAIVRDPEVFLFDEPLSNLDAKLRVMMRNQIKEIHYEVKTTTVYVTHDQIEAMTMADKIVVLNGGIVEQVGSPDELYDNPSNTFVASFIGSPSMNQIHGKVVSEKGKKYFQSKDNSLFLLPE

SEQ ID NO: 175108 - protein, 309 aa, Unknown
  Bacterial polypetide isolated from the Sargasso Sea
MAEVKLKNITKKYGDVLAVKNMSLSIPHNEFLVLVGPSGCGKSTTLRMIAGLEEISGGEIYIGDQVVNEKDPKDRNISMVFQNYALYPHMTVEENLGFSLKIAKEEKNEIEIRVKEAVQILGLEELRKRKPSQLSGGQRQRVAMGRAIVRRPDAFLFDEPLSNLDAKLRTQMRTEIKKLHQKLKTTVIYVTHDQVEAMTLADRIVIMKDGVIEQIGTPLDLFEKPSTKFVATFIGSPSMNMIKATITNRSDKLFMKTDDDIYVPAPEHKINSLTEGQIISFGFRAEDIVPLKFGQKPSNSWTMHSKVNL

SEQ ID NO: 175109 - protein, 351 aa, Unknown
  Bacterial polypetide isolated from the Sargasso Sea
MAKIKFINVEKSFGKNKVIKKFNLEINDGEFTVLVGPSGCGKSTLLRMISGLEKIDKGTILLNKNIINDLLPSKRDMAMVFQSYALYPHMNVYENMSFGLKMEKISKNNIQKKVNQAAKILKIKHLLDRKPGQLSGGQRQRVAIGRAISRNPKIFLFDEPLSNLDAALRSEMRVEISKLHKKIKTNMIYVTHDQVEAMTLADKMVILNEGRIEQVGSPDEIYNFPNNLFVAEFIGTPKMNIIKIDKSNIINNTTLRIFGKEYEFKNYKFSNEIYLGIRPEHIHPNLKHEIEFNINIDLIENLGSDKIIYGLFKDNEIRIRTSEDLSQNNTGFSFNKNKIVFFDSKKNKLNY

SEQ ID NO: 175110 - protein, 213 aa, Unknown
  Bacterial polypetide isolated from the Sargasso Sea
KRENFVILGPSGCGKTTLLRIIAGLEKEKNGSIQINNRIVSDHFHTLPTEKRDIGLVVQERALFPHMSIIKNVMFGIKFNKAKKQEIAMNLLRLFEVDKYAYNFPNEISSGEQQRVAIARAMAPNPKILLMDEPFGTLDHSLTHQLRIETKKVLKDNKITAIIVSHDFDDAISMSDRVIVIEEGVIKQQGTAKDITNIVREKSIDFSSISEKS

SEQ ID NO: 175111 - protein, 363 aa, Unknown
  Bacterial polypetide isolated from the Sargasso Sea
MSDYLRIEGIHKQFGSTPVLKDVNLTIFKGEMVCFLGPSGCGKTTLLRIIAGLETQSAGTIAQAGKDISMLPPMLRDYGIVFQSYALFPNLTVNENVAYGLTNRKVRKAVIRERVAELLALVGLPDSGPKHPGQLSGGQQQRIALARALATSPGLLLLDEPLSALDARVRVRLRQEIRQLQQRLGVTTIMVTHDQEEALSMADRIVVMNHGVIEQIGTPTEIYREPATPFVADFVGKANILPATVSANGAIQVGDVGLNCVKVSESLKGGSRVSLFLRPEDLVVRGVDTKAGNTLSGRIGKLEFLGAFCRVSVQVDGMPGTEVLADLSYHDMTEFDLQEGSVLNLAVLGNRVRIFGEDQRRVQ

SEQ ID NO: 175112 - protein, 343 aa, Unknown
  Bacterial polypetide isolated from the Sargasso Sea
MKLDSTPITLTRCAKTFRGTRVLEPLDLSIGAGETLVLLGPSGCGKTTTLRLIAGLDTPDAGGTIAFGNDDVTALPIERRQVGMVFQNYALFPNLTVRGNVGYGLKIRKTEPRALRERVDELLAMMRLDAHADKPIDQLSGGQRQRVALARALAVRPRVLLLDEPLTALDAKLRDTLRREMNTLLRELGVTTVYVTHDQAEAMELGDRIVVMGAGRIEQIGTPRDIYYHPANRTVAQFIGTLNRLAGQWRDGTLVTTGGAIATPHAADEWFFRPEDAQLADPAHAPLRGAVSACAFLGERTRLTIEHAAPDALVIDVPGRIALARGTAVGLTVAPEGLIALGA

SEQ ID NO: 175113 - protein, 217 aa, Unknown
  Bacterial polypetide isolated from the Sargasso Sea
MSKIKAENVNVYYGPKQALFDVSINIAEKEVTALIGPSGCGKSTFLRCLNRMNDVIDICRVEGSIKMDDLELNSRKLDVVRLRENVGMVFQKPNPFPKTIYENVAYGPTIHGIAQSKEEMDQIVETSLKKAALWNEVKDRLDEIGTGLSGGQQQRLCIARTISVSPEVILMDEPCSALDPIATAQIEELIDDLKKEVTIVIVTHSMSQAARVSQKTG

SEQ ID NO: 175114 - protein, 250 aa, Unknown
  Bacterial polypetide isolated from the Sargasso Sea
IKIKAKDVDVFYGKKQALFNISLDIEENQVTALIGPSGCGKSTFLRCLNRMNDVIDICSVKGEILINDFNINDKSCDVVRLREKIGMVFQKPNPFPKTLYENVSYGPTIHGMSQSKQEMDEIVETSLKKAALWEEVKDRLHEPGTGLSGGQQQRLCIARAISVRPEVILMDEPCSALDPIATAQIEELIDELKKEHTIIIVTHSMAQAARVSQNTGFFHLGQLIEHGSTDKIFKNPDNKKTQDYITGRFG

SEQ ID NO: 175115 - protein, 176 aa, Unknown
  Bacterial polypetide isolated from the Sargasso Sea
KLDVVRLRENVGMVFQKPNPFPKTIYENVAYGPTIHGIAQSKEEMDQIVETSLKKAALWNEVKDRLDEIGTGLSGGQQQRLCIARAISVSPEVILMDEPCSALDPIATAQIEELIDDLKKEVTIVIVTHSMSQAARVSQKTGFFHLGKLIEFGPTDKIFKNPDNQQTQDYITGRFG

SEQ ID NO: 175116 - protein, 237 aa, Unknown
  Bacterial polypetide isolated from the Sargasso Sea
KKQALFNISLDIEENQVTALIGPSGCGKSTFLRCLNRMNDVIDICNVKGEILINDFNINDKSCDVVRLREKIGMVFQKPNPFPKTLYENVSYGPTIHGMAQSKQEMDEIVETSLKKAALWEEVKDRLHEPGTGLSGGQQQRLCIARAISVRPEVILMDEPCSALDPIATAQIEELIDELKKEHTIIIVTHSMAQAARVSQNTGFFHLGQLIEHGSTDKIFKNPDNKKTQDYITGRFG

SEQ ID NO: 175117 - protein, 253 aa, Unknown
  Bacterial polypetide isolated from the Sargasso Sea
MTNIKIKSKNLNVYYGDKQALFDVNLDLNEKEVTALIGPSGCGKSTFIRCINRMNDVIDICKVTGNIEMDGMNINDKDLDVVSLRERVGMVFQKPNPFPKSIYDNISYGPKIHGKGETKSELDQIVENSLKKSALWEEVKDRLDEPGTSLSGGQQQRLCIARAISVNPEVILMDEPCSALDPIATAKIEELIDELKKTYTIVIVTHSMAQAVRVSQKTGFFHLGKLIEVGKTEKIFKNPDNKMTQDYITGRFG

SEQ ID NO: 175118 - protein, 137 aa, Unknown
  Bacterial polypetide isolated from the Sargasso Sea
MKKIKAKDVDVFYGKKQALFNISLDIEENQVTALIGPSGCGKSTFLRCLNRMNDVIDICSVKGEILINDFNINDKSCDVVRLREKIGMVFQKPNPFPKTLYENVSYGPTIHGIAQSKQEMDEIVETSLKKAALWEEV

SEQ ID NO: 175119 - protein, 213 aa, Unknown
  Bacterial polypetide isolated from the Sargasso Sea
MIENLAVSYSGKTAIKDINMKIPDKAVTALIGPSGCGKTTLLRTINRMHDLTKGAEVTGKIIIDGENVYDSYINPILQRRKIGMVFQKPNPFPTMSIWDNVAAGLKLNGVKDKSILNEIIEDSLKMAYLWDEVKDELKKPAVALSGGQQQRLCIARALAIQPEVLLMDEPASALDPIATQKIEQTIIELKKHYTIIIVTHNMQQALRVSDRTG

SEQ ID NO: 175120 - protein, 152 aa, Unknown
  Bacterial polypetide isolated from the Sargasso Sea
MIENLAVAYNGKKAIKNINMKIPDKAVTALIGPSGCGKTTLLRTINRMHDLTKGAEVTGKIIIDGENVYDSYINPILQRRKIGMVFQKPNPFPTMSIWDNVAAGLKLNGVKDKSILNEIIEDSLKMAYLWDEVKDELKKPAVALSGGQQQRL

SEQ ID NO: 175121 - protein, 272 aa, Unknown
  Bacterial polypetide isolated from the Sargasso Sea
MVEKTIKNKSIKANSSSKKSNYTDDNLNKNISFEKPLLEAKNVFVHYGKTLAVKNVSIQVPSNKVVSLIGPSGCGKSTLIRCFNRMNDTIRIAKIEGEIKYKEENIYNLDPAEVRYRIGMVFQKPNPFPKSIYENVAFGPKVNGIKDNLDELVEASLKKADLWKEVKDRLKENAYGLSGGQQQRLCIARSLAVSPEVILMDEPCSALDPISTDRIEELIKELSKTMTILIVTHNMQQAIRVSDYAACMMAGEERIGELIEYGEVDQIFWKSN

SEQ ID NO: 175122 - protein, 118 aa, Unknown
  Bacterial polypetide isolated from the Sargasso Sea
WDEVKDNLHRKGTFLSGGQQQRLCIARALALKPKILLLDEPTSALDPKSTSNIEDLIIELKSTVTIVMVTHNIGQASRVSDYTAFLYLGKLIEYGDTGKLFTAPDNKLTEEYLTRKFG

SEQ ID NO: 175123 - protein, 207 aa, Unknown
  Bacterial polypetide isolated from the Sargasso Sea
MNDLIETAKVTGEVKFRGINLYDSQVDPVAVRRRIGMVFQKPNPFPKTIYDNVAFGPRVGGMKKELDEVVEQSLQKAALWDEVKDRLKDSALGLSGGQQQRLCIARALAVGPEVLLMDEPCSALDPIATTRIEDLMQELKEEYSIVIVTHNMQQAARVSSRTAFFSTEPGADNTRPTGVMIECDSTEKIFSTPEDQRTENYVTGRFG

SEQ ID NO: 175124 - protein, 173 aa, Unknown
  Bacterial polypetide isolated from the Sargasso Sea
MSKIIAENVNVYYGSKQALFDVSIDIAEKEVTALIGPSGCGKSTFLRCLNRMNDVIDICRVEGSIKMDDLELNSRKLDVVRLRENVGMVFQKPNPFPKTIYENVAYGPTIHGIAQSKEEMDQIVETSLKKAALWNEVKDRLDEIGTGLSGGQQQRLCIARAISVSPEVILMDE

SEQ ID NO: 175125 - protein, 188 aa, Unknown
  Bacterial polypetide isolated from the Sargasso Sea
MIKIKAKDVDVFYGKKQALFNISLDIEENQVTALIGPSGCGKSTFLRCLNRMNDVIDICSVKGEILINDFNINDKSCDVVRLREKIGMVFQKPNPFPKTLYENVSYGPTIHGIAQSKQEMDEIVETSLKKAALWEEVKDRLHEPGTGLSGGQQQRLCIARAISVRPEVILMDEPCSALDPIATAQIEE

SEQ ID NO: 175126 - protein, 112 aa, Unknown
  Bacterial polypetide isolated from the Sargasso Sea
MIKIKAKDVDVFYGKKQALFNISLDIEENQVTALIGPSGCGKSTFLRCLNRMNDVIDICSVKGEILINDFNINDKGCDVVRLREKIGMVFQKPNPFPKLYMKMYLTVQQFMV

SEQ ID NO: 175127 - protein, 270 aa, Unknown
  Bacterial polypetide isolated from the Sargasso Sea
MTTRDRIEDIETIGKPNVENPFISAKNVNVHYGDNHAIKDVSLQIAKNQVIALIGPSGCGKSTFIRCINRMNDTIDIAKITGKISLDGEDIYSEKLDPVILRARVGMVFQKPNPFPKSIYDNVAYGPRIHGLAKDRNELDEIVINSLQKAGLYEEVSDRLDESGLSLSGGQQQRLCIARTIAVNPEVILMDEPCSALDPIATARIENLIDELSEKFSIVIVTHSMQQAARVSQRVAYFHLGRLVEVDDTEKVFTNPSHILTQDYITGRIG

SEQ ID NO: 175128 - protein, 165 aa, Unknown
  Bacterial polypetide isolated from the Sargasso Sea
GIYKLNGIPVENLSDDELAEIRNQKLGFVFQQFHLLSDATALENVTLPMIYAGIEPEQRLERGKNALKKVGLSERMNNRPNQLSGGQQQRVAIARAIINNPAILLADEPTGALDSKTTEDVLDLFDKLHESGITIVLVTHEDEVANRAKKIAKFKDGRIVELKVN

SEQ ID NO: 175129 - protein, 92 aa, Unknown
  Bacterial polypetide isolated from the Sargasso Sea
MDQAEETANKMSTRNLDVYYGDKQALFDINVDIPERSVTALIGPSGCGKSTFIRCLNRMNDTIDGCRVEGDIYIDKSDIYDRGLDVVELRAR

SEQ ID NO: 175130 - protein, 253 aa, Unknown
  Bacterial polypetide isolated from the Sargasso Sea
MNNIKIKSKNLNVYYGDKQALFDVNLDLNEKEVTALIGPSGCGKSTFIRCINRMNDVIDICKVTGNIEMDGMNINDKDLDVVSLRERVGMVFQKPNPFPKSIYDNISYGPKIHGKGETKSELDQIVENSLKKSALWEEVKDRLDEPGTSLSGGQQQRLCIARAISVNPEVILMDEPCSALDPIATAKIEELIDELKKTYTIVIVTHSMAQAVRVSQKTGFFHLGKLIEVGKTEKIFKNPDNKMTQDYITGRFG

SEQ ID NO: 175131 - protein, 186 aa, Unknown
  Bacterial polypetide isolated from the Sargasso Sea
LINDFNINDKSCDVVRLREKIGMVFQKPNPFPKTLYENVSYGPTIHGMAQSKQEMDEIVETSLKKAALWEEVKDRLHEPGTGLSGGQQQRLCIARAISVRPEVILMDEPCSALDPIATAQIEELIDELKKEHTIIIVTHSMAQAARVSQNTGFFHLGQLIEHGSTDKIFKNPDNKKTQDYITGRFG

SEQ ID NO: 175132 - protein, 152 aa, Unknown
  Bacterial polypetide isolated from the Sargasso Sea
MIKIKAKDVDVFYGKKQALFNISLDIEENQVTALIGPSGCGKSTFLRCLNRMNDVIDICSVKGEILINDFNINDKSCDVVRLREKIGMVFQKPNPFPKTLYENVSYGPTIHGMAQSKQEMDEIVETSLKKAALWEEVKDRLHEPGTGLSGGQ

SEQ ID NO: 175133 - protein, 93 aa, Unknown
  Bacterial polypetide isolated from the Sargasso Sea
ARAISVRPEVILMDEPCSALDPIATAQIEELIDELKKEHTIIIVTHSMAQAARVSQNTGFFHLGQLIEHGSTDKIFKNPDNTKTQDYITGRFG

SEQ ID NO: 175134 - protein, 168 aa, Unknown
  Bacterial polypetide isolated from the Sargasso Sea
EKGWNVFQKPNPFPKTWYENIAYGPTIHGMATTKHEMDEIVEKSLRRAALWDEVKDRLHEIATGLSGGQQQRLCIARAISIEPEVILMDEPCSALDPIATAKIEELMDELRQNFTIVIVTHSMQQAARVSQRTAFFHLGNLVESGETDQIFTTPSNQKTEDYITGRFG

SEQ ID NO: 175135 - protein, 210 aa, Unknown
  Bacterial polypetide isolated from the Sargasso Sea
MIKIKAKDVDVFYGKKQALYNISLDIEENQVTALIGPSGCGKSTFLRCLNRMNDVIDICNVKGEILINDFNINDKSCDVVRLREKIGMVFQKPNPFPKTLYENVSYGPTIHGMAQSKQEMDEIVETSLKKAALWEEVKDRLHEPGTGLSGGQQQRLCIARAISVRPEVILMDEPCSALDPIATAQIEELIDELKNGAYNNNCYSFYGSSC

SEQ ID NO: 175136 - protein, 143 aa, Unknown
  Bacterial polypetide isolated from the Sargasso Sea
MSKVKVSSKNVNVHYGTKQALHSVSLDINENEVTALIGPSGCGKSTFLRCINRMNDLIDICKVDGSITVDNEEIISDEVDVVSLRSKIGMVFQKPNPFPKSIFDNVAYGPTIHGIDESKSDLEEIVHSSLKRAGLLKEVQDRL

SEQ ID NO: 175137 - protein, 225 aa, Unknown
  Bacterial polypetide isolated from the Sargasso Sea
YWSSGCGKSTVIRAINRMNDLIEGCKLSGSVIFEGIDIYAEDIDPVEVRRRIGMVFQQPNPFPKSIYENIAFGARVNGFKGNMDQLVEESLIKAAVWDECKDKLNESGYSLSGGQQQRLCIARTIAIEPDVILMDEPCSALDPLSTLKIEETIHELKKNFTIIIVTHNMQQANRVSDYTAFFNTERKDKDLGGKIGFLVEFDKTKNMFNSPKQKSTQDYISGKFG

SEQ ID NO: 175138 - protein, 181 aa, Unknown
  Bacterial polypetide isolated from the Sargasso Sea
MIKTNKKTPKNIILSLENVSISYGTYEAVKNVFCNFKKGNITSLIGPSGCGKSTVLRSLNRMNDLIPNCSLKGTVLFDGTNIYDKRVDPVEVRRRIGMVFQQPNPFPKSIYENIAFGARINGFTGDMDELVESSLRKAALWDECKDKLNDSGYSLSGGQQQRLCIARTIAIEPEIILMDEP

SEQ ID NO: 175139 - protein, 201 aa, Unknown
  Bacterial polypetide isolated from the Sargasso Sea
MIKIKAKNVDVFYGKKQALYNIGLDIEENQVTALIGPSGCGKSTFLRCLNRMNDVIDICRVKGEILINDFNINDKSCDVVRLREKIGMVFQKPNPFPKTVYENISYGPTIHGMAQSKQEMDEIVETSLKKAALWEEVKDRLYEPGTGLSGGQQQRLCIARAISVRPEVILMDEPCSALDPIATAQIEELIDELKKEHTIII

SEQ ID NO: 175140 - protein, 174 aa, Unknown
  Bacterial polypetide isolated from the Sargasso Sea
DVVSLRERVGMVFQKPNPFPKSIYDNISYGPKIHGKGETKSELDEIVENSLKKAALWEEVKDRLDEPGTGLSGGQQQRLCIARAISVNPEVILMDEPCSALDPIATAKIEELIDELKKTYTIVIVTHSMAQAVRVSQKTGFFHLGKLIEVGKTEKIFKNPDNKMTQDYITGRFG

SEQ ID NO: 175141 - protein, 121 aa, Unknown
  Bacterial polypetide isolated from the Sargasso Sea
VTLPMIYAGIEPEQRLERGKDALKKVGLSERMNNRPNQLSGGQQQRVAIARAIINNPAILLADEPTGALDSKTTEDVLDLFDKLHESGITIVLVTHEDEVANRAKKIAKFKDGRIVELKVN

SEQ ID NO: 175142 - protein, 136 aa, Unknown
  Bacterial polypetide isolated from the Sargasso Sea
MNEIKIKSKNLNVYYGEKQALFDVNLDLNEKEVTALIGPSGCGKSTFIRCINRMNDVIDICKVSGNIEIDGVEINDKNLDVVSLRERVGMVFQKPNPFPKSIYDNISYGPKIHGKGETKSELDEIVENSLKKAALW

SEQ ID NO: 175143 - protein, 90 aa, Unknown
  Bacterial polypetide isolated from the Sargasso Sea
ISVRPEVILMDEPCSALDPIATAQIEELIDELKKEHTIIIVTHSMAQAARVSQNTGFFHLGQLIEHGSTDKIFKNPDNKKTQDYITGRFG

SEQ ID NO: 175144 - protein, 141 aa, Unknown
  Bacterial polypetide isolated from the Sargasso Sea
MSNIKIKSKNLDVFYGDKQALFDVNLDLNEKEVTALIGPSGCGKSTFIRCINRMNDVIDICKVTGNIEMDGMDINDKNLDVVALREKVGMVFQKPNPFPKSIYDNISYGPKIHGKGETKSELDQIVENSLKKSALWEEVKD

SEQ ID NO: 175145 - protein, 60 aa, Unknown
  Bacterial polypetide isolated from the Sargasso Sea
MNNVKVSTKNVNVHYGTKQALHRVTLDINEKEVTALIGPSGCGKSTFLRCINRMNDLIDI

SEQ ID NO: 175146 - protein, 212 aa, Unknown
  Bacterial polypetide isolated from the Sargasso Sea
CGKSTFLRCLIRMNDVIDICKVQGEFHLNGIDIYGPEIQVENLRKQVGMVFQKPNPFPKTIYENVAYGPKIHGLASTKSELDDIVKDTLNRAGLYTEVKDRLDDIATGLSGGQQQRLCIARAIAIKPEIILMDEPCSALDPIATAVIEELINELKENYTIVIVTHSMQQAARISDKTAYFHLGEMIEFGITSNIFTNPNHEMTEAYISGRIG

SEQ ID NO: 175147 - protein, 195 aa, Unknown
  Bacterial polypetide isolated from the Sargasso Sea
MTEKIKIKSKNVNVYYGQKKALDKINLEIPTNKVTALIGPSGCGKSTFLRCINRMNDTIDICRIEGKIIVDEEDIYSTEVDPVLLRAKIGMVFQKPNPFPKSIFDNVAYGPKIHGIVNSDDELEELVIYSLKKAGLFEEVKDRLNDSGTSLSGGQQQRLCIARAIAISPQIILMDEPCSALDPIATAVIEELYDE

SEQ ID NO: 175148 - protein, 183 aa, Unknown
  Bacterial polypetide isolated from the Sargasso Sea
DFNINDKSCDVVRLREKIGMVFQKPNPFPKTLYENVSYGPTIHGMAQSKQEMDEIVETSLKKAALWEEVKDRLHEPGTGLSGGQQQRLCIARAISVRPEVILMDEPCSALDPIATAQIEELIDELKKEHTIIIVTHSMAQAARVSQNTGFFHLGQLIEHGSTDKIFKNPDNKKTQDYITGRFG

SEQ ID NO: 175149 - protein, 100 aa, Unknown
  Bacterial polypetide isolated from the Sargasso Sea
QQQRLCIARAISVNPEVILMDEPCSALDPIATAKIEELIDELKKTYTIVIVTHSMAQAVRVSQKTGFFHLGKLIEVGKTEKIFKNPDNKMTQDYITGRFG

SEQ ID NO: 175150 - protein, 146 aa, Unknown
  Bacterial polypetide isolated from the Sargasso Sea
TPETWMSLWSVPSARRRVWDECKDKLNESGYSLSGGQQQRLCIARTIAIQPEVILMDEPCSALDPISTLKIEETMHELKKSFTIVIVTHNMQQAVRVSDMTAFYNAEAVEGGTGKVGYLVEFNETDKIFNAPQQQATQDYVSGRFG

SEQ ID NO: 175151 - protein, 290 aa, Unknown
  Bacterial polypetide isolated from the Sargasso Sea
DIAEGEFITMLGPSGSGKTTCLMMLAGFETPTHGEILLDGNIISNIPPHKRGIGMVFQNYALFPHMTVYENLAFPLRVRKVEKDEIDKKVDKALSMVSLNGFETRMPAQLSGGQQQRVAVARALVFDPAVVLMDEPLGALDKNLRESMQYEIKHIHESIGVTVVYVTHDQSEALTMSNRIAVFNDGKVQQLSNPAELYEKPVNSFVAEFIGENNTFNGEIVDIDKDKCKVKLANSEILANPISVKSKGEKTTVSLRPERALINPSEKMDNMFTGKIEEVIYHGDHTRVRL

SEQ ID NO: 175152 - protein, 220 aa, Unknown
  Bacterial polypetide isolated from the Sargasso Sea
SLIGPSGCGKSTFLRCLNRMNDVIDSCKVQGEFLLNGVTDIYGDSIQVETLREKIGMVFQKPNPFPKSIFENVAYGPKIHGLASTQSELNDIVMESLNRAGLYEEVKDRMDDIATGLSGGQQQRLCIARAIAIRPEIILMDEPCSALDPIATARIEELINELKENYTIIIVTHSMSQASRISQRTAFFHLGKLIEHGDTSKIFTKPDKEQTNDYITGRFG

SEQ ID NO: 175153 - protein, 150 aa, Unknown
  Bacterial polypetide isolated from the Sargasso Sea
MSKIKAENVNVYYGSKQALFDVSIDIAEKEVTALIGPSGCGKSTFLRCLNRMNDVIEICRVEGSIKMDNLELNSRKLDVVRLRENVGMVFQKPNPFPKTIYENVAYGPTIHGIAQSKEEMDQIVETSLKKAALWNEVKDRLDEIGTGLSG

SEQ ID NO: 175154 - protein, 273 aa, Unknown
  Bacterial polypetide isolated from the Sargasso Sea
MTTSQLQTEQHQVSDDTAISIQNVTISYGSYEAVKNVYCDVPRGKVTAFIGPSGCGKSTVLRALNRMNDLIEGCSLKGRVLFDGVDLYGASVDPVEVRRRIGMVFQQPNPFPKSIYENIAFGARINGFTGDMDELVERSLRQAAVWDECKDKLNESGYSLSGGQQQRLCIARTIAIQPEVILMDEPCSALDPISTLKIEETMHELKKSFTIVIVTHNMQQAVRVSDMTAFYNAEAVEGGSGKVGYLVEFNETEKIFNSPQQQATQDYVSGRFG

SEQ ID NO: 175155 - protein, 270 aa, Unknown
  Bacterial polypetide isolated from the Sargasso Sea
MSKNPEFVKFDKVDKSYDGKVLVVKDLQLDIAEGEFITMLGPSGSGKTTCLMMLAGFETPTNGEILLDGNIISNIPPHKRGIGMVFQNYALFPHMTVYENLAFPLRVRKMEKDEIDKKVEKALSMVSLNGFETRMPGQLSGGQQQRVAVARALVFDPAVVLMDEPLGALDKNLRESMQYEIKHIHESIGVTVVYVTHDQSEALTMSNRIAVFNDGKVQQLSNPSELYEKPVNSFVAEFIGENNTFNGEVSDISGDECKVKLSNGEIIASA

SEQ ID NO: 175156 - protein, 146 aa, Unknown
  Bacterial polypetide isolated from the Sargasso Sea
YGPTIHGMAQSKQEMDEIVETSLKKAALWEEVKDRLHEPGTGLSGGQQQRLCIARAISVRPEVILMDEPCSALDPIATAQIEELIDELKKEHTIIIVTHSMAQAARVSQNTGFFHLGQLIEHGSTDKIFKNPDNKKTQDYITGRFG

SEQ ID NO: 175157 - protein, 251 aa, Unknown
  Bacterial polypetide isolated from the Sargasso Sea
MIKIKAKDVDVFYGKKQALYNISLDIEENQVTALIGPSGCGKSTFLRCLNRMNDVIDICSVKGEILINDFNINDKGCDVVRLREKIGMVFQKPNPFPKTLYENVSYGPTIHGIAQSKQEMDEIVETSLKKAALWEEVKDRLHEPGTGLSGGQQQRLCIARAISVRPEVILMDEPCSALDPIATAQIEELIDELKKEHTIIIVTHSMAQAARVSQNTGFFHLGQLIEHGSTDKIFKNPDNKKTQDYITGRFG

SEQ ID NO: 175158 - protein, 126 aa, Unknown
  Bacterial polypetide isolated from the Sargasso Sea
MAEALSPDKDKEVAFIGPPKVITKDVNVFYGENPALNSISISVSGNEVTACIGPSGCGKSTFLRCLNRMNDTIEGCRVTGDILIDGNNINHSSVDVVQLRTRVGMVFQKPNPFPKSIYENVAYGPR

SEQ ID NO: 175159 - protein, 177 aa, Unknown
  Bacterial polypetide isolated from the Sargasso Sea
MEENSEIKIDAQNVNVFYADKQAIDNVSLKVEKSKITALIGPSGCGKSTFLRCINRMNDVIPSCRVEGKILVDEIDVNNPELDPVFLRARVGMVFQKPNPFPKSIFDNIAYGPRIHGLTNSKSELDDIVKESLVRAGLWTEVSDRLFDQGTGLSGGQQQRLCIARAIAVNPEVILMD

SEQ ID NO: 175160 - protein, 250 aa, Unknown
  Bacterial polypetide isolated from the Sargasso Sea
MIKIKAKDVDVFYGKKQALFNISLDIEENQVTALIGPSGCGKSTFLRCLNRMNDVIDICSVKGEILINDFNINDKGCDVVRLREKIGMVFQKPNPFPKTLYENVSYGPTIHGIAQSKQEMDEIVETSLKKAALWEEVKDRLHEPGTGLSGGQQQRLCIARAISVRPEVILMDEPCSALDPIATAQIEELIDELKKEHTIIIVTHSMAQAARVSQNTGFFHLGQLIEHGSTDKIFKNPDNKKTQDYITREV

SEQ ID NO: 175161 - protein, 268 aa, Unknown
  Bacterial polypetide isolated from the Sargasso Sea
MKPDGTQGPNGPNNFSATPSVKVDVEQRSGEVSSLSEQEACIQVENMNFYYGDVKALNNINMTIPERKVTAFIGPSGCGKSTLIRIFNRMNDLIDGTRLEGSVRLNGTEIYDPDLNVADLRRRVGMVFQKPNPFPKSIYENVAYGLRIQGINNRVTLNATVEKALKGAALWEEVKDRLHENALSLSGGQQQRLVIARAIAIEPEVLLLDEPASALDPISTLKIEELIYELKSKYTIVIVTHNMQQAARVSDYTAFMYLGDLIEYDDTK

SEQ ID NO: 175162 - protein, 119 aa, Unknown
  Bacterial polypetide isolated from the Sargasso Sea
LPMIYAGIEPEQRLERGKNALKKVGLSERMNNRPNQLSGGQQQRVAIARAIINNPAILLADEPTGALDSKTTEDVLDLFDNLHESGITIVLVTHEDEVANRAKKIAKFKDGKIVELKVK

SEQ ID NO: 175163 - protein, 251 aa, Unknown
  Bacterial polypetide isolated from the Sargasso Sea
NPKIIAKNVNVYYNEKKAISNISIDIASKEVVSLIGASGCGKSTFLRCFNRMNDTIEGCRVEGTIEIDNENIYNSNLDVVSLRAKVGIVFQKPNPFPKSIFDNVAYGPKIHGLASNKSDLNNIVEYSLKSSGLWDEVKDRLDSPGTGLSGGQQQRLCIARAIAVSPEIILMDEPCSALDPIATAKIENLIDQLGRKYSIVIVTHSMQQAARVSQRTAYFHLGKLIEVGATKDIFTNPTDKKTEAYISGRIG

SEQ ID NO: 175164 - protein, 250 aa, Unknown
  Bacterial polypetide isolated from the Sargasso Sea
MIKIKAKDVDVFYGKKQALFNISLDIEENQVTALIGPSGCGKSTFLRCLNRMNDVIDICSVKGEILINDFNINDKGCDVVRLREKIGMVFQKPNPFPKTLYENVSYGPTIHGIAQSKQEMDEIVETSLKKAALWEEVKDRLHEPGTGLSGGQQQRLCIARAISVRPEVILMDEPCSALDPIATAQIEELIDELKKEHTIIIVTHSMAQAARVSQNTGFFHLGQLIEHGSTDKIFKNPDNKKTQDYITGRF

SEQ ID NO: 175165 - protein, 155 aa, Unknown
  Bacterial polypetide isolated from the Sargasso Sea
AFGARVNGFRGDMDQLVEESLTKAAVWDECKDKLNESGYSLSGGQQQRLCIARTIAIEPDVILMDEPCSALDPLSTLKIEETIHELKKNFTIIIVTHNMQQANRVSDFTAFFNTEKKGKDLGGKVGFLVEFSKTKSMFNSPKQKSTQDYISGKFG

SEQ ID NO: 175166 - protein, 243 aa, Unknown
  Bacterial polypetide isolated from the Sargasso Sea
LVVSYAKVQALKGVSLNIYPNEVTALIGPSGCGKSTFIRSLNRMNDTISVCNIEGQVFLDGENIYDPARDVVQLRTQVGMVFQKPNPFPKSIFENVAYGPKIHGLAADDEELRGIVLGSLERAGLLDEVKDRLNVPGTSLSGGQQQRLCIARAIAVRPDIILMDEPCSALDPIATKRIEELITELKAEYTIVIVTHSMQQARRLSDKIAYFHLGSIVEHGETAEVFENPIDERTADYVLGRIG

SEQ ID NO: 175167 - protein, 154 aa, Unknown
  Bacterial polypetide isolated from the Sargasso Sea
MSKIKAENVNVYYGSKQALFDVSIDIAEKEVTALIGPSGCGKSTFLRCLNRMNDVIEICRVEGSIKMDNLELNSRKLDVVRLRENVGMVFQKPNPFPKTIYENVAYGPTIHGIAQSKEEMDQIVETSLKKAALWNEVKDRLDEIGTGLSGGQQQ

SEQ ID NO: 175168 - protein, 233 aa, Unknown
  Bacterial polypetide isolated from the Sargasso Sea
MRALTGIKLDGVSFAFGTHTVLNQIDLHIDAGSIVALLGPSGCGKSTLLRLLAGLSVPAAGEIRFGDRLVAKPGWGMAPEQRDIGMVFQDYALWPHMTAAQNIAFPLRMRGVARAARQQRVNDALAMVGLNGFADRKPSGLSGGQQQRVALARAIVAEPRVLLFDEPLSNLDSELRESLCVEMSRLLRQLGITAVYVTHDRREAELLADRIVHLSAGTVAAVRTITSSSGELA

SEQ ID NO: 175169 - protein, 218 aa, Unknown
  Bacterial polypetide isolated from the Sargasso Sea
INWSSGCGKSTFLRCLNRMNDVIDICSVKGEILINDFNINDKSCDVVRLREKIGMVFQKPNPFPKTLYENVSYGPTIHGIAQSKQEMDEIVETSLKKAALWEEVKDRLHEPGTGLSGGQQQRLCIARAISVRPEVILMDEPCSALDPIATAQIEELIDELKKEHTIIIVTHSMAQAARVSQNTGFFHLGQLIEHGSTDKIFKNPDNKKTQDYITGRFG

SEQ ID NO: 175170 - protein, 175 aa, Unknown
  Bacterial polypetide isolated from the Sargasso Sea
IIGCLDRPSKGIYKLNGIPVENLSDDELAEIRNQKLGFVFQQFHLLSDATALENVTLPMIYAGIEPEQRLERGKNALKKVGLSERMNNRPNQLSGGQQQRVAIARAIINNPAILLADEPTGALDSKTTEDVLDLFDKLHESGITIVLVTHEDEVANRAKKIAKFKDGRIVELKVN

SEQ ID NO: 175171 - protein, 179 aa, Unknown
  Bacterial polypetide isolated from the Sargasso Sea
MSKNPEFVKFDKVDKSYDGKVLVVKDLQLDIAEGEFITMLGPSGSGKTTCLMMLAGFETPTHGEILLDGNIISNIPPHKRGIGMVFQNYALFPHMTVYENLAFPLRVRKVEKDEIDKKVDKALSMVSLSGFETRMPAQLSGGQQQRVAVARALVFDPAVVLMDEPLGALDKNLRESMQY

SEQ ID NO: 175172 - protein, 175 aa, Unknown
  Bacterial polypetide isolated from the Sargasso Sea
KNRNVFQQPNPFPKSIYENIAFGARINGFTGDMDELVESSLRKAAVWSECKDKLNDSGYSLSGGQQQRLCIARTIAIEPEIILMDEPCSALDPISTLKIEETMHELKKNYTIIIVTHNMQQALRVSDMTAFFNAIEYEDGDGGKVGYLAEFDSTKKIFNSPKEKTTQEYISGKFG

SEQ ID NO: 175173 - protein, 235 aa, Unknown
  Bacterial polypetide isolated from the Sargasso Sea
MVENNNTKISAKDVDVFYSEKQALNKISMDIKEKEVTALIGPSGCGKSTFLRCINRMNDLIEICKVTGSIKVDNEEIISSSTDVVSLRSKIGMVFQKPNPFPKSIFDNVAYGPSIHGLADTKSDLENIVITSLKKAGLYNEVKDRLNEPGTSLSGGQQQRLCIARAIAVNPEIILMDEPCSALDPIATAIIEELIDELRLNYTIIIVTHSMQTAARVSQKTCFFHLGELIESGET

SEQ ID NO: 175174 - protein, 78 aa, Unknown
  Bacterial polypetide isolated from the Sargasso Sea
MNATATASKNALELRNLSFFYGKFQGLRNVSLDIAEHKVTAFIGPSGCGKSTLLRTLNRMYSLYPGQRAEGSISFYGP

SEQ ID NO: 175175 - protein, 160 aa, Unknown
  Bacterial polypetide isolated from the Sargasso Sea
MASNKEYKVLIENLGVSYSGKTAIKDINMKIPDKAVTALIGPSGCGKTTLLRTINRMHDLTKGAEVTGKIIIDGENVYDSYINPILQRRKIGMVFQKPNPFPTMSIWDNVAAGLKLNGVKDKGILNEIIEDSLKMAYLWDEVKDELKKPGSCMSGGQQQR

SEQ ID NO: 175176 - protein, 227 aa, Unknown
  Bacterial polypetide isolated from the Sargasso Sea
MDNIKEDFKNLDLTVGDVFSKDARLKARNVNVFYGSNKAIDNVTIDIGNKEVISLIGPSGCGKSTFLRCFNRMNDTIDSCRIEGKITLDDENIYNEKIDVVPLRARIGMVFQKPNPFPKSIYDNVAYGPRIHGLSENKEHLDNIVEESLKRAGLWEEVNDRLLSPGTGLSGGQQQRLCIARAIAVSPEVILMDEPCSALDPIATAKIEELIHELGNEYSIVIVTHSM

SEQ ID NO: 175177 - protein, 138 aa, Unknown
  Bacterial polypetide isolated from the Sargasso Sea
FVFHKFHLLSDATALENVILPMIYAGIDLEQRIERGKNALKKVGLSERINNRPNQLSGGQQQRVAIARAIINNPSILLADEPTGALDSKTTKDVLDLFDKLHESGITIVLVTHEDEVANRAKKIAKFKDGRIVELKVN

SEQ ID NO: 175178 - protein, 67 aa, Unknown
  Bacterial polypetide isolated from the Sargasso Sea
MNNIKVSTKNVNVHYGTKQALHRVTLDINEKEVTALIGPSGCGKSTFLRCINRMNDLIDICKVDGSI

SEQ ID NO: 175179 - protein, 199 aa, Unknown
  Bacterial polypetide isolated from the Sargasso Sea
RVEGQVRYHGVDLYQSEVDAVEVRRRIGMVFQKPNPFPKSIYDNIAFGPRIAGAKKSELDDIVERSLQRAALWDEVRDRLSDPAYGLSGGQQQRLCIARAIAVEPDVVLMDEPCSALDPIATARIEELIAELKTDYTIVIVTHNMQQAARISDRTAFFSVQVTDAGRRTGELVELGATEHIFTNPDDPRTEAYITGRVG

SEQ ID NO: 175180 - protein, 87 aa, Unknown
  Bacterial polypetide isolated from the Sargasso Sea
APEVLLMDEPCSALDPIATAQIEELIDELRQDFAVVIVTHSMQQAARVSQKTAFFHLGVIAEHGDTNQIFTNPVDKRTQDYITGRFG

SEQ ID NO: 175181 - protein, 150 aa, Unknown
  Bacterial polypetide isolated from the Sargasso Sea
MSDPIIKIQNMNKWFGDFQVLKNINLEVEANKKIVVCGPSGSGKSTLIRCINRLEEHQDGDIIVDGNELSEKTKDIEKIRAEVGMVFQQFNLFPHLSILDNCTLAPIWVKKMPKKEAQELALDQLKKVQIDDQANKFPGQLSGGQQQRLR

SEQ ID NO: 175182 - protein, 210 aa, Unknown
  Bacterial polypetide isolated from the Sargasso Sea
MSIIENHETVGSPLSEGAKLRARDVCVFYGEKQAIYNVSLDIRQNEVIALIGPSGCGKSTFLRCLNRMNDTIDICNVTGEILLDGDNIYDPRVDVVPLRATVGMVFQKPNPFPKSIYDNIAYGPRIHGLASSRVELDEIVEKSLQRAGLWNEVKDRLHAPGTGLSGGQQQRLCIARTIAVDPEVILMDEPCSALDPIATAKIEELIDELR

SEQ ID NO: 175183 - protein, 244 aa, Unknown
  Bacterial polypetide isolated from the Sargasso Sea
THSTYGFGDKHVLKDITMRIPKNKVTALIGQSGCGKSTLINCFNRLNDLYDGCQYKGEVIIDGKNINSKKTNVSRLRAKVGMVFQRPNPFPMSIYENVCYGLKLQGVRERRNLDDAVESALKQAALWDEVKDRLFEPAMTLSGGQQQRLVIARALSLKPEVLLLDEPTSALDPLTTLFIEELMESLKKQCTIVIVTHNMQQAARVSDYTAFFHQGKLVEYADSDTLFTMPEKKQTEDYITGRYG

SEQ ID NO: 175184 - protein, 99 aa, Unknown
  Bacterial polypetide isolated from the Sargasso Sea
QQRLCIARAISVSPEVILMDEPCSALDPIATAQIEELIDDLKKEVTIVIVTHSMSQAARVSQKTGFFHLGKLIEFGPTDKIFKNPDNQQTQDYITGRFG

SEQ ID NO: 175185 - protein, 98 aa, Unknown
  Bacterial polypetide isolated from the Sargasso Sea
ARALAVNPEVLLMDEPASALDPIGTLAIEELIRELAGSVTIVIVTHNMQQAARVSDETAFLMVNDNRAGYLVEHDYTDKIFTNPSEERTEAYITGRFS

SEQ ID NO: 175186 - protein, 278 aa, Unknown
  Bacterial polypetide isolated from the Sargasso Sea
LLGPSGCGKSTTLRCIAGLEKADGGEIAIDDMIVVSSDGNGYVPAHQRPIGMVFQSYAIWPHMNVFDNVAFPISRGKGKLPKSQVRERVLEALSLVRLDGLENRPAPQLSGGQQQRLALARALVRQPKALLLDEPLSNLDAKLRDEMRVELKTLTERLNITTIFVTHDQLEALTLSDQIAVMRDGEIVQLGSPKEIYSTPVSRFTAEFIGTTNLLEGTLVSSSRGVAKVSTPQGEILCTAVDSLNVNDKVSLAIRPANIIVKATKNAKDNAIQGKIET

SEQ ID NO: 175187 - protein, 97 aa, Unknown
  Bacterial polypetide isolated from the Sargasso Sea
TSRAENRMTNLPNQLSGGQQQRVAIARAIINQPSLLLADEPTGALDSKTTEDVLNLFDQLHSQGITIVLVTHEDNVAQRAKKIARFRDGKVIEITDN

SEQ ID NO: 175188 - protein, 242 aa, Unknown
  Bacterial polypetide isolated from the Sargasso Sea
MSKIIAENVNVYYGSKQALFDVSIDIAEKEVTALIGPSGCGKSTFLRCLNRMNDVIDICRVEGSIKMDDLELNSRKLDVVRLRENVGMVFQKPNPFPKTIYENVAYGPTIHGIAQSKEEMDQIVETSLKKAALWNEVKDRLDEIGTGLSGGQQQRLCIARAISVSPEVILMDEPCSALDPIATAQIEELIDDLKKEVTIVIVTHSMSQAARVSQKTGFFHLGKLIEFGSTEKIFKNPDKQQT

SEQ ID NO: 175189 - protein, 187 aa, Unknown
  Bacterial polypetide isolated from the Sargasso Sea
MTVAIRATDLVKSYTPGVRALDRVSLEVNNGEVLVVMGPSGSGKSTLIRTFNGLEMLDGGSLDVLGVRLDSAHAEPQVRAIRRRVGMVFQQFNLFPHLSILENIALAPVKVQKRPKEEVERRALELLEQMGIQEQAQKYPAQLSGGQQQRVAIARALALDPEVMLFDEPTSALDPERVKEVLDAMRQ

SEQ ID NO: 175190 - protein, 158 aa, Unknown
  Bacterial polypetide isolated from the Sargasso Sea
MNEIKIKSKNLNVYYGEKQALFDVNLDLNEKEVTALIGPSGCGKSTFIRCINRMNDVIDICKVSGNIEIDGVEINDKNLDVVSLRERVGMVFQKPNPFPKSIYDNISYGPKIHGKGETKSELDEIVENSLKKAALWEEVKDRLDEPGTGLSGGHNNVF

SEQ ID NO: 175191 - protein, 135 aa, Unknown
  Bacterial polypetide isolated from the Sargasso Sea
MNNVKVSTKNVNVHYGTKQALHRVTLDINEKEVTALIGPSGCGKSTFLRCINRMNDLIDICKVDGSITVDNEEIISDEVDVVSLRSKIGMVFQKPNPFPKSIFDNVAYGPTIHGIVDTKTDLEEIVHSSLKRAGL

SEQ ID NO: 175192 - protein, 229 aa, Unknown
  Bacterial polypetide isolated from the Sargasso Sea
MVQKSVGPIELESQDVSVWFGQRKVLEGVNIAFPKNTVTALIGPSGCGKSTYIRTLNRLHELIPGAALAGSVLYEGKDIYDTDIDPVHIRLQIGMVFQKPNPFPSMTIRGNVLSGLKLSGLKRDYLDDIVEETLTSAGLWNEVKDRLDSAAGELSGGQQQRLVIARALAVQPHVLLMDEPCSALDPTSTLKIEETIRELSKDITIVIVTHNMQQAVRVSDYTAFFLAAE

SEQ ID NO: 175193 - protein, 104 aa, Unknown
  Bacterial polypetide isolated from the Sargasso Sea
LSGGQQQRLCIARAISVRPEVILMDEPCSALDPIATAQIEELIDELKKEHTIIIVTHSMAQAARVSQNTGFFHLGQLIEHGSTDKIFKNPDNKKTQDYITGRFG

SEQ ID NO: 175194 - protein, 207 aa, Unknown
  Bacterial polypetide isolated from the Sargasso Sea
MNSKKNDLKSLELTVGDVFSKNARLKARNVNVFYGENKAIDNVTIDIGNKEVISFIGPSGCGKSTFLRCFNRMNDTIDSCVIQGEITIDEENIYDKKIDVVPLRARIGMVFQKPNPFPKSIYDNVAYGPRIHGLSENKEHLDNIVEESLKRAGLWQEVSDRLSSPGTGLSGGQQQRLCIARAIAVSPEVILMDEPCSALDPIATAKI

SEQ ID NO: 175195 - protein, 104 aa, Unknown
  Bacterial polypetide isolated from the Sargasso Sea
MSGGQQQRLCIARAIAVSPEVILMDEPCSALDPIATAKVEELIAEMSESYTIVIVTHSMQQAARVSNRTAYFHLGHLVEVNETDKVFTSPDHELTESYITGRFG

SEQ ID NO: 175196 - protein, 95 aa, Unknown
  Bacterial polypetide isolated from the Sargasso Sea
MIKIKAKDVDVFYGKKQALFNISLDIEENQVTALIGPSGCGKSTFLRCLNRMNDVIDICSVKGEILINDFNINDKSCDVVRLRKKIGMVFQKPNP

SEQ ID NO: 175197 - protein, 218 aa, Unknown
  Bacterial polypetide isolated from the Sargasso Sea
LIGPSGCGKSTFLRCLNRMNDVIDICSVKGEILINDFNINDKSCDVVRLREKIGMVFQKPNPFPKTLYENVSYGPTIHGMAQSKQEMDEIVETSLKKAALWEEVKDRLHEPGTGLSGGQQQRLCIARAISVRPEVILMDEPCSALDPIATAQIEELIDELKKEHTIIIVTHSMAQAARVSQNTGFFHLGQLIEHGSTDKIFKNPDNKKTQDYITGRFG

SEQ ID NO: 175198 - protein, 239 aa, Unknown
  Bacterial polypetide isolated from the Sargasso Sea
MIKIKAKDVDVFYGKKQALFNISLDIEENQVTALIGPSGCGKSTFLRCLNRMNDVIDICSVKGEILINDFNINDKSCDVVRLREKIGMVFQKPNPFPKTLYENVSYGPTIHGMAQSKQEMDEIVETSLKKAALWEEVKDRLHEPGTGLSGGQQQRLCIARAISVRPEVILMDEPCSALDPIATAQIEELIDELKKEHTIIIVTHSMAQAARVSQNTGFFHLGQLIEHGSTDKIFKNPDN

SEQ ID NO: 175199 - protein, 215 aa, Unknown
  Bacterial polypetide isolated from the Sargasso Sea
MKNKFETENVVVHYGTKIAIDNISLNIEANNITSLIGPSGCGKSTFLRCLNRMNDTIDGCAVSGKLLLDNEDIYGENIDPVDIRAKVGMVFQKPNPFPKSIFENIAYGPKIHGLAKSKADLNDIVLQSLERAGLIDEVHDRLHDSATGLSGGQQQRICIARAIAVNPEVILMDEPCSALDPIATAVIEELLDQLSKDFTIVIVTHSMAQAARVQR

SEQ ID NO: 175200 - protein, 236 aa, Unknown
  Bacterial polypetide isolated from the Sargasso Sea
MSEEEMIIETKGVKVNFGDFWALKGIDISIRKGEIVVILGPSGSGKSTYIRTLNRLQPHSGGTVVIDGITIDDETTVADMKYVRAEVGFVFQQFNLFPHLTIMENITLAPMKVKGMPKRQAEDKAMELLEKVGIPEQAYKYPSGLSGGQQQRVAIARALAMDPKIMLFDEPTSALDPEMIKEVLDVMIDLAKEDVTMIVVTHEMGFAKEVADRCILFDEGEGVEQNTPEEFFTNPK

SEQ ID NO: 175201 - protein, 144 aa, Unknown
  Bacterial polypetide isolated from the Sargasso Sea
MGVRTNCLNLWYGDFQALQDINFEATRGIITGLIGPSGCGKSTLLRCFNRMNERYGNVTTTGEILIHGQNIYDGEVSLVELRKAVGMVFQRPNPLPMSVRDNVLFGLDLHLEPEQLKKTDLEQVVEQALREVFLWEDLKDQLDA

SEQ ID NO: 175202 - protein, 262 aa, Unknown
  Bacterial polypetide isolated from the Sargasso Sea
MTIEQNHKGAISIRNVTKIYDPEGVNVMAVDDCSLEIAAGEVCMIVGPSGCGKTTLLNAIAGFHSVTEGEIYLDGELLCGPEKPLAEQGADRIVVFQHGALFPWKTLAENVAYGPIVQGVMAKKEALEKAEDMLAEAGIGDMGHKYPGEVSSGMARRAEIVRALINNPKVLLLDEPYRAMDALTKSIMHEALLEVYDRTKVTIFFITHDLEEAIFLGDRVVVMTTRPAKTKTILDVKIPRPRDYQVLSSEEFRVLMNEAKGA

SEQ ID NO: 175203 - protein, 112 aa, Unknown
  Bacterial polypetide isolated from the Sargasso Sea
MIKINSKNVDVFYGKKQALFNINLDIEENQVTALIGPSGCGKSTFLRCLNRMNDVIDICRVKGQIIINDFDINDKSCDVVRLREKIGMVFQKPNPFPKTIYENISYGPTIHG

SEQ ID NO: 175204 - protein, 163 aa, Unknown
  Bacterial polypetide isolated from the Sargasso Sea
MSKGIEIRNLNLSYGNSKALNDISLDIKEKQVTAFIGPSGCGKSTLLRCINRLNDLIDSVKMNGEIKIDGIDINSPGYDVTTLRRNVGMVFQKSNPFPMSIYENIAYGLKIGGEKNKGKIDHVVEESLKQAALWEEVKIDLMILLLDSPVDNNKDYVLLELLQ

SEQ ID NO: 175205 - protein, 207 aa, Unknown
  Bacterial polypetide isolated from the Sargasso Sea
FLRCLNRMNDVIDICKVQGEIVINDFNINDKGCDVVRLREKIGMVFQKPNPFPKTLYENISYGPTIHGMAQSKQEMDEIVETSLKKAALWEEVKDRLHEPGTGLSGGQQQRLCIARAISVQPEVILMDEPCSALDPIATAQIEELIDELKKEHTIIIVTHSMAQAARVSQNTGFFHLGELIEHGSTDKIFKNPENNKTQDYITGRFG

SEQ ID NO: 175206 - protein, 296 aa, Unknown
  Bacterial polypetide isolated from the Sargasso Sea
MSWWIMWEVSYLFENIGTIDEGRLTISQKPKVIDANNAKELSINGGEINFDKVKFNYGKPGGLFEELSLKISDGEKVGLVGKSGAGKSSILNLLLRFYDVDSGKILIDSQDISQVTQESLRSQIGVVTQETALLNRSIYENIAYGNPSASRNEIYEAAKKAEAYEFICDLEDKDGRKGFSAFVGERGVRLSGGQRQRVAIARVLLKNAPILILDEATSALDSEIEAAIQNQLNNILRDKTALVIAHRLSTINKLDRLIVMEHGKVVEMGTHKSLIKKGGHYSKLWSLQSGGFLPTL

SEQ ID NO: 175207 - protein, 233 aa, Unknown
  Bacterial polypetide isolated from the Sargasso Sea
MNVSTAQIAAPFVTQSPVVMDCKLDRIFYGNFMAVRDSHVPIEKNKITGFIGPSGCGKSTVLRSLNRMNDLVKGFRFEGHVHFLGQDVYGKGVDPVVVRRYIGMVFQQPNPFSMSIFDNVAFGLRLNRYKGDLGDRVKHALQGAALWDEVKDKLKVSGLSLSGGQQQRLCIARAIATEPEVLLLDEPCSALDPIATRRVEELMVELKKDYTIALVTHNMQQAIRVADTTAFFS

SEQ ID NO: 175208 - protein, 228 aa, Unknown
  Bacterial polypetide isolated from the Sargasso Sea
MSKKVASLENISKTYGKEDLTVKALDSINLEIYKGDYLAVMGASGSGKSTAMNIIGCLDRPSEGIYKLNGIPVENLSDDELAEIRNQKLGFVFQQFHLLSDATALENVTLPMIYAGIDPEQRFERGKNALKKVGLSERMNNRPNQLSGGQQQRVAIARAIINNPAILLADEPTGALDSKTTEDVLDLFDKLHESGITIVLVTHEDEVANRAKKIAKFKDGRIVELKVN

SEQ ID NO: 175209 - protein, 232 aa, Unknown
  Bacterial polypetide isolated from the Sargasso Sea
FDVSMDMYEKEVTALIGPSGCGKSTFLRCINRMNDVIDICSVKGNVSIDGHDIYDKSIRVESLRESVGMVFQKPNPFPKSIYENIAYGPRIHGIANSKTDLDEIVETSLQKAALFDEVKDRLHQPGTGLSGGQQQRLCIARAISVNPEIILMDEPCSALDPIATAKIEDLMSELKEEFTIIIVTHSMQQAARVSKNTGFFHLGKLIEVDSTDTIFSNPGNQKTQDYITGRFG

SEQ ID NO: 175210 - protein, 197 aa, Unknown
  Bacterial polypetide isolated from the Sargasso Sea
MTIETETEDTDNVNIFEVSDVNVYYGDFRAIRDVSIDIEANEITAFIGPSGCGKTTMLRSFNRMNDLIPTARVTGELKYRGVSLYDKRVDPVEVRRRIGMVFQKPNPFPKSVYDNVAYGPRIAGNVSKGAEMDDLVESSLRKAALWDEVKDRLKSSALGMSGGQQQRLCIARAIATNPDVVLMDEPCSALDPTATGR

SEQ ID NO: 175211 - protein, 241 aa, Unknown
  Bacterial polypetide isolated from the Sargasso Sea
VKNVFLNFKAGDITSLIGPSGCGKSTVLRALNRMNDLIPNCSLKGTVLFDGTNIYDKRVDPVEVRRRIGMVFQQPNPFPKSIYENIAFGARINGFTGDMDELVESSLRKAAVWSECKDKLNDSGYSLSGGQQQRLCIARTIAIEPEIILMDEPCSALDPISTLKIEETMHELKKNYTIIIVTHNMQQALRVSDMTAFFNAIEYEDGDGGKVGYLAEFNSTKKIFNSPKEKTTQEYISGKFG

SEQ ID NO: 175212 - protein, 251 aa, Unknown
  Bacterial polypetide isolated from the Sargasso Sea
MIKIKAKDVDVFYGKKQALFNISLDIEENQVTALIGPSGCGKSTFLRCLNRMNDVIDICSVKGEILINDFNINDKSCDVVRLREKIGMVFQKPNPFPKTLYENVSYGPTIHGIAQSKQEMDEIVETSLKKAALWEEVKDRLHEPGTGLSGGQQQRLCIARAISVRPEVILMDEPCSALDPIATAQIEELIDELKKEHTIIIVTHSMAQAARVSQNTGFFHLGQLIEHGSTDKIFKNPDNKKTQDYITGRFG

SEQ ID NO: 175213 - protein, 96 aa, Unknown
  Bacterial polypetide isolated from the Sargasso Sea
LCIARAISVSPEVILMDEPCSALDPIATAQIEELIDDLKKEVTIVIVTHSMSQAARVSQKTGFFHLGKLIEFGPTDKIFKNPDNQQTQDYITGRFG

SEQ ID NO: 175214 - protein, 220 aa, Unknown
  Bacterial polypetide isolated from the Sargasso Sea
MKNKFETENVNVHYGTKIAIDNISLNIEANNITSLIGPSGCGKSTFLRCLNRMNDTIDGCAVSGKLLLDNEDIYGENIDPVDIRAKVGMVFQKPNPFPKSIFENIAYGPKIHGLAKSKAELYDIVLQSLERAGLIDEVRDRLHDSATGLSGGQQQRICIARAIAVNPDVILMDEPCSALDPIATAVIEELLDQLSKDFTIVIVTHSMAQAARVSSKTAFF

SEQ ID NO: 175215 - protein, 138 aa, Unknown
  Bacterial polypetide isolated from the Sargasso Sea
MITDEYILSSDNLNVYYGNFQALANVSIKIKPNIVTALIGPSGCGKSTFLRCFNRMNDLIPIFSLDGSIKYKSQELYDDTTDATNIRSQIGMVFQKPNPFPKSIYNNVAFGLKINGYTGNYDEAIENSLRRDSVVGRS

SEQ ID NO: 175216 - protein, 118 aa, Unknown
  Bacterial polypetide isolated from the Sargasso Sea
MIEVKDNFGFNYGSTQVLFDLNLRIPNRKVTALIGPSGCGKSTLLRCFNRMNDLIDGISHTGDITIGGQSIFDPALEIISLRKKVGMVFQKYNPFPKTIYENVVFSLSVSGRNNKALL

SEQ ID NO: 175217 - protein, 95 aa, Unknown
  Bacterial polypetide isolated from the Sargasso Sea
CIARAIAVQPEVILLDEPCSALDPIATARIEELIDKLRRNFTIVIVTHSMQQAARVSQRTAFFHLGDLVEFGDTEQIFTAPSDERTQSYITGRIG

SEQ ID NO: 175218 - protein, 184 aa, Unknown
  Bacterial polypetide isolated from the Sargasso Sea
RVDPVEVRRRIGMVFQQPNPFPKSIYENIAFGARINGFTGDMDQLVESSLRKAAVWSECKDKLNDSGYSLSGGQQQRLCIARTIAIEPEIILMDEPCSALDPISTLKIEETMHELKKNYTIIIVTHNMQQALRVSDMTAFFNAVEYEDGDGGKVGYLAEFDSTKKIFNSPKEKTTQEYISGKFG

SEQ ID NO: 175219 - protein, 285 aa, Unknown
  Bacterial polypetide isolated from the Sargasso Sea
FITMLGPSGSGKTTCLMMLAGFETPTHGEILLDGNIISNIPPHKRGIGMVFQNYALFPHMTVYENLAFPLRVRKVEKDEIDKKVDKALSMVSLNGFETRMPAQLSGGQQQRVAVARALVFDPAVVLMDEPLGALDKNLRESMQYEIKHIHESIGVTVVYVTHDQSEALTMSNRIAVFNDGKVQQLSNPAELYEKPVNSFVAEFIGENNTFNGEVIDIDKDKCKVKLANSEILANPISVKSKGEKTTVSLRPERALINPTDKMDNMFTGKIEEVIYHGDHTRVRLN

SEQ ID NO: 175220 - protein, 219 aa, Unknown
  Bacterial polypetide isolated from the Sargasso Sea
ALIGPSGCGKSTFLRCLNRMNDVIDICSVKGEILINDFNINDKSCDVVRLREKIGMVFQKPNPFPKTLYENVSYGPTIHGMAQSKQEMDEIVETSLKKAALWEEVKDRLHEPGTGLSGGQQQRLCIARAISVRPEVILMDEPCSALDPIATAQIEELIDELKKEHTIIIVTHSMAQAARVSQNTGFFHLGQLIEHGSTDKIFKNPDNTKTQDYITGRFG

SEQ ID NO: 175221 - protein, 244 aa, Unknown
  Bacterial polypetide isolated from the Sargasso Sea
MANATPGKLSVRNLNFYYGKFHALKNINLDITKNQVTAFIGPSGCGKSTLLRTFNKMFELYPEQRAEGEILLDGDNILTNTQDIALLRAKVGMVFQKPTPFPMSIYDNIAFGVRLFEKLSRADMDERVQWALTKAALWNETKDKLHQSGYSLSGGQQQRLCIARGIAIRPEVLLLDEPCSALDPISTGRIEELITELKQDYTVVIVTHNMQQAARCSDHTAFMYLGELIEFSNTDDLFTKPAKK

SEQ ID NO: 175222 - protein, 154 aa, Unknown
  Bacterial polypetide isolated from the Sargasso Sea
KSIYDNISYGPKIHGKGETKSELDQIVENSLKKSALWEEVKDRLDEPGTSLSGGQQQRLCIARAISVNPEVILMDEPCSALDPIATAKIEELIDELKKTYTIVIVTHSMAQAVRVSQKTGFFHLGKLIEVGKTEKIFKNPDNKMTQDYITGRFG

SEQ ID NO: 175223 - protein, 305 aa, Unknown
  Bacterial polypetide isolated from the Sargasso Sea
FLVVKDLQLDIAEGEFITMLGPSGSGKTTCLMMLAGFETPTNGEILLDGNIISNIPPHKRGIGMVFQNYALFPHMTVYENLAFPLRVRKMEKDEIDKKVDKALSMVSLNGFETRMPGQLSGGQQQRVAVARALVFDPAVVLMDEPLGALDKNLRESMQYEIKHIHESIGVTVVYVTHDQSEALTMSNRIAVFNDGKVQQLSNPSELYEKPVNSFVAEFIGENNTFNGEVSDISGDECKVKLSNGEIIASAISVKSKGEKTTVSLRPERALIEPSEKMDNMFSGKIEEVIYHGDHTRVRINLLGNP

SEQ ID NO: 175224 - protein, 262 aa, Unknown
  Bacterial polypetide isolated from the Sargasso Sea
MSNNPEFVKFDKVDKSYDGKVLVVKDLQLDIAEGEFITMLGPSGSGKTTCLMMLAGFETPTNGEILLDGNIISNIPPHKRGIGMVFQNYALFPHMTVYENLAFPLRVRKMEKDEIDKKVDKALSMVSLNGFETRMPGQLSGGQQQRVAVARALVFDPAVVLMDEPLGALDKNLRESMQYEIKHIHESIGVTVVYVTHDQSEALTMSNRIAVFNDGKVQQLSNPSELYEKPVNSFVAEFIGENNTFNGEVSDISGDECKVKLS

SEQ ID NO: 175225 - protein, 216 aa, Unknown
  Bacterial polypetide isolated from the Sargasso Sea
GPSGCGKSTFLRCLNRMNDLIDICTVSGKIIMGGEDINQRNLDVVRLREKVGMVFQKPNPFPKTLYENIAYGPTIHGIASSKQEMDAIVENSLKKAALWDEVKDRLNEIGTGLSGGQQQRLCIARAISINPDVILMDEPCSALDPIATAKIEELIDELRENFTIVIVTHSMQQAARVSQKTAFFHLGNLVEEGETDQIFKNPQHEKTQDYVMGRIG

SEQ ID NO: 175226 - protein, 87 aa, Unknown
  Bacterial polypetide isolated from the Sargasso Sea
MRSQDHAEARDLGQEKAAKVFEINGLHAYYGDFCALRDVQLDVHQSEVTAFIGPSGCGKSTFLRCFNRMNDLIEGARVDGEMRYHGL

SEQ ID NO: 175227 - protein, 234 aa, Unknown
  Bacterial polypetide isolated from the Sargasso Sea
MYYGQKQALFDVKMDIPKQRVTAFIGPSGCGKSTLLRTFNRMNDLVDGCRVEGEINIDGRNIYRKGEDVAELRRRVGMVFQKPNPFPKSIYENVVYGLRIQGINSKRVLDEAVEWALKSAALWDEVKDRLHDSALGLSGGQQQRLVIARTVAVQPEVLLLDEPCSALDPISTLKVEELIYELKSKYTIVIVTHNMQQAARVSDYTAFMYMGKLIEFGDTDTLFTNPAKKQTEDY

SEQ ID NO: 175228 - protein, 132 aa, Unknown
  Bacterial polypetide isolated from the Sargasso Sea
MKSIKIKADNLNVYYGEKQALFDVSMYMEEKQVTALIGPSGCGKSTFIRCLNRMNDVIDICKVQGKIEIDGNDIYAPDMQVEQLRERVGMVFQKPNPFPKSIFENVAYGPRIHGIAEHKSDLEEIVVTSLKK

SEQ ID NO: 175229 - protein, 219 aa, Unknown
  Bacterial polypetide isolated from the Sargasso Sea
MAKTNSKNKSKIIAKNLDVFYGDAQAIYGVDIDILENQVTSFIGPSGCGKSTFLRCLNRMNDTIDSCSIKGQVLLDGSDIYDPKVDVVMLRAKVGMVFQKPNPFPRSIYENVAYGPRIHGTFDSKDELDFIVEKSLRRAGLWDEVKDRLSEPGNGLSGGQQQRLCIARAIAIRPEVILMDEPCSALDPIATAKIEELIDELKEKFTIVIVTHSMQQAAR

SEQ ID NO: 175230 - protein, 185 aa, Unknown
  Bacterial polypetide isolated from the Sargasso Sea
IDGVEINDKNLDVVSLRERVGMVFQKPNPFPKSIYDNISYGPKIHGKGETKSELDEIVENSLKKAALWEEVKDRLDEPGTGLSGGQQQRLCIARAISVNPEVILMDEPCSALDPIATAKIEELIDELKKTYTIVIVTHSMAQAVRVSQKTGFFHLGKLIEVGKTEKIFKNPDNKMTQDYITGRFG

SEQ ID NO: 175231 - protein, 229 aa, Unknown
  Bacterial polypetide isolated from the Sargasso Sea
SLDIEENQVTALIGPSGCGKSTFLRCLNRMNDVIDICSVKGEILINDFNINDKGCDVVRLREKIGMVFQKPNPFPKTLYENVSYGPTIHGIAQSKQEMDEIVETSLKKAALWEEVKDRLHEPGTGLSGGQQQRLCIARAISVRPEVILMDEPCSALDPIATAQIEELIDELKKEHTIIIVTHSMAQAARVSQNTGFFHLGQLIEHGSTDKIFKNPDNKKTQDYITGRFG

SEQ ID NO: 175232 - protein, 228 aa, Unknown
  Bacterial polypetide isolated from the Sargasso Sea
MSKKVASLENISKTYGKEDLTVKALDSINLEIYKGDYLAVMGASGSGKSTAMNIIGCLDRPSDGIYKLNGIPVENLSDDELAEIRNQKLGFVFQQFHLLSDATALENVTLPMIYAGIDPGQRLERGKSALKKVGLSERMNNRPNQLSGGQQQRVAIARAIINNPAILLADEPTGALDSKTTEDVLDLFDKLHESGITIVLVTHEDEVANRAKKIAKFKDGRIVELKVN

SEQ ID NO: 175233 - protein, 219 aa, Unknown
  Bacterial polypetide isolated from the Sargasso Sea
MSDDLKKEDVIKISTNDVCVSYGNVRAINNISLDIMRNKVTAFIGPSGCGKSTFLRTINRMNDFIDICKVSGKILLDGQDLYAPEVDVVQLRAIVGMVFQKPNPFPKSIFENVLYGPKIHGLVNSKSESDEIVENSLKRAGLWQEVKDRLKEPGTGLSGGQQQRLCIARAIAVSPEVILMDEPCSALDPIATAKIEELIDELRENYTIVIVTHSMQQAA

SEQ ID NO: 175234 - protein, 194 aa, Unknown
  Bacterial polypetide isolated from the Sargasso Sea
MNEIKIKSKNLNVFYGEKQALFDVNLDLNEKEVTALIGPSGCGKSTFIRCINRMNDVIDICKVSGSIEMDGIDINDKNLDVVSLRERVGMVFQKPNPFPKSIYDNVSYGPNIHGKGETKSELDEIVENSLKKAALWEEVKDRLDEPGTSLSGGQQQRLCIARAISVNPEVILMDEPCSALDPIATAKIEELIDE

SEQ ID NO: 175235 - protein, 217 aa, Unknown
  Bacterial polypetide isolated from the Sargasso Sea
MIKISAKNVDVFYGKKQALFNINLDIEENQVTALIGPSGCGKSTFLRCLNRMNDVIDICKVQGEIVINDFNINDKGCDVVRLREKIGMVFQKPNPFPKTLYENISYGPTIHGMAQSKQEMDEIVETSLKKAALWEEVKDRLHEPGTGLSGGQQQRLCIARAISVQPEVILMDEPCSALDPIATAQIEELIDELKKEHTIIIVTHSMAQAARVSQRTG

SEQ ID NO: 175236 - protein, 96 aa, Unknown; identical to SEQ ID NO: 175213
  Bacterial polypetide isolated from the Sargasso Sea

SEQ ID NO: 175237 - protein, 173 aa, Unknown
  Bacterial polypetide isolated from the Sargasso Sea
PVLLRAKIGMVFQKPNPFPKSIFDNVAYGPKIHGIVNSNDELEELVIYSLKKAGLYGEVKDRLNDTGTSLSGGQQQRLCIARAIAISPQIILMDEPCSALDPIATAIIEELIDELAKNFTIVIVTHSMQQAARVSQQTAFFHMGSLIEVGRTDQIFSTPSQKKTQDYITGKIG

SEQ ID NO: 175238 - protein, 170 aa, Unknown
  Bacterial polypetide isolated from the Sargasso Sea
LRARVGMVFQKPNPFPKSIYDNVAYGPRIHGLANRKSDLDEIVENSLRKAGLWEEVKDRLDANATGMSGGQQQRLCIARAIAVSPEVVLMDEPCSALDPIATAKVEELIAELSESYTIVIVTHSMQQAARVSHRTAYFHLGHLVEVNETNKVFTSPEHELTESYITGRFG

SEQ ID NO: 175239 - protein, 166 aa, Unknown
  Bacterial polypetide isolated from the Sargasso Sea
MVWFFKNPIRFPKTLYENVSYGPTIHGMAQSKQEMDEIVENSLKKAALWEEVKDRLHEPGTGLSGGQQQRLCIARAISVRPEVILMDEPCSALDPIATAQIEELIDELKKEHTIIIVTHSMAQAARVSQNTGFFHLGQLIEHGSTDKIFKNPDNKKTQDYITGRFG

SEQ ID NO: 175240 - protein, 189 aa, Unknown
  Bacterial polypetide isolated from the Sargasso Sea
MYQQGKTETLVSAVLPDETVGNVFVDNPRITAREVNVFYGDKQAIDRVTLDIAEKQVISFIGPSGCGKSTFLRCLNRMNDTIDICRIEGEIALDGMNIYTPDVDVVPLRARVGMVFQKPNPFPKSIYDNVAYGPRIHGLAASSVELDEIVEISLERAGLWNEVKDRLQQPGTGLSGGQQQRLCIARTIA

SEQ ID NO: 175241 - protein, 231 aa, Unknown
  Bacterial polypetide isolated from the Sargasso Sea
MEKTKIESKKISVFYGEKKALSGISLDIPEKRVTSLIGPSGCGKSTFLRCLNRMNDTIEICRIEGKILVDGEDIYDRKLDPVLLRARIGMVFQKPNPFPKSIFDNVAYGPKIHGLTNSKDELSELVESSLKKAGLFNEVKDRLNEPGTSLSGGQQQRLCIARAIAVSPEVILMDEPCSALDPIATAVIEELIDEISKNFTIVIVTHSMQQAARVSNQTAFFHMGNLIEVGK

SEQ ID NO: 175242 - protein, 229 aa, Unknown; identical to SEQ ID NO: 175231
  Bacterial polypetide isolated from the Sargasso Sea

SEQ ID NO: 175243 - protein, 133 aa, Unknown
  Bacterial polypetide isolated from the Sargasso Sea
MNSKKNDLKSLELTVGDVFSKNARLKARNVNVFYGENKAIDNVTIDIGNKEVISFIGPSGCGKSTFLRCFNRMNDTIDSCVIQGEITIDEENIYDKKIDVVPLRARIGMVFQKPNPFPKSIYDNVAYGPRIHG

SEQ ID NO: 175244 - protein, 249 aa, Unknown
  Bacterial polypetide isolated from the Sargasso Sea
MIEQHFDASAGENDASSESEDENEDETTEEAEDDEEESNEETEDVAESEETQKSHDEDIPDSTRTLNIDDEAHMWIHDLDLHYGNAQAIYNVSIPFERNAVTALIGPSGCGKSTLLRCLNRMNDLISICKIDGKIELEDDNIMTRGADLVTIRRRVGMVFQKPNPFPKSIYDNVAYGVRLHYNPSRRELDRIVESALRRAALWDEVSDRLHELGTSLSGGQQQRLCIARTIAVEPEVILMDEPCSALDP

SEQ ID NO: 175245 - protein, 121 aa, Unknown
  Bacterial polypetide isolated from the Sargasso Sea
MIKIKAKDVDVFYGKKQALYNISLDIEENQVTALIGPSGCGKSTFLRCLNRMNDVIDICNVKGEILINDFNINDKSCDVVRLREKIGMVFQKPNPFPKTLYENVSYGPTIHGMAQSKQEMD

SEQ ID NO: 175246 - protein, 215 aa, Unknown
  Bacterial polypetide isolated from the Sargasso Sea
PSGCGKSTFLRCLNRMNDVIEICRVEGSIKMDNLELNSRKLDVVRLRENVGMVFQKPNPFPKTIYENVAYGPTIHGIAQSKEEMDQIVETSLKKAALWNEVKDRLDEIGTGLSGGQQQRLCIARAISVSPEVILMDEPCSALDPIATAQIEELIDDLKKEVTIVIVTHSMSQAARVSQKTGFFHLGKLIEFGPTDKIFKNPDNQQTQDYITGRFG

SEQ ID NO: 175247 - protein, 234 aa, Unknown
  Bacterial polypetide isolated from the Sargasso Sea
FKAGDITSLIGPSGCGKSTVLRALNRMNDLIPNCSLKGTVLFDGTNIYDKRVDPVEVRRRIGMVFQQPNPFPKSIYENIAFGARINGFTGDMDELVESSLRKAAVWSECKDKLNDSGYSLSGGQQQRLCIARTIAIEPEIILMDEPCSALDPISTLKIEETMHELKKNYTIIIVTHNMQQALRVSDMTAFFNAIEYEDGDGGKVGYLAEFDSTKTIFNSPKEKTTQEYISGKFG

SEQ ID NO: 175248 - protein, 182 aa, Unknown
  Bacterial polypetide isolated from the Sargasso Sea
MQRIAVPSAHQDLQTPAPVKLAARGLDFYYGQFHALKNINLEIPEKRVTALIGPSGCGKSTLLRIFNRIYALYPKLEARGEVLLDGENILSPKYPMNRLRSKVGMVFQKPVPFPMTIFENVAYGIRHHEKLSKADMADRVEHALRQGALWDEVKDKLGQSALGLSGGQQQRLCIARAVALKP

SEQ ID NO: 175249 - protein, 110 aa, Unknown
  Bacterial polypetide isolated from the Sargasso Sea
MIKIKAKDVDVFYGKKQALFNISLDIEENQVTALIGPSGCGKSTFLRCLNRMNDVIDICSVKGEILINDFNINDKSCDVVRLREKIGMVFQKPNPFPKTLYENVSYGPTI

SEQ ID NO: 175250 - protein, 132 aa, Unknown
  Bacterial polypetide isolated from the Sargasso Sea
MDEIVETSLKKAALWEEVKDRLHEPGTGLSGGQQQRLCIARAISVRPEVILMDEPCSALDPIATAQIEELIDELKKDHTIIIVTHSMAQAARVSQNTGFFHLGQLIEHGSTDKIFKNPDNKKTQDYITGRFG

SEQ ID NO: 175251 - protein, 202 aa, Unknown
  Bacterial polypetide isolated from the Sargasso Sea
MSKNPEFVKFDKVDKSYDGKVLVVKDLQLDIAEGEFITMLGPSGSGKTTCLMMLAGFETPTNGEILLDGNIISNIPPHKRGIGMVFQNYALFPHMTVYENLAFPLRVRKIEKDEIDKKVDKALSMVSLNGFETRMPGQLSGGQQQRVAVARALVFDPAVVLMDEPLGALDKNLRESMQYEIKHIHESIGVTVVYVTHDQRKP

SEQ ID NO: 175252 - protein, 226 aa, Unknown
  Bacterial polypetide isolated from the Sargasso Sea
MSKNPEFVKFDKVDKSYDGKVLVVKDLQLDIAEGEFITMLGPSGSGKTTCLMMLAGFETPTHGEILLDGNIISNIPPHKRGIGMVFQNYALFPHMTVYENLAFPLRVRKVEKEEIDKKVDKALSMVSLNGFETRMPAQLSGGQQQRVAVARALVFDPAVVLMDEPLGALDKNLRESMQYEIKHIHESIGVTVVYVTHDQSEALTMSNRIAVFNDGKVQQLSDPAEL

SEQ ID NO: 175253 - protein, 163 aa, Unknown
  Bacterial polypetide isolated from the Sargasso Sea
VFQKPNPFPKTIYENISYGPTIHGMAQSKNEMDEIVETSLKKAALWEEVKDRLHEPGTGLSGGQQQRLCIARAISVKPEVILMDEPCSALDPIATAQIEELIDELKKDHTIIIVTHSMAQAARVSQNTGFFHLGELIEHGSTDKIFKNPENKRTQDYITGRFG

SEQ ID NO: 175254 - protein, 140 aa, Unknown
  Bacterial polypetide isolated from the Sargasso Sea
MNEIKIKSKNLNVYYGEKQALFDVNLDLNEKEVTALIGPSGCGKSTFIRCINRMNDVIDICKVSGNIEIDGVEINDKNLDVVSLRERVGMVFQKPNPFPKSIYDNISYGPKIHGKGETKSELDEIVENSLKKAALWEEVK

SEQ ID NO: 175255 - protein, 256 aa, Unknown
  Bacterial polypetide isolated from the Sargasso Sea
MVENNNTKISAKDVDVFYSEKQALNKISMDIKEKEVTALIGPSGCGKSTFLRCINRMNDLIEICKVTGSIKVDNEEIISSSTDVVSLRSKIGMVFQKPNPFPKSIFDNVAYGPSIHGLADTKSDLENIVITSLKKAGLYNEVKDRLNEPGTSLSGGQQQRLCIARAIAVNPEIILMDEPCSALDPIATAIIEELIDELRLNYTIIIVTHSMQQAARVSQKTCFFHLGELIETGDTNKIFTNPDNTKTQDYITGRFG

SEQ ID NO: 175256 - protein, 195 aa, Unknown
  Bacterial polypetide isolated from the Sargasso Sea
DVDVFYGKKQALFNISLDIEENQVTALIGPSGCGKSTFLRCLNRMNDVIDICSVKGEILINDFNINDKSCDVVRLREKIGMVFQKPNPFPKTLYENVSYGPTIHGMAQSKQEMDEIVETSLKKAALWEEVKDRLHEPGTGLSGGQQQRLCIARAISVRPEVILMDEPCSALDPIATAQIEELIDELKKEHTIIIV

SEQ ID NO: 175257 - protein, 251 aa, Unknown; identical to SEQ ID NO: 175212
  Bacterial polypetide isolated from the Sargasso Sea

SEQ ID NO: 175258 - protein, 177 aa, Unknown
  Bacterial polypetide isolated from the Sargasso Sea
MVDTAPGKIQVRDLNFYYGKFHALKNINLDIAKNQVTAFIGPSGCGKSTLLRTFNKMFELYPEQRAEGEILLDGDNILTNTQDIALLRAKVGMVFQKPTPFPMSIYDNIAFGVRLFEKLSRADMDERVQWALTKAALWNETKDKLHQSGYSLSGGQQQRLCIARGIAIRPEVLLLDE

SEQ ID NO: 175259 - protein, 251 aa, Unknown
  Bacterial polypetide isolated from the Sargasso Sea
MSKIKAKDVNVFYGDKQALFNVSIDIEEKQTTALIGPSGCGKSTLLRCFNRMNDIIDGCHVEGQISMGNTVISDPALDIVKLRTKVGMVFQKPNPFPKSIYDNVAYGPRIHGLAKNKAELDQIVETSLQRAGIWGEIKDRLSSSGTGLSGGQQQRLCIARAIAVKPEVILMDEPCSALDPIATATIEELMNELSKDFTIIIVTHNMQQAARISKKTAFFHLGNIIEYNTTETIFTNPTEEKTQDYITGRFG

SEQ ID NO: 175260 - protein, 181 aa, Unknown
  Bacterial polypetide isolated from the Sargasso Sea
QSTAMNIIGCLDRPSEGIYKLNGIPVENLSDDELAEIRNQKLGFVFQQFHLLSDATALENVTLPMIYAGIEPEQRLERGKNALTKVGLSERMNNRPNQLSGGQQQRVAIARAIINNPAILLADEPTGALDSKTTEDVLDLFDKLHESGITIVLVTHEDEVANRAKKIAKFKDGRIVELKVN

SEQ ID NO: 175261 - protein, 95 aa, Unknown
  Bacterial polypetide isolated from the Sargasso Sea
PDVVLMDEPCSALDPIATARIEELIAELKTQYTIVIVTHNMQQAARISDRTAFFSVEVSDSGRRTGQLVEIDRTEQIFTNPEDPRTEAYITGRVG

SEQ ID NO: 175262 - protein, 165 aa, Unknown
  Bacterial polypetide isolated from the Sargasso Sea
NCSLKGTVLFDGTNIYDKRVDPVEVRRRIGMVFQQPNPFPKSIYENIAFGARINGFTGDMDELVESSLRKAAVWSECKDKLNDSGYSLSGGQQQRLCIARTIAIEPEIILMDEPCSALDPISTLKIEETMHELKKNYTIIIVTHNMQQALRVSDMTAFFNAVEYE

SEQ ID NO: 175263 - protein, 249 aa, Unknown
  Bacterial polypetide isolated from the Sargasso Sea
IVKCRDVSVYYGENKAINSVSIGIEKKSITAFIGPSGCGKSTFLRTINRMNDTIEHCKIEGSVIVDGQDIYDPSVDVVPLRAKVGMVFQKPNPFPKSIYENVAYGPRIHGLASSKSELDEIVEKALKGAGLWNEARDRLNESGTGLSGGQQQRLCIARTIAVEPQIILMDEPCSALDPIATSKIEDLMSELAKEYTIIIVTHSMQQAARVSQKTAYFHLGNLIEYGDTKEIFVRPKDTQTEAYISGKIG

SEQ ID NO: 175264 - protein, 236 aa, Unknown
  Bacterial polypetide isolated from the Sargasso Sea
MSKNPEFVKFDKVDKSYDGKVLVVKDLQLDIAEGEFITMLGPSGSGKTTCLMMLAGFETPTHGEILLDGNIISNIPPHKRGIGMVFQNYALFPHMTVYENLAFPLRVRKVEKDEIDKKVDKALSMVSLSGFETRMPAQLSGGQQQRVAVARALVFDPAVVLMDEPLGALDKNLRESMQYEIKHIHESIGVTVVYVTHDQSEALTMSNRIAVFNDGKVQQLSNPAELYEKPSKFFCC

SEQ ID NO: 175265 - protein, 244 aa, Unknown
  Bacterial polypetide isolated from the Sargasso Sea
MKSIKIKADNLNVHYGEKQALFDVSMYMEEKQVTALIGPSGCGKSTFIRCLNRMNDVIDICKVQGKIEIDGNDIYSPDMQVEQLRERVGMVFQKPNPFPKSIFENVAYGPKIHGIAENKSDLEEIVVTSLKKAALFDEVKDRLSDSGTSLSGGQQQRLCIARAISVNPDIILMDEPCSALDPIATARIEELMGDLKTEYTIIIVTHSMQQAARVSSRTGFFHLGKLVEVDKTETIFQIHQIRER

SEQ ID NO: 175266 - protein, 113 aa, Unknown
  Bacterial polypetide isolated from the Sargasso Sea
DRLDEPGTSLSGGQQQRLCIARAISVNPEVILMDEPCSALDPIATAKIEELMEELKKTFTIVIVTHSMAQAVRVSQRTGFFHLGNLIEVDTTDKMFKNPNNKMTQDYITGRFG

SEQ ID NO: 175267 - protein, 206 aa, Unknown
  Bacterial polypetide isolated from the Sargasso Sea
IRCFNRMNDTIRIANISGQILYNKRNVTDIDPAEVRYRIGMVFQKPNPFPKSIYENVAFGPKVNGIKENLDQIVETSLKKADLWKEVKDRLKENAYGLSGGQQQRLCIARTLAVNPEVILMDEPCSALDPISTDRIEELIKDLSSSVTIVIVTHNMQQAVRVSDYSACMMAGEERIGELIEYGEVDQIFGNPKDKRTEEYVTGRIG

SEQ ID NO: 175268 - protein, 140 aa, Unknown
  Bacterial polypetide isolated from the Sargasso Sea
GLANTKRELNDIVLNSLERAGLIDEVRDRLEDSATGLSGGQQQRICIARAIAVNPEVILMDEPCSALDPIATAKIEELMSSLTDSYTIVIVTHSMQQAARVSQKTAFFHLGTLIETNDTEKLFTQPEHKQTQDYITGRIG

SEQ ID NO: 175269 - protein, 209 aa, Unknown
  Bacterial polypetide isolated from the Sargasso Sea
STFLRCLNRMNDVIEICRVEGSIKMDNLELNSRKLDVVRLRENVGMVFQKPNPFPKTIYENVAYGPTIHGIAQSKEEMDQIVETSLKKAALWNEVKDRLDEIGTGLSGGQQQRLCIARAISVSPEVILMDEPCSALDPIATAQIEELIDDLKKEVTIVIVTHSMSQAARVSQKTGFFHLGKLIEFGATDKIFKNPDNQQTQDYITGRFG

SEQ ID NO: 175270 - protein, 203 aa, Unknown
  Bacterial polypetide isolated from the Sargasso Sea
MVKKLNYKFEIKGVNVFYGSKQAINDISLNIEENKITALIGPSGCGKSTFLRCMNRMNDVITNCRVKGKILLDKQDIYSDKIDPVQLRAKVGMVFQKPNPFPKSIFENIAYGPRIHGLGSTKAELSEIVLDSLERAGLINEVKDRLDDVATGLSGGQQQRICIARAIAVNPEVILMDEPCSALDPIATARIEELMNSLATTYT

SEQ ID NO: 175271 - protein, 236 aa, Unknown
  Bacterial polypetide isolated from the Sargasso Sea
MSKIIAENVNVYYGSKQALFDVSINIAEKEVTALIGPSGCGKSTFLRCLNRMNDVIDICRVEGSIKMDDLELNSRQLDVVRLRENVGMVFQKPNPFPKTIYENVAYGPTIHGIAQSKEEMDQIVETSLKKAALWNEVKDRLNEVGTGLSGGQQQRLCIARAISVSPEVILMDEPCSALDPIATAQIEELIDDLKKEVTIVIVTHSMSQAARVSQKTGFFHLGKLIEKGSTDKIFKN

SEQ ID NO: 175272 - protein, 203 aa, Unknown
  Bacterial polypetide isolated from the Sargasso Sea
MNRMNDTIDICRIEGEIALDGKNIYAPDVDVVPLRARVGMVFQKPNPFPKSIYDNVAYGPRIHGLAAGSVELDEIVKISLERAGLWNEVKDRLQQPGTGLSGGQQQRLCIARAIAVSPEVILMDEPCSALDPIATAKIEELIDELSSQFTIVIVTHSMQQAARVSQRTAYFHLGKLVEVGETEQMFTTPQHEMTQNYITGRFG

SEQ ID NO: 175273 - protein, 251 aa, Unknown
  Bacterial polypetide isolated from the Sargasso Sea
MTKISAKNVNVFYGSKQALFDVSLDIMDKEVTALIGPSGCGKSTFLRCLNRMNDVIDICKVEGSIKMDELELNSRKLDVVRLRENVGMVFQKPNPFPKTIYENVSYGPTIHGMAQSKSELDQIVEMSLKKAALWEEVKDRLDEIGTGLSGGQQQRLCIARAISVSPEVILMDEPCSALDPIATAQIEELIDDLKKEHTIVIVTHSMSQAARVSQKTGFFHLGKLIEFGDTEKIFKNPDNQQTQDYITGRFG

SEQ ID NO: 175274 - protein, 251 aa, Unknown
  Bacterial polypetide isolated from the Sargasso Sea
MIKIKAKDVDVFYGKKQALFNISLDIEENQVTALIGPSGCGKSTFLRCLNRMNDVIDICSVKGKILINDFNINDKSCDVVRLREKIGMVFQKPNPFPKTLYENVSYGPTIHGMAQSKQEMDEIVETSLKKAALWKEVKDRLHEPGTGLSGGQQQRLCIARAISVRPEVILMDEPCSALDPIATAQIEELIDELKKEHTIIIVTHSMAQAARVSQNTGFFHLGQLIEHGSTDKIFKNPDNTKTQDYITGRFG

SEQ ID NO: 175275 - protein, 284 aa, Unknown
  Bacterial polypetide isolated from the Sargasso Sea
MIKNTKKLQKNNILSLEDVSISYGTFEAVKNVFCNFKRGDITSLIGPSGCGKSTVLRALNRMNDLIPNCSLKGTVLFDGTNIYDKRVDPVEVRRRIGMVFQQPNPFPKSIYENIAFGARINGFTGNMDELVESSLRKAAVWSECKDKLNDSGYSLSGGQQQRLCIARTIAIEPEIILMDEPCSALDPISTLKIEETMHELKKNYTIIIVTHNMQQALRVSDMTAFFNAVEYEDGDGGKVGYLAEFDSTKKIFNSSKRKNHSGIYFWQIWLIYTLKRKIFTLKKA

SEQ ID NO: 175276 - protein, 212 aa, Unknown
  Bacterial polypetide isolated from the Sargasso Sea
MWKSTLLKCINRMNDLVEICKTDGQVLLDSKDINDASQDPVLLRMKVGMVFQKPNPFPKSIYDNVAFGPTLHGMTNSKEELDHVVIESLSKSGLYDEVKDRLFDPGTGLSGGQQQRLCIARALAVNPEILLMDEPCSALDPIATAKIEDLIAELKEQYTIVIVTHSMQQAARVSDRTAYMHMGELIESGLTKTIFSNPQHQKTQDYITGRIG

SEQ ID NO: 175277 - protein, 135 aa, Unknown
  Bacterial polypetide isolated from the Sargasso Sea
MDIKEKEVTALIGPSGCGKSTFLRCINRMNDLIEICKVSGSIKVDNEEIISDKIDVVSLRSKIGMVFQKPNPFPKSIFDNVAYGPTIHGLVDSKNDLEEIVHSSLKKAGLFDEVKDRLNEPGTSLSGGQQQRLCI

SEQ ID NO: 175278 - protein, 237 aa, Unknown
  Bacterial polypetide isolated from the Sargasso Sea
MIIETEGVKVNFGDFWALKGVDIKVRKGEIIVILGPSGSGKSTYIRTLNRLQPHSGGTIKIDGITIDDDTTVSDLKYIRSEIGFVFQQFNLFPHLTIMENVTLAPMKVKGMPKREAEDLAMELLERVGIPEQAYKYPSGLSGGQQQRVAIARALAMDPKIMLFDEPTSALDPEMIKEVLEVMIDLAKRDITMIVVTHEMGFAKEVADRCILFDEGHLIEENTPEEFFSNPKHDRTKL

SEQ ID NO: 175279 - protein, 269 aa, Unknown
  Bacterial polypetide isolated from the Sargasso Sea
MIKNTKKLQKNNILSLEDVSISYGTFEAVKNVFCNFKRGDITSLIGPSGCGKSTVLRALNRMNDLIPNCSLKGTVLFDGTNIYDKRVDPVEVRRRIGMVFQQPNPFPKSIYENIAFGARINGFTGDMDELVESSLRKAALWDECKDKLNDSGYSLSGGQQQRLCIARTIAIEPEIILMDEPCSALDPISTLKIEETMHELKKNYTIIIVTHNMQQALRVSDMTAFFNAVEYEDGDGGKVGYLAEFDSTKKIFNSPKEKTTQEYISGKFG

SEQ ID NO: 175280 - protein, 257 aa, Unknown
  Bacterial polypetide isolated from the Sargasso Sea
MELKNSNIKIKSKNLNVYYGNKQALHNINLEINNKEVTALIGPSGCGKSTFIRCINRMNDTIDICRVDGSIEIDGKEVNDKNVDVVTLREKIGMVFQKPNPFPKSIYDNIAYGPTIHGIGEKKDEMDKIVETSLKKAALWDEVKDRLNEPGTGLSGGQQQRLCIARALSVNPEVILMDEPCSALDPIATAKIEELIDDLKKSYTIVIVTHSMAQAVRVSQKTGFFHLGKIIEVDTTEKIFKNPANKMTQDYITGRFG

SEQ ID NO: 175281 - protein, 252 aa, Unknown
  Bacterial polypetide isolated from the Sargasso Sea
MQNKSKKKIGKEIISTDEVTKSFGKFQALKGITSKIYEKEVVVIFGPSGSGKSTFIRTLNRLEPHDSGEIIVDGIVLNDDVKNLQYVRSNVGMVFQQFNLFPHLSVLRNITIAPQKVKGLKRADAEEIAMGLLERVGIPEQASKFPSQLSGGQQQRLAIARALAMQPKIMLFDEPTSALDPEMIKEVLEVMTELAESGMTMICVTHEMGFAKEVADRFLFFDEGLIVEEGTGDQIFNNPKEERTKLFLSQIL

SEQ ID NO: 175282 - protein, 259 aa, Unknown
  Bacterial polypetide isolated from the Sargasso Sea
MSIEELKVSIKNLNVFYGEKQALFGVNLNIYANEVTSLIGPSGCGKSTLIKCINRMNDLVDICRYNGQIMIDGEDINDSSTDPVSLRTRIGMVFQKPNPFPKSLYDNVAYGPRLHGMTNSKEDLDELVITSLQKAGLFNEVKDRLFEPGTGLSGGQQQRLCIARALAVNPEIILMDEPCSALDPIATAKIEELIEELKEKYTIVIVTHSMQQAARVSNRTAYMHMGELIESGLTKTIFSNPEHIKTQDYITGENWLTII

SEQ ID NO: 175283 - protein, 257 aa, Unknown
  Bacterial polypetide isolated from the Sargasso Sea
MIRLENIDKYFGENRVLSSVNLQLEPGNVTALIGPSGSGKSTLLRCVNLLEIPESGSLELGDQRLEFSRDHKPSRETVLTIRRRTGMVFQNFQLFPHLTVRQNVMEGLLTVLKWDEQRARLRADELLEKVGIAQKADAWPSTLSGGQQQRVAIARALAPSPEVLLCDEPTSALDPGLAAEVVDVLKQLATEGMTMLMATHDLRLAATIARDVVFLSNGVVVEAGPSRDIFMRPRERETERFVSTLTHSLPDAWTAQG

SEQ ID NO: 175284 - protein, 268 aa, Unknown
  Bacterial polypetide isolated from the Sargasso Sea
MIKNTKKSQKKNILSLEDVSISYGTFEAVKNVFLNFKAGDITSLIGPSGCGKSTVLRALNRMNDLIPNCSLKGTVLFDGTNIYDKRVDPVEVRRRIGMVFQQPNPFPKSIYENIAFGARINGFTGDMDELVESSLRKAAVWSECKDKLNDSGYSLSGGQQQRLCIARTIAIEPEIILMDEPCSALDPISTLKIEETMHELKKNYTIIIVTHNMQQALRVSDMTAFFNAVEYEDGDGGKVGYLAEFDSTKKIFNSPKEKTTQEYISGKF

SEQ ID NO: 175285 - protein, 361 aa, Unknown
  Bacterial polypetide isolated from the Sargasso Sea
MSKNPEFVKFDKVDKSYDGKVLVVKDLQLDIAEGEFITMLGPSGSGKTTCLMMLAGFETPTHGEILLDGNIISNIPPHKRGIGMVFQNYALFPHMTVYENLAFPLRVRKVEKDEIDKKVDKALSMVSLSGFETRMPAQLSGGQQQRVAVARALVFDPAVVLMDEPLGALDKNLRESMQYEIKHIHESIGVTVVYVTHDQSEALTMSNRIAVFNDGKVQQLSNPAELYEKPVNSFVAEFIGENNTFNGEVVDIAKDRCKVKLANSEILANPISVKSKGEKTTVSLRPERALINPTDKMDNMFTGKIEEVIYHGDHTRVRLNLLGSSEFILKVPNSTSNLELKVSQDINIGWNSIDARALDPK

SEQ ID NO: 175286 - protein, 231 aa, Unknown
  Bacterial polypetide isolated from the Sargasso Sea
MLNIDQLVTSYPDWRVSFSATLPKGEITALIGPSGAGKSTLLGMIAGFVPVESGTLDFDGEDLLPLGPAARPVTTLFQDHNLFLHLSVFDNIAIGLHPGLRLNAAQRAQVKDAASRVGLGEMLTRLPEQLSGGQQQRVGLARALVRGKPLLLLDEPFSALDPALRREMLAEVARLACEQGITVLMVSHNPEDAQLIADQVLFVDEGRIALQGKPDILQNSNHPGLLRYLGQ

SEQ ID NO: 175287 - protein, 165 aa, Unknown
  Bacterial polypetide isolated from the Sargasso Sea
MFNINLEIEENQVTALIGPSGCGKSTFLRCLNRMNDVIDICKVQGEIVINDFNINDKGCDVVRLREKIGMVFQKPNPFPKTLYENISYGPTIHGMAQSKQEMDEIVEISLKKAALWEEVKDRLHEPGTGLSGGQQQRLCIARAISVQPEVILMDEPCSALDPIAT

SEQ ID NO: 175288 - protein, 195 aa, Unknown
  Bacterial polypetide isolated from the Sargasso Sea
MIKIKAKDVDVFYGKKQALFNISLDIEENQVTALIGPSGCGKSTFLRCLNRMNDVIDICSVKGEILINDFNINDKSCDVVRLREKIGMVFQKPNPFPKTLYENVSYGPTIHGMAQSKQEMDEIVETSLKKAALWEEVKDRLHEPGTGLSGGQQQRLCIARAISVRPEVILMDEPCSALDPIATAQIEELIDELKK

SEQ ID NO: 175289 - protein, 194 aa, Unknown
  Bacterial polypetide isolated from the Sargasso Sea
ICRVEGSIKMDDLELNSRKLDVVRLRENVGMVFQKPNPFPKTIYENVAYGPTIHGIAQSKEEMDQIVETSLKKAALWNEVKDRLDEIGTGLSGGQQQRLCIARAISVSPEVILMDEPCSALDPIATAQIEELIDDLKKEVTIVIVTHSMSQAARVSQKTGFFHLGKLIEFGSTEKIFKNPDKQQTQDYITGRFG

SEQ ID NO: 175290 - protein, 269 aa, Unknown
  Bacterial polypetide isolated from the Sargasso Sea
METKETVQVNNENVFNVKDVSVSYGEFVAIKNVNMDISKNKITAFIGPSGCGKSTLIRTFNRMNDLILGAKVNGTINYQGVDLYDKMVDPVQVRRRIGMVFQKPNPFPKTIKENITFGLKVNNMTDNMDERVERALTQAALWDEVKDDLNKNALELSGGQQQRLCIARTIAVEPDTILMDEPCSALDPVATKKIEDLMQELVKEFSILIVTHNMQQASRASDYCAFFTTKTSDDGKRRTGELVEFNETNAMFTNPDEELTEQYISGRFG

SEQ ID NO: 175291 - protein, 251 aa, Unknown
  Bacterial polypetide isolated from the Sargasso Sea
MIKINSKNVDVFYGKKQALFNINLDIEENQVTALIGPSGCGKSTYLRCLNRMNDVIDICRVKGQIIINDFDINDKSCDVVRLREKIGMVFQKPNPFPKTIYENISYGPTIHGMAQSKNEMDEIVETSLKKAALWEEVKDRLHEPGTGLSGGQQQRLCIARAISVKPEVILMDEPCSALDPIATAQIEELIDELKKDHTIIIVTHSMAQAARVSQNTGFFHLGELIEHGSTDKIFKNPENKRTQDYITGRFG

SEQ ID NO: 175292 - protein, 252 aa, Unknown
  Bacterial polypetide isolated from the Sargasso Sea
MAVDDCSLEIKSGEVCMIVGPSGCGKTTLLNAIAGFHSITEGEIYLDNEILCGPNKPLADQGSDRIVVFQHGALFPWKTLQENVAYGPIVQKVLPKNEALDKAGSLLEEAGIGDMMKKYPGEVSSGMARRAEIVRALINNPKVLLLDEPYRAMDALTKSIMHESLLEVYDKTNVTIFFITHDLEEAIFLGDKVVVMTTRPAKTKLILDVDIPRPRNYQVLSSEKFRVLVNEAKDAVHEEAIKAFEAGERELA

SEQ ID NO: 175293 - protein, 255 aa, Unknown
  Bacterial polypetide isolated from the Sargasso Sea
MTNNKVKIKTEKLDVFYGQKQALKNVNLEIFNREVTALIGPSGCGKSTYIRCINRMNDVIETCKISGSIKIDGQEINNKQIDVVRLRERIGMVFQKPNPFPKSIYDNVAYGPQIHGLADHKDKLDQIVQTSLKKSALWEEVKDRLDEPGTSLSGGQQQRLCIARAISVNPEVILMDEPCSALDPIATAKIEELMEELKKTFTIVIVTHSMAQAVRVSQRTGFFHLGNLIEVDTTDKMFKNPNNKMTQDYITGRFG

SEQ ID NO: 175294 - protein, 179 aa, Unknown
  Bacterial polypetide isolated from the Sargasso Sea
MKCAVGSGWCSSSPTPFPKSIYENIAFGARINGFTGDMDELVERSLRQAAVWDECKDKLNESGYSLSGGQQQRLCIARTIAIQPEVILMDEPCSALDPISTLKIEETMHELKKSFTIVIVTHNMQQAVRVSDMTAFYNAEAVEGGSGKVGYLVEFNETEKIFNSPQQQATQDYVSGRFG

SEQ ID NO: 175295 - protein, 251 aa, Unknown
  Bacterial polypetide isolated from the Sargasso Sea
MIKIKAKDVDVFYGKKQALFNISLDIEENQVTALIGPSGCGKSTFLRCLNRMNDVIDICSVKGEILINDFNINDKSCDVVRLREKIGMVFQKPNPFPKTLYENVSYGPTIHGMAQSKQEMDEIVETSLKKAALWEEVKDRLHEPGTGLSGGQQQRLCIARAISVRPEVILMDEPCSALDPIATAQIEELIDELKKEHTIIIVTHSMAQAARVSQNTGFFHLGQLIEHGSTDKIFKNPDNTKTQDYITGRFG

SEQ ID NO: 175296 - protein, 251 aa, Unknown
  Bacterial polypetide isolated from the Sargasso Sea
MIKINSKNVDVFYGKKQALFNINLDIEENQVTALIGPSGCGKSTFLRCLNRMNDVIDICRVKGQIIINDFDINDKSCDVVRLREKIGMVFQKPNPFPKTIYENISYGPTIHGMAQSKNEMDEIVETSLKKAALWEEVKDRLHEPGTGLSGGQQQRLCIARAISVKPEVILMDEPCSALDPIATAQIEELIDELKKDHTIIIVTHSMAQAARVSQNTGFFHLGELIEHGSTDKIFKNPENKKTQDYITGRFG

SEQ ID NO: 175297 - protein, 293 aa, Unknown
  Bacterial polypetide isolated from the Sargasso Sea
MKNVIEQSATSGDQLPEVHVDRLEAVAQGKDVPAEVHPQVLEEKPVLEIEDFNLWYGMKQALHNVTMPITHSKVTALIGPSGCGKSTLLRSVNRMNDLVQNVKIKGTMLLNGDSIYDPRRDVIDLRKRMGMVFQKPNPFPMSIFENVVYALRIDGERNRGILEEVCEVSLRGAALWDEVKDRLQDSALGLSGGQQQRLCIARAIAAEPEVLLLDEPCSALDPIATGKVEELIQELRGQYSVLMVTHNMQQASRASDYTAFMYLGRLIEYGSTSDIFTNPVLQETESYVTGRFG

SEQ ID NO: 175298 - protein, 249 aa, Unknown
  Bacterial polypetide isolated from the Sargasso Sea
MQTSEVYVHYGKKMAINNVALNFPKNEVTSLIGPSGCGKSTFLRCLNRMNDVIDICNVKGKFLLNGNVDIYSPDIQVETLREKVGMVFQKPNPFPKTIYENVAYGPKIHGIASSQNELDEIVKDSLHRAGLYEEVKDRMDDIATGLSGGQQQRLCIARAIAIRPEIILMDEPCSALDPIATAKIEDLINELKENYTIIIVTHSMSQASRVSSKTAFFHLGNLVEYGETGKIFTKPDKEQTNDYITGRFG

SEQ ID NO: 175299 - protein, 252 aa, Unknown
  Bacterial polypetide isolated from the Sargasso Sea
MIRLEGIDKSFGTHRVLHGIDLALQPGSVTALIGPSGSGKSTLLRCVNLLEVPEAGALTVGDARIDFSPAHRPARDAVFAVRRQTGMVFQNFQLFPHLSVVQNVMEGLVTVQRWPRERARERALALLEKVGIADKADAWPGTLSGGQQQRVAIARALAPSPQVLLCDEPTSALDPELSVEVVEVLRQLAREGTTMLMATHDLRLAASIAHDAVFLAEGRVVEAGASRDLFGDPRDPRTAKFISTLAQGVPVF

SEQ ID NO: 175300 - protein, 228 aa, Unknown
  Bacterial polypetide isolated from the Sargasso Sea
MSKKVASLENISKTYGKEDLTVKALDSINLEIYKGDYLAVMGASGSGKSTAMNIIGCLDRPSKGIYKLNGIPVENLSDDELAEIRNQKLGFVFQQFHLLSDATALENVTLPMIYAGIEPEQRLERGKNALKKVGLSERMNNRPNQLSGGQQQRVAIARAIINNPAILLADEPTGALDSKTTEDVLDLFDKLHESGITIVLVTHEDEVANRAKKIAKFKDGRIVELKVN

SEQ ID NO: 175301 - protein, 228 aa, Unknown
  Bacterial polypetide isolated from the Sargasso Sea
MSKKVASLENISKTYGEEDLTVKALDSINLEIYKGDYLAVMGASGSGKSTAMNIIGCLDRPSEGIYKLNGIPVENLSDDELAEIRNQKLGFVFQQFHLLSDATALENVTLPMIYAGIDPEERLERGKNALKKVGLSERMNNRPNQLSGGQQQRVAIARAIINNPAILLADEPTGALDSKTTEDVLDLFEKLHESGITIVLVTHEDEVANRAKKIAKFKDGRIVELKVN

SEQ ID NO: 175302 - protein, 264 aa, Unknown
  Bacterial polypetide isolated from the Sargasso Sea
MKTNNFDLANLSQNDTALEIRNLDLRYGDKQALFNVSMKIPKKQVTAFIGPSGCGKSTLLRCINRMNDLVDNCHIDGEILLHGQNIYDKKIDVAALRRNVGMVFQRPNPFPKSIYENVVYGLRLQGINNRRELDEAAERSLRGAAIWDEVKDRLHDNAFGLSGGQQQRLVIARAIAIEPEVLLLDEPTSALDPISTLTIEELITELKTKYTVVIVTHNMQQAARVSDQTAFMYMGELVEYADTNTIFTTPKKRKTEDYITGRYG

SEQ ID NO: 175303 - protein, 165 aa, Unknown
  Bacterial polypetide isolated from the Sargasso Sea
VGMVFQKPNPFPKSIYENVAYGLRIQGVNDRRTLDDAVEKSLKGAALWDEVKDRIGESAMGLSGGQQQRLVIARAIAIEPEVILLDEPASALDPISTLKIEELIYKLKEDYTIVIVTHNMQQAARVSDYTAYMYLGKLIEMNDTGTLFTTPRKKMTEDYITGRYG

SEQ ID NO: 175304 - protein, 254 aa, Unknown
  Bacterial polypetide isolated from the Sargasso Sea
MEKKSLIHCTDVNVFYDDKQALFNVDLNINEKEVTSLIGPSGCGKSTFIRCLNRMNDVIETCSFNGSIIINGQDIYDPEIDVVELRAKIGMVFQKPNPFPKSVFDNVAYGPKLHGRFLNKSDMNNKVEDSLIKAGLWDEIKDRLNEPGTALSGGQQQRLCIARAIAVDPEIILMDEPCSALDPIATARIEELIDELKVNYTIVIVTHSMQQAARVSQRTAFFHLGNLIEVGDTEKIFRSPDNEQTEAYVTGRYG

SEQ ID NO: 175305 - protein, 235 aa, Unknown
  Bacterial polypetide isolated from the Sargasso Sea
MDITKNKITAFIGPSGCGKSTLIRSFNRMNDLILGAKVNGTITYQGVDLYDKMVDPVQVRRRIGMVFQKPNPFPKTIKENITFGLKVNNMTDNMDDRVEKALTQAALWDEVKDDLDKNALELSGGQQQRLCIARTIAVEPDTILMDEPCSALDPVATKKIEDLMQELVKEFSILIVTHNMQQASRSSDYCAFFTTKTSDDGKRRTGELVEFNETSVMFTTPDKELTEQYISGRFG

SEQ ID NO: 175306 - protein, 271 aa, Unknown
  Bacterial polypetide isolated from the Sargasso Sea
MSKNPEFVKFDKVDKSYDGKVLVVKDLQLDIAEGEFITMLGPSGSGKTTCLMMLAGFETPTHGEILLDGNIISNIPPHKRGIGMVFQNYALFPHMTVYENLAFPLRVRKVEKDEIDKKVDKALSMVSLNGFETRMPAQLSGGQQQRVAVARALVFDPAVVLMDEPLGALDKNLRESMQYEIKHIHESIGVTVVYVTHDQSEALTMSNRIAVFNDGKVQQLSNPAELYEKPVNSFVAEFIGENNTFNGEIVDIDKDKCKVKLANSEILANPI

SEQ ID NO: 175307 - protein, 204 aa, Unknown
  Bacterial polypetide isolated from the Sargasso Sea
MSNNPEFVKFDKVDKSYDGKVLVVKDLQLDIAEGEFITMLGPSGSGKTTCLMMLAGFETPTNGEILLDGNIISNIPPHKRGIGMVFQNYALFPHMTVYENLAFPLRVRKMEKDEIDKKVDKALSMVSLNGFETRMPGQLSGGQQQRVAVARALVFDPAVVLMDEPLGALDKNLRESMQYEIKHIHESIGVTVVYVTHDQVKLLH

SEQ ID NO: 175308 - protein, 253 aa, Unknown
  Bacterial polypetide isolated from the Sargasso Sea
MSNSKILANGVDVYYGSKQALFGISMDIKEKEVTALIGPSGCGKSTFLRCINRMNDLIEICKVSGSIKVDNEEIISEKTDVVSLRSKIGMVFQKPNPFPKSIFDNVAYGPTIHGLVDSKNELEEIVHSSLKKAGLFDEVKDRLNEPGTSLSGGQQQRLCIARAIAVNPEIILMDEPCSALDPIATAIIEELIDELRLNYTIIIVTHSMQQAARVSQKTCFFHLGELIETGETNKIFTNPDNTKTQDYITGRFG

SEQ ID NO: 175309 - protein, 113 aa, Unknown
  Bacterial polypetide isolated from the Sargasso Sea
DRLNQNATSLSLEEQQKLCIARLLPVKPSVLLMDEPTSALDPKAAAALEELIWSLRGSDTILIVTHNMAQARRASEDCAFMLLGKMMEVAPTADLFLSPQLPETADYVEGRYG

SEQ ID NO: 175310 - protein, 277 aa, Unknown
  Bacterial polypetide isolated from the Sargasso Sea
MKKDEQPPTKRNEPGKKMTNDIASNKEYKVLIENLAVSYSGKTAIKDINMKIPDKAVTALIGPSGCGKTTLLRTINRMHDLTKGAEVTGKIIIDGENVYDSYINPILQRRKIGMVFQKPNPFPTMSIWDNVAAGLKLNGVKDKSILNEIIEDSLKMAYLWDEVKDELKKPAVALSGGQQQRLCIARALAIQPEVLLMDEPASALDPIATQKIEQTIIELKKHYTIIIVTHNMQQALRVSDRTGFMYLGDLVEYDKTEKIFKNPEKELTANYVQGRFG

SEQ ID NO: 175311 - protein, 280 aa, Unknown
  Bacterial polypetide isolated from the Sargasso Sea
RYGYGASGKGAISIRNVTKIYDPGGADVLALDDCSLEIASGEVCMIVGPSGCGKTTLLNAIAGFHSITEGQIDLDGEMLCGPGKELATQGADRVVVFQNGALFPWKTLADNVAYGPIVQGQMNKAEARDKAESMLAEAGLGGVADKYPGEVSSGMARRAEIVRALINDPKVLLLDEPYRAMDALTKSIMHESLLEVYDRTKVTIFFITHDLEEAIFLGDRVVVMTTRPARTKKIVDVKIDRPRDYRLLSSEEFRILVQETKEAVHEEAVKAFEAGERELA

SEQ ID NO: 175312 - protein, 251 aa, Unknown
  Bacterial polypetide isolated from the Sargasso Sea
MIKIKAKDVDVFYGKKQALFNISLDIEENQVTALIGPSGCGKSTFLRCLNRMNDVIDICSVKGEILINDFNINDKGCDVVRLREKIGMVFQKPNPFPKTLYENVSYGPTIHGIAQSKQEMDEIVETSLKKAALWEEVKDRLHEPGTGLSGGQQQRLCIARAISVRPEVILMDEPCSALDPIATAQIEELIDELKKEHTIIIVTHSMAQAARVSQNTGFFHLGQLIEHGSTDKIFKNPDNKKTQDYITGRFG

SEQ ID NO: 175313 - protein, 265 aa, Unknown
  Bacterial polypetide isolated from the Sargasso Sea
MFEHNTLNVKDISEEQTAVEVKNLNLWFGNKHVLNDVSMRIPKHKITALIGQSGCGKSTLISCFNRLNDLYDGCKYNGEIIIDGRNINSRKINVSRLRTNVGMVFQRPNPFPMSIYENVCYGLRLQGVKVRRHLDDAVEGALKQAALWDEVKDRLFESAQVLSGGQQQRLVIARALALKPDILLLDEPTSALDPLTTLFIEELMDVLKKQCTIVIVTHNMQQAARVSDYTAFFHQGRLIEYADSDTLFTMPEKKQTEDYITGRYG

SEQ ID NO: 175314 - protein, 251 aa, Unknown
  Bacterial polypetide isolated from the Sargasso Sea
MIKIKAKDVDVFYGKKQALFNISLDIEENQVTALIGPSGCGKSTFLRCLNRMNDVIDICSVKGEILINDFNINDKSCDVVRLREKIGMVFQKPNPFPKTLYENVSYGPTIHGMAQSKQEMDEIVETSLKKAALWEEVKDRLHEPGTGLSGGQQQRLCIARAISVRPEVILMDEPCSALDPIATAQIEELIDELKKEHTIIIVTHSMAQAARVSQNTGFFHLGQLIEHGSTDKIFKNPDNKKTQDYITGRFG

SEQ ID NO: 175315 - protein, 227 aa, Unknown
  Bacterial polypetide isolated from the Sargasso Sea
MEINEDKKDFKTNTVGDIFSDNPKIVSRNVSVYYNDKKAISDVSLDIGSKEIISLIGPSGCGKSTFLRCFNRMNDTIDGCKVEGKIFLDNENIYDEMIDVVPLRAKVGMVFQKPNPFPKSIYDNVAYGPRIHGLVDNKKDMDNIVEMSLKNAGLWDEVKDRLDSPGTGLSGGQQQRLCIARAIAVSPEIILMDEPCSALDPIATAKIEELLQTLANDYSIVIVTHSM

SEQ ID NO: 175316 - protein, 205 aa, Unknown
  Bacterial polypetide isolated from the Sargasso Sea
MIKIKAKDVDVFYGKKQALFNISLDIEENQVTALIGPSGCGKSTFLRCLNRMNDVIDICSVKGEILINDFNINDKSCDVVRLREKIGMVFQKPNPFPKTLYENVSYGPTIHGMAQSKQEMDEIVETSLKKAALWEEVKDRLHEPGTGLSGGQQQRLCIARAISVRPEVILMDEPCSALDPIATAQIEELIDELKKEHTIIIVTHS

SEQ ID NO: 175317 - protein, 185 aa, Unknown
  Bacterial polypetide isolated from the Sargasso Sea
MGSVQTVGEALLESPSVSCRDVAVHYGDKQALFDINLDMGTNEVLSLIGPSGCGKTTFLRCINRMNDTIEGCRVSGTIKIYDEEINHVDADVVSLRSRVGMVFQKPNPFPKSIYDNIAYGPRIHGLAASNEELDQIVESSLKRAGLWKEVSDRLQTPGTGLSGGQQQRLCIARAIAVNPEVILMD

SEQ ID NO: 175318 - protein, 166 aa, Unknown
  Bacterial polypetide isolated from the Sargasso Sea
MNNVKVSTKNVNVHYGTKQALHRVTLDINEKEVTALIGPSGCGKSTFLRCINRMNDLIDICKVDGSITVDNEEIISDEVDVVSLRSKIGMVFQKPNPFPKSIFDNVAYGPTIHGIVETKTDLEEIVHSSLKRAGLLKEVKDRLHEPGTSLSGGQQQRLCIARAIAV

SEQ ID NO: 175319 - protein, 251 aa, Unknown
  Bacterial polypetide isolated from the Sargasso Sea
MIKISAKNVDVFYGKKQALFNINLEIEENQVTALIGPSGCGKSTFLRCLNRMNDVIDICKVQGEIVINDFNINDKGCDVVRLREKIGMVFQKPNPFPKTLYENISYGPTIHGMAQSKQEMDEIVETSLKKAALWEEVKDRLHEPGTGLSGGQQQRLCIARAISVQPEVILMDEPCSALDPIATAQIEELIDELKKEHTIIIVTHSMAQAARVSQNTGFFHLGELIEHGSTDKIFKNPENNKTQDYITGRFG

SEQ ID NO: 175320 - protein, 252 aa, Unknown
  Bacterial polypetide isolated from the Sargasso Sea
MDTKISAEGVNVFYGEAHALKNVSMQFMRNEVTALIGPSGCGKSTFLRCLNRMNDVIPDCRVEGKIMMGDVDINDNRLDVVRLREKVGMVFQKPNPFPKSIYDNVAYGPSIHGLARTQADMDRIVEESLEKAGLLEEVKDRLNQPGTGLSGGQQQRLCIARAIAVSPDVILMDEPCSALDPIATARIEELMEELRKNYTIIIVTHSMQQAARVSQQTAFFHLGDLVEVGKTDDLFVKPQEQKTQDYITGRFG

SEQ ID NO: 175321 - protein, 239 aa, Unknown
  Bacterial polypetide isolated from the Sargasso Sea
YGTKQALHRVTLDINEKEVTALIGPSGCGKSTFLRCINRMNDLIDICKVDGSITVDNEEIISDEVDVVSLRSKIGMVFQKPNPFPKSIFDNVAYGPTIHGIVETKTDLEEIVHSSLKRAGLLKEVKDRLHEPGTSLSGGQQQRLCIARAIAVNPDIILMDEPCSALDPIATATIEELIDELKNKYTIVIVTHSMQQAARVSQRTGFFHLGELVETGETQKIFTNPENEKTQGYITGRFG

SEQ ID NO: 175322 - protein, 251 aa, Unknown
  Bacterial polypetide isolated from the Sargasso Sea
MSKIKAENVNVYYGSKQALFDVSIDIAEKEVTALIGPSGCGKSTFLRCLNRMNDVIEICRVEGSIKMDNLELNSRKLDVVRLRENVGMVFQKPNPFPKTIYENVAYGPTIHGIAQSKEEMDQIVETSLKKAALWNEVKDRLDEIGTGLSGGQQQRLCIARAISVSPEVILMDEPCSALDPIATAQIEELIDDLKKEVTIVIVTHSMSQAARVSQKTGFFHLGKLIEFGPTDKIFKNPDNQQTQDYITGRFG

SEQ ID NO: 175323 - protein, 86 aa, Unknown
  Bacterial polypetide isolated from the Sargasso Sea
SALDPISTLKVEETMHELKKDFTIVIVTHNMQQAVRVSDMTAFYNAVAVEGGSGKVGYLVEFDETSNIFNNPRQEATQEYVSGRFG

SEQ ID NO: 175324 - protein, 248 aa, Unknown
  Bacterial polypetide isolated from the Sargasso Sea
ISARGVQVYYEDKQAIKNVDVKIQDKTVTAFIGPSGCGKSTFLRCLNRMNDTISICRVEGEILLEGQNIYHPDVDPVQLRAKVGMVFQKPNPFPKSIYENVAYGPRIHGLFESKSDLDEIVEMVLRRAALWEEVKDRLSEPGTGLSGGQQQRLCIARAIATRPEVLLMDEPCSALDPIATAQIEELIADLKENFCVVIVTHSMQQAARVSNKTAFFHLGDLVEYGETEELFVRPTDPRTESYISGKIG

SEQ ID NO: 175325 - protein, 256 aa, Unknown
  Bacterial polypetide isolated from the Sargasso Sea
MSDKNNIKIDAQNVNVFYADKQAIDNVSLKVEKSKITALIGPSGCGKSTFLRCINRMNDVIPSCRVEGKILVDETNVNNPELDPVFLRARVGMVFQKPNPFPKSIFDNIAYGPRIHGLTNNKSELDDIVKESLVRAGLWAEVSDRLFDQGTGLSGGQQQRLCIARAIAVNPEVILMDEPCSALDPIATAKIEELMMSLSQNYTIVIVTHSMQQAARISQKTAFFHLGKLIEMDTTDKIFTNPNKSKTQDYITGRFG

SEQ ID NO: 175326 - protein, 259 aa, Unknown
  Bacterial polypetide isolated from the Sargasso Sea
MIKNTKKSQKNNILSLEDVSISYGNFEAVRNVFCNFKSGDITSLIGPSGCGKSTVLRALNRMNDLIPNCSLRGTVLFDGTNIYDKRVDPVEVRRRIGMVFQQPNPFPKSIYENIAFGARINGFVGDMDELVESSLRKAAVWSECKDKLNDSGYSLSGGQQQRLCIARTIAIEPEIILMDEPCSALDPISTLKIEETMHELKKNYTIIIVTHNMQQALRVSDMTAFFNAIEYEDGDGGKVGYLAEFNSTKKIFSSPKEKT

SEQ ID NO: 175327 - protein, 317 aa, Unknown
  Bacterial polypetide isolated from the Sargasso Sea
MANDVLVSFRGVQKSYDGETLIVKDLNLDIRKGEFLTLLGPSGSGKTTSLMMLAGFETPTAGEILLDGRSLNKLPPHKRDIGMVFQNYALFPHMTVAENLAFPLSVRGMSRTDISERVKRALSMVQLDSFRNRYPGQLSGGQQQRVALARALVFEPQLVLMDEPLGALDKQLREHMQMEIKHLHQRLGVTVVYVTHDQGEALTMSDRVAVFHQGEIQQIAPPRELYEAPHNTFVAQFIGENNRLTGELVSRDGEQCVVRLARGEEVRATAVNVGAVGESVSLSIRPERIRLNGHSEACPNRFSGRIAEFIYLGDHVR

SEQ ID NO: 175328 - protein, 253 aa, Unknown; identical to SEQ ID NO: 175130
  Bacterial polypetide isolated from the Sargasso Sea

SEQ ID NO: 175329 - protein, 148 aa, Unknown
  Bacterial polypetide isolated from the Sargasso Sea
IAYGPTIHGIGEKKDEMDKIVETSLKKAALWDEVKDRLNEPGTGLSGGQQQRLCIARALSVNPEVILMDEPCSALDPIATAKIEELIDDLKKSYTIVIVTHSMAQAVRVSQKTGFFHLGKIIEVDTTEKIFKNPANKMTQDYITGRFG

SEQ ID NO: 175330 - protein, 82 aa, Unknown
  Bacterial polypetide isolated from the Sargasso Sea
MTNDIASNKEYKVLIENLAVSYSGKTAIKDINMKIPDKAVTALIGPSGCGKTTLLRTINRMHDLTKRCRKLQAKSSLRRKCV

SEQ ID NO: 175331 - protein, 209 aa, Unknown
  Bacterial polypetide isolated from the Sargasso Sea
IRCFNRMNDLIPSARVEGIVHYNDVSIYSDQADPTDIRFKIGMVFQKPNPFPKTIFENVAFGPKINGFPSSEIEGIVESSLKQAALWDEVKDRLQDNGLDLSGGQQQRLCIARALAVNPDIILMDEPASALDPVSTSKLEDLVKELSKNVTIIIVTHNMQQATRICDYAAVMMAGEARIGELIEYGTNDSVFGNPKDKRTEDYVTGRIG

SEQ ID NO: 175332 - protein, 265 aa, Unknown
  Bacterial polypetide isolated from the Sargasso Sea
MFEHNTLNVNDIGEEQTAVEVKKLNLWFGNKHVLNDISMRIPKNKITALIGQSGCGKSTLISCFNRLNDLYDGCKYDGEIIIDGQNINSRKVNVSRLRTNVGMVFQRPNPFPMSIYENVCYGLKLQGVKIRRHLDDAVESALKQAALWDEVKDRLFESAHVLSGGQQQRLVIARALALKPDILLLDEPTSALDPLTTLFIEELMDALKKQCTIIIVTHNMQQAARVSDYTAFFHQGRLIEYADSDTLFTMPDKKQTEDYITGRYG

SEQ ID NO: 175333 - protein, 251 aa, Unknown
  Bacterial polypetide isolated from the Sargasso Sea
MSKAINIENLSLYYGESKALKEVTLDIEANKSTAFIGPSGCGKSTLLRCLNRLNDLIEGVKIEGEIKISGTNIYDPSVDLTNLRRSVGMVFQKSNPFPLSIYENIAYGLKIAGIKDKSKLDHVIEKSLKGAALWDEVKDRLNESAYSLSGGQQQRLCIARAIAVEPTILLMDEPCSALDPIATAKVEELIKELKKDYTIVIVTHNMQQASRVSDYTAFMFLGELIEFDETKTIFMNPSIQQTNDYISGRFG

SEQ ID NO: 175334 - protein, 179 aa, Unknown
  Bacterial polypetide isolated from the Sargasso Sea
MNEIKIKSKNLNVYYGEKQALFDVNLDLNEKEVTALIGPSGCGKSTFIRCINRMNDVIDICKVSGNIEIDGVEINDKNLDVVSLRERVGMVFQKPNPFPKSIYDNISYGPKIHGKGETKSELDEIVENSLKKAALWEEVKDRLDEPGTGLSGGQQQRLCIARAISVNPEVILMDEPCSA

SEQ ID NO: 175335 - protein, 255 aa, Unknown
  Bacterial polypetide isolated from the Sargasso Sea
MINNKVKIKTTNLNVYYGDKQALNDVNLEIHSKEVTALIGPSGCGKSTYIRCINRMNDVIDICRVTGSIEIDGNEINKKEIDVVSLREKIGMVFQKPNPFPKSIYDNVSYGPNIHGLAENKVKMDEIVETSLKKAALWNEVKDRLNEPGTSLSGGQQQRLCIARAISVNPEVILMDEPCSALDPIATAKIEELMDELKKTYTIVIVTHSMSQAVRVSQRTGFFHLGKLIEVDTTEKIFKNPNNKMTQDYITGRFG

SEQ ID NO: 175336 - protein, 162 aa, Unknown
  Bacterial polypetide isolated from the Sargasso Sea
FQKPNPFPKTLYENISYGPTIHGMAQSKQEMDEIVETSLKKAALWEEVKDRLHEPGTGLSGGQQQRLCIARAISVQPEVILMDEPCSALDPIATAQIEELIDELKKEHTIIIVTHSMAQAARVSQNTGFFHLGELIEHGSTDKIFKNPENNKTQDYITGRFG

SEQ ID NO: 175337 - protein, 167 aa, Unknown
  Bacterial polypetide isolated from the Sargasso Sea
NWYGFSKTPILSPKTLYENVSYGPTIHGMAQSKQEMDEIVETSLKKAALWEEVKDRLHEPGTGLSGGQQQRLCIARAISVRPEVILMDEPCSALDPIATAQIEELIDELKKEHTIIIVTHSMAQAARVSQNTGFFHLGQLIEHGSTDKIFKNPDNKKTQDYITGRFG

SEQ ID NO: 175338 - protein, 360 aa, Unknown
  Bacterial polypetide isolated from the Sargasso Sea
MSSKNDSFVVFDRVQKSYDGLSLVVKDLNLNIKKGEFLTMLGPSGSGKTTCLLMLAGFETATHGEILLDGKPINNIPPHKRGIGMVFQNYALFPHMTVGENLSFPLEVRKISKNDREEKVLQALEMVQMTDFINRKPAQLSGGQQQRIALARSLVFNPDLVLMDEPLGALDKQLREHMQYEIKNLHKQLGVTVVYVTHDQSEALTMSDRVAVFNDGQIQQLSTPDGLYERPENAFVAQFIGENNKLTGKIKSVNNSEVIVKTTQNMEVKALKVNCGGEGTNTTLSIRPERIHLNSKYKNKVDATIKQLIYHGDHIRCLIKIDKENDFIVKIPNSNIKNTLKIGEKILISWDIKDCHALDA

SEQ ID NO: 175339 - protein, 140 aa, Unknown
  Bacterial polypetide isolated from the Sargasso Sea
GIAQSKQEMDEIVETSLKKAALWEEVKDRLHEPGTGLSGGQQQRLCIARAISVRPEVILMDEPCSALDPIATAQIEELIDELKKEHTIIIVTHSMAQAARVSQNTGFFHLGQLIEHGSTDKIFKNPDNKKTQDYITGRFG

SEQ ID NO: 175340 - protein, 116 aa, Unknown
  Bacterial polypetide isolated from the Sargasso Sea
VKDRLHEPGNWDYLGGQQHRLCIARAISVRPEVILMDEPCSALDPIATAQIEELIDELKKEHTIIIVTHSMAQAARVSQNTGFFHLGQLIEHGSTDKIFKNPDNKKTQDYITGRFG

SEQ ID NO: 175341 - protein, 121 aa, Unknown
  Bacterial polypetide isolated from the Sargasso Sea
AALWNEVKDRLDEIGTGLSGGQQQRLCIARAISVSPEVILMDEPCSALDPIATAQIEELIDDLKKEVTIVIVTHSMSQAARVSQKTGFFHLGKLIEFGSTDKIFKNPDKQQTQDYITGRFG

SEQ ID NO: 175342 - protein, 253 aa, Unknown
  Bacterial polypetide isolated from the Sargasso Sea
MKNIKISSKNVNVHYGAKQALHSVSLNINENEVTSLIGPSGCGKSTFLRCINRMNDLIDICKVDGSITVDNEEIISDEVDVVSLRSKIGMVFQKPNPFPKSIFDNVAYGPTIHGIAESKTDLEEIVHSSLKRAGLLKEVKDRLHEPGTSLSGGQQQRLCIARAIAVNPDIILMDEPCSALDPIATAIIEELIDELKANYTIVIVTHSMQQAARVSQRTGFFHLGELIETGDTQKIFTNPDNEKTQGYITGRFG

SEQ ID NO: 175343 - protein, 361 aa, Unknown
  Bacterial polypetide isolated from the Sargasso Sea
MSKNPEFVKFDKVDKSYDGKVLVVKDLQLDIAEGEFITMLGPSGSGKTTCLMMLAGFETPTHGEILLDGNIISNIPPHKRGIGMVFQNYALFPHMTVYENLAFPLRVRKVEKDEIDKKVDKALSMVSLNGFETRMPAQLSGGQQQRVAVARALVFDPAVVLMDEPLGALDKNLRESMQYEIKHIHESIGVTVVYVTHDQSEALTMSNRIAVFNDGKVQQLSDPAELYEKPVNSFVAEFIGENNTFNGEVTDIDKDKCKVKLANSEILANPISVKSKGEKTTVSLRPERALINPKDKMDNMFTGKIEEVIYHGDHTRVRLNLLGSAEFILKVPNSTSNLELKVSQDIKIGWNSLDARALDPK

SEQ ID NO: 175344 - protein, 114 aa, Unknown
  Bacterial polypetide isolated from the Sargasso Sea
MSGGQQQRLCIARAIAVQPDVILMDEPCSALDPVSTGKVEDLMLELKEDYTIVIVTHNMQQAARVSDLTAFFTVAAMDERSSRTGVLVEIDETRAIFSDPKDDRTANYVTGKFG

SEQ ID NO: 175345 - protein, 119 aa, Unknown
  Bacterial polypetide isolated from the Sargasso Sea
MHYGKKVKDRLHEPGTGLSGGQQQRLCIARAISVRPEVILMDEPCSALDPIATAQIEELIDELKKEHTIIIVTHSMAQAARVSQNTGFFHLGQLIEHGSTDKIFKNPDNTKTQEYITGR

SEQ ID NO: 175346 - protein, 139 aa, Unknown
  Bacterial polypetide isolated from the Sargasso Sea
MIKIKAKDVDVFYGKKQALFNISLDIEENQVTALIGPSGCGKSTFLRCLNRMNDVIDICSVKGEILINDFNINDKSCDVVRLREKIGMVFQKPNPFPKTLYENVSYGPTIHGMAQSKQEMDEIVETSLKKAALWEESKR

SEQ ID NO: 175347 - protein, 76 aa, Unknown
  Bacterial polypetide isolated from the Sargasso Sea
MELNNSKIKIKSKNLNVYYGNKQALHNINLEINNKEVTALIGPSGCGKSTFIRCINRMNDTIDICKVDGSIEIDGK

SEQ ID NO: 175348 - protein, 251 aa, Unknown
  Bacterial polypetide isolated from the Sargasso Sea
MNKIEAKNVDVYYGAKQALFDINMDIEANKVTALIGPSGCGKSTFLRCLNRMNDVIDICKVSGVVKINDYDINQKDTDVVRLREKVGMIFQKPNPFPKTIYENISYGPEIHGIAQSKSEMDNIVEESLRKAALWEEVKDRIHEPGTGLSGGQQQRLCIARTISIKPEVILMDEPCSALDPIATAQIEELIDELRKEHTIIIVTHSMSQAARVSQNTGFFHLGKLIEVGSTDKIFKNPTQQQTQDYITGRFG

SEQ ID NO: 175349 - protein, 104 aa, Unknown
  Bacterial polypetide isolated from the Sargasso Sea
LSGGQQQRLVIARAIAIEPEVLLLDEPASALDPISTLKIEELIYELKDKYTIVIVTHNMQQAARVSDYTAFMYMGDLIEFDATNKMFTNPSQQQTEDYITGRFG

SEQ ID NO: 175350 - protein, 251 aa, Unknown
  Bacterial polypetide isolated from the Sargasso Sea
MIKIKAKNVDVFYGKKQALYNIGLDIEENQVTALIGPSGCGKSTFLRCLNRMNDVIDICSVKGEILINDFNINDKSCDVVRLREKIGMVFQKPNPFPKTVYENISYGPTIHGMAQSKQEMDEIVETSLKKAALWEEVKDRLHEPGTGLSGGQQQRLCIARAISVRPEVILMDEPCSALDPIATAQIEELIDELKKEHTIIIVTHSMAQAARVSQNTGFFHLGHLIEHGSTDKIFKNPDNTKTQDYITGRFG

SEQ ID NO: 175351 - protein, 253 aa, Unknown
  Bacterial polypetide isolated from the Sargasso Sea
MKSIKIKADNLNVHYGEKQALFDVSMYMEEKQVTALIGPSGCGKSTFIRCLNRMNDVIDICKVQGKIEIDGNDIYAPDMQVEQLRERVGMVFQKPNPFPKSIFENVAYGPRIHGIAEHKSDLEEIVVNSLKKAALFDEVKDRLNDAGTGLSGGQQQRLCIARAISVNPDIILMDEPCSALDPIATARIEELMGELKTEYTIIIVTHSMQQAARVSSRTGFFHLGKLVEVDKTETIFSNPSDQRTQDYITGRFG

SEQ ID NO: 175352 - protein, 186 aa, Unknown
  Bacterial polypetide isolated from the Sargasso Sea
MSKNPEFVKFDKVDKSYDGKVLVVKDLQLDIAEGEFITMLGPSGSGKTTCLMMLAGFETPTNGEILLDGNIISNIPPHKRGIGMVFQNYALFPHMTVYENLAFPLRVRKMEKDEIDKKVDKALSMVSLNGFETRMPGQLSGGQQQRVAVARALVFDPAVVLMDEPLGALDKNLRESMQYEIKHIHE

SEQ ID NO: 175353 - protein, 251 aa, Unknown
  Bacterial polypetide isolated from the Sargasso Sea
MIKINSKNVDVFYGKKQALFNINLDIEENQVTALIGPSGCGKSTFLRCLNRMNDVIDICRVKGQIIINDFDINDKSCDVVRLREKIGMVFQKPNPFPKTIYENISYGPTIHGMAQSKNEMDEIVENSLKKAALWEEVKDRLHEPGTGLSGGQQQRLCIARAISVKPEVILMDEPCSALDPIATAQIEELIDELKKDHTIIIVTHSMAQAARVSQNTGFFHLGELIEHGSTDKIFKNPENKRTQDYITGRFG

SEQ ID NO: 175354 - protein, 177 aa, Unknown
  Bacterial polypetide isolated from the Sargasso Sea
MSNSKILANGVDVYYGSKQALFGISMDIKEKEVTALIGPSGCGKSTFLRCINRMNDLIEICKVSGSIKVDNEEIISEKTDVVSLRSKIGMVFQKPNPFPKSIFDNVAYGPTIHGLVDSKNELEEIVHSSLKKAGLFDEVKDRLNEPGTSLSGGQQQRLCIARAIAVNPEIILMDEPC

SEQ ID NO: 175355 - protein, 163 aa, Unknown
  Bacterial polypetide isolated from the Sargasso Sea
FSKTKSFFPKTIYENISYGPTIHGMAQSKNEMDEIVETSLKKAALWEEVQDRLHEPGTGLSGGQQQRLCIARAISVKPEVILMDEPCSALDPIATAQIEELIDELKKDHTIIIVTHSMAQAARVSQNTGFFHLGELIEHGSTDKIFKNPENKKTQDYITGRFG

SEQ ID NO: 175356 - protein, 246 aa, Unknown
  Bacterial polypetide isolated from the Sargasso Sea
MTVAIRATDLVKSYTPGVRALDRVSLEVSSGEVLVVMGPSGSGKSTLIRTFNGLERLDGGALDVLGVRLDSTHAEHQVRAIRRRVGMVFQQFNLFPHLSILENISLAPVKVQKRPKAEVEQRALQLLEQMGIQEQAEKYPAQLSGGQQQRVAIARALALDPEVMLFDEPTSALDPERVKEVLDAMRQLASGGMTMVVVTHEIGFARDVADRVMFMDQGQVVETSDPVTFFSGAREERSRRFLSQML

SEQ ID NO: 175357 - protein, 257 aa, Unknown
  Bacterial polypetide isolated from the Sargasso Sea
MVDKINNLKFKTKNVSVFYGSKQAINKISLDIEEKQITALIGPSGCGKSTFLRCLNRMNDVISNCSVNGKILLDGNNIYSDEIDPVLLRAKVGMVFQKPNPFPKSIFENIAYGPRIHGIGNNRAELTDLVHHSLEQAGLIDEVKDRLDDIATGLSGGQQQRICIARAIAVNPDVILMDEPCSALDPIATAKIEELMSSLSKSYTIIIVTHSMQQAGRVSQKTAFFHMGDLIEYGETPKIFTQPDQQKTQDYITGRFG

SEQ ID NO: 175358 - protein, 102 aa, Unknown
  Bacterial polypetide isolated from the Sargasso Sea
MKLSDEKIKLQVNDLKLYYGDALALKSVNMTIPEKRVTAFIGPSGCGKSTLLRCFNRMNDLVDICRIEGEILMDSQNIYDPKVDVAELRRQVGMVFQKPNPF

SEQ ID NO: 175359 - protein, 253 aa, Unknown
  Bacterial polypetide isolated from the Sargasso Sea
MIRLSGIEKQFAGQRVLKGVGLAMAAGSVTALIGPSGSGKSTLLRCVNLLERPDAGQLVLGGSELDFTRHLSRQSVLALRQQTGMVFQNFQLFPHMTVLENVMEGLVTVLQWPRERAAVRALQLLDKVGLRHKAQAVPATLSGGQQQRVAIARALAPAPKVLLCDEPTSALDPELAQEVVAVLRQLASEGTTMLIATHDLRLAAQIAQQVIFLEAGEVVEAGSARQMFTTPKRARTFEYISTLTERLPESWSI

SEQ ID NO: 175360 - protein, 218 aa, Unknown
  Bacterial polypetide isolated from the Sargasso Sea
LIGPSGCGKSTFIRCLNRMNDVIDICKVQGKIEIDGNDIYAPDMQVEQLRERVGMVFQKPNPFPKSIFENVAYGPRIHGIAEHKSDLEEIVVTSLKKAALFDEVKDRLSDSGTSLSGGQQQRLCIARAISVNPDIILMDEPCSALDPIATARIEELMGDLKTEYTIIIVTHSMQQAARVSSRTGFFHLGKLVEVDKTEAIFSNPSDQRTQDYITGRFG

SEQ ID NO: 175361 - protein, 151 aa, Unknown
  Bacterial polypetide isolated from the Sargasso Sea
MSKIKAENVNVYYGSKQALFDVSIDIAEKEVTALIGPSGCGKSTFLRCLNRMNDVIEICRVEGSIKMDNLELNSRKLDVVRLRENVGMVFQKPNPFPKTIYENVAYGPTIHGIAQSKEEMDQIVETSLKKAALWNEVKDRLDEIGTGLSGG

SEQ ID NO: 175362 - protein, 96 aa, Unknown
  Bacterial polypetide isolated from the Sargasso Sea
VCIARAIATSPDVLLMDEPCSALDPIATAQVEELIDELRQNFCVVIVTHSMQQAARVSQRTAFFHLGSLVEFGDTEKIFTNPNDPRTESYITGRIG

SEQ ID NO: 175363 - protein, 253 aa, Unknown
  Bacterial polypetide isolated from the Sargasso Sea
MNNIKIKSKNLNVYYGEKQALYDVNLDLNEKEVTALIGPSGCGKSTFIRCINRMNDVIDICKVTGNIEMDGIEINDKDLDVVSLRERVGMVFQKPNPFPKSIYDNVSYGPKIHGKGESKNELDEIVEHSLKKAALWEEVKDRLEEPGTSLSGGQQQRLCIARAISVNPEVILMDEPCSALDPIATAKIEELIDELKKTYTIVIVTHSMAQAVRVSQKTGFFHLGKLIEVGKTEKIFKNPDNKMTQDYITGRFG

SEQ ID NO: 175364 - protein, 86 aa, Unknown
  Bacterial polypetide isolated from the Sargasso Sea
PEVILMDEPCSALDPIATAQIEELIDELKKEHTIIIVTHSMAQAARVSQNTGFFHLGQLIEHGSTDKIFKNPDNKKTQDYITGRFG

SEQ ID NO: 175365 - protein, 205 aa, Unknown
  Bacterial polypetide isolated from the Sargasso Sea
MIKISAKNVDVFYGKKQALFNINLDIEENQVTALIGPSGCGKSTFLRCLNRMNDVIDICKVQGEIVINDFNINDKECDVVRLREKIGMVFQKPNPFPKTLYENISYGPTIHGMAQSKQEMDEIVETSLKKAALWEEVKDRLHEPGTGLSGGQQQRLCIARAISVQPEVILMDEPCSALDPIATAQIEELIDELKKEHTIIIVTHS

SEQ ID NO: 175366 - protein, 190 aa, Unknown
  Bacterial polypetide isolated from the Sargasso Sea
MKSIKIKADNLNVYYGEKQALFDVSMYMEEKQVTALIGPSGCGKSTFIRCLNRMNDVIDICKVQGKIEIDGNDIYAPDMQVEQLRERVGMVFQKPNPFPKSIFENVAYGPRIHGIAEHKSDLEEIVVTSLKKAALFDEVKDRLYDAGTGLSGGQQQRLCIARAISVNPDIILMDEPCSALDPIATARKKN

SEQ ID NO: 175367 - protein, 251 aa, Unknown; identical to SEQ ID NO: 175322
  Bacterial polypetide isolated from the Sargasso Sea

SEQ ID NO: 175368 - protein, 253 aa, Unknown
  Bacterial polypetide isolated from the Sargasso Sea
MSDIKIKSKNLNVYYGDKQALFDVNLDLNEKEVTALIGPSGCGKSTFIRCINRMNDVIDICKVTGNIEIDGIEINDSNLDVVSLRERVGMVFQKPNPFPKSIYDNISYGPKIHGKGETKNELDEIVEKSLKKAALWEEVKDRLNEPGTGLSGGQQQRLCIARAISVNPEVILMDEPCSALDPIATAKIEELIDELKKTYTIVIVTHSMAQAVRVSQKTGFFHLGKIIEVGKTEKIFKNPDNKMTQDYITGRFG

SEQ ID NO: 175369 - protein, 158 aa, Unknown
  Bacterial polypetide isolated from the Sargasso Sea
KSFSKSIFDNVAYGPTIHGIVETKTDLEEIVHLSLKRAGLLKEVKDRLHEPGTSLSGGQQQRLCIARAIAVNPDIILMDEPCSALDPIATATIEELIDELKNKYTIVIVTHSMQQAARVSQRTGFFHLGELVETGETQKIFTNPENEKTQGYITGRFG

SEQ ID NO: 175370 - protein, 76 aa, Unknown
  Bacterial polypetide isolated from the Sargasso Sea
MNNVKVSTKNVNVHYGTKQALHRVTLDINEKEVTALIGPSGCGKSTFLRCINRMNDLIDICKVDGSITVDNEEIIS

SEQ ID NO: 175371 - protein, 257 aa, Unknown
  Bacterial polypetide isolated from the Sargasso Sea
MPTARTTKARISVRGLNFHYGRRQALYDVNVDFPDREVTAIIGSSGCGKSTLLRVLNRMYSIYPEQKATGEVEMDGKNILDPQFKLNELRLKVGMVFQKPTPFTMSIYDNVALAITHHEVLTRSELDERVEFALRQAALWDEVKDKLDQSALALSGGQQQRLCIARALAIDPEVLLLDEPTSALDPIATGKIEDLLHALRKHYTVVIVTHNMQQAARVSEHTAFMHLGKLIEFGTTEQIFSKPNQKATEDYITGRFG

SEQ ID NO: 175372 - protein, 253 aa, Unknown
  Bacterial polypetide isolated from the Sargasso Sea
MSNIKIKSKNLDVFYGDKQALFDVNLDLNEKEVTALIGPSGCGKSTFIRCINRMNDVIDICKVTGNIEMDGMDINDKDLDVVALREKVGMVFQKPNPFPKSIYDNISYGPKIHGKGETKSELDEIVENSLRKSALWEEVKDRLDEPGTSLSGGQQQRLCIARAISVNPEVILMDEPCSALDPIATAKIEELIDELKKTYTIVIVTHSMAQAVRVSQKTGFFHLGKLIEVGKTEKIFKNPDNKMTQDYITGRFG

SEQ ID NO: 175373 - protein, 130 aa, Unknown
  Bacterial polypetide isolated from the Sargasso Sea
MTTSQLQTEQHQVSDDTAISIQNVTISYGSYEAVKNVYCDVPRGKVTAFIGPSGCGKSTVVRALNRMNDLIEGCSLKGRVLFDGVDLYGASVDPVEVRRRIGMVFQQPNPFPQEHLREHCLRCPDQRFHR

SEQ ID NO: 175374 - protein, 156 aa, Unknown
  Bacterial polypetide isolated from the Sargasso Sea
MKTNNFDLANLSQNDTALEIRNLDLRYGDKQALFNVSMKIPKKQVTAFIGPSGCGKSTLLRCINRMNDLVDNCHIDGEILLHGQNIYDKKIDVAALRRNVGMVFQRPNPFPKSIYENVVYGLRLQGINHRRELDEAAERSLRGAAIWDEVKDRLHD

SEQ ID NO: 175375 - protein, 253 aa, Unknown
  Bacterial polypetide isolated from the Sargasso Sea
MKNIKIKADNLNVHYGEKQALFDVSMYMEEKQVTALIGPSGCGKSTFIRCLNRMNDVIDICKVQGKIEIDGNDIYAPDMQVEQLRERVGMVFQKPNPFPKSIFENVAYGPRIHGIAEHKSDLEEIVVNSLKKAALFDEVKDRLYDAGTGLSGGQQQRLCIARAISVNPDIILMDEPCSALDPIATARIEELMGDLKTEYTIIIVTHSMQQAARVSSRTGFFHLGKLVEVDKTETIFSNPSDQRTQDYITGRFG

SEQ ID NO: 175376 - protein, 271 aa, Unknown
  Bacterial polypetide isolated from the Sargasso Sea
MIIPSETDDNFETVGQTTVDNPKISARNVTVSYGSKTAIKNVSIDIAQNEVLAMIGPSGCGKSTFLRCLNRMNDSIDICKVSGEILLDDQNILDKKIDVVPLRARVGMVFQKPNPFPKSIYDNVSYGPKIHGLANNKEELDEIVVTSLEKAGLFDEVKDRLNEPGTGLSGGQQQRLCIARTIAVSPEVILMDEPCSALDPIATAKVEDLINELKENFSIVIVTHAMQQAARVSQRTAYFHLGDLVEVGPTDKIFTTPSHRLTESYITGRFG

SEQ ID NO: 175377 - protein, 254 aa, Unknown
  Bacterial polypetide isolated from the Sargasso Sea
MSPEQTALEVKDLNLYYGNKQALFNVNMKIPKGQVTAFIGPSGCGKSTLLRCINRMNDLVEICRIEGEIQLHGHNIYDKSVDVSALRRQVGMVFQRPNPFPKSIYENVVYGLRLQGINDRRTLDEAAERSLRGAALWDEVKDRLHDNAFGLSGGQQQRLVIARAIAIEPEVLLLDEPTSALDPISTLTIEELINELKSQFTVVIVTHNMQQAARVSDQTAFMYMGELIEYSDTNTIFTTPAKKKTEDYITGRYG

SEQ ID NO: 175378 - protein, 288 aa, Unknown
  Bacterial polypetide isolated from the Sargasso Sea
MQSLPEEPPKANEGEKSDLPDNINPDTLQSTRELHIDGEAQIEVKDLNLRYGSAQALFDVSIPIEKNSVTSLIGPSGCGKSTLLRCLNRMNDLIPICNFDGSIVYDGEDINKSGTDLVRLRRKIGMVFQKPNPFPKSVFDNVSYGVQLHYNPSRRKMNEIVEKSLTSAALWGEVSDRLHELGTSLSGGQQQRLCIARTIAVEPDVILMDEPCSALDPIATAKIEDLITQLKEHFTVVIVTHSMSQAMRVSDYTAFMFLGRLIEFDKTDKIFNNPGNELTDRYISGRFG

SEQ ID NO: 175379 - protein, 255 aa, Unknown
  Bacterial polypetide isolated from the Sargasso Sea
MTQEKLKISVKNLNVHYGSKQALYNVNLNIFENEVTSLIGPSGCGKSTLIKCFNRMNDLVDICRVDGQIIIDGQNINDHDTDPVLLRTKVGMVFQKPNPFPKSVYDNVAYGPKLHGMTGNKRELDELVIKSLQKAGLFDEVKDRLFEPGTGLSGGQQQRLCIARALAVNPEILLMDEPCSALDPIATAKIEELINELKQKYTIVIVTHSMQQAARVSNRTAYMHMGELIESGLTKTIFSNPEHVKTQDYVTGRIG

SEQ ID NO: 175380 - protein, 123 aa, Unknown
  Bacterial polypetide isolated from the Sargasso Sea
KKAGLFDEVKDRLNEPGTSLSGGQQQRLCIARAIAVNPEIILMDEPCSALDPIATAIIEELIDELRLNYTIVIVTHSMQQAARVSQKTSFFHLGELIETGDTKKIFTNPDNSKTQDYITGRFG

SEQ ID NO: 175381 - protein, 58 aa, Unknown
  Bacterial polypetide isolated from the Sargasso Sea
MPKITAENINVFYDEVHALKDVSVEIEQNAVTAFIGPSGCGKSTFLRCLNRMNDTIDI

SEQ ID NO: 175382 - protein, 264 aa, Unknown
  Bacterial polypetide isolated from the Sargasso Sea
MKTNNFDLANLSQNDTALEIRNLDLRYGNKQALFNVSMKIPKKQVTAFIGPSGCGKSTLLRCINRMNDLVDNCHIDGEILLHGQNIYDKKIDVAALRRNVGMVFQRPNPFPKSIYENVVYGLRLQGINNRRELDEAAERSLRGAAIWDEVKDRLHDNAFGLSGGQQQRLVIARAIAIEPEVLLLDEPTSALDPISTLTIEELITELKTKYTVVIVTHNMQQAARVSDQTAFMYMGELVEYADTNTIFTTPKKRKTEDYITGRYG

SEQ ID NO: 175383 - protein, 282 aa, Unknown
  Bacterial polypetide isolated from the Sargasso Sea
MNMAESHLNPVERTAAPAGTQEAAHGRPLEPLNAKIEVNNLNFFYNKFHALKNINLSIPEGKVTAFIGPSGCGKSTLLRTFNKMFALYPEQRAEGEILMDGENLLTTKRDISLLRARIGMVFQKPTPFPMSIYDNIAFGVKMFEKLTRSEMDDRVEWALTKAALWNEVKDKLNQSGYGLSGGQQQRLCIARGIAIRPEVLLLDEPCSALDPISTGRIEELIAELKSDYTVVIVTHNMQQAARCSDFTAYMYLGELIEFGETEKIFIKPVRKETEDYITGRFG

SEQ ID NO: 175384 - protein, 151 aa, Unknown
  Bacterial polypetide isolated from the Sargasso Sea
NVAFGARINGYKGNMDELVRSSLEQAALWDEVSDKLSESGLALSGGQQQRLCIARAIAVRPEVILMDEPCSALDPIATQRIEDLIRELRNTFTIVIVTHNMQQAARVSDKTAFMLAGEERIGRLVEFSPTQELFTNPSDSRTEDYITGRFG

SEQ ID NO: 175385 - protein, 207 aa, Unknown
  Bacterial polypetide isolated from the Sargasso Sea
FLRCLNRMNDVIDICKVEGEIKINDYNINQKGTDVVRLREKIGMVFQKPNPFPKTLYENISYGPEIHGMAQSKDELDQIVEDSLKKAALWNEVKDRLNEPGTGLSGGQQQRLCIARAISVKPEVILMDEPCSALDPIATAQIEELIDELKKEHTIVIVTHSMSQAARVSQQTGFFHLGKLIEVGSTDKIFKNPDQQQTQDYITGRFG

SEQ ID NO: 175386 - protein, 135 aa, Unknown
  Bacterial polypetide isolated from the Sargasso Sea
RRELDEAAERSLRGAAIWDEVKDRLHDNAFGLSGGQQQRLVIARAIAIEPEVLLLDEPTSALDPISTLTIEELITELKTKYTVVIVTHNMQQAARVSDQTAFMYMGELVEYADTNTIFTTPKKRKTEDYITGRYG

SEQ ID NO: 175387 - protein, 207 aa, Unknown
  Bacterial polypetide isolated from the Sargasso Sea
LLRTINRMHDLTKGAEVTGKIIIDGENVYDSHINPILQRRKIGMVFQKPNPFPTMSIWDNVAAGLKLNGVKNKNVLGEIIEDSLKMAYLWDEVKDELKKPAVALSGGQQQRLCIARALAIQPEVLLMDEPASALDPIATQKIEQTIIELKKHYTIIIVTHNMQQALRVSDRTGFMYLGDLVEYDKTETVFKNPKKELTANYVQGRFG

SEQ ID NO: 175388 - protein, 218 aa, Unknown
  Bacterial polypetide isolated from the Sargasso Sea
LIGPSGCGKSTFLRCLNRMNDVIEICRVEGSIKMDNLELNSRKLDVVRLRESVGMVFQKPNPFPKTIYENVAYGPTIHGIAQSKEEMDQIVETSLKKAALWNEVKDRLDEIGTGLSGGQQQRLCIARAISVSPEVILMDEPCSALDPIATAQIEELIDDLKKEVTIVIVTHSMSQAARVSQKTGFFHLGKLIEFGPTDKIFKNPDNQQTQDYITGRFG

SEQ ID NO: 175389 - protein, 313 aa, Unknown
  Bacterial polypetide isolated from the Sargasso Sea
MYKCFICTFMSKNPEFVKFDKVDKSYDGKVLVVKDLQLDIAEGEFITMLGPSGSGKTTCLMMLAGFETPTHGEILLDGNIISNIPPHKRGIGMVFQNYALFPHMTVYENLAFPLRVRKVEKDEIDKKVDKALSMVSLNGFETRMPAQLSGGQQQRVAVARALVFDPAVVLMDEPLGALDKNLRESMQYEIKHIHESIGVTVVYVTHDQSEALTMSNRIAVFNDGKVQQLSNPAELYEKPVNSFVAEFIGENNTFNGEVVDIDKDKCKVKLANSEILANPISVKSKGEKTTVSLRPERALINPTDKMDNMFTGK

SEQ ID NO: 175390 - protein, 255 aa, Unknown
  Bacterial polypetide isolated from the Sargasso Sea
MLKTINLKKVYPNGEEALKGINLDIPNGQVVALIGPSGAGKSTFIRTINRLVEPTSGKVYFADEKNDITSLNKSKLRKTRRQIGMIFQEFALVERLSVMENVLSGRLGYVGFWNSFFRKFPQKDIEEAFRLLQRIGLEHMLDKRADELSGGQRQRVGIARALIQNPMLLLVDEPTASLDPKNSRQIMRLICELCKERDLAAIINIHDVFLAQNFAERIIGLKAGEIVYDGKPSGLSETILTNIYGEEDWSKTVAN

SEQ ID NO: 175391 - protein, 67 aa, Unknown
  Bacterial polypetide isolated from the Sargasso Sea
SRVDKLSGGQQQRVGIARALAQQPAIILADEPVASLDPATSVRVLGLLRDICKEDGITAIVSLHQLE

SEQ ID NO: 175392 - protein, 216 aa, Unknown
  Bacterial polypetide isolated from the Sargasso Sea
MIDLEIKDLKKSFGSEFVLKGLSFSVNSQSLLAIIGSNGAGKSTLLRCCSRLIEPSSGSIKIFDKEITTLNSHKLGQIRRDVAFIFQRHNLVPRLSVLSNVIHGDFGNITSGIIRVTRWFHFLAPQNSRSRAMDCLRKVNLSHLAMKRVDSLSGGQSQRVAIARALMQRPKLLLADEPVASLDPVAAKTVMELLTELCKKEKITVIFTSHNVEDAV

SEQ ID NO: 175393 - protein, 265 aa, Unknown
  Bacterial polypetide isolated from the Sargasso Sea
RMINRLEEPSGGRLLIGGEDVTALDADGLRALRRRIGMIFQHFNLLSSRTVAGNVAFPLELAGTPKAEIDARVAELLQTVGLEAHAQKYPAQLSGGQKQRVGIARALATRPQILLCDEATSALDPQTTASVLSLLSKINRELGLTIVLITHEMDVIRRVCDRVAVLDAGQMVETGPVTRVFLHPQHPTTRRFVSESEHVDEGALHRDFDAVGGRIVRLTFLGGDTYEPLLGSVARETGVDYNILSGRIDRIKDTPYGQLVVALVG

SEQ ID NO: 175394 - protein, 194 aa, Unknown
  Bacterial polypetide isolated from the Sargasso Sea
MGPSGSGKSTLMNIIGCLDTPTHGTYQFEGELVHQMDDDQLASIRNRKIGFVFQTFNLLPKSTALRNVEVPLIYSNIPKVKRLEMARNSLISVGLEDRLDHKPNELSGGQRQRVAIARALVNNPSIILADEPTGNLDSKSGIEIMKILNDLHHKGNTIILVTHEKEIAMHANRIITIFDGKIKEDRSNIKTVAV

SEQ ID NO: 175395 - protein, 227 aa, Unknown
  Bacterial polypetide isolated from the Sargasso Sea
ISFDVAENDFVAIIGPSGAGKSTLIRCINRLVEPSSGSIIFKGQNITNMSKSELRRVRRDIGMIFQEFNLINRMSVMDNLLSGRLGYIGNIRTLFKAYPRKDIDRAIELLERVGLIDHIDKRADELSGGQRQRVGIARALMQEPELLLLDEPTSSLDPKISREIMTLVKEMAFELRVPCLCNIHDVQLATEFCNKIVGIQEGTKMFEGDPNKLSEEKLNEIYAMEVL

SEQ ID NO: 175396 - protein, 213 aa, Unknown
  Bacterial polypetide isolated from the Sargasso Sea
MKLEKDRDVLSLKGVSVRYVDSTVALHPTSLDVKQGEFLVLLGASGAGKSTLLRSINGLVLPTKGEVSIPGLAGGVVNAKTLREHRKRCGMVFQQHHLIGRQSVLRNVLMGKLGDRGAFASLWPWSKKDKLEALTVIERVGLLEKALSRADALSGGQQQRVGIARALIQKPRILLADEPVASLDPATAHSVLTLLHEICKKDHLTAIVSLHQV

SEQ ID NO: 175397 - protein, 96 aa, Unknown
  Bacterial polypetide isolated from the Sargasso Sea
MKSDWPNRFDHFPAQLSGGEQQRVAIARALAVEPKIILADEPTGNLDQNTGSKIIELLFRLSEKNKSSLVVVTHSVTLARQCDRIVELIDGNTVEK

SEQ ID NO: 175398 - protein, 179 aa, Unknown
  Bacterial polypetide isolated from the Sargasso Sea
MTVIVFDQVQKSYQVAGRAIPALHATSMTIETGEVFGIVGHSGAGKSTLVRLINMLEPATGGRILIDNEDITRYSAAELRAFRRKVGMIFQHFNLLSSKTVADNIAFPMKLAGIYSKTEIRERVEELLARVSLSEHANKYPSQLSGGQKQRVGIARALACRPTILLCDEATSALDPQTT

SEQ ID NO: 175399 - protein, 190 aa, Unknown
  Bacterial polypetide isolated from the Sargasso Sea
SIIFKGQNITNMSKSELRRVRRDIGMIFQEFNLINRMSVMDNLLSGRLGYIGNIRTLFKAYPRKDIDRAIELLERVGLSDHIDKRADELSGGQRQRVGIARALMQEPELLLLDEPTSSLDPKISREIMNLVKEMAFELRVPCLCNIHDVQLATEFCNKIVGIQEGTKMFEGDPNKLSEEKLNEIYAMEVL

SEQ ID NO: 175400 - protein, 113 aa, Unknown
  Bacterial polypetide isolated from the Sargasso Sea
KKERRLEMASNALIIVGLGDRMHHRPNELSGGQRQRVAIARALVNEPSIILADEPTGNLDSKSGHEIMKIFDELHKSGNTIILVTHEDDIAKYSNRIVRLLDGKVVSDKPVKK

SEQ ID NO: 175401 - protein, 217 aa, Unknown
  Bacterial polypetide isolated from the Sargasso Sea
KIYNVGGEEVRALDGVDLTIKNNEYLAIMGRSGSGKSTMMNMIGCLDTPTSGIYHFEGEEVHIMDDAQLASIRNRKIGFVFQTFNLLPKASALNNVEIPLVYANIRKEKRIEMASKALKDVGLEDRMHHKPNELSGGQRQRVAIARALVNNPSIILADEPTGNLDSKSGHEIMGILDHLHSKGNTIILVTHEDDIAKHAKRTIRLFDGKIIEDDKGK

SEQ ID NO: 175402 - protein, 206 aa, Unknown
  Bacterial polypetide isolated from the Sargasso Sea
MIKLKNVNVIYPTGTHAMKDVSLDINEGDFLVIVGKSGAGKSTLLRTLNGLVKTTSGSINIFDKEVTTSSKRELREIRSKTGMIFQTFNLVTRTTVFNNVLTGRLGEMSTLRGFFGLWSDEDKKIAMDALKEVEIEEKAWTRASKLSGGQQQRVGIARALTQKPKLVLADEPVASLDPVTSRKVMDYIKKINVELGITTNCKSTLP

SEQ ID NO: 175403 - protein, 96 aa, Unknown
  Bacterial polypetide isolated from the Sargasso Sea
EDRMYHRPNELSGGQRQRVAIARALVNDPSIILADEPTGNLDSKSGDEIMNILDNLFSRGNTIILVTHEEYIAKHAHRIINIFDGKIKEDKVVKKK

SEQ ID NO: 175404 - protein, 208 aa, Unknown
  Bacterial polypetide isolated from the Sargasso Sea
KYQTGKKNINVLKDINLTIKKKETVSVVGESGSGKTSLIMLIGGLERPTSGKIIFQDKEITNLNEDKVSEIRKKNIGIIFQSFYLIPNYNAVENVALTLELNQFKNPEKEAKLLLERFGLKHRLNNLPSQLSGGEQQRVAIARAIAMKPVLILADEPTGNLDTENSVMISDILFKYVKEEGSSLIMVTHDPKLANKAKRKIKIKDGKI

SEQ ID NO: 175405 - protein, 131 aa, Unknown
  Bacterial polypetide isolated from the Sargasso Sea
PRASALDNVALPLVYAGYKKEIRDSMAMKALKSVDLTNRATHKPNELSGGQRQRVAIARALVNKPSIILADEPTGNLDSKTSEGIMDLFSKLHDAGNTIIMVTHENDIAAYSKRIVRLMDGNIESDKKNIN

SEQ ID NO: 175406 - protein, 227 aa, Unknown
  Bacterial polypetide isolated from the Sargasso Sea
MELINLSDIYKIYNVGGEEVRALDGVDLTINNNEYLAIMGPSGSGKSTLMNMIGCLDTPTSGIYQFEGEEVHIMDDAQLASIRNRKIGFVFQTFNLLPKASALHNVEIPLVYANIRKERRIDMASKALKDVGLGDRMHHKPNELSGGQRQRVAIARALVNNPSIILADEPTGNLDSKSGHEIMGILDNLHLKGNTIILVTHEDVIAKRAKRIIRLFDGKIIEDEISK

SEQ ID NO: 175407 - protein, 97 aa, Unknown
  Bacterial polypetide isolated from the Sargasso Sea
LHIVGLQDRMTHKPNELSGGQRQRVAIARALVNKPSIILADEPTGNLDSKSGNEILKFFSKLHKDGNTIIMVTHEESVAKLSKRRIDIFDGKIARDE

SEQ ID NO: 175408 - protein, 229 aa, Unknown
  Bacterial polypetide isolated from the Sargasso Sea
KGISFDVAENDFLAIIGPSGAGKSTLIRCINRLVEPTSGQIYFHGQDVTKLTFRELRKVRRGIGMIFQEFNLIDRMSVMDNLLSGRLGFTGNVRTLFKAFKRQDIESALKLLERVGLSDQVDKRADELSGGQRQRVGIARALMQEPKLLLLDEPTSSLDPKISREIMNLVKEMAFELKVPCLCNIHDVQLAMDSCNKIIGIQEGIKMFEGVPESLNKEKLQEIYAMEVL

SEQ ID NO: 175409 - protein, 231 aa, Unknown
  Bacterial polypetide isolated from the Sargasso Sea
MIEFKNVSVVYPGGVNALNNVSLNIDEGDFVIIVGMSGAGKSTLLRTVNNLVKPTDGNVFIDSQNVTSASKKELKKIRSDIGMIFQTFNLVNRSSVLKNVLTGRLSQVSTLRSVFGLWPKNDKDIAFESLNKVGILEKAYVRGSNLSGGQQQRVGIARALAQKPKVMLADEPVASLDPITSRVVMKYLKEINQELGITTICNLHFLDLAKEFGETIIGLKDGELVYDGKVD

SEQ ID NO: 175410 - protein, 167 aa, Unknown
  Bacterial polypetide isolated from the Sargasso Sea
VTRTTVFNNVLTGRLGEMSTLRGFFGLWSDEDKKIAMDALKEVEIEEKAWTRASKLSGGQQQRVGIARALTQKPKLVLADEPVASLDPVTSRKVMDYIKKINVELGITTIVNLHFLDLAKDYAERIIGMYDGKIVYDGMVDDITDADFEKIYGGQLTEEDYNETRTN

SEQ ID NO: 175411 - protein, 183 aa, Unknown
  Bacterial polypetide isolated from the Sargasso Sea
GKSTLLNILGLLDLPNCGQYHFAGHDIFNATPDELAAIRNQQIGFVFQSFNLLPRLSALDNVALPLSYRGVSRHESVEHAQRMLAQVGLAERAHHRPADLSGGQRQRVAIARALVGKPSVILADEPTGNLDSTTAQEIMDLLLNLNRDQQVTLIIVTHDPHIAERLERKILVCNGVVHEAGRP

SEQ ID NO: 175412 - protein, 232 aa, Unknown
  Bacterial polypetide isolated from the Sargasso Sea
MEVKEILISLNNVYKIYNVGGEEVRALDGIDLKINENEYLAIMGPSGSGKSTLMNMIGCLDTPSSGVYQFEGEMVQEMNDDQLASIRNRKIGFIFQTFNLLPKATAQHNVEIPLIYGNVRKIKRVNLSKEALDSVGLSDRMQHKPNELSGGQRQRVAIARALVNSPSIILADEPTGNLDSKSGQEIMGILDQLHQKGNTIILVTHEDEIAQHAHRIIRLFDGKITEDSEIKN

SEQ ID NO: 175413 - protein, 189 aa, Unknown
  Bacterial polypetide isolated from the Sargasso Sea
IYFHGQDITQLSHRELRKIRRGIGMIFQEFNLIDRMSVMDNLLSGRLGFTGNMRTLFKAFKRQDIDSALKLLERVGLSDQVDKRADELSGGQRQRVGIARALMQDPKLLLLDEPTSSLDPKISREIMNLVKEMAFELKVPCLCNIHDVQLAMDSCNKIIGIQEGTKMFEGTPESLNKEKLQEIYAMEVL

SEQ ID NO: 175414 - protein, 144 aa, Unknown
  Bacterial polypetide isolated from the Sargasso Sea
FPFPEADRRLALDCLDRVGLLTRALQPVYNLSGGQQQRVGIARAIAQQPNLILADEPVASLDPETAHRVLGMLHEITKQDDIPTIVSLHQVELAKAFADRIIGLNDGEVLFDGPPDELDEAVLDRIYDRPNNVELDAYTSEAAE

SEQ ID NO: 175415 - protein, 171 aa, Unknown
  Bacterial polypetide isolated from the Sargasso Sea
IRRGIGMIFQEFNLIDRMSVMDNLLSGRLGFTGNIRTLFKVFKREDIDSAIQLLERVGLSDQVNKRADELSGGQRQRVGIARALMQDPKLLLLDEPTSSLDPKISREIMNLVKEMAFELKVPCLCNIHDVQLAMDSCNKIIGIQEGTKMFEGTPESLNKEKLQDIYAMEVL

SEQ ID NO: 175416 - protein, 219 aa, Unknown
  Bacterial polypetide isolated from the Sargasso Sea
MALIQTRELWKTYKMGSELVHALQGLSVDVERGEFVAIMGPSGSGKSTLMNLIGCLDTPSRGTYLLNGHDVSQMEDDALARIRNREIGFVFQTFNLLPRASALQNVELPLIYSGVPAAERKVRAIEALGLVELEDRMDHRPNELSGGQRQRVAIARALVNKPSIILADEPTGNLDSKTGVELMSVFSRLHREGNTIVLITHESDVASHAHRIISLRDGL

SEQ ID NO: 175417 - protein, 174 aa, Unknown
  Bacterial polypetide isolated from the Sargasso Sea
CTLNNVLTGLLGNNNSYYSVFYLFNRKQKMIALEALDQVGLLSRAYTRTDRLSGGQQQRVGIARAIVKSPQLLLADEPVASLDPKISYQILSLLKDISISQDIAVLCNLHQVDFALRFADRIIGLAEGRLVMDKPIKEIDGEYIRQIYQGHDQGLFFGPNMTQSWADDFIRYSA

SEQ ID NO: 175418 - protein, 199 aa, Unknown
  Bacterial polypetide isolated from the Sargasso Sea
MLQINRLTKDFGAVKAVNDLTVAIPTGQMVGIIGRSGAGKSTLLRILNRMTDATEGEVIVDGEDILAHRGKAKLAWQKNCAMIFQQFNLVSRLDVLTNVILGRLNDQSVLRACLKLFTAEERLEALTLLDRFGVAPTALQRAETLSGGQQQRVAICRAMMQKPSIILADEPIASLDPLNARLVMESLQTINKEESLTVV

SEQ ID NO: 175419 - protein, 189 aa, Unknown
  Bacterial polypetide isolated from the Sargasso Sea
GKSTLMNMIGCLDTPTEGTYEFEGELVHEMDDDQLASIRNRKIGFVFQTFNLLPKATALRNVEVPLIYSNISKSKRLKMASDSLVSVGLEDRLDHKPNELSGGQRQRVAIARALVNNPSIILADEPTGNLDSKSGIEIMKILHELYTNGNTIILVTHEEDIAMHAKRIITIFDGKIKEDKINKKMTKAL

SEQ ID NO: 175420 - protein, 217 aa, Unknown
  Bacterial polypetide isolated from the Sargasso Sea
TGKVISAELGALETRSTVRRHRCKTAMVFQHHQLIERHTALQNVLTGRLAYHSTWRSLFPLPRQEQALALHCLDRVGMAEKALTRVDQLSGGQQQRVGIARALAQQPAMILADEPVASLDPATSERVLTLLRDICREDGITAIISLHQLEYAQRFADRIIGLANAQIVFDAAPSQLQQRHLNEIYHGTRGAVTDAAETTEPNPQTTTPSPIKLEIAQ

SEQ ID NO: 175421 - protein, 262 aa, Unknown
  Bacterial polypetide isolated from the Sargasso Sea
MIIKKVNKFFGDNHAVKNVSFEVNKPQMIGIIGRSGAGKSTLLRIINRLTDATDGSIEIEGQNILDLKSKEKRSWQRNCAMIFQQFNLVPRLDVLTNVILGRLNYQGSFRASLKMFSRDERADALILLNNLGMANTALQRAETLSGGQQQRVAICRALMQNPKMILADEPIASLDPMNARMVMESLRKIHDEKNLTVISNLHTLDTAKTYCDRIIGMKDGEIVFDDLPEKLSDKLAREIYGAEADEAFEPQVTSTELKTKKK

SEQ ID NO: 175422 - protein, 255 aa, Unknown
  Bacterial polypetide isolated from the Sargasso Sea
MIDLEIKDLKKSFGSEFVLKGLSFSVNSQSLLAIIGSNGAGKSTLLRCCSRLIEPSSGSIKIFDKEITTLNSHKLSQIRRDVAFIFQRHNLVPRLSVLSNVIHGDFGNITSGIIRVTRWFHFLAPQNSRSRAMDCLRKVNLSHLAMKRVDSLSGGQSQRVAIARALMQRPKLLLADEPVASLDPVAAKTVMELLTELCKKEKITVIFTSHNVEDAVKYSDKVLALKEGEISFLRASKALDPKELIEQYDSSVRNV

SEQ ID NO: 175423 - protein, 236 aa, Unknown
  Bacterial polypetide isolated from the Sargasso Sea
IIMPDLISLTNIKRHYDVGGEIVRALDGVDVKIKQNEYISIMGPSGSGKSTLMNMIGCLDTPTEGNYEFGGELVHEMDDDQLASIRNRKIGFVFQTFNLLPKATALRNVEVPLIYSNIPKEERLEMANKALVSVGLGDRVDHKPNELSGGQRQRVAIARALVNNPSIILADEPTGNLDSKSGIEIMKILDELHSKGNTIILVTHEEDIANHANRIITIFDGRVKDDLINNNKMEVA

SEQ ID NO: 175424 - protein, 82 aa, Unknown
  Bacterial polypetide isolated from the Sargasso Sea
SGGQRQRVAIARALVNDPSIILADEPTGNLDSKTSYSIMDLFSLLHEKGNTIIMVTHEEDIAKYSKRVVRLKDGLISSDKKK

SEQ ID NO: 175425 - protein, 96 aa, Unknown
  Bacterial polypetide isolated from the Sargasso Sea
LADRLHHKPNELSGGQRQRVAIARALVNKPSIILADEPTGNLDSKSGSEIMTILDDLHKNGNTIILVTHEDDVAQHAHRIIRLFDGKIIEDSKQAP

SEQ ID NO: 175426 - protein, 195 aa, Unknown
  Bacterial polypetide isolated from the Sargasso Sea
MSILEVKDLCASYSSSGPEILKGISFDVAENDFLAIIGPSGAGKSTLIRCINRLVEPTSGQIYFRGQEVTKLTLRELRKVRRSIGMIFQEFNLIDRMSVMDNLLSGRLGFTGNLRTLFKAFKRKDIESALKLLERVGLSDQVDKRADELSGGQRQRVGIARALMQEPKLLLLDEPTSSLDPKISREIMNLVKEMA

SEQ ID NO: 175427 - protein, 202 aa, Unknown
  Bacterial polypetide isolated from the Sargasso Sea
QNEYISIMGPSGSGKSTLMNMIGCLDTPTEGTYEFEGELVHEMDDDQLASIRNRKIGFVFQTFNLLPKATALRNVEVPLIYSNISKSKRLKMASESLISVGLEDRLDHKPNELSGGQRQRVAIARALVNNPSIILADEPTGNLDSKSGIEIMKILHELYTNGNTIILVTHEEDIAMHAKRIITIFDGKIKEDKINKKMTKAL

SEQ ID NO: 175428 - protein, 255 aa, Unknown
  Bacterial polypetide isolated from the Sargasso Sea
MIDLEIKDLKKSFGSEFVLKGLSFSVNSQSLLAIIGSNGAGKSTLLRCCSRLIEPSSGSIKIFDKEITTLNSHKLGQIRRDVAFIFQRHNLVPRLSVLSNVIHGDFGNITSGIIRVTRWFHFLAPQNSRSRAMDCLRKVNLSHLAMKRVDSLSGGQSQRVAIARALMQRPKLLLADEPVASLDPVAAKTVMELLTELCKKEKITVIFTSHNVEDAVKYSDKVLALKEGEISFLKASKAIDPTELIEQYDSSVRNV

SEQ ID NO: 175429 - protein, 296 aa, Unknown
  Bacterial polypetide isolated from the Sargasso Sea
SSARRPTSGSVLVDGQEMTGLRRRELNHARHRIGMIFQHFNLLTTRTVFDNVALPLELMGEKRSTIKNRVLPLLEMVGLADKAKQYPAQLSGGQKQRVAIARALASKPNVLLCDEATSALDPQTTSSILELLRDINHQLGITILLITHEMEVVKSICHRVSLISDGKLVEDAEVGDFFTAPATQLGRDFLNDFLQLSPPKELLERLEESPSEHTHPVVRLTFSGDAVSTPLISRLARECSVDVSILQAKVESIQDRTLGLMIAELLGSHEQTQQAMSYLAAHQLQVEVLGHVQRNV

SEQ ID NO: 175430 - protein, 185 aa, Unknown
  Bacterial polypetide isolated from the Sargasso Sea
IFQQFNLVPRLDVLTNVILGRSNIQGTIRSSLKLFTKDERIDALMALDKLGMAETALQRAETLSGGQQQRVAICRAMMQQPKMILADEPIASLDPLNARLVMESLRNIHREKKITVLANLHTLDTAKNYCDRIIGMRLGEIVFDDVPSSLKDDVAREIYGAEAEEAFEPTVTSTSLGDEKFAEAG

SEQ ID NO: 175431 - protein, 138 aa, Unknown
  Bacterial polypetide isolated from the Sargasso Sea
LHLLPRTTATENVEVPLLYSRPLMSAAERREKAAEALDLMKLSDRASHHPNQLSGGQQQRVAIARALVNKPDLILADEPTGNLDTATGKEVMQTLVKLREERGITIVLITHEIEIASYGSRIVSIRDGKIISDEKNVV

SEQ ID NO: 175432 - protein, 172 aa, Unknown
  Bacterial polypetide isolated from the Sargasso Sea
DLPTFNLVNRSTVLKNVLTGRLSTISTFRSIFGLWPKDQKQLAFEALDQVEILEKAYVRASNLSGGQQQRVGIARALSQKPKVMLADEPVASLDPITSRVVMNYLKKINTELGITTIVNLHFLDLAKEFGDRLIGLRDGKLVFDGNVDGVSDEDFENIYGRSIKSSDLIGND

SEQ ID NO: 175433 - protein, 182 aa, Unknown
  Bacterial polypetide isolated from the Sargasso Sea
LKNIRSQIGMIFQTFNLVNRSTVLKNVLTGRLSTISTFRSIFGLWPKDQKQLAFEALDQVEILEKAYVRASNLSGGQQQRVGIARALSQKPKVMLADEPVASLDPITSRVVMNYLKKINTELGITTIVNLHFLDLAKEFGDRLIGLRDGKLVFDGNVDGVSDEDFENIYGRSIKSSDLIGND

SEQ ID NO: 175434 - protein, 163 aa, Unknown
  Bacterial polypetide isolated from the Sargasso Sea
RLTVMENVLIGALGSTPFWRTCFSWFTAEQKQRALQALTRVGMAHFAYQRVSTLSGGQQQRVAIARALMQQAKVILADEPIASLDPESARIVMDTLRDINQTDGITVVVTLHQVDYALRYCERIVALRQGNVFFDGSSQHFDNDRFDHLYRSMNRVEQNAQAA

SEQ ID NO: 175435 - protein, 270 aa, Unknown
  Bacterial polypetide isolated from the Sargasso Sea
MFRAQNIVKNFGQVKAVDGVSFAVAKPEMIGIIGRSGAGKSTLLRVINRLTDATSGAITYGDQELLSLRGKNKRAWQARCAMIFQQFNLVPRMDVVSNVLFGTLNARSTFASLLNLFPKSDINKAIDILERLGVAENCTKRAEALSGGQQQRVAIARALMQNPEIILADEPIASLDPLNAKIVMESLRRIHDEDGRMVICNLHTLDTARAFCDRVIGMRDGKIVFDGPASDLSAAVARDVYGADKEFSEAATSTSIEALEMSDRAILKTA

SEQ ID NO: 175436 - protein, 227 aa, Unknown
  Bacterial polypetide isolated from the Sargasso Sea
MIKINSLSKEYIMGDNKLLALDDVSVSINAGEFVSIMGSSGSGKSTLMNIIGCLDIPSRGEYFFRDYNISSLNSNRLAEIRNKEIGFVFQNFNLLPRLNALENVILPLLYSGRNFKERNKLALEALEGVGLHDRKNHRPNQLSGGQQQRVSIARAIAGFPKLILADEPTGALDSKTSLEIMKILNDLNSKGITIVLVTHEDDIANYGSRIIKMKDGKIIEDKKNVTN

SEQ ID NO: 175437 - protein, 259 aa, Unknown
  Bacterial polypetide isolated from the Sargasso Sea
MLKINNLTKKFGSNIAVNSVSIEVGKPIMLGIIGASGAGKSTLLRMINRLETETSGNISFEGLSISDLKGAAISRWQSNCAMIFQQFNLVPRMDVVSNVLHGTLNKRSTFTTFFNLYPKSDINTAIEILGRLGVAEHAAKRAEAISGGQQQRVAIARALMQDPKIILADEPIASLDPMNAQIVMETLRRIHDEDGRTVIANLHTLDTARKYCDRVIGMRNGHLVFDGTPSELTTEVARKVYGAGSDFSEAATSTEIRVA

SEQ ID NO: 175438 - protein, 273 aa, Unknown
  Bacterial polypetide isolated from the Sargasso Sea
RAAIRVDRLNKSFGRKQALFDLALSVQPGEMVALIGASGSGKSTLLRHLAGLARGDAGSIEVLGRQVQADGRLNGDVRRQRADIGYIFQQFNLVGRLSVMQNVLLGGLGRMPRWRGSLSLFNAEERQRAMQALERVGLAELAAQRASTLSGGQQQRVAIARALCQQAEVILADEPIASLDPESARKVMEILADINRCDGKTVVVTLHQVDYAVRYCQRAVALKGGRIHFDGPTESFNPDFLNDLYGGDLDISLLLPQGQRPRAVERPLTLAKA

SEQ ID NO: 175439 - protein, 237 aa, Unknown
  Bacterial polypetide isolated from the Sargasso Sea
MPSKSSKVVIGNSDLVHASGLNYVYGTGALKYHVLKDIDFVAKKGEVTLLIGPSGSGKSTLLTLMGALRSCQTGSLRVLDHELLGINEAQCVHIRRRIGFIFQSHNLVQALTAFENVELILRLKIHDFQQRKLRAYDLLDSVGLRQHLSSYPNELSGGQRQRVAIARALALEPDLILADEPTASLDRISGLEVIQLISEMCHQRGSGVVLVTHDLRLEQEADKIWSIEDGSINPVSL

SEQ ID NO: 175440 - protein, 250 aa, Unknown
  Bacterial polypetide isolated from the Sargasso Sea
MSILEVKDLCASYSSSGPEILKGISFDVAENDFLAIIGPSGAGKSTLIRCINRLVEPTSGQIYFRSQEVTKLSLRELRKVRRGIGMIFQEFNLIDRMSVMDNLLSGRLGFTGNIRTLFKAFKRKDIDNALKLLERVGLSDQVDKRADELSGGQRQRVGIARALMQDPKLLLLDEPTSSLDPKISREIMNLVKEMAFELKVPCLCNIHDVQLAMDFCNKIIGIQEGTKMFEGTPDSLNKEKLQEIYAMEVL

SEQ ID NO: 175441 - protein, 255 aa, Unknown
  Bacterial polypetide isolated from the Sargasso Sea
MIKFENVSVTYPGGVEALKNLDLEINEGDFLIIVGLSGAGKSTLLRTINNLVKPSNGVVFLDNKDITNANKKQLKQIRSEIGMIFQTFNLVNRSTVLKNVLTGRLSKVSTIRSIFGLWPKDQKQMAFEALNQVEILEKAYVRASNLSGGQQQRVGIARALSQKPKVMLADEPVASLDPITSRVVMSYLKKINKELGITTIVNLHFLDLAKEFGDRLIGLRDGELVYDGKVDDVSDEDFENIYGRSIKQSDLIGND

SEQ ID NO: 175442 - protein, 265 aa, Unknown
  Bacterial polypetide isolated from the Sargasso Sea
MIKLIGLNKVYGKGSDAVHALRDVSLHVPQGKIFGVIGASGAGKSTLIRCVNLLERPTEGQVIVDGQDLVALSERDLTQARRQIGMIFQHFNLLASRTVSANIAFPLELAGWSKEKIQQRVEELLALVGLEARAHAYPSELSGGQKQRVAIARALAPAPKVLLCDEATSALDPQTTRSILTLLKEINVKLGLTILLITHEMDVVKGICDEVAIISDGRLIEQGEVAWFFSNAKTQLARDFIHSTIHLGVPQEYQDRMSAERVPGS

SEQ ID NO: 175443 - protein, 173 aa, Unknown
  Bacterial polypetide isolated from the Sargasso Sea
MFPSSGEYHFRNNNVSTLNSNKLAELRNKDIGFVFQNFNLLPRLNATENVVLPLLYSGKNLKERNKLAIEALESVGLKDRVHHRPNQLSGGQQQRVSIARAIAGSPKLILADEPTGALDSKTGLEIMKILNDLNAKGITIVLVTHEDDIANYGSRIIKMKDGRILEDKQNVNN

SEQ ID NO: 175444 - protein, 267 aa, Unknown
  Bacterial polypetide isolated from the Sargasso Sea
MLKIINISKYFDQVKAVNNVTINVENSSMIGIIGRSGAGKSTLLRTINRLTDATSGEILFQDQNILDLKKKDKLAWQKNCAMIFQQFNLVPRLDVLTNVILGKLNEMSTVRASLKLFTSEERYAALNLLDKFGMIQTALQRAETLSGGQQQRVAICRAMMQDPKLILADEPIASLDPLNARLVMESLRKIHDEQNITVICNLHTLDTAKQYCDRIIGMQNGEIVFDDLPSKLTNQKAREIYGAEADEAFEGTMTSVSLESADIKKTA

SEQ ID NO: 175445 - protein, 256 aa, Unknown
  Bacterial polypetide isolated from the Sargasso Sea
MIKFENLSVTYPGGVEALKDINLEINEGDFLIIVGLSGAGKSTLLRATNNLVKPTKGNVYVDSKNVTTASKKELKNIRSDIGMIFQTFNLVNRSTVLKNVLTGRLSQISTIRSIFGLWPKDQKKLAFEALNQVEILEKAYVRASNLSGGQQQRVGIARALSQKPKVMLADEPVASLDPITSRVVMSYLKKINTELGITTIVNLHFLDLAKEFGDRLIGLRDGELVYDGKVSDVSDKDFENIYGRSIKSSDLIGEDD

SEQ ID NO: 175446 - protein, 257 aa, Unknown
  Bacterial polypetide isolated from the Sargasso Sea
MIKLKNVNVIYPTGTHAMKDVSLDINEGDFLVIVGKSGAGKSTLLRTLNGLVKTSSGSINIFDKEVTTSSKRELREIRSKTGMIFQTFNLVTRTTVFNNVLTGRLGEMSTLRGFFGLWSDEDKKIAMDALKEVEIEEKAWTRASKLSGGQQQRVGIARALTQKPKLVLADEPVASLDPVTSRKVMDYIKKINVELGITTIVNLHFLDLAKDYAERIIGMYDGKIVYDGMVDDITDADFEKIYGGQLTEEDYNETRTN

SEQ ID NO: 175447 - protein, 253 aa, Unknown
  Bacterial polypetide isolated from the Sargasso Sea
MNAIEVNHLSKSYADFEVLRDISFTIGVGESIAIIGSNGAGKSTLLKCLTRITEPSQGSINVFGDPILKFRTGALRRMRSSIGVVFQKHNLVPRLSVLTNVIHGDIGRLHNVSKFPLAGIRNWGQISASNRTRKKAMEALEMVSLSHLALQRADTLSGGQSQRVAIARALMQEPNMILADEPVASLDPVAANEVMSLFYDLCKNKNITLIFTSHNVEHALEYGNKVLAIKNGRLSLFKDSNSIEIKTLQAEYD

SEQ ID NO: 175448 - protein, 228 aa, Unknown
  Bacterial polypetide isolated from the Sargasso Sea
MTLISLKNIFKIYNVGGEEVRALDGIDLDILENEYLAIMGPSGSGKSTLMNMIGCLDTPTSGIYEFEGEMVQVMDDSQLASIRNRKIGFVFQTFNLLPKATAQHNVEIPLVYANIKNKDRAKMATDALESVGLADRLHHKPNELSGGQRQRVAIARALVNKPSIILADEPTGNLDSKSGSEIMTILDDLHKNGNTIILVTHEDDVAQHAHRIIRLFDGKIIEDSKQAP

SEQ ID NO: 175449 - protein, 270 aa, Unknown
  Bacterial polypetide isolated from the Sargasso Sea
MLELQDLSKKYNTGDEALKGVSLSIPKGQVLALIGPSGAGKSTLIRCINRLIEPTSGKVLHNGEDVTLMNSRRLRKTRRKMGMIFQEYALVERLTVMENVLSGRLGYVGFWRSYFRKFPQADFKEAFRLLARVGLEEMADKRADELSGGQRQRVGIARALIQNPEILLVDEPTASLDPKTSRQIMRLITELCEERQLAAIINIHDVGLAEMFAQRIVGLQKGATVYDGPNNGLNPEVLTKIYGEEDWTKKKKGTQNEDLEASSGSEKEVM

SEQ ID NO: 175450 - protein, 227 aa, Unknown
  Bacterial polypetide isolated from the Sargasso Sea
MDLINLSDIYKIYNVGGEEVRALDGVDLTINSNEYLAIMGPSGSGKSTMMNMIGCLDTPSSGIYHFEGEEVHIMDDAQLASIRNRKIGFVFQTFNLLPKASALNNVEIPLVYANIKKEKRIEMASKALKDVGLEDRMHHKPNELSGGQRQRVAIARALVNNPSIILADEPTGNLDSKSGHEIMGIFDHLHSKGNTIILVTHEDDIAKHAKRTIRLFDGKIVEDNKGK

SEQ ID NO: 175451 - protein, 232 aa, Unknown
  Bacterial polypetide isolated from the Sargasso Sea
MSAVIALNSVRKTYEMGDNSVHALDDVSLTVEQGEFVTVTGASGSGKSTLMHILGCLDKPTAGKYFLRGEDVSDLSPADLAVIRNKQIGFVFQGFNLLPRTTATENVEVPLLYSRPLMSAAERREKAGEALDLMKLSDRASHHPNQLSGGQQQRVAIARALVNKPDLILADEPTGNLDTATGKEVMQTLVKLREERGITIVLITHEIEIASYGSRIVSIRDGKIISDEKNVV

SEQ ID NO: 175452 - protein, 256 aa, Unknown
  Bacterial polypetide isolated from the Sargasso Sea
VSFEVNKPQMIGIIGRSGAGKSTLLRIINRLTDATDGSIEIEGQNILDLKSKEKRSWQRNCAMIFQQFNLVPRLDVLTNVILGRLNYQGSFRASLKMFSRDERADALILLNNLGMANTALQRAETLSGGQQQRVAICRALMQNPKMILADEPIASLDPMNARMVMESLRKIHDEKNLTVISNLHTLDTAKTYCDRIIGMKDGEIVFDDLPEKLSDKLAREIYGAEADEAFEPQVTSTELKTKNKLNGDVEKEFATA

SEQ ID NO: 175453 - protein, 221 aa, Unknown
  Bacterial polypetide isolated from the Sargasso Sea
MSTLLKLKKINLKYQTGEDYISVLKDINLTTKKKETISIVGESGSGKTSLIMLIGGLERPTSGKIYFQDHEITKLSEDEVSKIRKKNIGIIFQSFYLIPNYTALENVTLILELNKFKNPEKEAKSLLDRFGLKHRLNNLPSQLSGGEQQRVAIARAIAMKPELILADEPTGNLDTENSDMISKILFRYVKEEGSSLIMVTHDPKLANRASRKIKIKDGKIK

SEQ ID NO: 175454 - protein, 267 aa, Unknown
  Bacterial polypetide isolated from the Sargasso Sea
MIKVEKLNKYFGDNRAVNDVTFEINKPEMIGIIGRSGAGKSTLLRIMNRLTDATSGSIFIEGRNILSLTKKDKRAWQKDCAMIFQQFNLVPRLDVLTNVILGRSNIQGTLRSSLKLFTKDERVDALMALDKLGMAETALQRAETLSGGQQQRVAICRAMMQQPKMILADEPIASLDPLNARLVMESLRNIHREKQITVLANLHTLDTAKNYCDRVIGMRLGEIVFDDVPSSLKDDVAREIYGAEAEEAFEPTVTSTSLGDEQFAEAG

SEQ ID NO: 175455 - protein, 151 aa, Unknown
  Bacterial polypetide isolated from the Sargasso Sea
SQISTIRSIFGLWPKDQKQLAFEALNQVEILEKAYVRATNLSGGQQQRVGIARALSQKPKVMLADEPVASLDPITSRVVMSYLKKINTELGITTIVNLHFLDLAKEFGDRLIGLRDGELVYDGKVSDVSDKDFENIYGRSIKSSDLIGEDD

SEQ ID NO: 175456 - protein, 279 aa, Unknown
  Bacterial polypetide isolated from the Sargasso Sea
MKLEKDRDVLSLKGVSVRYVDSTVALHPTSLDVKQGEFLVLLGASGAGKSTLLRSINGLVLPTKGEVSIPGLAGGVVNAKTLREHRKRCGMVFQQHHLIGRQSVLRNVLMGKLGDRGAFASLWPWSKKDKLEALTVIERVGLLEKALSRADALSGGQQQRVGIARALIQKPRILLADEPVASLDPATAHSVLTLLHEICKKDHLTAIVSLHQVELARSFADRIIGLRQGAVVFEGRAEQLSPDVARNLYAKQSNASNTSASTDSPRTLQSSQTKELLPC

SEQ ID NO: 175457 - protein, 229 aa, Unknown
  Bacterial polypetide isolated from the Sargasso Sea
MTLISLKNIYKIYNVGGEEVRALDGIDLDINENEYLAIMGPSGSGKSTLMNMVGCLDTPTSGIYEFEGEMVQVMDDSQLASIRNRKIGFVFQTFNLLPKATAQHNVEIPLVYANIRKRQRVEMASKALESVGLSDRSHHRPNELSGGQRQRVAIARALVNNPSIILADEPTGNLDSKSGHEIMNILDDLHQKGNTIILVTHEDDIAQHAHRVIRLLDGEITEDLKIKSK

SEQ ID NO: 175458 - protein, 255 aa, Unknown
  Bacterial polypetide isolated from the Sargasso Sea
MLKTINLKKVYPNGEEALKGINLEIPNGQVVALIGPSGAGKSTFIRTINRLVEPTSGKVYFANEKNDITSLNKSKLRKIRRQIGMIFQEFALVERLSVMENVLSGRLGYVGFWNSFFRKFPQKDIEEAFRLLQRIGLEHMLDKRADELSGGQRQRVGIARALIQNPMLLLVDEPTASLDPKNSRQIMRLICELCKERNLAAIINIHDVFLAQNFAERIIGLKAGEIVYDGKPSGLSETILTKIYGEEDWSKTVAN

SEQ ID NO: 175459 - protein, 259 aa, Unknown
  Bacterial polypetide isolated from the Sargasso Sea
MLEIVNLTKNFGSLTAVSEANFSITKPQMIGIIGRSGAGKSSLLRMINRLLDATSGEIIHSGINIRNLKGKGKRKWQKDCAMIFQQFNLVPRLNVLTNVLLGGLNQQPLIRSLLSIFTQEERNKALKILDRFGIVETALQRAETLSGGQQQRVAICRALMQSPKMILADEPIASLDPLNAKLVMEALRNIHIQEKITVVCNLHTLDTAKKYCDRIIGMKAGKIVFDDVPLKLTQSKTKHIYGADEDDEFNSSVTSTSLG

SEQ ID NO: 175460 - protein, 689 aa, Unknown
  Bacterial polypetide isolated from the Sargasso Sea
MSQPLLKLAAVTRRFPAGDKDVVVLSNVNLSIHAGEIVAIVGASGSGKSTLMNILGCLDHPSEGTYTVGGRDTHMLDSDELAQLRREHFGFVFQRYHLLPHVDAVANLEMPAIYAGTPRAERHARARELLARLGLADRAHHRPGQLSGGQQQRVSIARALMNGGQVILADEPTGALDTKSGQDVIRILHELNALGHTIVIVTHDQAVARHAKRIIEISDGEIVADRPNRHYAEALAEVSVGAAEAAESIEAEAGALPADDRHDTPSPPAPVDTDAHPDTDTGTRTRRFAAGSGRFAEACRMAWIALVSHRLRTLLTMLGIIIGITSVVSIVAIGEGAKRYMLDEIGSIGTNTINLYPGTDWGDSRADAIQTLVPADVAALAEQPYVDSATPETSRTLLLRYRNVDVNALVSGVGDRFFQARGMRFAQGVAFDEDAVRRQVQVAVIDQNTRRKLFGATRNPIGEVILVDNVPCVVIGVTADKKSAFGSVKSLNVWVPYTTASGRLFGQRHLDSITVRVRDGQPSAAAEKSLEKLMTQRHGRKDFFTYNMDSVVKTVEKTGQSLTLLLSLIAVISLVVGGIGVMNIMLVSVTERTREIGIRMAVGARQSDILQQFLVEAVLVCLLGGTIGIALSFGLGALFSMFVAQWKMVFSAGAIVTAFVCSTLTGVIFGFMPARNASRLDPIDALVRD

SEQ ID NO: 175461 - protein, 153 aa, Unknown
  Bacterial polypetide isolated from the Sargasso Sea
DEDLSRVRGRYLGLVFQSYNLIQQLSVVENIMVPLSYQLPVRPDGRELSTKLATLVGLAGRLDHRPNQLSGGQQQRVAIARALVNNPHVILADEPTGNLDTATSNEIMDLLDVLNNTGRTIVMVTHEPDIAERAKTVITLRDGLIQSVEQNRV

SEQ ID NO: 175462 - protein, 267 aa, Unknown
  Bacterial polypetide isolated from the Sargasso Sea
MIEIKNLNKYFGSNHAVKNLNITIQESEMIGIIGRSGAGKSTLLRIMNRLTEESSGEIIVDGQDITKLNKKDKRAWQKSCAMIFQQFNLVPRLDVLTNVVLGRLNVQPTFKGALKLFTKEERVDALLALDELGMSQTALQRAETLSGGQQQRVAICRAMMQDPKMILADEPIASLDPLNARLVMESLRKIHEEKKMTVIANLHTLDTAKHYCDRIIGMSLGEVVFDDVPSKLTDQLAKEIYGAEADEAFEASLTSTSLGTTQKAGAS

SEQ ID NO: 175463 - protein, 269 aa, Unknown
  Bacterial polypetide isolated from the Sargasso Sea
MRISNIRKEFGSVIAVNGVSFTIEKPEFIGIIGRSGAGKSTLLRMINRLIDSTDGEVEFEGTNVLSLSGRAKRDWQRNCAMIFQQFNLIPRLDAITNVMLGRLNQLNLLRSFFRIFPEKDIADALTNLERLDIADKALTRVEHLSGGQQQRVAIARALMQNPKLILADEPIASLDPLSAETVMNNLRKIHENDQLTVICNLHTLETARRYCNRVIGMLKGKVVFDGPIDQLTGSVVREIYDSEKLDESLNSVSLKQPEESNIDSASAES

SEQ ID NO: 175464 - protein, 230 aa, Unknown
  Bacterial polypetide isolated from the Sargasso Sea
MGSLISLQSIKRHYEVGDELVRALDGVDLNINHNEYISIMGPSGSGKSTLMNMIGCLDTPSAGTYEFEGELVHDMDDNQLASIRNRKIGFVFQTFNLLPKATALHNVEVPLIYSNIPKDQRIEKAIKALTEVGLEDRMYHRPNELSGGQRQRVAIARALVNDPSIILADEPTGNLDSKSGDEIMNILDNLFSRGNTIILVTHEEYIAKHAHRIINIFDGKIKEDKVVKKK

SEQ ID NO: 175465 - protein, 202 aa, Unknown
  Bacterial polypetide isolated from the Sargasso Sea
GKSTAMNLIGCLDTLTSGQFLFEGSDISNFTSDELATIRNGKIGFVFQSFNLLARTTAMDNVQLPLLYSGMPRADRARVAEKVLKEVGLGDRVDHHPSQLSGGQQQRVAIARALVNAPALILADEPTGALDTRTGIEIMSLFQKLNVTGITIIIVTHEADVAQFAKRIIRFQDGRIISEENNKESVNAKELLQNFKPVDRAG

SEQ ID NO: 175466 - protein, 255 aa, Unknown
  Bacterial polypetide isolated from the Sargasso Sea
MLKTINLKKVYPNGEEALKGINLEIPNGQVVALIGPSGAGKSTFIRTINRLVEPSSGNVYFANEKNDITSLNKSKLRKVRRQIGMIFQEFALVERLSVMENVLSGRLGYVGFWNSFFRKFPQKDIEEAFRLLQRIGLEHMLDKRADELSGGQRQRVGIARALIQNPMLLLVDEPTASLDPKNSRQIMRLICELCKERNLAAIINIHDVFLAQNFAERIIGLKAGEIVYDGKASGLSEAILTNIYGEEDWSKTVAN

SEQ ID NO: 175467 - protein, 267 aa, Unknown
  Bacterial polypetide isolated from the Sargasso Sea
MLKIINISKYFDQVKAVNNVSINVENSSMIGIIGRSGAGKSTLLRTINRLTDATSGEILFQNQNILDFKKKDKLEWQKNCAMIFQQFNLVPRLDVLTNVMLGKLNEMSTVRASLKLFTSEERHAALNLLNKFGMMQTALQRAETLSGGQQQRVAICRAMMQDPKLILADEPIASLDPLNARLVMESLRKIHDEQNITVICNLHTLDTAKQYCDRIIGMQNGEIVFDDLPSKLTNQKAREIYGAEADEAFEGTMTSVSLESADIKKTA

SEQ ID NO: 175468 - protein, 95 aa, Unknown
  Bacterial polypetide isolated from the Sargasso Sea
ADRLHHKPNELSGGQRQRVAIARALVNKPSIILADEPTGNLDSKSGSEIMTILDDLHKNGNTIILVTHEDDVAQHAHRIIRLFDGKIIEDSKQAP

SEQ ID NO: 175469 - protein, 274 aa, Unknown
  Bacterial polypetide isolated from the Sargasso Sea
MIIKKVNKFFGDNHAVKNVSFEVNKPQMIGIIGRSGAGKSTLLRIINRLTDATDGSIEIEGQNILDLKSKEKRSWQRNCAMIFQQFNLVPRLDVLTNVILGRLNYQGSFRASLKMFSRDERADALILLNNLGMANTALQRAETLSGGQQQRVAICRALMQNPKMILADEPIASLDPMNARMVMESLRKIHDEKNLTVISNLHTLDTAKTYCDRIIGMKDGAIVFDDVPEKLSDKLAREIYGAEADEAFEPQVTSTELKTKKKINGDVEKEFATA

SEQ ID NO: 175470 - protein, 274 aa, Unknown
  Bacterial polypetide isolated from the Sargasso Sea
MIIKKVNKFFGDNHAVKNVSFEVNKPQMIGIIGRSGAGKSTLLRIINRLTDATDGSIEIEGQNILDLKSKEKRSWQRNCAMIFQQFNLVPRLDVLTNVILGRLNYQGSFRASLKMFSRDERADALILLNNLGMANTALQRAETLSGGQQQRVAICRALMQNPKMILADEPIASLDPMNARMVMESLRKIHDEKNLTVISNLHTLDTAKTYCDRIIGMKDGEIVFDDLPEKLSDKLAREIYGAEADEAFEPQVTSTELKTKKKINGDVEKEFATA

SEQ ID NO: 175471 - protein, 268 aa, Unknown
  Bacterial polypetide isolated from the Sargasso Sea
MHLQVSKLKKEFGSTVAIDSVSFESTKNEFIGIIGRSGAGKSTLLRVLNRLTTETEGKVFAGSINILELKGSEKRQWQSQCAMIFQQFNLVPRLDVITNVILGRLFYQSTLRSTLRFFTKEERSNALDLMNRFGVAPTALQRAETLSGGQQQRVAICRAMMQNPKIILADEPIASLDPLNARLVMEALQSINSNEKIKVICNLHTLDTARTYCDRIIGMRSGDIVFDGKPSELSDAKAREIYGVEADEAFEASVTSTSLNTSRVGIAS

SEQ ID NO: 175472 - protein, 274 aa, Unknown
  Bacterial polypetide isolated from the Sargasso Sea
MRISKVNKFFGNNHAVKNVSFEVNKPQMIGIIGRSGAGKSTLLRIINRLTDATDGEVEIDGQNILQLKSKEKRSWQRNCAMIFQQFNLVPRLDVLTNVILGRLNYQGSFRASLKMFSRDERADALILLNTLGMANTALQRAETLSGGQQQRVAICRALMQNPKMILADEPIASLDPMNARMVMESLRKIHDEKNLTVISNLHTLDTAKTYCDRIIGMKDGAIVFDDLPEKLSDKLAREIYGAEADEAFEPQVTSTELKTKKKINGDVEKEFATA

SEQ ID NO: 175473 - protein, 237 aa, Unknown
  Bacterial polypetide isolated from the Sargasso Sea
MVSRHIIIILIIKLLFMSSLLKLKKINLKYQTGKDNISVLKDINLTTKKKETISIVGESGSGKTSLIMLIGGLERPTSGKIYFLDKEITKLSEDEVSKIRKKNIGIIFQSFYLIPNYTALENVTLILELNKFKNPEKEAKSLLDRFGLKHRLNNLPSQLSGGEQQRVAIARAIAMKPELILADEPTGNLDTENSDMISKILFRYVKEESSSLIMVTHDPKLANRASRKIKIKDGKIK

SEQ ID NO: 175474 - protein, 228 aa, Unknown
  Bacterial polypetide isolated from the Sargasso Sea
MDNNFLVIENISKSFGDNKVLENINLKISKSEFFGLLGSSGSGKTTLLRILGGFEKPDSGRVILDGTDITNLEPFDRPLNYMFQSYALFPHLNVFNNLAFGIKENFTQKEIEINVRNIAELLSIEHLLNRRIKQLSGGEQQRVALGRCLIKKPKLLLLDEPLAALDKKLRSKTQLELTTLQKKLKITFVFVTHDQEEAMSLSDRMAIMKNGLILECSSPEEIYENPKS

SEQ ID NO: 175475 - protein, 44 aa, Unknown
  Bacterial polypetide isolated from the Sargasso Sea
NGSSINNIGRALLTSPQMLLMDEPLASLDLPRKRELLPYLQTLA

SEQ ID NO: 175476 - protein, 200 aa, Unknown
  Bacterial polypetide isolated from the Sargasso Sea
MDKNFLVIENISKSFGKNKVLENINLNISKSEFFGLLGSSGSGKTTLLRILGGFEKPDTGRIFLEGVDITNLEPFDRPLNYMFQSYALFPHLNVFNNLAFGIREKFNKKEIEIKVKDISELLSIDNLLNRKIKQLSGGEQQRVALGRCLIKKPKLLLLDEPLAALDKKLRSKTQLELTSLQKKLKMTFVFVTHDQEEAMS

SEQ ID NO: 175477 - protein, 270 aa, Unknown
  Bacterial polypetide isolated from the Sargasso Sea
KSGSLEIAGEIWQDKNKFVPTNERAIGMVFQESRLFPHLKVRENLLYGYKRTPTDSRNLHLEEVVRVLALENLLERGIEKLSGGEKQRVALGRALLTSPKLLLMDEPLAALDAQIKVEIISFIRKIEQELSIPIVYVTHSMSEVLQLVDTMVILKEGNVVKCGPVEKVFSDIQLRDAIGDEHSGAILDTNVLDHDKEFGITRLDFMGQELSVPLQNIPLGEGLRVHIHSKDVSLATHPPEGLTSVLNILKTKNKKIGNHIGYSVDIELDA

SEQ ID NO: 175478 - protein, 219 aa, Unknown
  Bacterial polypetide isolated from the Sargasso Sea
MDITNLEPFDRPLNYMFQSYALFPHLNVFNNLAFGIKENFTQKEIEINVRNIAELLSIEHLLNRRIKQLSGGEQQRVALGRCLIKKPKLLLLDEPLAALDKKLRSKTQLELTTLQKKLKITFVFVTHDQEEAMSLSDRMAIMKNGLILESSSPEEIYENPKSLYTANFIGIANIIEIYKKDENFYSDDLGINFKLNKELKNTKTNILLRPEKIKIQSIN

SEQ ID NO: 175479 - protein, 59 aa, Unknown
  Bacterial polypetide isolated from the Sargasso Sea
RALLTSPQMLLMDEPLASLDLPRKRELVPYLQTLAQELKLPIVYVSHSLDEILQLADHM

SEQ ID NO: 175480 - protein, 214 aa, Unknown
  Bacterial polypetide isolated from the Sargasso Sea
MNISTNLHRPGGFNLSVDLSIATDRVTALYGISGSGKTTLLRLITGLDREAGVEVNFNGKAWQTADFFLPVHKRRIGFVFQNLNLFPHLSAAGNLNFATRRNNSNEGLSQNEVIDILDIGNLLSKHPGNLSGGEQQRVAIARALLCNPELLVMDEPLGSIDTLAKTRILPYLQRLHSKLKIPVVYVSHSLDEVLELSDEVILLESGRATTKQSV

SEQ ID NO: 175481 - protein, 270 aa, Unknown
  Bacterial polypetide isolated from the Sargasso Sea
YALFPHLNVFDNLAFGIREKFNKNEINSEVKDISELLSIDNLLNRRIKQLSGGEQQRVALGRCLIKKPKLLLLDEPLAALDKKLRSKTQLELTSLQKQLKVTFVFVTHDQEEAMSLSDRMAIMREGKILECSSPEEVYENPKSFYTANFIGIANTIEVYKKSNHYFSNELNINLELEHEAKKQKTNILLRPEKIKIKSAKGVKINLVNSFEGVVLEKSYLGSFTRYEVKSGNKIISVLDQNYNSNSNYNFPIGERVLCSWEKESLKILED

SEQ ID NO: 175482 - protein, 176 aa, Unknown
  Bacterial polypetide isolated from the Sargasso Sea
MFGFGKASPPAVHDDGRTRARFVVKHPGFALDVDLDLPGRGVSALFGHSGSGKTSCLRCFAGLDRPQQGYLQVAGELWQDSERGFFLPAHKRPIGYVFQDANLFPHLSVRKNLEYGQRRIPAAQRKVALDQALLLLGIGHLLERMPSALSGGERQRVGIARALVTSPRLLLMDEPL

SEQ ID NO: 175483 - protein, 268 aa, Unknown
  Bacterial polypetide isolated from the Sargasso Sea
MSIDAHIQIERGTFQLNARLELPARGVTAVFGPSGSGKTTLLRALAGLEPCPDSRVIVNGTPWQTATECLATHERPVCLVFQEPSLFEHLTVQANLDFGRQRISKSAQTIPLDHSIELLEISPLLNRYPHQLSVGEQQRVAIARALAVCPEWLLLDEPLAAMDAARKREILPYLENLCRETDLPILYVSHSREEVARLADHLVVLNEGKVIANGPAIEILSNLALPLAREPDSTAIIETTVAGQDNTFGLTLLDFAGGQFPVTHHDLP

SEQ ID NO: 175484 - protein, 239 aa, Unknown
  Bacterial polypetide isolated from the Sargasso Sea
MDNNFLVIENISKSFGDNKVLENINLNISKSEFFGLLGSSGSGKTTLLRILGGFEKPDTGRVMLDGTDITNLEPFERPLNYMFQSYALFPHLNVFNNLAFGIKENFTQKEIEINVRNIAELLSIEHLLNRRIKQLSGGEQQRVALGRCLIKKPKLLLLDEPLAALDKKLRSKTQLELTTLQKKLKITFVFVTHDQEEAMSLSDRMAIMKNGLILECSSPEEIYENRKSLYTANFIGIAN

SEQ ID NO: 175485 - protein, 263 aa, Unknown
  Bacterial polypetide isolated from the Sargasso Sea
MFGFGKASPPAVQGDERIRARFLVKHPGFTLDIDLDLPGRGVSALFGHSGSGKTSCLRCFAGLDRPQQGYLQVAGELWQDSERGFFLPAHKRAIGYVFQDANLFPHLSVRKNLEYGQRRIPASQRRVALDQALQLLGIGHLLERMPSALSGGERQRVGIARALVTSPRLLLMDEPLASLDLKRKQEVLPYLQRLHEELDIPVLYVSHAPDEVARLADHLVLLDEGQVRASGPLKEILLRADLPFASDEDAEAVIDGQVCAHDA

SEQ ID NO: 175486 - protein, 361 aa, Unknown
  Bacterial polypetide isolated from the Sargasso Sea
MLNINIEKQLGHLQLKVNTQLPLQGVTAVFGRSGAGKTSLVNLLGGLTTPDNGEISLGDTLLFKHKTVNLPPEKRQIGYVFQEARLFPHYSVKGNLTYGMRHKAPELFDKVVSLLGIEKLLSRYPSTLSGGEKQRVAIGRALLTSPQMLLMDEPLASLDLPRKRELLPYLQTLAQELKLPIVYVSHSLDEILQLADHMLVLHQGKMIAQGPLTQVWNSEQMRPWVPLQELSSLLSARIADRHPDYPMTRLLMDDGNQLWVSGQLPPTHKQLKVRIQANHVSVCTEEPKGSSIRNLLKGKIKELYPSDNGEQIQLKIALGKDELWANITPWACDELQLAPGKTIYAQIKGVTMTQMDIAESS

SEQ ID NO: 175487 - protein, 352 aa, Unknown
  Bacterial polypetide isolated from the Sargasso Sea
MSNSFLEIIDVTKRFGDILALDRVNLKIEKSEIFSLLGSSGCGKSTLLRIIAGFEKPDQGKILLEGNDITNLPPYIRPLNIMFQNYALFPHLNVTNNIKFGLKEESFSKQEINNRVNEILNLLELNGLEERKVNEISGGQQQRVALARCLVKKPKLLLLDEPLAALDKQLRIQTQFELVNLQNKLGITFIIVTHDQEEAISLSDRMAIMQNGEILQVGNPVEIYEKPKNTYIANFIGTANIFHILNKDNQIIIEELNYEIKNINNNKNFNKCLIRPEKINIKKIENQSGNSNVGIVKEVAYLGSYTKYLIEVNGIQFYSFMQNSLVSDNLQIKWDDKVEFKFNDSSIFLFND

SEQ ID NO: 175488 - protein, 361 aa, Unknown
  Bacterial polypetide isolated from the Sargasso Sea
MLNINIEKQLGQLQLKVNTQLPLQGVTAVFGRSGAGKTSLVNLLGGLTTPDNGEISLGDTLLFKHKTVNLPPEKRQIGYVFQEARLFPHYSVKGNLTYGMRHKAPELFDKVVSLLGIEKLLSRYPSTLSGGEKQRVAIGRALLTSPQMLLMDEPLASLDLPRKRELLPYLQTLAQELKLPIVYVSHSLDEILQLADHMLVLHQGKMIAQGPLTQVWNSEQMRPWVPLQELSSLLSARIADRHPDYPMTRLLMDDGNQLWVSGQLPPTHKQLKVRIQANHVSVCTEEPKGSSIRNLLKGKIKELYPSDNGEQIQLKIALGKDELWANITPWARDELQLTPGKNIYAQIKGVTMTQMDIAESH

SEQ ID NO: 175489 - protein, 221 aa, Unknown
  Bacterial polypetide isolated from the Sargasso Sea
MDKNFLVIENISKSFGEYKVLENINLNISKSEFFGLLGSSGSGKTTLLRILGGFEKPDTGRVILDGVDITNLEPFDRPLNYMFQSYALFPHLNVFNNLAFGIKENYKQDEIKIKVRDIAELLSIENLLSRRIKQLSGGEQQRVALGRCLIKKPKLLLLDEPLAALDKKLRSKTQLELTTLQKKLQITFVFVTHDQEEAMSLSDRMAIMKNGHILECSSPAE

SEQ ID NO: 175490 - protein, 361 aa, Unknown
  Bacterial polypetide isolated from the Sargasso Sea
MLNINIEKQLGQLQLKVYTHLPLQGVTAVFGRSGAGKTSLVNLLGGLTSPDKGEISLGDTLLFKHKTVNLPPEKRRIGYVFQEARLFPHYSVKGNLTYGMRHKAPELFDKVVSLLGIEKLLSRYPCTLSGGEKQRVAIGRALLTSPQMLLMDEPLASLDLPRKRELLPYLQTLAQELKLPIVYVSHSLDEILQLADHMLVLHQGKMIAQGPLTQVWNSEQMRPWVPLQELSSLLSARIADRHPDYPMTRLLMDDGNQLWVSGQLPPTHKQLKVRIQANHVSVCTEEPKGSSIRNLLRGNIKELYPSDNGEQIQLKIALGKEELWANITPWACDELQLAPGKAIYAQIKGVTMTQMDIAESH

SEQ ID NO: 175491 - protein, 347 aa, Unknown
  Bacterial polypetide isolated from the Sargasso Sea
MSLEFEHVSFQYPGARHGVDDVTLSAAQGELLAVMGRSGSGKSTLLRLAAGLLDGGSGRIAIGGADMAGVPVWRREVSMVFQHYALFPNLSVADNVAYGLKMRGVAAEVRRRRARDMLERVGLAAHAERGIAMLSGGQQQRVALARALVIEPKLLLLDEPLAALDAGIRHQLRDEIRALQRACGATTLLVTHDQDEALSMADRVAIVDGGRVLQVGTPRDLYERPVSAQVARFVGHSTLLRGRVTAHDTVDVRFATLRVETGGHRPGAEVEVLVRPEHVEADPPAHGVNRIDGAPGDVRYFGATQRYDFIPTGSADPLLCEGRVPASRRIAIDPRHLLVLPAAPEAQ

SEQ ID NO: 175492 - protein, 352 aa, Unknown
  Bacterial polypetide isolated from the Sargasso Sea
MSEPFLQIIDVSKRFDNVVALDKVNLKIAKSEIFSLLGSSGCGKSTLLRIIAGFEKPDEGRILLEGKDITKLPPYVRPLNIMFQNYALFPHLNVTNNIQFGLKEEKISKEEINHRVNEILNLLELNGLEKRKINEISGGQQQRVALARCLVKKPKLLLLDEPLAALDKQLRVQTQFELVNLQYKLGITFIIVTHDQEEAMSLSDRMAIMKNGEILQVGNPVEIYEKPKDKYIANFIGTANIFNVLNKNNQIIIKELNYEVKNINNKENYVKCLIRPEKISVKKLENQSDNLNIGVVKEVAYLGSYTKYLIDVNGFEFYSFMQNSLVSDNLQIRWDDKVQISFNETSIYFFND

SEQ ID NO: 175493 - protein, 226 aa, Unknown
  Bacterial polypetide isolated from the Sargasso Sea
AGFSERLPSELSGGQQQRVAVARALVLEPEVLLFDEPLSNLDAKLRRRVRQEIRELQQKLELTTIYVTHDQEEALAVSDKIIVMNEAVIAQQGTPEDLYESPESLFVADFIGDANIIIGRMTEHDGDLAAIKIGELSLNLPHKGVNPGEIKLAVRPLALNVHAEKHPGIPGKVLKSVYLGSHQEYTIETDQGEWFVLDMEMNEIHEENTEVSLDFKSRGVSIIPHS

SEQ ID NO: 175494 - protein, 250 aa, Unknown
  Bacterial polypetide isolated from the Sargasso Sea
MAEVKIRNLFKSYGNTEVIHGLDVDIEDGEFVVLVGPSGCGKSTLLRMIAGLEGISSGDIMIGKSIVNNLPPSQRDIAMVFQNYALYPHKTVNDNMAFSLKMKGLSKNDISNRVNQAAEILGLTPYLKRYPRALSGGQRQRVAMGRAIVRDPQVFLFDEPLSNLDAKLRVQMRAEIRELQQRLNSTTVYVTHDQIEAMTMADKIVVMKDGYIEQTGSPLEVYDKPANTFVASFIGSPAMNMIEGTVEIKN

SEQ ID NO: 175495 - protein, 258 aa, Unknown
  Bacterial polypetide isolated from the Sargasso Sea
DRKRIVEELLALSKLDKLGSRYPHELSGGQQQRVALARAMAPNPRLLLLDEPFSNLDGELRRRLSAEVRDILKSRGISAMLVTHDQAEAFAVCDHVGVLKDGQLQQWDTPYNLYHEPATPFVASFIGQGYFIRGQLLSSDTVQTELGVIHGNRAYQLPVGGAVDVLLRPDDLVGDAHSELRARIIDRTFQGATILYRMQLQTGTQLEALFPSHADHQPGDEVGLRVAAEHLVVFPAQGSVNLHAQLPLEQVLDTGRSA

SEQ ID NO: 175496 - protein, 291 aa, Unknown
  Bacterial polypetide isolated from the Sargasso Sea
EPGQLITLLGPSGCGKTTTLRLIAGLEMVSKGKIFIGGKDVTHVSASDRDVSMVFQSYALFPHMNVFQNVSYGLTISRLPKEEVKEKAEAALELVGLADYGKRLPSELSGGQQQRVAVARALVLEPEVLLFDEPLSNLDAKLRRRVRQEIRELQQKLELTTVYVTHDQEEALAVSDQIIVMNEAVIAQQGTPEDLYESPESLFVADFIGDANIIIGRMSEHEGDLAAIKIGELSLNLPHKGVHPGEIKLAVRPQAVNVHAEKHPGIPGKVLKSVYLGSHQEYTIETDQGEW

SEQ ID NO: 175497 - protein, 312 aa, Unknown
  Bacterial polypetide isolated from the Sargasso Sea
VNLSVAKGEFVTLLGPSGCGKTTTLRCIAGLERLDAGEISIGEKIVVSADKNIFLYPEKREIGMVFQSYAVWPHMTVFDNVAYGLRVRGFGSAELKKKTNYALELVGLDHLASRFATKLSGGQRQRVALARAICYEPNVILFDEPLSNLDAKLREQMRDEIVRLQKEVGITSIFVTHDQSEALVMSDRIVVMDKAVIQQIGDPKTIYANPANSFVANFIGVANLFEGNLSDRKGKNATAKIDFGGALGVKELLANDVNNIPNNSKIHLCIRPEDMELSTKKFTGELAKNSIAGKVIETVYLGNFLECRVKIG

SEQ ID NO: 175498 - protein, 207 aa, Unknown
  Bacterial polypetide isolated from the Sargasso Sea
MAEVKIRNLFKSYGNTEVIHGLDVDIGDGEFVVLVGPSGCGKSTLLRMIAGLEGISSGDIMIGKSIVNNLPPSQRDIAMVFQNYALYPHKTVNDNMAFSLKMKGLSKNDIANRVNQAAEILGLTPYLKRYPRALSGGQRQRVAMGRAIVRDPQVFLFDEPLSNLDAKLRVQMRAEIRELQQRLNSTTIYVTHDQIEAMTMADKIVVR

SEQ ID NO: 175499 - protein, 233 aa, Unknown
  Bacterial polypetide isolated from the Sargasso Sea
GLELVGLAGFGERLPFELSGGQQQRVAVARALVLEPEVLLFDEPLSNLDAKLRRRVRQEIRELQQKLELTTIYVTHDQEEALAVSDQIIVMNEAVIAQQGTPKDLYESPESLFVADFIGDANIIIGRMTEHDGDLAAIKIGELSLNLPHKGVNPGEIKLAVRPLAVNVHEEKHPGITGKVLKSVYLGSHQEYTIETDQGEWFVLDTEMNEIHEENTEVSLDFKSRGVSIIPHS

SEQ ID NO: 175500 - protein, 274 aa, Unknown
  Bacterial polypetide isolated from the Sargasso Sea
DVSMVFQSYALFPHMNVFQNVSYGLNISRLPKEEVKEKAEAALGLVGLADYGKRLPSELSGGQQQRVAVARALVLEPEVLLFDEPLSNLDAKLRRRVRQEIRELQQNLELTTVYVTHDQEEALAVSDQIIVMNEAVIAQQGTPEDLYESPESLFVADFIGDANIIIGHMTEYDGKLSTIKVGELSLNLPHKGVNPGEIKLAIRPQAVKVHAEKHPGIPGKVLKSVYLGSHQEYTIETDQGEWFVLDTEMNEIHEENMEVSLDFKTRGVSIIPHS

SEQ ID NO: 175501 - protein, 271 aa, Unknown
  Bacterial polypetide isolated from the Sargasso Sea
VAENVAFGIRKQPNAERATQELLELVKLGNLAKRYPHELSGGQQQRVALARALAPEPKLLLLDEPFSNLDGELRRRLSHEVREILKARGTSAILVTHDQEEAFAVSDHVGVFKDGRLEQWDTPFNLYHEPLTPFVASFIGQGYFIRGQLLGPETVQTELGMIRGNRAYTWAQGSAVDVLLRPDDIVPDESSELKARIVGKTFLGAATLYRLQLPTGSQLESIFPSHADHQPGDEVGIRVAADHLVAFPALGSVAAQLQLSDSGGVRRVSSN

SEQ ID NO: 175502 - protein, 353 aa, Unknown
  Bacterial polypetide isolated from the Sargasso Sea
MEKTNQAVVFQDVSKSFGQVNAVRELNFNIEPGQLITLLGPSGCGKTTTLRLIAGLEMVSKGKIFIGDKDVTHVSASDRDVSMVFQSYALFPHMNVFQNVSYGLTISRLPKEEVKEKAEAALGLVGLSDYGKRLPSELSGGQQQRVAVARALVLEPEVLLFDEPLSNLDAKLRRRVRQEIRELQQKLELTTVYVTHDQEEALAVSDQIIVMNEAVIAQQGTPEDLYESPESLFVADFIGDANIIIGRMTEHEGDLSAIKIGELSLNLPHKGLNPGEIKLAVRPQAVNVHAEKHPGIPGKVLKSVYLGSHQEYTIETDQGEWFVLDTEMNEIHEENTEVSLDFKSRGVSIIPHS

SEQ ID NO: 175503 - protein, 348 aa, Unknown
  Bacterial polypetide isolated from the Sargasso Sea
MYSLEVRNIKMKYDNFTALSDVSLKVKKGEFVTLLGPSGCGKTTLLKIISGFITPSNGNVFINNEDVTKTPPETRDTAMCFQSYALFPHLSVLQNLSFGLIQRKVDTKKRSQILEEVVAQLELTTELEKLPNQLSGGQQQRVALGRALVMRPEVILFDEPLSNLDALLRESVRIEIKRIVKLFNLTAIYVTHDQHEALSLSDRIALMHEGSIIQIDDSETIYTSPKNKFVANFLGSSNIISAKLIKKGNKKNEWIFQSEIGKLVVYSEEVSVKPDVHISWRSEKVTFNKSSDNKIKGKIENIFFLGSHYEVFVKVNNEIVKINVINKHLLNKEITFFLDKRDLKILED

SEQ ID NO: 175504 - protein, 349 aa, Unknown
  Bacterial polypetide isolated from the Sargasso Sea
LQLNLKNVTKEFGDVQAVRNLNFSIEKGQLVTLLGPSGCGKTTTLRLIAGLEMVTEGKIFIGEKEVTKMSASDRDVSMVFQSYALFPHMTVMQNVSYGLTMSRISKQEVKEKSQNGLELVGLSGFGERLPSELSGGQQQRVAVARALVLEPEVLLFDEPLSNLDAKLRRRVREEIRELQQDLGLTTVYVTHDQEEALAVSDRIIVMNEAVIAQEGTPKELYEEPINLFVSDFIGDANLINSSILEIDGLNAKLDIGGIQLQLPHRGLMPGNAMVAIRPQSIYLNESETEKGILGTILKSSYLGDHLEYTVKSELGEFFVIDNQMQTQHPPGAEVSITFRSYGISLIPES

SEQ ID NO: 175505 - protein, 255 aa, Unknown
  Bacterial polypetide isolated from the Sargasso Sea
MLELDDLCLAYDTPHGRRTVVDGLSLALPRGDIGCLLGASGCGKTTVLRAIAGFEPVRMGRIVLDGVPVAAPSLDVPPERRRIGMMFQDYALFPHLSAADNVAFGLRRMPKAERRLRVAEMLELVGLADSGGAYPHELSGGQQQRVALARALAPSPELLLLDEPFSNLDVDTRERLAFELRDILKRTGHTAILVTHNQAEAFAIADRIGVMKDGQLAQWDTPYALHHHPASPFVADFVRRDALADERARALARGR

SEQ ID NO: 175506 - protein, 157 aa, Unknown
  Bacterial polypetide isolated from the Sargasso Sea
MGQSKKLNKQPRSLSPLVQLAGIRKSFDGKEVISSLDLTINNGEFLTLLGPSGCGKTTVLRLIAGLETVDSGHIMLDNEDITHVPAENRYVNTVFQSYALFPHMTVFENVAFGLRMQKTPAADISPRVTEALRMVQLEEFAQRKPHQLSGGQQQRVA

SEQ ID NO: 175507 - protein, 357 aa, Unknown
  Bacterial polypetide isolated from the Sargasso Sea
MSSILELQDISKNYGSSVVLKDINLTIENNEFFTILGSSGSGKSTLIRIIGGFVKPSSGDLIFNNKVINEEPIFKRPFNTVFQDYALFPNMNVYNNIGFGLKIRKLDPKTVSDKVEEVLSIVGLNDFKKRMPHELSGGQQQRVALARAIVCEPKVILLDEPLGALDAELRKQMQLFLKDIQKKIKTTFIFITHDQEEAIFLSDRIAVLNNHQFEQVGSPKDLYYKPKSKYLASFFGECNLIDGTVDNINSDIITIDTAIGKINIKNKYKNISQKQNITFAIRPEQIFLNQKKDINSFRTNVDRVEFKGSVTNIILDFQKNIKIKVQINNSEQQMNINENDQLDIYFDPNFGNLFVND

SEQ ID NO: 175508 - protein, 215 aa, Unknown
  Bacterial polypetide isolated from the Sargasso Sea
MSRLMQLQDVAESTRLGPLSGEIKAGEILHLVGPNGAGKSTLLARMAGLTNGEGSITFGDMPLEEWPAARLAQYRAYLAQQQNPPFAMPVWHFLTLHQPDKARTDLLQEVADALGLGDKLGRGVNQLSGGEWQRVRLAAVILQICPQANPLGQLLLLDEPMNSLDVAQQNALDRLLSQLCLQGIAIVMSSHDLNHTLRHAHKAWLLKRGKLLASG

SEQ ID NO: 175509 - protein, 255 aa, Unknown
  Bacterial polypetide isolated from the Sargasso Sea
MLQISHLAASYGGKPALEDINLTLDSGELLVVLGPSGCGKTTLLNLIAGFVPYQHGSITLAGNRVDGPGADRGVVFQNEGLLPWRNVQDNVAFGLQLAGGDKPQRQRIALEMLQKVGLEDAGKRFIWQLSGGQRQRVGIARALAANPQLLLLDEPFGALDAFTREQMQTLLLKLWHETGKQVLLITHDIEEAVFMATELVLLSPGPGRVLERLPLNFARRFVAGESSRSIKSDPQFIAMREYVLGRVFEQREAFS

SEQ ID NO: 175510 - protein, 818 aa, Unknown
  Bacterial polypetide isolated from the Sargasso Sea
MSGQRNDGETSPEHLNASHGAGGHQDHAAHAAQGQASGDADGNHAAHHGHGHGEMSEGPDGALRDPVCGMSVTADSPFRSEHDGHPYFFCSASCQKKFRADPLRYVKPSTSTSVEAAPEGSIYTCPMHPEIRQDHPGNCPKCGMALEPLLPSLEDEENPELTDFRRRFWWTLPLTAVVFVLAMFGHRLGWMEASTQSWVELALSTPVVVWAGLPFFERCTRSFINRSPNMWTLIGLGTGTAYVYSVIATVVPGVFPEAFAAHGRVSVYFEAAAVIISLTLVGQLLELKARSQTSAAIKALLGLAPKTARRINADGTEEDVPLAHVHVGDLLRVRPGEKVPVDGVVTEGSSALDESMITGEPIPVSKRVGDHVIGATMNTSGSLIIKSEKVGSQTMLAQIVQMVAQAQRSRAPMQRMADKVAGVFVVAVVGVAILTFVAWGFFGPEPSWVYGLINAVAVLIIACPCALGLATPMSIMVASGKGASNGVLFRDAAAIENFRKVNTLIVDKTGTLTEGRPAFERAIGVNGYAEEDVLRLAASLDQGSEHPLAATIVDAARERRLAFEKVEHFESSTGIGVRGLVGSRNLALGNTTLMQADGIDVGTLTENSDTLRAQGASVMYLAVDGMLAGLLAVSDPVKATTPEALARLKEDGIRVVMATGDGVVTARAVATKLGIGEFHGEVKPADKLALVTKFQQEGKVVAMAGDGINDAPALAKADVGVAMGTGTDVAMSSAQVTLVKGDLRGIARARELSEATIGNMKQNLGFAFVYNALGVPLAAGVLYPFTGLLLSPMIAALAMSLSSASVITNALRLRNVKI

SEQ ID NO: 175511 - protein, 403 aa, Unknown
  Bacterial polypetide isolated from the Sargasso Sea
FVPAVMLAAVLTFLVWLVFGPSPALSFALVNAVAVLIIACPCAMGLATPTSIMVGTGRGAEMGVLFRKGEALQLLKDAKVVAVDKTGTLTEGRPVLTDLEIADGFDRNQVLAKVASVESRSEHPIARAIVESAVEGGIALPTMTDFDSVTGMGVRATVDGARVEVGADRFMRELGLDVSGFARTAERLGNEGKSPLYAAIDGRLAAIIAVADPIKSSTPAAIAALHQLGLKVAMITGDNARTAQAIAKQLGIDEVVAEVLPEGKVEAVRRLKATHGQIAYVGDGINDAPALAEADVGLAIGTGTDVAVESADVVLMSGNLQGVPNAIALSKATIGNIRQNLFWAFGYNTALIPVAAGVLYPAYGVLLSPIFAAGAMALSSVFVLGNALRLRRFQPPLAADTAH

SEQ ID NO: 175512 - protein, 758 aa, Unknown
  Bacterial polypetide isolated from the Sargasso Sea
MSQIKLYVATMNCAGCVAKIEKAFAAEPNVSARINLADKQVTVDGKMSSDKALAVMDKAGYPAQLIVDAKAAAEEKRVEDAAEYRLRMRQAIAALAVGIPMMLWGLLGGEMMINSPSMQLGWGIMGLVTLALLVGTGRHFYQGMWRALKAKTTNMDTLIVLGTSTAWLYSMLVVLIPSAFPMDTRHVYFEASVMILGLINLGHALELKARGKTSEAVQRLLGLQSSTAIRIGDNGDEEVEIDQLKLGDKLRLRPGDRVALDGVVESGQSLLDEAMLTGEPIPVPKHVGDNLSAGTVNGNGSLVYRVTAGQQDTRLAKIIALVQEAQTSKMPIGRLADKISAVFVPTVVVIALLAAAIWYLVGPEPALSHALVVLTSVLIIACPCALGLATPMSIMVSVGRAAQMGVLVKNGEALQSASKVDCVVLDKTGTVTQGKPQVTDIHWSEGNDQAPNDQALSDEDKRALLGAIASLEQHSEHPLASAIVSYVKQASIPLPSTEIFTNHQGKGIEGRVDGADFLVGNQALMAAFDVQSEKGVTGSHSGFAIEAATQFAKQGKTAIYVAKAGKLVATIAIADPIKADAKEAIRAIRSQGIRVVLLTGDNPQTAQAVAAQVGIEEVIAGVLPEQKQQHIKALQQQGYVVAMVGDGINDAPALMSADVGIAMGSGTEVAIESADMTLLSQQLIVIANLLALSRATIRNIKQNLFGAFIYNSLGIPVAAGVLYPLTGMLLSPVIAGAAMALSSLTVVTNANRLRQQKL

SEQ ID NO: 175513 - protein, 422 aa, Unknown
  Bacterial polypetide isolated from the Sargasso Sea
MSCASCVTRVQNALQSVPGVTQARVNLAERTALVMGSASAADLVQAVEKAGYGAEAIEDDAKRRERQQETAVATMKRFRWQAAVALLLGIPVMVWGMIGDNMMVSDDNRSLWLTIGLATLAVMVFAGGHFYRNAWKSLMNGTATMDTLVALGTGVAWLYSMSVNLWPQWFPMEARHLYYEASAMIIGLINLGHMLEARARQRSSKALEKLLDLTPPTARVVTDEGEKNVPLADVQAGMLLRLTTGDRVPVDGEITQGEAWLDEAMLTGEPIPQQKGEGDSVHAGTVVQDGSVLFRASAVGSHTTLSRIIRMVRQAQSSKPEIGKLADRISSVFVPVVVAIALVSAAIWYFFGPAPQIVYTLVIATTVLIIACPCALGLATPMSIISGVGRAAEFGVLVRDADALQRASTLDTLVFDKDRDAD

SEQ ID NO: 175514 - protein, 801 aa, Unknown
  Bacterial polypetide isolated from the Sargasso Sea
MQKAGDKQASKEWSIPIAGMTCASCVARVEKGLAKVPGVTHAAVNLATERASVTAGAAVPQDAIVDAVNRAGYEVPMNSATLDIKGMTCASCVSRVEKALLRLPGVSAAVVNLATETATVTSMGVNDDALVAAVIKAGYEAAQHVDSSARPAPSRFDADMLAVMASALLSVPLVVPMVADLFGAHAMLPASAQLALATVVQFVFGARFYKAAYKAVLAKAGNMDLLVALGTTAAYGLSVYELIAHPGQMDHLYFEASAVVITLVRFGKWLEVLAKRKTTDAIRALNALRPETARVRVAGEEKDIALSSVRAGDQVVVRPGGRIPVDGTIVEGQSDVDESLITGESLPVAKAVGDAVVTGSIVGNGYLLLHTTAVGADTMLSRIIRIVESAQAGKAPIQRLVDRVSAVFVPVILGIALVTLVGWLLANGNVEAAILNAVAVLVIACPCALGLATPTAIMAGTGVAAQHGILIKDAEALELAHRITVIALDKTGTLTEGKPSLAQFVVNQIPHLDALQLAASVQQASEHPLARAVVNAAHEKGLTLSRASDVTALTGRGIEATVDGRRLVIASERWLLGNAVVVSSELELVGKQAQEAGFSVSWLVQTQPATKVLAMMAFGDAIKNTSPGAIRALSALGVRAVLLTGDNEGSAQLVAKELGINDVRASLLPEDKAKAVAALKNDGTTVGMVGDGINDAPALAAADVGIAMSTGTDVAMHAAGVTLMRGDPALIADAIDISRRTYSKIRQNLFWAFVYNLIGVPLAAFGLLNPIVAGAAMAFSSVSVVSNALLLRTWKPRPRGV

SEQ ID NO: 175515 - protein, 731 aa, Unknown
  Bacterial polypetide isolated from the Sargasso Sea
CASCVGKIEAALKQTPGVQNAEMNFADRTVLVSGTADSQLLVQAVESVGYNAKPFEDKPDTDVVDEKEAADRTYYKKLMRDTFIALSLGIPLMTYSIVVDEMTVETNVERLLWLAVGLLTLGVMFFSGRHFYIGAWKSFKNHSANMDTLIALGTGTAWFYSMLVVLVPEAVPLMARHVYFEATAMIIGLIDLGLALELKARGKTSEAIKRLIGLQAKTATVIRDNKEVQVAIEQVLFNDVIKVRPGEKVPVDGVVVEGHTSIDESMLTGEPMPVEKSHDDEVVAGTLNKSGMFLFKATRVGKDTALAQIIAMVKRAQNSKPPIGRLADVISAYFVPVVMIISVLSALAWLNFGPEPALAFAIVSATTVLIIACPCALGLATPMSVMVGVGKAAEAGVLIRNGEALQTASKISVMILDKTGTITEGTPKVTDIILANFSDEKTVLQLAASLENGSEHPLAMAIVESAHDQGIELLKTEEFNAITGMGVEGRCEGKALLFGNSKLMASKGVGIGNYSEKAQTLAKDAKTPMYFAVDGQLAAIIAVADPIKPDSVSAIKRLQANDIRVIMLTGDNKETAAAVAKKAAISEFFAEVLPEDKANKVHELQQQREVVGMTGDGINDAPALALADVGFAIGTGTDVAIESADITLMRGSLHGLADAIAVSKATLRNIKQNLFGAFIYNVAGIPFAAGVLYPFFGVLLSPVIAGAAMAFSSLTVVSNANRLRLFKAKDH

SEQ ID NO: 175516 - protein, 498 aa, Unknown
  Bacterial polypetide isolated from the Sargasso Sea
VPLTHVHEGDPLRVRPGEKVPVDGIVEEGASSLDESMLTGESLPISKRPGDKVIGATMNTSGALVIRAEKVGSATVLSQIVQLVAQAQRSRAPMQRMADLVAGYFVMAVVAIAILTLVVWGMFGPQPSWVYGLINAVAVLIIACPCALGLATPMSVMVATGRGATQGVLFRDAAAIENLRKVDTLIVDKTGTLTEGRPAFDQAVSAGELDADEILRLAASLDQGSEHPLADAIVSAARERNLVLSPVDDFDSGSGIGVRGKVEGKIMLLGNTAFMQQDNVNVDGLAATAEGWRIKGASVMYLAVDGTLVGLLAVSDPIKQSTPEAVQALKAAGIRVIMATGDGISTAKAVAEQLGIDEVHGEVKPADKLNLVDKLQSEGCIVAMAGDGINDAPALAKANVGIAMGTGTDVAMNSAQITLVKGDLRGISIARDLSNKTVLNMKQNLGFAFIYNALGVPLAAGVLYPFAGLLLSPMFAALAMSLSSASVVFNSLRLRGSV

SEQ ID NO: 175517 - protein, 574 aa, Unknown
  Bacterial polypetide isolated from the Sargasso Sea
GLYSMTVVFFPGYVPEMARHVYFEATAMIIGLINLGLALEIKARGKTSEAIKRLIGLQAKTARVIRDGDDIDIPIEDVLLNDLIRVRPGERISVDGVVVEGQTSIDESMLTGEPMPIEKRKDDEVVAGTINKSGSIVFRAERVGKDTALAQIINMVKRAQNSKPPIGRLADVISAYFVPVVMIIAVMSALAWLNFGPAPEVAFAIVSATTVLIIACPCALGLATPMSVMVGVGKAAEAGVLIRNGEALQSASKITTMVLDKTGTITEGAPKVTDVVIASDHNQDDVLSLAASLESGSEHPLAMAIVESAKETGVPIHSVTDFESIAGKGVAATLNSQRLLFGNEKLMKEKSIELHHYVDKAQRLAAEAKTPMYFAIDSKLVAVIAVADPIKSDSIDAINRLQHNGIRVVMLTGDNRMTAKAVARKAGIVDYVAEVMPEDKANKVLELQREGEIVGMTGDGINDAPALAHANVGFAIGTGTDVAIESADITLMRGSLHGLADAIAVSKATLRNIKQNLFGAFIYNVAGIPFAAGVFYPFLGLLLSPVIAGAAMAFSSLTVVTNANRLRLFKAKEH

SEQ ID NO: 175518 - protein, 584 aa, Unknown
  Bacterial polypetide isolated from the Sargasso Sea
MGTGVAWIYSVVATLAPQLFPPAFRGEDGMVAVYFEAAAVITVLVLLGQVLELRARERTSGAIKALLNLAPKTARRIAADGSEEEISLDLVAVGDRLRVRPGEKVPVDGVVEDGRSSLDESMVTGESMPVTKAKADTVIGGTLNQTGALVIVADKVGRDTMLARIVQMVAEAQRSRAPIQRMADQVSGWFVPVVIAVAVVAFIAWGIWGPEPRFAYGLVAAVAVLIIACPCALGLATPMSIMVGVGRGAGLGVLIKNAEALEHMEKVDTLVVDKTGTLTEGRPAVTQVVPAPGFDEAELLRLAASVERASEHPLALAIVEAAKDRAIATSDVTDFDSPTGRGALGTVEGRRIVLGNARFLADEGVATEALAGQADALRRDGATAIFIGIDGTVGGAFAIADPVKATTPEALAALKAEGIRVVMLTGDNRTTAEAVARRLGIDEVEAEVLPDQKSAVVAKFKREGRVVAMAGDGVNDAPALAAADVGIAMGSGTDVAIESAGVTLLKGDLTGIVRARKLSQATMSNIRQNLVFAFIYNVAGVPVAAGALYPLFGILLSPIIAAAAMALSSVSVVTNALRLNRKAL

SEQ ID NO: 175519 - protein, 829 aa, Unknown
  Bacterial polypetide isolated from the Sargasso Sea
MKTEDASVCIRRVTVKNDNAVQHNNQTASEQTLSPDEGHVLHKVRDPVCGMAILPDRAHSSIRYQDHQLYFCSASCESKFKAHPDRYLTEDACEHSHHHHHDHHEVSPDQIKQPHHQAEKENSEGVWTCPMHPEIRRNGPGSCPVCGMALEPLVATASTGPSDELHDMTRRFWLGLLLAFPVLVLEMGSHLFPDLRNTVPPQYNTWLQLLLASPVVLWCGWPFFARAGMSLRNRSLNMFTLVAMGTGVAWVYSVIATVFPSWFPASFRNMDGLVAVYFEAAAVITVLVLLGQVLELRAREQTSGAITALLNLAPKTARRLDHDGHETDINAEDVLPCDKLRIRPGESIPVDGIVIEGKTTVDESMVTGESMPVTKTKGDPVIGGTINQTGSLIIRAEKVGDETMLSRIVQMVADAQRSRAPIQRMADSVSGWFVPLVILIAVVAFVIWSVWGPEPRMAHGLIAAVSVLIIACPCALGLATPMSIMVGVGKGAQGGVLIRNAEALERLEKVDTLVVDKTGTLTEGSPTVTGIISLNPGGEASLLRVAAAVEKGSQHPLGMAVVRAAQHRGIMIPAVSDFNAPSGKGVSGDVEGQRVVIGNELAMQENSIVIDNQKAVADTLRMEGATVIYVATDGYLAGLIAISDPVKATTPDALKALRQAGIRIVMLTGDNQLTAEAVARKLGIDEVEAGVLPDGKKAVITRLKASGHVVAMAGDGVNDAPALAAADVGIAMGTGTDVAIESAGVTLLKGDLMILNRARHLSEITMKNIRQNLFFAFIYNALGVPVAAGLLYPVYGILLSPVIAAAAMALSSVSVIVNALRLKSVRLGK

SEQ ID NO: 175520 - protein, 758 aa, Unknown
  Bacterial polypetide isolated from the Sargasso Sea
MSQIKLYVATMNCAGCVAKIEKAFAAEPNVSARINLADKQVTVDGKMSSDAALAVMDKAGYPAQLIVDAKAAAEEKRVEDAAEYCLRMRQAIAALAVGIPMMLWGLLGGEMMINRPSMQLGWGIMGLVTLALLVGTGRHFYQGMWRALKAKTTNMDTLIVLGTSTAWLYSMLVVLIPSAFPMDTRHVYFEASVMILGLINLGHALELKARGKTSEAVQRLLGLQSSTAIRIGDNGDEEVEISQLKLGDKLRLRPGDRVALDGVVESGQSLLDEAMLTGEPIPVPKHVGDNLSAGTVNGNGSLVYRVTAGQQDTRLAKIIALVQEAQTSKMPIGRLADKISAVFVPTVVVIALLAAAIWYFVGPEPALSHALVVLTSVLIIACPCALGLATPMSIMVSVGRAAQMGVLVKNGEALQSASKVDCVVLDKTGTVTQGKPQVTDIHWIEGNDQAPNDQKFSDEDKRALLGAIASLEQHSEHPLASAIVSYVKQASIPLPATEIFTNHQGKGIEGRVDGADFLVGNQALMAAFDVQSGEGVTGNHSGFAIEAAAQFAKQGKTAIYVARAGKLVATIAIADPIKDDAKEAISAIRSQGIRVVLLTGDNLQTAQAVAAQVGIDEVIAGVLPEQKQQHIKALQQQGHVVAMVGDGINDAPALMSADVGIAMGSGTEVAIESADMTLLSHQLIVIANLLALSRATIRNIKQNLFGAFIYNSLGIPVAAGVLYPLTGMLLSPVIAGAAMALSSLTVVTNANRLRQQKL

SEQ ID NO: 175521 - protein, 924 aa, Unknown
  Bacterial polypetide isolated from the Sargasso Sea
MHCGGCTGRVQRALAAVPGVVEATVDLDTHTAAVTAHDTVDAAQLVEAVGTAGYGAAVRDPLPEDAATPHAHPVEASPAPMAAAASTARHPLPADSTIIELDIDGMTCASCVSRVEKALAKVPGVTRASVNLATERATVDAASDVTAARLAEAVKQAGYGATPVAGAAIPPAASNAPADLELDIGGMTCASCAGRVEKALAAVPGVAGVSVNLATERASVHGAGALDAAALIAAVTTAGYRASLSATSSAGAAGADAQPAGPAQDPDVRKHLEAIRERDLVIWSAVLSAPLVAPMLVAPFGIDLMLPGWLQLMLASIVQFGYGARFYRAAWHAVKARTGNMDLLVALGTSAAYGLSLWMLLRAPLHPGHLYFEASAVIVTLVRFGKWLESRAKRQTTDAIRALNALRPDRARVIEHGVERDVPLAQVRVGTRVSIRPGERVPVDGRIVTGRSHIDESLITGESLPVPKDDGDPVTAGSINGEGALVVETTAIGAETTLARIIRLVESAQAEKAPIQRLVDRVSEVFVPAILGIALLTLIGWLIAGAGTETAILNAVAVLVIACPCALGLATPAAIMAGTGVAARHGVLIKDAQALELAQRTTVIAFDKTGTLTEGKPSVTAFEAVGVPHDEALALAAAVQRQSDHPLARAVVAAHEAELAARGGAVSSPVAADARAVAGRGVEARVGGQLLALGSTRWRDELGIAVPPALDARAAELERAGNTISWLMRADAPRALLALIAFGDTVKPGARDAIAALSARGVASVLVTGDNRGSAAAVAASLGIGEVHAQVLPDDKARVVTELKRTHGGIVAMVGDGINDAPALAAADVGIAMATGTDVAMHTAGITLMRGDPALVADAIDISRRTYRKIQQNLFWAFVYNLVGVPLAALGWLNPVIAGAAMAFSSVSVVTNALLLRRWKGRAG

SEQ ID NO: 175522 - protein, 801 aa, Unknown
  Bacterial polypetide isolated from the Sargasso Sea
MSDEHIVHHSHPEALAGGPIEAAREDVTDPVCGMRVGSATARSIEFKGTTYYFCSTKCGDAFQAEPAKYVHVSDRPQPAPERKPGVIYTCPMHPQVRQPAPGNCPICGMTLEPVMPAATEERNPELESMTRRFWVALVLSIPLLWITTGAMLPSLDLGALINRLGASLAWPHLMSVTWAQCAQALLATPVVLWAGWPFLERGWRSFVTWQLNMFSLIGLGVAVAYVFSLFALFFPAQLPQAFRQGNELPLYFEAASVIVTLILLGQVLELRARSRTSSAIRDLLSLAPNTAFRVNADGTEEEVGLDVVAVGDVLRVKPGSKVPVDGVVIEGQSSIDESMITGESIPAEKSAGSKVTGATVNQTGAFLMRAEKVGAETLLARIVQMVADASRSRAPIQKLADKVSGWFVLAVLGIAALSFAVWALVGPAPALAHALVAAISVLIIACPCALGLATPVSIIVGVGRGAKEGVLIKDAEALELMEKVDTLVVDKTGTLTEGKPQVQAVEVLASMSEADVLSYSASLEGLSEHPLAQAIITRAKAADAPVLAVRDFAAVPGKGVTGNIDGRAVLLGNAHLMEDNHVDLAVLNERAEALREQGQTVMYLAVDGKLAGCVGVADSVKATTPEAIRLLRASGVKIIMLTGDNPVTANAVAKALSLDGVKAGVLPQDKYKHVQELQNQGRIVAMAGDGVNDAPALAQANVGIAMGTGTDVAMSSARVVLVKGDLRGIAKARALSVGTMKNIRQNLFFAFAYNVIGIPIAAGVLYPWLGILLSPIIASAAMALSSVSVIGNALRLRAAKV

SEQ ID NO: 175523 - protein, 239 aa, Unknown
  Bacterial polypetide isolated from the Sargasso Sea
GHWKPKSRQSLKFNLDPAEKSSLDVLEFSGASLSFESLSRPILSDVGVSVRRGQKIGVIGPNGAGKTTLLRLITGDLGLDSGQLEVAPGVQIGYFHQDHRTLDFELTPVQEVQRLKPRMEYGALRALLGQFQFTKEMVSTKLSRLSGGERARLALLRLLLEENNMLLLDEPTNHLDTDAKEALETALAEFDGGIITVSHDRYFLDKVCDTIWDLRGDGGLVVWPGNYSDYKRGTISTTD

SEQ ID NO: 175524 - protein, 219 aa, Unknown
  Bacterial polypetide isolated from the Sargasso Sea
MTSDEQNFIEIKGVSKHFGDVVAVDNVDLAIKKGELFSILGASGSGKTTLLRILAGLEIPSQGSILIDGVDMTSVAPYDRPVNIMFQNYALFPHMSVFENIAYGLKKEGLQKESIEEKVQRMLSLVKLEGYDNRKPNQLSGGQSQRVALARSLVKEPKVLLLDEPMAALDKKLRQSTQFELMDIHYELGITFVIVTHDQEEAMTLSDRIAIMEQGQFVQ

SEQ ID NO: 175525 - protein, 365 aa, Unknown
  Bacterial polypetide isolated from the Sargasso Sea
MTSDEQNFIEIKGVSKHFGDVVAVDNVDLAIKKGELFSILGASGSGKTTLLRILAGLEIPSQGSILIDGVDMTSVAPYDRPVNIMFQNYALFPHMSVFENIAYGLKKEGLKKESIEEKVQKMLALVKLEGYENRKPNQLSGGQSQRVALARSLVKEPKVLLLDEPMAALDKKLRQSTQFELMDIHYELGITFVIVTHDQEEAMTLSDRIAIMEQGQFVQIGSPNLIYENPRSKFVADFLGNINLLEAIITEQNDKEIIVDCAALGGELKFDQTEQANASEMTVALRPEKVMIEKNMPTNDDQSHIKGIVEDFGYFGNLSIYRVKTESGHVIQVSKQNRDRVEQSIKWEDEVYLSWDNDSLMLLGE

SEQ ID NO: 175526 - protein, 335 aa, Unknown
  Bacterial polypetide isolated from the Sargasso Sea
MTSDEQNFIEIKGVSKHFGDVVAVDNVDLTIKKGELFSILGASGSGKTTLLRILAGLEIPSQGSILIDGVDMTSVAPYDRPVNIMFQNYALFPHMSVFENIAYGLKKEGLQKESIEEKVQRMLALVKLEGYENRKPNQLSGGQSQRVALARSLVKEPKVLLLDEPMAALDKKLRQSTQFELMDIHYELGITFVIVTHDQEEAMTLSDRIAIMEQGQFVQIGSPNLIYENPRSKFVADFLGNINLLEAIITEQNDKEIVVNCAALGGELKFDQTEQANASEMTVALRPEKVMIEKNMPTNDDQSHIKGTVEDFGYFGNLSIYRVKTESGHVIQVSK

SEQ ID NO: 175527 - protein, 365 aa, Unknown
  Bacterial polypetide isolated from the Sargasso Sea
MTSDEQNFIEIKGVSKHFGDVVAVDNVDLTIKKGELFSILGASGSGKTTLLRILAGLEIPSQGSILIDGVDMTSVAPYDRPVNIMFQNYALFPHMSVFENIAYGLKKEGLKKESIEEKVQRMLTLVKLEGYENRKPNQLSGGQSQRVALARSLVKEPKVLLLDEPMAALDKKLRQSTQFELMDIHYELGITFVIVTHDQEEAMTLSDRIAIMEQGQFVQIGSPNLIYENPRSKFVADFLGNINLLEAIITEQNEKEIVVDCAALGGELKFDQTEQANASEMTVALRPEKVMIEKNIPTNDGQSHIKGIVEDFGYFGNLSIYRVKTESGHVIQVSKQNRDRVEQSIKWEDEVYLSWDNDSLMLLGE

SEQ ID NO: 175528 - protein, 600 aa, Unknown
  Bacterial polypetide isolated from the Sargasso Sea
MRRRVVREAGWQACGIPVRRRWGACRRVGGPVGRRPGCWKCAAGTAWSAVSPTPAKIHGFPSISPLTGPAVLSTANITMQFGPKPLFENISVKFGEGNRYGLIGANGCGKSTFMKILGGDLEPSAGNVALEPNVRLGKLRQDQFAYEDVRVLDVVMMGHTEMWAAMTERDAIYANPEATDDDYMHAAELEGKFAEYGGYDAEARAGALLLGIGIEEKFHNGTMSEVAPGWKLRVLLAQALFSKPDVLLLDEPTNNLDINSIRWLEQTLNEYNSTMIIISHDRHFLNSVCTHMADMDFGTLKVWPGNYDDYMLASAQARERQAAANTRAKERVAELQDFVRRFSANKSKARQATSRAKQIDKIKIEEFKPSSRQNPFIRFEFEKKLHNVAVVAEEITKKYERTIFQNFNLSVQPGERIAIIGENGAGKTTLLRSLLGALTLDHGTVKWSENANVGYMPQDTYEEFPNDITLMDWIDQYRKDGDDETMVRGTLGRLLFSSDDIRKSVKVLSGGEKGRMIWGKLMLGRHNVLLMDEPTNHMDMESIESLQIALEQFEGTLIFVSHDREFVSGLANRIIEVRTDGTLFDFGGNYEEFLTSQGQE

SEQ ID NO: 175529 - protein, 110 aa, Unknown
  Bacterial polypetide isolated from the Sargasso Sea
MHHAADTSVDLWRVLAQVGLAGFEENPTGQLSAGQQRRVALARLWLRDKPALWILDEPFTAIDKQGVKVLERLFLIHAERGGMVILTTHQDMTLMQGRLKTLSLTPLLQE

SEQ ID NO: 175530 - protein, 362 aa, Unknown
  Bacterial polypetide isolated from the Sargasso Sea
ILKSFGETKVLRDVSLEIYDGEFTALVGPSGCGKSTLLRILAGLEDLDDGSVRIDNIDVSEASASERNLSMVFQSYALYPHLTVRENIAVPLRMRELNSSQRLPFFGSFLTPTPIKQNISDKITAAAKMLEIDHLLERKPGQLSGGQRQRVALGRALVRKPKAFLLDEPLSNLDAKLRVQTRSEITQLHRQLKSTFVYVTHDQVEAMTMADRIAVMKDGEILQYDTPENIYNKPSSVHVAEFIGSPKINIFPAGLINQNYDSKLKLGVRPENIKLNEGTCRLKVIISHVENLGPEIQVQFELPSNKDRFYSKFDPKYLGHFPVDSEAQIGFDEVDCHLFDDKGRRLDPSRVRQFFESLNQAA

SEQ ID NO: 175531 - protein, 236 aa, Unknown
  Bacterial polypetide isolated from the Sargasso Sea
MEFATAKKRSCGRLAPFFKTSFLGWSSQVVLEACGLTCSKRDRTLFEGLSLVVNTGELLYLRGPNGAGKTSLLRILTGLSAPESGAVLYNGVNISEDKTGYYRDLFYLGHKSGTNGSLSALDNLSFWLAQHSISVQENTLYDVLAKVGLVGLEDVPVRYLSAGQQRRVALSRLWLKPAKVWILDEPFTALDVKGVHMLEKSMKEHVGRGGLIITTSHQHLSETAGEHRVFDLEYRF

SEQ ID NO: 175532 - protein, 365 aa, Unknown
  Bacterial polypetide isolated from the Sargasso Sea
MTSNEENFIEINGVSKNFGEVVAVDNVDLAIKKGELFSILGASGSGKTTLLRILAGLEIPSQGSILIDGVDMTSVSPYDRPVNIMFQNYALFPHMSVFDNIAYGLKKEGMEKESIQEKVERMLALVKLEGYESRKPNQLSGGQSQRVALARSLIKEPKVLLLDEPMAALDKKLRQSTQFELMDIHDELGITFVIVTHDQEEAMTLSDRIAIMEEGQFVQIGSPNLIYENPKSKFVADFLGNINLLEATITKQNDSQIVVNCAALGGELKFNQTEQSNALEMTVALRPEKVVIEKSKPTNDQQSHVKGIVEDFGYFGNLSIYRVRTESGHIIQVSKQNRDRVEQSIKWEDEVYLSWENDSLMLLGE

SEQ ID NO: 175533 - protein, 206 aa, Unknown
  Bacterial polypetide isolated from the Sargasso Sea
MLEARELLCERDDRILFSELSFRVNAGEWVQITGSNGAGKTTLLRLLTGLARPDAGEVCWQEQPLHHVRDSYHQQLLWIGHQPGIKTRLSALENLRFFHHDGDIAQCLAALAQAGLAGYEDIPVNQLSAGQQRRVALARLWLTRARLWILDEPFTAIDVNGVERLTQRMAQHTEQGGIVILTTHQPLNVETDKVRRISLTSERATQ

SEQ ID NO: 175534 - protein, 365 aa, Unknown
  Bacterial polypetide isolated from the Sargasso Sea
MTSGEQNFIEIKGVSKHFGDVVAVDNVDLAIKKGELFSILGASGSGKTTLLRILAGLEIPSQGSILIDGVDMTSVAPYDRPVNIMFQNYALFPHMSVFENIAYGLKKEGLQKESIEEKVQKMLALVKLEGYENRKPNQLSGGQSQRVALARSLVKEPKVLLLDEPMAALDKKLRQSTQFELMDIHDELGITFVIVTHDQEEAMTLSDRIAIMEQGQFVQIGSPNLIYENPKSKFVADFLGNINLLEAIITEQNDKEIVVDCAALGGELKFDQTEEANASEMTVALRPEKVMIEKNMPTNDDQSHIKGIVEDFGYFGNLSIYRVRTESGHVIQVSKQNRDRVEQSIKWEDEVYLSWDNDSLMLLGE

SEQ ID NO: 175535 - protein, 161 aa, Unknown
  Bacterial polypetide isolated from the Sargasso Sea
GYVPQQIYLSDTTVSENIAFGLNEDEISQESVERAAKIANLHEFIINELPSQYKTIIGERGVRLSGGQRQRIGIARALYHEPKLLIFDEATSALDNITEKSVMEAIYNKDYKITKILIAHRLSTVKKCDKIFLFDKGELKHEGNYQELIENSEKFRSSVND

SEQ ID NO: 175536 - protein, 305 aa, Unknown
  Bacterial polypetide isolated from the Sargasso Sea
KYNEGLDINKTLDGEVQIDNVSFSYSHDSDPVLNNISIRATKGETVALVGKSGSGKSTIVNLLNRFYDDYEGKITIDGYDIKKIKLTDLRNSISYVSQDPTLFNDTVKNNIAYGLKEVTDTEVFQAAREANAYAFIMSLPEGFNTIIGDKGVTLSGGEKQRVAIARALLKKSSILIFDEATSALDNESEKEIQSAIEKASKDKTTFIIAHRLSTVEQADQICVLENGIITQSGTHNELIKEEGLYNVLQGNPELIEDTKSVNLEKDFVPTLINEKKSFWEEFNFGNIALTPLSFLYWSVSTFKNS

SEQ ID NO: 175537 - protein, 191 aa, Unknown
  Bacterial polypetide isolated from the Sargasso Sea
FYDPDSGEILINKKNIKKYKQNSLRQMIGVVPQDTVLFNDTIFYNISYGLINSSEAEVINAAKIAGIHDFIESIPDKYNTIVGERGLKLSGGEKQRVAIARAVLKNPSILFFDEATSALDTNTEKEINKNLNKISQGKTTLIIAHRLSTVSNADKIIVIDKGNIVEEGDHSSLLNKDGLYALMWNKQKHQN

SEQ ID NO: 175538 - protein, 126 aa, Unknown
  Bacterial polypetide isolated from the Sargasso Sea
RGLKLSGGEKQRVAIARTLLKNPPILVLDEATSALDTLTEREIKQSLNDLAEKRTTIIIAHRLSTVVEANKILVLDKGKIIEQGTHKQLLRKKGLYADMWSTQQTIKKAEATLKNVKPEYKKLLSN

SEQ ID NO: 175539 - protein, 224 aa, Unknown
  Bacterial polypetide isolated from the Sargasso Sea
MKNVRFSYPKTFDEALSGISLKIKAGESIGLVGPSGSGKTTLVDVLLGVLEPQKGKITFNGKLLGPVLSDWRAKVAYLPQQVYLIDNSVRCNVALGLSEEEIDDSRVKESLQKARLLETIEKLPQGLNTMLGERGIRLSGGQRQRVALARAFYHEREVLVMDEATSALDNETELEIIEEVKLLKGQKTLIVIAHRLSTVQHCDMIYRLEYGKIIESGTPDHVLN

SEQ ID NO: 175540 - protein, 129 aa, Unknown
  Bacterial polypetide isolated from the Sargasso Sea
MEALDAVGFLDDLKTLPMGLETPLPGEGRQLSGGQRQKLAIARALIGQPKLLLLDEPTSALDPRSQATVLSTLRQLRCTRLLIAHRLSTVKQADLILVLQNGELVQQGDYASLADSDGAFRALMQQQGV

SEQ ID NO: 175541 - protein, 254 aa, Unknown
  Bacterial polypetide isolated from the Sargasso Sea
DISSGFKISNVSFSFPGRSRNVLDNLDVDIPVGKTFAIVGPSGAGKTTLAQMLMRFWDPDKGSIMFNEIDLKNFKLEDLRSRIALVAQDTYLFNNSLRDNILIAKPDATHQELQEAVNLSALSEVVQSLPEGLDTEVGERGASLSGGQRQRVAIARAFLKDAPVLILDEATSHLDAVSENIVHKALNQLKKNRTTLIIAHRLSTVSDADQIIVLDKGHIEEIGTHRELFKNKGLYRKLISKQLSRTDIQRDKAL

SEQ ID NO: 175542 - protein, 157 aa, Unknown
  Bacterial polypetide isolated from the Sargasso Sea
FYNIAYGRPEASPQEVQNAAELAQVHQFIMGLPDGYNTPVGERGLKLSGGEKQRVAIARALLKDPKIFLFDEATSALDTKTEKEIQTSLGQISSGSTTLVIAHRLSTVIDADEILVLSNGEIKERGQHSSLLNLDGLYADLWRRQQDAKSKQNISSE

SEQ ID NO: 175543 - protein, 220 aa, Unknown
  Bacterial polypetide isolated from the Sargasso Sea
SFSIPEGKSLAIVGPTGAGKSTISKLLFRFYDPDSGEILINKKNIKKYKQNSLRQMIGVVPQDTVLFNDTIFYNISYGLIDSSEEDVINAAKVAGIHDFIESIPNKYNTIVGERGLKLSGGEKQRVAIARAVLKNPSILFFDEATSALDTNTEKEINKNLNKISQGKTTLIIAHRLSTVSKADKIIVLDKGNIVEEGNHLSLLNKNGLYALMWNKQKHEN

SEQ ID NO: 175544 - protein, 319 aa, Unknown
  Bacterial polypetide isolated from the Sargasso Sea
INRFKNSISYVSQDPTLFNDTVRNNIAYGLGEVSDSEVFQVAREANAYEFIMSLPDGFNTIIGDKGATLSGGEKQRVAIARALLKKSSILIFDEATSALDNESEKEIQSAIEKASKDKTTFIIAHRLSTVEKADQICVLENGIITQSGTHNELIKEEGLYNLLQGKPELIEDSKTIDLEKDFVPTLINEKKSFWDEFNFGNIALTPLSFVYWSVSTFKNIFFIPKASNEGEVPVVVVGNVTVGGNGKTPLVSQIALDLKNLGFKPGIILRGYKGSFTGTKLVNDNTTAKEVGDEAIFHFNRGFNVVVDRDRSRGPFLFR

SEQ ID NO: 175545 - protein, 336 aa, Unknown
  Bacterial polypetide isolated from the Sargasso Sea
VATGLGGLAVVIAGAYMVEGGRLESGYLPLLTLLSMAAFLPISEISNVSRQLADTLGSTRRLYAVDNEPVPVSDGNGVAFNMSGGGLPIVLEDVDFQYEGGNRQALHGVRFEVPAGKTVALVGSSGAGKTTIAHLLMRFWDPGSGVIRIGGHDLRDYALDDLRSKLALVAQDTYLFNDSLRANILIANPDVDETTLMAAVVRASLEEFVGGLPDGLDTKVGERGMSLSGGQRQRVAIARAFLKDAPVLILDEATSHLDAVNEQAVRAALEELMEDRTTIVIAHRLSTVRNADLIVALNEGRVFESGTHDELLAKSGLYAQLVAHQLAGAAGRTAAE

SEQ ID NO: 175546 - protein, 235 aa, Unknown
  Bacterial polypetide isolated from the Sargasso Sea
GRSKNVLDNLNVDIPVGKTFALVGLSGAGKTTLAQMLMRFWDPDQGSIKFDEIDLKNLKLHDLRSKIALVAQDTYLFNNTLKDNILIAKPEATEQELQEAVNFSALSEVVQSLPEGLETEVGERGASLSGGQRQRVAIARAFLKDAPVLILDEATSHLDAVSENIVHKALNQLKKNRTTLIIAHRLSTVRDADQIIVLDNGHIEEIGTHEELFKNNGLYKKLISKQMSGSGLQHN

SEQ ID NO: 175547 - protein, 693 aa, Unknown
  Bacterial polypetide isolated from the Sargasso Sea
MQPGGRSTHEKRRQPASATIERSGIVRESAQPGRATSSRVPGWHAAGRRAAANSVASILSPADPMRRTPSSEPSPISTQPRNDWQTILSLLPYLATYKWRVGFALSCLIGAKVANLGVPIVMKRIIDGLASVKHLTALGRAHDSPGIVLLGGVGLMVVAYAVVRLSTSLFTELREILFAKVTESAVRQLALKVFRHLHALSLRFHLDRQTGGMSRDIERGTRGITQLISYSLYSILPTLVEVGLVLGFFIVKYEAYYAIVTFIALAAYIVFTVKVTEWRTHFRRTMNELDSKANSRAIDSLLNYETVKYFGNEEWEAHRYDENLKRYRTAAIKSQRSLSALNFGQQAIIGTGLVFILWRATEGVMAGRLTLGDLVLINTFMLQLYIPLNFLGVVYRELKQSLTDMDRMFTLLGATQEVPDVPDAPALRVSGAQVRFEHVNFSYEPARQILHDVSFTIPAGSTTAVVGHSGSGKSTLARLMFRFYDLDRATGGAITIDGQDIRDVAQDSLRASIGIVPQDTVLFNDSIYYNIAYGRPSATREEVIAAARAAHIHDFIEGLPKGYETPVGERGLKLSGGEKQRVAIARTILKNPPILLFDEATSALDSRSERAIQHELDQIARERTTLIIAHRLSTVVHAQQIIVMDKGRIVERGTHAELLSANGLFAQMWALQQQRAAETPESAETVSAGEGGR

SEQ ID NO: 175548 - protein, 392 aa, Unknown
  Bacterial polypetide isolated from the Sargasso Sea
KRLDKLGSEDREALGDLNAFVVDTVQGLGEVLAFQQTTTRSKSFLQRVQRHIDTRLPFYSDLSRQTALLEVATGLGGLAVVVTGATLVSSGDLNPTTLPLLTLLALACFLPVSEIVHVGRQLADTLGAARRLHQVHNEPVVVNSATAPTPINVHNATNAISFHQVEFSYPGTEIHALAGVSFEVAAGSTVAIVGPSGAGKTTAAQLILRFWDADTGHIRLFDQSLCDLDLDDLRAHVAMVSQETYLFNDTLAQNILMARPDATEAEVTAAIEQASLTDFVHNLPEGLETNVGERGVRLSGGQRQRVAIARAFLKDAPVLILDEATSHLDAVNEAAVHESLQQLMHGRTTLIIAHRLSTVRNSTQIVVMEAGKIVQIGDHDSLLQEGGLYSRL

SEQ ID NO: 175549 - protein, 561 aa, Unknown
  Bacterial polypetide isolated from the Sargasso Sea
MTFGFGVTRVVAFIGIGAVSALAVRAVKTGEPFVDLLILLAVLAPVAGVFHWFESWIAHDMAFRLLAEMRIALFEKLDRLAPAYMVRRRTGDMVAMATHDVETVEYFFAHTVAPAFVAVLIPSIVVGVLVFFGWELAAALLPFLVLVAMTPFFTRKRIDELGSRAREALGELNAHAVDTIQGLGEIVAFQRTPERRAELIERTENHHVVRLPFFRDLTFQTSLLEVATGLGGLAVVVAGAVLVDAGRLESGILPLLTLLSMAAFLPISEISNVGRQLADTLGSTRRLYAVDNEPVPVKDGPGVTEDTGARGLPIELDGVDFQYEAGNRRALHGAAFESPAGKTVALVGPSGAGKTTIAHLLMRFWDPEEGAIRLGGRDLRDYTLDDLRRRIALVAQDTYLFNDTLRANILIANPDADEVALMAAIDRASLGEFVAGLPDGLETKVGERGMRLSGGQRQRVAIARAFLKDAPVLILDEATSHLDAVNEHAVREALEELMADRTTIVIAHRLSTVRGADLIVALNEGRVIETGTHEALLAKGGLYAQLVAHQLAGAAGRSAAE

SEQ ID NO: 175550 - protein, 242 aa, Unknown
  Bacterial polypetide isolated from the Sargasso Sea
MEEVSFTYPGRSTPALDAVNLSIEPGQTLALVGPSGAGKTTLAHLLLRFWDPQSGRIVFQGYNLEEHRLDDLRAHMALVAQDTYLFNSTLRSNILLARPDADEFALEHAIERAALSDFVAGLPDGLDTPVGERGMRLSGGQRQRVAIARAFLKDAPILILDEATSHLDAISEQKVRQALEELMHDRTTVIIAHRLSTVRDADKIVAMEDGRIAEQGSHAELLARGGLYAHLVQRQMAGTAAE

SEQ ID NO: 175551 - protein, 684 aa, Unknown
  Bacterial polypetide isolated from the Sargasso Sea
MKIITGLLGCPPKDIDITPDEPFDIIVDRLQQQTDSRIRQRHIAPRKLAKQTLPLVLLSDNGNPCVLAQRQGEQALILDPAVGNPQVIDQQALLTRWNGRVYQVRRQQSRFDIRWFIPAFLQQKRLLGEILLFSLVLQLLALISPLFFQVVMDKVLVHQAWSTLDVLVFGLLITALVEVCLRGLREYQYAHTANRIDIQLGLRMVQHLFALPLLYFKSRQVGAIVTRVQELNTIREFLTGTMFTLTVDVLFMFVFLAVMASLSAMLTLAILLSIPAYVLIAWWITPRMQQAVEQQFGHAAANTAFLNETVAGAETLKSLALEPRFVRRWDEQTSQMVTAGYRVQQLNNASQHGVMWLQKLVSAGVLWLGASEVISLQLTIGQLIAFNMMAGHVAQPLSRLVELWGQFIQTRIAVDKLGDMLNLPPEHQRDGAGQVSAGAILLERVRFRYQPDAPLIIDDLSLTIAPGETLGVVGSSGSGKSTLARLLLRLYQPEQGEIFIDGQPIRQLPLHHLRQQMGVVLQENHLFNKSVRDNIAQSMPHASLDQIIRAATLAGAHDFILRLPLGYDTVLAEGGSSLSGGQRQRIAIARTLLADPRILIFDEATSALDDESQALIQRNMRQIACGRTVITIAHRLSTVRQCDRIIVLQRGKIVEQGDHASLLARGEHYARLWRLQQDLHEETP

SEQ ID NO: 175552 - protein, 1179 aa, Unknown
  Bacterial polypetide isolated from the Sargasso Sea
MYFDRRLWAMMAGLRWRVAAAVALGLLAMGVGILRFVFLGRVLALVFSGAPARSIGEAVVATAACVLLRAWLDHRRTVLAQHTAGRVQATLRARLFDRIAALGPAWFSGERTGGVMLAVVDGVEQLQTFFGTYLPQLVIAACAPVMIFAVLAWWDVPTAAILLVAALVTLALPQLVHRADKRAALARSAAFKAFGEEFLDAVQGLPTLKAFGQSTAFGAKLAAKARALSDSTFWVLALGLLTRFFTDLGTGLGAAAAIAVGAWRVRHGDMSLEALLIVLMSGSEIFRPLRDLRSVLHQGMIGQSAANAIHALLDADSHAPAADAPRVTGLRPEIAFDAVSFAYPGRRADAHAALSFSVREGETVAIVGPSGAGKSTIVRLLLRQHDAQGGAIRIGGHDVRTLDAGQVREMIAVVAQDATLFDGSVADNLRLGRPDASDADMIAAARAANAHDFISALPDGYATRIGERGLMLSGGQRQRLAIARALLRDAPILLLDEALSSVDAENEALIQQALDRLTRGRTTLVLAHRLSSVIGADRILVLDQGQVVDEGTHAALIARDGPYRRLMGPQLEAVAESVGAAATAGPTARASSGPQVRPLNDDAAEIGWPETLQTLLRFVRPWTGKVVLTVLFGIGRVLAFIGVGVIGALVVGAVPGGHVSPTLVTALLVIAPLAAVLHWLESWLAHDMAYRLLAEMRIALFATLERLAPAGLLRRRSGDLVSLATQDVETVEYFYAHTLAPAFVAVLVPAAVLVLLASVAWPLALVLLPFLSWAGLAPVLARRDVDRLGTGAREALGQLGAHLTETIQGLAELTAFQAVARRRAAFVAEVDAYRKQRAKLLDDLSAQSAALEIASGLGGLVVAALGALLCARGWFPRESLPLLVLVAVAAFMPVAEIGQVARQLADTIASTRRLRALEKEPVPVTDGTQAMPADPAVRFEATSFTYPGRSVPAIDRVSFEVRPGSTVALVGASGAGKSTVASLLLRFWDPQQGRVTLGGVDLRDLRLDDLRQHIALVAQDTYLFNDTLEANIRLAASDASDADVQRAIDHAALGDFVARLPDGLATRVGERGVQLSGGQRQRVAIARAFLKDAPVLILDEATSHLDTISEQQIRAALEDLMTQRTSIIIAHRLSTVRNADLILVMEHGSVIEAGRHADLMARQGAYARLVSHQASGVAA

SEQ ID NO: 175553 - protein, 128 aa, Unknown
  Bacterial polypetide isolated from the Sargasso Sea
MQRHMLKSKIHRAAVTHCELHYEGSCAIDEDLLEASGIIENERIDIWNINNGERFSTYAIKGERGSGMISLNGSAARRAQLGDLVIIAAFAMVDEAELQAGWKPKLVFIDDGNKIKGHRDHVPTQNWT

SEQ ID NO: 175554 - protein, 128 aa, Unknown
  Bacterial polypetide isolated from the Sargasso Sea
MQRNMLKSKIHRVAVTHCELHYEGSCAIDEDLLEAANIVENERIDIWNINNGERFSTYAIKGERGSGMISLNGSAARRAQLGDLVIIAAFAVVDEAELKAGWKPDLVFVDDNNKIKGSRDHVPTQNWT

SEQ ID NO: 175555 - protein, 303 aa, Unknown
  Bacterial polypetide isolated from the Sargasso Sea
NANKIMAASADKNMIDKDEYPASAAIESRCATMMATLWNAPSPTTTIGVSTIGSSEACMLGGLALKRRWKQARTAAGKDTNTPNLVMSSGVQVVWEKFCNYWDVEPRYVPVTEEHPTLDGATVTDYIDENTIGVVAIMGVTYTGSYEPVAEIAKALDDHQAATGLDVPIHVDAASGGFIAPFLQPDIVWDFRLPRVKSINTSGHKYGLVYPGLGWVVWREKGDLPEDLIFNVSYLGGNMPTLAINFSRPGSQVLLQYYMFLRLGFAGYRRVQAESQDVARFLADEIAKIPAFTLWSDGSDIPV

SEQ ID NO: 175556 - protein, 720 aa, Unknown
  Bacterial polypetide isolated from the Sargasso Sea
MKSLKVAASLSVRSCFEIDREVVNVLTTDFCDVGAAVVSVDDVRNGIVEKIKNTGLKLPIFVSVCCEETFPDDICSSITGVFELCGSNTDFYGKQVETAVQKYEQALLPPFFGTLKKYVEMGNSTFACPGHQGGQFFRKHPVGRQFFDFFGETIFRSDMCNADVKLGDLLIHEGAPLDAQKYAAKVFNADKTYFVLNGTSSSNKVATNALLAKGDLVLFDRNNHKSNHHGALIQAGATPIYLETARNPFGFIGGIDAHCFQESYLREQIRAVAPERADEQRPFRLAIIQLGTYDGTIYNARQVVDRIGHLCDYILFDSAWVGYEQFIPMMNDCSPLLLELTPEDPGIIVTQSVHKQQAGFSQTSQIHKKDSHIKGQARYCNHKRFNNAFMMHASTSPFYPLFAALDVNAKMHEGASGRYLWREAVKAGIEARKLLLKKCKYIKPFIPSMIEGRPWQDYQTEQMADDLRFFEFEPGQKWHSFDGYEKGQYFIDPCKFLLTTPGIDAETGKYTEFGIPATILANFLRENNIIPEKCDLNSILFLMTPAEDMAKMQHLVSQISRFEKLVDEDAPLSEVLPNVYNANKARYKDYTIRQLCQEMHNLYVSHDVKQLQKEMFRQAHFPTKVMDPQEANLEFIRGKVELVPLSQIEGRIAAEGALPYPPGVLCVVPGEIWGGAVQRYFLALEEGINLLPGFSPELQGVYLENTPDGKIQALGYVLNK

SEQ ID NO: 175557 - protein, 720 aa, Unknown
  Bacterial polypetide isolated from the Sargasso Sea
MKSLKVAASLSVRSCFEIDREVVNVLTTDFCDVGAAVVSVDDVKNGIVEKIKNTGLKLPIFVSVCCEETFPDDICSSITGVFELCGNNTDFYGKQVETAVQKYEQALLPPFFGTLKKYVEMGNSTFACPGHQGGQFFRKHPVGRQFFDFFGETIFRSDMCNADVKLGDLLIHEGAPLDAQKYAAKVFNADKTYFVLNGTSSSNKVATNALLAKGDLVLFDRNNHKSNHHGALIQAGATPIYLETARNPFGFIGGIDAHCFQESYLREQIRAVAPERADEQRPFRLAIIQLGTYDGTIYNARQVVDRIGHLCDYILFDSAWVGYEQFIPMMNDCSPLLLELTPDDPGIIVTQSVHKQQAGFSQTSQIHKKDKHIKGQARYCNHKRFNNAFMMHASTSPFYPLFAALDVNAKMHEGASGRYLWREAVKAGIEARKLLLKKCKYIKPFIPSMIEGRPWQDYQTELMADDLRFFEFEPGQKWHSFEGYEKGQYFVDPCKFLLTTPGIDAETGKYTEFGIPATILANFLRENNIIPEKCDLNSILFLMTPAEDMAKMQHLVSQISRFEKLVDEDAPLSEVLPNVYNANKARYKDYTIRQLCQEMHNLYVSHDVKQLQKEMFRHAHFPTKVMDPQEANLEFIRGNVELVPLSQIEGRIAAEGALPYPPGVLCMVPGEIWGGAVQRYFLALEEGINLLPGFSPELQGVYLESTPDGKIQALGYVLNK

SEQ ID NO: 175558 - protein, 710 aa, Unknown
  Bacterial polypetide isolated from the Sargasso Sea
MNIIAILNHLGVFFKEEPIRQLQASLERKGFEVVYPVDVADLLKLIEKNPRVCGAIFDWDKYSLGLCKEIHDRNEKLPIFAFANDQSTLDIHLTDLRLNVHFFEYRLGMADDIALKMGQATQEYQDAILPPFTKALFKYVEEGKYTFCTPGHMGGTAFQMSPAGSIFYDFYGPNAFKADVSISMPELGSLLDHSGPHKEAEEYIARTFNADRSYIVTNGTSTANKIVGMYSAPAGSTVLVDRNCHKSLTHLMMMNDVTPLYFRPTRNAYGILGGIPQSEFSRETIAAKVAATPGALAPRYAVITNSTYDGLLYNTGFIKEALDTPYIHFDSAWVPYTNFSPIYEGKCGMSGEAMPGKVFYETQSTHKLLAAFSQASMIHIKGDVEEETFNEAFMMHTSTSPQYGIVASTEISAAMMRGNTGKRLIKDSIDRAISFRKEIKRLREQSEGWFFDVWQPDDIDTVECWKLDPKDDWHGFKDIDDDHMYLDPIKVTLLTPGMGRNGQLLDNGIPASLVSKFLDERGIVVEKTGPYNLLFLFSIGIDQSKAMQLLRALTEFKRGYDLNLTIKSILPSLYREDPSFYEGMRIQELAQRIHELTSKYRLPELMFKAFDVLPEMKMTPHAAWQQELAGNVVEVPLRDMVDRISANMILPYPPGVPLVLPGEMVTQDSLPVLEFLEMLCEIGAHYPGFETDIHGLYRQADGSYTVKVLR

SEQ ID NO: 175559 - protein, 643 aa, Unknown
  Bacterial polypetide isolated from the Sargasso Sea
INQLNEYLPLYAFINTHSTMDVSAHDLRMALWFFEYALGQSEDIATRIRQYTSEYLDNITPPFTKALFTYVKEGKYTFCTPGHMAGTAYQKSPVGCLFYDFFGGNTLKADVSISVTELGSLLDHTGPHLEAEEYIARTFGAEQSYMVTNGTSTSNKIVGMYAAPAGSTLLIDRNCHKSLAHLLMMSDVVPIWLKPTRNALGILGGIPRREFTHASIERKVEETNQAQWPVHAVITNSTYDGLLYNTNWIKQTLDVPSIHFDSAWVPYTHFHPIYQGKSGMSGERVPGKVIFETQSTHKMLAALSQASLIHIKGDYDEDTFNEAFMMHTSTSPSYPIVASIETAAAMLRGNSGKRLINRSVERALHFRKEVQRLREESDGWFFDIWQPEKVDEAECWPVAPGEDWHGFVDADADHMFLDPVKVTILTPGMDEQGNMSEEGIPAALVAKFLDERGVVVEKTGPYNLLFLFSIGIDKTRAMGLLRGLTEFKRSYDLNLRVKNMLPDLYAEDPDFYRNMRIQDLAQGIHQLIRQHDLSGLMLRAFDTLPEMKMTPHQAWQRQIKGEVETVALDQLVGRVSANMILPYPPGVPLLMPGEMITAKSRAVLDFLLMLCSVGQRYPGFETDIHGAKLGEDGLYRVRVLKMA

SEQ ID NO: 175560 - protein, 285 aa, Unknown
  Bacterial polypetide isolated from the Sargasso Sea
LRLKSREINPPLIIRFNDILKDRINALHDSFFNAIKTYKYKNIYQGVFPVKCNQQKNVLEKIIEFGSQWNFGLEVGSKSELLIGLALLENQNSLLICNGYKDKKYIQIATLARKLGKNPIIVIEQRDEVKRIIQAVQELNATPLIGIRAKLSSKSSGRWGKSIGDNSKFGLSIPEIMLTIKELKEANLINEMKLLHFHIGSQISDIAVIKDALQEASQIYVELCKLGAPMQYIDVGGGLGIDFDGTKTSSNTSTNYSLQNYANDVIATIKDSCELNNIKHPTIIS

SEQ ID NO: 175561 - protein, 311 aa, Unknown
  Bacterial polypetide isolated from the Sargasso Sea
ALPLGSQIANIRDIRQGVSEAARFYCELRELGASINCFDVGGGLAVDYDGTRSQSNNSMNYGLSEYANNIVNVLTDICNEYEQPMPRIISESGRHLTAHHAVLITDVIGTEAYQVEEIQPPAEESPQLLHNMWQSWTEISGRADQRALIEIYHDSQSDLQEAQSLFALGQLSLAERAWAEQANLRVCHEVQGLLSTKNRYHRPIIDELNEKLADKFFVNFSLFQSLPDAWGIDQVFPVLPLSGLDKAPERRAVMLDITCDSDGIVDQYVDGQGIETTLPVPAWSAESPYLMGFFMVGAYQEILGDMHNLFG

SEQ ID NO: 175562 - protein, 195 aa, Unknown
  Bacterial polypetide isolated from the Sargasso Sea
EDELPDELKGLKAAFASTYYANLSVFRSAPDTWAIDQLFPVMPIHRLEEQPRELGSFADLTCDSDGKLARFIASGSAKPLLELHELKDGEPYWIGLFLGGAYQEVMGNLHNLFGSTNAVSIRLSPGGPYRVEHVVRGQTNSDVLEAMEHDPEALLERLRQASEEAIGSGDLSISAARRLMQHLEGSLRQTTYLEE

SEQ ID NO: 175563 - protein, 288 aa, Unknown
  Bacterial polypetide isolated from the Sargasso Sea
VLITDVIGTEAYQVEEIQPPAEESPQLLHNMWQSWTEISGRADQRALIEIYHDSQSDLQEAQSLFALGQLSLAERAWAEQANLRVCHEVQGLLSTKNRYHRPIIDELNEKLADKFFVNFSLFQSLPDAWGIDQVFPVLPLSGLDKAPERRAVMLDITCDSDGIVDQYVDGQGIETTLPVPAWSAESPYLMGFFMVGAYQEILGDMHNLFGDTNSAVVSIEENGMTNIESVLAGDTVADVLRYVNLDAVDFMRTYEELVNQHIAEDERAQILEELQVGLKGYTYLEDFS

SEQ ID NO: 175564 - protein, 257 aa, Unknown
  Bacterial polypetide isolated from the Sargasso Sea
MWASFVQLTDLTDDRALIEIYHDSQGDLAEAHNQFALGLLDLTQRAWAEQVNLRICYELNKHMDNKNRFHRPIIDELNARLADKFFVNFSLFQSLPDAWGIDQVFPVLPLSGLTEAPKKRAVLLDITCDSDGALEHYVDGQGIESTLPVPEYSADKPYLMGFFLVGAYQEILGDMHNLFGDTHSAIINMDDQGVASISEINQGDTVADMMRYVHLDVESFQQSYAQLVSAKIDKNEQQSVLDELQNGLNGYTYLEEL

SEQ ID NO: 175565 - protein, 296 aa, Unknown
  Bacterial polypetide isolated from the Sargasso Sea
MGHSVKIVVEKLSELTTLLEEIDNLGIEPAIGIRIRLNSVGKGKWQNTGGEKGKFGLTAGQVLSAVEVLKKHNKLHLMQMVHFHIGSQIANIRDIHRALRECARHFAELTQLGVPLNTVDVGGGLGVDYEGSGSRSACSMNYTVEEYARNVVNAFAEVCDQHDLTHPAIITESGRALTAHHAVLITDVIDVEKAPNHLNPEPPLENSVLVLDEMWQCLQRLNPRMALEIYHDAMHLFSEAHDQYVHGLVSMLEWAKIEQLYFTILHRVRASLSNNARAHREVLDDLNEKLADKLFC

SEQ ID NO: 175566 - protein, 307 aa, Unknown
  Bacterial polypetide isolated from the Sargasso Sea
ALDQAGLLNDLRLLHFHIGSQINDIAVLKDALQEAGQIYVELTRLGAAMGFLDVGGGLGIDYDGSRTATAASTNYSLQNYANDVVATVRECCLPHGVPVPTLVSESGRAIASHFSVLVFNVLGCGRPPAKAPPIEKDEPLPVANLRETLERIRHINGGDSSGDSSGDSNDMILLQEAWNDAIKFRDDALAAFRLGYIRLQQRAMAEQLTWICAKEISQRLPDSEPIHDDLRGLQRALACTYYANLSVFRSAPDTWAIDQLFPLMPIHRLDERPTELGHFADLTCDSDGKLARFIHFRANKITALTAS

SEQ ID NO: 175567 - protein, 303 aa, Unknown
  Bacterial polypetide isolated from the Sargasso Sea
NYTLQNYANDVVATVRECCEPHNVPVPVLVSESGRAIASHFSVLVFDVLGCGRTPDDEPPSQDNEPLPVRNLRDTLTHIRSVEKETDPELRLLQEAWNDAIKFRDDALAAFRLGYIRLEERAMAEQLTWSCARAINERLPTNTPIHDDLKGLRRALACTYYVNLSVFRSAPDTWAIDQLFPLMPIHRLDQQPTELGDFADLTCDSDGKLARFIHSGQSKSLLELHPLLDGEPYWIGMFLGGAYQEVMGNLHNLFGSTSAVHVRLNPKGSGYLLDHVVKGDTNADVLEEMQHNPDLMLERLRQA

SEQ ID NO: 175568 - protein, 302 aa, Unknown
  Bacterial polypetide isolated from the Sargasso Sea
PAGHVLVQPRGDRGGSLDLVELVEGLQNRDLQLPLLIRFDDILEDRLERLHGAFERAIAQYGYGGHYQGVFPVKCNQQRHVVEQLVESGRRWHFGLEAGSKAELLIALSLLEDPKALLICNGYKDQRYIETAILARQLGRQPVVVIEQADEVPRIIEASRNLGAAPLIGVRAKLSTRSTGRWGSSVGEKAKFGLSIPDLLATVEALREADLLTDLRLLHFHIGSQICDIAVLKDALQEAGQLYVQLASLGAPMGFLDVGGGLGVDYDGSRSATAASTNYSLQNYANDVVATIRECCEPQGIA

SEQ ID NO: 175569 - protein, 262 aa, Unknown
  Bacterial polypetide isolated from the Sargasso Sea
LHAAFERAIAQYSYPGRYQGVFPVKCNQQRHVVEELVSCGKRWNFGLEAGSKAELLIALSLLDDPEALLICNGYKDRLYIETAILARRLGRQPVVVIEQPDEVDRIIEASKSLGAAPYIGVRAKLSSRSTGRWSTSVGDKAKFGLSIPELLATVERLRENNLLPDLRLLHFHIGSQINDIAVLKDALQEAGQIYVELNRLGAPMGFLDVGGGLGIDYDGSRTASAASTNYSLQNYANDVVATVRECCEPNGVVVPTLVSESG

SEQ ID NO: 175570 - protein, 248 aa, Unknown
  Bacterial polypetide isolated from the Sargasso Sea
KARPAHWAEIYHDILHAMADVHAQFAHGLLSLQERAQAETLYVRCCRMLRAELDSANRAHREIIDELNEKLAEKLFVNFSLFQSLPDVWGIDQIFPVMPINGLNRSLNRRAVIQDITCDSDGRIDQYVDGQGIETTLPLPEHDPESPLLMGFFMTGAYQEILGDMHNLFGDTHSVDVKLDQQGQYQVGEPITGDTVAKVLRYVNFEPANLLEAYRQKFRHSGLAAELQQTLLAELSSGLEGYTYLEEG

SEQ ID NO: 175571 - protein, 258 aa, Unknown
  Bacterial polypetide isolated from the Sargasso Sea
FDVGGGLAVDYDGTRSQSNNSMNYGLSEYANNIVNVLTDICNEYEQPMPRIISESGRHLTAHHAVLITDVIGTEAYQVEEIQPPAEESPQLLHNMWQSWTEISGRADQRALIEIYHDSQSDLQEAQSLFALGQLSLAERAWAEQANLRVCHEVQGLLSTKNRYHRPIIDELNEKLADKFFVNFSLFQSLPDAWGIDQVFPVLPLSGLDKAPERRAVMLDITCDSDGIVDQYVDGQGIETTLPVPAWSAESPYLMGFFM

SEQ ID NO: 175572 - protein, 288 aa, Unknown
  Bacterial polypetide isolated from the Sargasso Sea
LGAPMGFLDVGGGLGIDYDGSRTATAASTNYSLQNYANDVVATVRECCEPNGVEVPTLVSESGRAIASHFSLLVFDVLGSNALPASIPDPAAEEPLTVRNLRETLATIQGLPDTTDARLVPLQEAWNDALKFKQDALAAFRLGYMGLPDRATAEQLTWACADAIARQLPEQGAIPEELSALHSALAGTYYANLSIFRSAPDTWAIDQIFPVLPIQRLDQRPTRLANLADLTCDSDGRLDRFIGDGQPKPLLELHDLTPGEPYLIALFLSGAYQEVMGNLHNLFGTTNA

SEQ ID NO: 175573 - protein, 175 aa, Unknown
  Bacterial polypetide isolated from the Sargasso Sea
MGSVRRSRKEDASAWTVADSRSVYGIRHWGAGYFNVNEQGHVEVMPRGPEAGSIDLHELVGQLRESGLDLPLLVRFPDILQARVRQLTGAFDRNIEALEYGAGYTALYPIKVNQQEAVVENVIATENVSIGLEAGSKPELMAVLALAPKGGTIVCNGYKDREFIHLALIGQKLGH

SEQ ID NO: 175574 - protein, 230 aa, Unknown
  Bacterial polypetide isolated from the Sargasso Sea
MTAAERPWSAAQSAAIYGLERWGDPYFSINAKGHVVVQPRGDRGGTLDLVELLQGLAARDLQTPLLIRFDDILEDRLERLHAAFERAIAHYAYDGVYQGVFPIKCNQQRHVVEHLVDRGSRWNFGLEAGSKAELLIALSLTSNPEALLICNGYKDSRYIETAILARQLGHQPMVVIEQADEVGRIIEASRNLGASPFLGIRSKLSSRSTGRWGSSVGERAKFGLDLTEML

SEQ ID NO: 175575 - protein, 310 aa, Unknown
  Bacterial polypetide isolated from the Sargasso Sea
GSLDLVDLVSELKSRNLALPLLIRFDDILEDRLERLHAAFERAIAQYSYPGRYQGVFPVKCNQQRHVVEELVSCGKRWNFGLEAGSKAELLIALSLLDDPEALLICNGYKDRLYIETAILARRLGRQPVVVIEQPDEVDRIIEASKSLGAAPYIGVRAKLSSRSTGRWGSSVGDKAKFGLSIPELLATVERLRENNLLPDLRLLHFHIGSQINDIAVLKDALQEAGQIYVELTRLGAPMGFLDVGGGLGIDYDGSRTASAASTNYSLQNYANDVVATVRECCEPNGVAVPTLVSESGRAIASHFSLLVFD

SEQ ID NO: 175576 - protein, 285 aa, Unknown
  Bacterial polypetide isolated from the Sargasso Sea
YDGSHTATAASTNYTLQNYANDVVATVRECCEPHNVPVPILVSESGRAIASHFSVLVFDVLGCGRTPDDEPPSQDNEPLPVRNLRDTLTHIRSVEKETDPELRLLQEAWNDAIKFRDDALAAFRLGYIRLEERAMAEQLTWSCSRAINERLPTNTPIHDDLKGLQRALACTYYVNLSVFRSAPDTWAIDQLFPLMPIHRLDQQPTELGDFADLTCDSDGKLARFIHSGQSKSLLELHPLVDGEPYWIGMFLGGAYQEVMGNLHNLFGSTSAVHVRLNPKGSGYLL

SEQ ID NO: 175577 - protein, 243 aa, Unknown
  Bacterial polypetide isolated from the Sargasso Sea
RAIIEIYHDTQSDIAEAHSLFAVGQFSLAHRAWAEQTHLRVCHEVKGLLSNNNRYHRPIIDELNEKLADKFFVNFSLFQSLPDAWGIDQVFPVLPLSGLDKAPERRAVMLDITCDSDGIVDQYVDGQGIETTLPVPAWSEESPYLIGFFMVGAYQEILGDMHNLFGDTNSAVVRLDADGAANIESVLQGDTVADVLRYVNLDAQEFMRTFEELVTQHIVEDERASILEELQVGLDGYTYLEDF

SEQ ID NO: 175578 - protein, 282 aa, Unknown
  Bacterial polypetide isolated from the Sargasso Sea
QGVSEAARFYCELRELGASINCFDVGGGLAVDYDGTRSQSNNSMNYGLSEYANNIVNVLTDICNEYEQPMPRIISESGRHLTAHHAVLITDVIGTEAYQVEEIQPPAEESPQLLHNMWQSWTEISGRADQRALIEIYHDSQSDLQEAQSLFALGQLSLAERAWAEQANLRVCHEVQGLLSTKNRYHRPIIDELNEKLADKFFVNFSLFQSLPDAWGIDQVFPVLPLSGLDKAPERRAVMLDITCDSDGIVDQYVDGQGIETTLPVPAWSAESPYLMGFFMVG

SEQ ID NO: 175579 - protein, 289 aa, Unknown
  Bacterial polypetide isolated from the Sargasso Sea
SLGAAPLIGIRAKLSTRSTGRWGSSVGEKAKFGLSIPDLLATVEALREADLLGDLRLLHFHIGSQICDIAVLKDALQEAGQLYVQLASLGAPMGFLDVGGGLGVDYDGSRSATSASTNYSLQNYANDVVATIRECCEPQGVTVPTLVSESGRAIASHFSVLVFNVLGQSGVSQPTIPEPIDGEALIVRNLRETLAGISPENLQEAWNDALKFKDDALAAFRLGYLSLPERGKAEQLYWACCSAIAELLPGEEELPDELKGLKAAFASTYYANLSVFRSAPDTWAIDQLF

SEQ ID NO: 175580 - protein, 324 aa, Unknown
  Bacterial polypetide isolated from the Sargasso Sea
PQILHHRVNSLCQAFDQAIQKYEYQADYLLVYPIKVNQQKTVVEEILASQASKEVPQLGLEAGSKPELMAVLAMAQKASSVIVCNGYKDNEYIRLALIGEKLGHKVYIVLEKLSELKMVLAESKRLGVKPRLGLRARLAFQGKGKWQASGGEKSKFGLSAAQILTVVDQLKQEDMLDSLQLLHFHLGSQIANIRDIRQGVSEAARFYCELRELGASINCFDVGGGLAVDYDGTRSQSNNSMNYGLSEYANNIVNVLTDICNEYEQPMPRIISESGRHLTAHHAVLITDVIGTEAYQVEEIQPPAEESPQLLHNMWQSWTEISGR

SEQ ID NO: 175581 - protein, 189 aa, Unknown
  Bacterial polypetide isolated from the Sargasso Sea
AICSCRCCIRFEDILEDRLERLHGAFERAIAQYGYGGHYQGVFPVKCNQQRHVVEQLVESGRRWHFGLEAGSKAELLIALSLLDDPKALLICNGYKDQRYIETAILARQLGRQPVVVIEQADEVPRIIEASRNLGAAPLIGVRAKLSTRSTGRWGSSVGEKAKFGLSIPDLLATVEALRDADLLGDLRL

SEQ ID NO: 175582 - protein, 189 aa, Unknown
  Bacterial polypetide isolated from the Sargasso Sea
MPASDIYNVDRWGDSYFRIDDQGQLCVRPNGEQGGQATLEAVLESCRAAGLRAPVLARFSGILRQRVKLLAGAFREAIEGNDYQGGYTPVYPIKVNQQRRVVHEILRAREDGERIGLEAGSKPELLAVLALSNPGDTIVCNGYKDAEYLRLALMGEKLGFRVHIVVEKMSELPALLALADELGVSPRIG

SEQ ID NO: 175583 - protein, 514 aa, Unknown
  Bacterial polypetide isolated from the Sargasso Sea
MTNFEPKKLKNIWTIEDSISTYNIDKWGDKYFSINSKGNISVTKDIKSENKIDLFKLVKELKSREINPPLIIRFNDILKDRINALHDSFLKAIKTYKYKNIYQGVFPVKCNQQKNVLEKIIEFGSQWNFGLEVGSKSELLIGLALLENQNSLLICNGYKDKKYIEIATLARKLGKNPIIVIEQRDEVKRIIQAVQELNATPLIGIRAKLSSKSSGRWGKSIGDNSKFGLSIPEIMLTIKELKEANLINEMKLLHFHIGSQISDIAVIKDALQEASQIYVELCKLGAPMQYIDVGGGLGIDFDGTKTSSNTSTNYSLQNYANDVIATIKDSCELNNIKHPTIISESGRAIISHCSVLIFNVLGTSHVSSKLQIFDKKNQQLIISNLLETFYELKKLKNKKINLSQIIELWNDAKKFKEDCLVAFRLGFLSLAERAYAEELTWACAKEISNNLNNDEINHPDLSEITETLASTYYANLSIFKSIPDSWAINQIFPIVPIHRHLEEPFCKGNFADLT

SEQ ID NO: 175584 - protein, 407 aa, Unknown
  Bacterial polypetide isolated from the Sargasso Sea
FNDILKDRINALHDAFLKAIKTYKYENIYQGVFPVKCNQQKNVLEKIIDFGDQWNFGLEVGSKSELLIGLALLENQKSLLICNGYKDKKYIEIATLARKLGKNPIIVIEQRDEVKRIIHAVKELNATPLIGIRAKLSSKSSGRWGKSIGDKSKFGLSIPEIMSTIKELKEANLINEMKLLHFHIGSQISDISVIKDALQEASQIYVELCKLGAPMQYIDVGGGLGIDFDGTKTSSSTSTNYSLQNYANDVIATIKDSCELNNIKHPTIISESGRAIISHCSVLIFNVLGTSHVSSKLQIFDKKDQQLIISNLLETFYELKKLNNKKINLSQIIELWNDAKKFKEDCLVAFRLGFLSLAERAYAEELTWACAKEISNNLNNDEINHPDLSEITETLASTYYANLSIFK

SEQ ID NO: 175585 - protein, 394 aa, Unknown
  Bacterial polypetide isolated from the Sargasso Sea
FHLGSQINDIGVLKDALQEAGQIYAELINLGAPMGYLDVGGGLGIDYDGSQTASIASTNYSLQNYANDVVATIKECCESKKIPLPTLITESGRAIASHFSILIFNILGKNSLPSDIPKEDEKECLSVRNLRETLVHINSLELKQEEDLAKLQEAWNDSLKFKADALAAFRLGYIDLVERAKAEQLTWACAKTIVNQLPKNILLPKELKKLSESLAVTYYANLSVFRSAPDTWAIDQVFPIMPIHRLNKEPKKLGHFADLTCDSDGKLDQFIDNGKIKNLLPLHEFNQDEKYLIGLFLGGAYQEVMGNLHNLFGSTNAVHIRFTEKGNYKVEHVIRGNTKSNVLEYLEHDPEILLERLRKSSELAISDGHLKIHDAQKLIEHVEASLRQSTYLQS

SEQ ID NO: 175586 - protein, 420 aa, Unknown
  Bacterial polypetide isolated from the Sargasso Sea
GLTVSELMKGVDLLASQDMGDCFQLLHFHQGSQITNIRHIKAALNEAARVYVELVKQGAGLKFLDVGGGLGVDYDGSQTNFESSVNYSLQEYANDVVYHVQSVCDDAGVDHPTIMSESGRAVVAYHSMLVFSVLGVSEQASHEPINQPSHDVQQPVQDLFETLEGLNVRNLLESYHDAQQSLDTAMNLFASGYLPLDQRAIIEQVYWSICQRISKLAKQLEYVPEEIEAISPGLCDTYFCNFSLFQSIPDSWAIKQLFPLMPIHRLDERPDCSAVLGDVTCDSDGKIEQFIDRRDVKRSLPLHSLKNEPYYLGAFLVGAYQEILGDLHNLFGDTHAVHISSDEHGRVVVDTVVKGDTVSQVLQYVEFNPDELAKNLRCSIEEAIGNGLISDGQAGRFIRFYEDGLGGYTYLEESTVSESS

SEQ ID NO: 175587 - protein, 441 aa, Unknown
  Bacterial polypetide isolated from the Sargasso Sea
KLSSRSTGRWGSSVGDKAKFGLSIPELLATVERLRENNLLPDLRLLHFHIGSQINDIAVLKDALQEAGQIYGELTRLGAPMGFLDVGGGLGIDYDGSRTASAASTNYSLQNYANDVVATVRECCEPNGVAVPTLVSESGRAIASHFSLLVFDVLGCSALPASVPKASGDEPLTVRNLRDTLATIQELSVTADAQLVRLQEAWNDALKFKQDALAAFRLGYMGLPDRASAEQLTWACADAIAQRLPKDQAIPEELAALNKALAGTYYANLSIFRSAPDTWAIDQLFPVVPIQQLDQRPTRLANLADLTCDSDGRLERFIGDGQPKQLLELHELDGNNPYLIGLFLSGAYQEVMGNLHNLFGTTNAVHIRLSPGGSYRIDHVVRGDTNADVLEAMEHDPRALLERLRVAAEAAINNGQLRIDESRRLLDHLESSLRQTTYLQD

SEQ ID NO: 175588 - protein, 364 aa, Unknown
  Bacterial polypetide isolated from the Sargasso Sea
WGSSVGERAKFGLDLTEMLQTVRALEAAGLLQDLRLLHFHIGSQINDIAVLKDALQEAGQIYVELTRLGAPMGYLDVGGGLGIDYDGSRTASAASTNYSLQNYANDVVATVRECCEAHQVQVPTLVSESGRAIASHFSVLVFDILGCSQTPTEEPSAAVDEPLTVRNLRETLHRIREVKGESDPEMQLLQESWNDAVKFRDDALSAFRLGYIRLEQRAMAEQLTWCCAREINRRLPTKAPIHEDLRGLQRALACTYYANLSVFRSAPDTWAIDQLFPLMPVHRLDEQPTELGHFADLTCDSDGKLANFIDAGQSKSLLELHPLKDGEQYWIGLFLGGAYQEVMGNLHNLFGSTSAVHVRLNPRG

SEQ ID NO: 175589 - protein, 637 aa, Unknown
  Bacterial polypetide isolated from the Sargasso Sea
MNDWSIDAARAGYNVTHWSQGFYGISDQGEVTVSPDPKNPDHKIGLNELAKDMVKAGVALPVLVRFPQILHHRVNSLCQAFDQAIQKYEYQADYLLVYPIKVNQQKTVVEEILASQASKEVPQLGLEAGSKPELMAVLAMAQKASSVIVCNGYKDNEYIRLALIGEKLGHKVYIVLEKLSELKMVLAESKRLGVKPRLGLRARLAFQGKGKWQASGGEKSKFGLSAAQILTVVDQLKQEDMLDSLQLLHFHLGSQIANIRDIRQGVSEAARFYCELRELGASINCFDVGGGLAVDYDGTRSQSNNSMNYGLSEYANNIVNVLTDICNEYEQPMPRIISESGRHLTAHHAVLITDVIGTEAYQVEEIQPPAEESPQLLHNMWQSWTEISGRADQRALIEIYHDSQSDLQEAQSLFALGQLSLAERAWAEQANLRVCHEVQGLLSTKNRYHRPIIDELNEKLADKFFVNFSLFQSLPDAWGIDQVFPVLPLSGLDKAPERRAVMLDITCDSDGIVDQYVDGQGIETTLPVPAWSAESPYLMGFFMVGAYQEILGDMHNLFGDTNSAVVSIEENGMTNIESVLAGDTVADVLRYVNLDAVDFMRTYEELVNQHIAEDERAQILEELQVGLKGYTYLEDFS

SEQ ID NO: 175590 - protein, 361 aa, Unknown
  Bacterial polypetide isolated from the Sargasso Sea
MGFLDVGGGLGIDYDGSRTASAASTNYSLQNYANDVVATVRECCEPNGVAVPTLVSESGRAIASHFSLLVFDVLGSSALPASIPNASEDEPLTVRNLRDTLSTIQELSGTADAQLVRLQEAWNDALKFKQDALAAFRLGYMGLPDRATAEQLTWACADAIAQRLPKDQAIPEELAALNKALAGTYYANLSIFRSAPDTWAIDQVFPVVPIQQLDQRPTRLANLADLTCDSDGRLDRFIGDGQPKQLLELHELDDDNPYLIGLFLSGAYQEVMGNLHNLFGTTNAVHIRLSPGGSYRIDHVVRGDTNADVLEAMEHDPRALLERLRVAAEAAINNGQLRINESRRLLDHLESSLRQTTYLQD

SEQ ID NO: 175591 - protein, 200 aa, Unknown
  Bacterial polypetide isolated from the Sargasso Sea
MADWGIEKARSIYNVAVWSEGYFDVNNNGDLVAYPDQDHKKPGINFPELTARFKEEGLTLPVLVRFTDILQHRVGTLINSFAQAKQEREYQGEYTAVYPIKVNQQFSVVKKLVSHDSGKVGLEAGSKPELMAILGVTDKPLRIVCNGYKDSEFLRLATIGQMMGHQVYVVVEKITELKTLIREIDSLGQAPMIGIRIKLN

SEQ ID NO: 175592 - protein, 195 aa, Unknown
  Bacterial polypetide isolated from the Sargasso Sea
LDLSSRSHRDIHDELNEKLADKLFVNFSLFQSMPDAWGIDQLFPVMPLERMNESLEHRAIIQDITCDSDGVLKSYADGNGIESSLPLPSYKEDSQFLLGMFMVGAYQEILGDLHNLFGDTDSVHVELDDEGGYRLTNAIKGDTVADVLRYVQFDAKKLLASYQKQLARMDFTPEMQASYLDELKSGVYGYTYFED

SEQ ID NO: 175593 - protein, 648 aa, Unknown
  Bacterial polypetide isolated from the Sargasso Sea
MTDFDTEKLNKNWTIEDSISTYGIDKWGEKYFSINSDGNISISPNRKSKKKVDLFKLVKEFKSREINTPLIIRFNDILKDRITELNNAFCQAIENYKYKNIYQGVFPIKCNQQKNVLEKIIEYGDPWHFGLEVGSKSELLIGLSILENQKSLLICNGYKDKNYIESAILARKLGKQPIIVIEQRDEVKRIIEAVKNLKATPILGIRSKLSSKSSGRWGKSVGDNSKFGLSIPEIMLTIKELKEANLINEMKLLHFHVGSQISDISVIKDALQEASQIFVELSKLGAPMKYIDVGGGLGIDFDGTKTSSNTSTNYSLQNYANDVVATVKDSCEVNNIQHPIIISESGRAIISHCSVLIFNILGTSHVSSQVKVPYQKKQSLIITNLIETLNQLKNLRDKKEYLSEIIELWNDAKKFKDDCLVAFRLGFVCLEERAYAEELAWACAKEIANQLESDEINHPDLSEITHTLASTYYANLSVFKSIPDTWAINQVFPIIPIHRHLEEPCCKGNFADLTCDSDGKLNSFIDNGKIKSLLNLHPPEKNNDYLIGIFLAGAYQEALGNFHNLFGNTNVIHIDINEDNSYKIKNIIKENSKSEILELLDYSSDNLVETIRVNTESAINNKTLTIKEARKLIEQIETSLRKSSYLSE

SEQ ID NO: 175594 - protein, 633 aa, Unknown
  Bacterial polypetide isolated from the Sargasso Sea
MTNWSSKDSLKVYNVPYWGAGFFNINDAGHVTVAPDKSRPDAQIVLSDAIEQLRQSGLTTPVLLRFPDILKSRVDALFNAFGQAIEKSGYEGDYLCVYPIKVNQQRRVIETISQSYSDKPRLGLEAGSKPELLAVLSHHHEQGSVIVCNGYKDREYIRHALLGNLMGHKVYIVVEKPSELEMVLDESARLNIKPNIGVRAKLASTGSGMWESSGGSMSKFGLSASQILALIERLRGLGKLDCLQLLHFHLGSQIANIRDIQGGIRECGRFYAELRRLGANIEVVDVGGGLGVDYEGTRSQSHCSANYSLSEYANNVVWGIGDVCREFDLPHPTIISESGRALTAHHAVLVTNIIGAEGVEMNDISAPDEDAPTILQNMWKGWLDLRSEDPSLLEIFHDSVADLGDVNTQYTMGLLNLEQRAWAEMLHQNTCLALKELLNPVNRNHRALADELSEKLADKCFANFSLFQSLPDAWGIGQVFPVMPLAGLERPLTRRGILMDITCDSDGQVEHYVDGLGVESTLPMPVYGENEECHVGFFLVGAYQEILGDLHNLFGDTHCAEVWLDDEGKMDIRNVVRGDTVDQLLRYVNIDPSVIRENYQRIVSHPALDDATRKALLDELELGLQGYAYLEDE

SEQ ID NO: 175595 - protein, 592 aa, Unknown
  Bacterial polypetide isolated from the Sargasso Sea
MTNFEPKKLKNIWTIEDSISTYNIDKWGNKYFSINSKGNISVTKDIKSDNKIDLFKLVKELKSREINPPLIIRFNDILKDRINALHDAFSKAIKTYKYKNIYQGVFPVKCNQQKNVLEKIIEFGSQWNFGLEVGSKSELLIGLALLENQNSLLICNGYKDKKYIEIATLARKLGKNPIIVIEQRDEVKRIIQAVQELNATPLIGIRAKLSSKSSGRWGKSIGDNSKFGLSIPEIMLTIKELKEANLINEMKLLHFHIGSQISDIAVIKDALQEASQIYVELCKLGAPMQYIDVGGGLGIDFDGTKTSSNTSTNYSLQNYANDVIATIKDSCELNNIKHPTIISESGRAIISHCSVLIFNVLGTSHVSSKLQIIDKKDQQLIISNLLETFYELKKLKNKKINLSQIIELWNDAKKFKEDCLVAFRLGFLSLAERAYAEELTWACAKEISNNLNNDEINHPDLSEITETLASTYYANISIFKSIPDSWAINQIFPIVPIHRHLEEPFCKGNFADLTCDSDGKLNNFIDDGKIKSLLNLHKPEQDKDYLIGIFMTGAYQETLGNLHNLFGSTNVVHIDINEDNSYKVKNIIKEEQ

SEQ ID NO: 175596 - protein, 637 aa, Unknown
  Bacterial polypetide isolated from the Sargasso Sea
MNDWSIDAARAGYNVTHWSQGFYGISDQGEVTVSPDPKNPDHKIGLNELAKDMVKAGVALPVLVRFPQILHHRVNSLCQAFDQAIQKYEYQADYLLVYPIKVNQQKTVVEEILASQASKEVPQLGLEAGSKPELMAVLAMAQKASSVIVCNGYKDNEYIRLALIGEKLGHKVYIVLEKLSELKMVLAESERLGVKPRLGLRARLAFQGKGKWQASGGEKSKFGLSAAQILTVVDQLKQSDMLDSLQLLHFHLGSQIANIRDIRQGVSEAARFYCELRELGASINCFDVGGGLAVDYDGTRSQSNNSMNYGLSEYANNIVNVLTDICNEYEQPMPRIISESGRHLTAHHAVLITDVIGTEAYQVEDIQPPAEESPQLLHNMWQSWTELSGRADQRALIEIYHDSQSDLQEAQSLFALGQLSLAERAWAEQANLRVCHEVQGLLSTKNRYHRPIIDELNEKLADKFFVNFSLFQSLPDAWGIDQVFPVLPLSGLDKAPERRAVMLDITCDSDGIVDQYVDGQGIETTLPVPAWSAESPYLIGFFMVGAYQEILGDMHNLFGDTNSAVVSIEENGMTNIESVLAGDTVADVLRYVNLDAVDFMRTYEELVNQHIVEDERAQILEELQVGLKGYTYLEDFS

SEQ ID NO: 175597 - protein, 494 aa, Unknown
  Bacterial polypetide isolated from the Sargasso Sea
TRSVIVCNGYKDREYIRLALIGEKMGHKVYLVIEKMSEIAIVLDEAERLNVVPRLGVRARLASQGSGKWQSSGGEKSKFGLAANQVLQLVEILRERGRLDSIQLLHFHLGSQMANIRDIATGVRESARFYVELHKLGVNIQCFDVGGGLGVDYEGTRSQSDCSVNYGLNEYANNIIWAIGDACEEHGLPHPTVITESGRAVTAHHTVLVSNIIGVERSEITEATPPADNAPRSLQSMWETWQEMHEPGTRRSLREWLHDSQMDLHDIHVGYSSGTFSLQERAWAEQLYLNMCHEVQKQLDPSNRAHRPIIDELQERMADKIYVNFSLFQSMPDAWGIDQLFPVMPLEGLNQVPERRAVLLDITCDSDGAIDHYVDGDGIATTMPMPEYDPENPPMLGFFMVGAYQEILGNMHNLFGDTEAVDVFVFPDGSVEVELSDEGDTVADMLQYVQLDPNTLLTQFRDQVKNTDLDAELQQQFLEEFEAGLYGYTYLEDE

SEQ ID NO: 175598 - protein, 292 aa, Unknown
  Bacterial polypetide isolated from the Sargasso Sea
NVESRSELTKLSKVAKNMKLVAPVSLRVNPDVDAKTHPYIATGLKENKFGIAFESAKDIFKQAENDNSIKLIGIDCHIGSQISKLSPFQDALRKIFDLIGELGELEVKLKHVDIGGGLGISYKDEVPPTPNEYVNAITDITREYDLEIIIEPGRSIIGNAGVLLTKVEYLNETPFKNFAVVDAAMNDLIRPSLYDSWHEIKRVTEDLCVEGKAYDVVGPICETGDFLGKNRKLSLSEGDLLAIQSAGAYGFSMSSNYNSRPRAPEVLVDGAKVHEIRRRETLEDLINGEYLV

SEQ ID NO: 175599 - protein, 290 aa, Unknown
  Bacterial polypetide isolated from the Sargasso Sea
GVELFLLKDGSILLNECAPRPHNSGHYTIEGCACSQYENHLRAILGWPLGDTSLKVGGAVMKNILGDGEGDEAMGRAHRLMGAALATPGASIHWYEKPDMKLARKMGHLTVVGSSAAVATERLDTILRAAKGDRTPAKKAPQVGIIMGSDSDLPTMSAAAEVLESFGIGCEVTVISAHRTPERMNEYARSAHTRGLRAIIAGAGGAAHLPGMVAAMTPLPVIGVPVPLKYLDGMDSLLSIVQMPKGVPVATVAIGNSANAGLIAARIVSAYEPDVCSKMLAYQDDMENVV

SEQ ID NO: 175600 - protein, 164 aa, Unknown
  Bacterial polypetide isolated from the Sargasso Sea
MGSDSDLPCMQRGIEVLERFAIPHEVRVLSAHRTPLVMSDYAQNAEARGLQVLIAGAGGAAHLPGMVAALTTLPVIGVPVSSKALSGVDSLYSIVQMPAGIPVATVAIGNAANAALLALQILALQQPALRQQLHAYRHELAEMVSTKDARLQDLGSRAYLQQQA

SEQ ID NO: 175601 - protein, 172 aa, Unknown
  Bacterial polypetide isolated from the Sargasso Sea
MTAPARVGVVMGSDSDLPCMHKAVEMLETFGVAHEVRVLSAHRTPLAMTEYAQQAEARGLQVVIAGAGGAAHLPGMVAALTTLPVIGVPVSSKALSGVDSLYSIVQMPAGIPVATVAIGNAANAGLLALQILAISDPALREQLHRYRRGLAEMVTAKDARLQELGSSNYLAQ

SEQ ID NO: 175602 - protein, 214 aa, Unknown
  Bacterial polypetide isolated from the Sargasso Sea
SNKRLIIALDFKNIDEMSHFISSLDPQKCIVKVGLQLFISEGPKVLDFLSQRGFEIFLDLKLHDIPNTVRKSVEEISQYNIKLTTIHLQGGRDMIQAANQVKGDTKLLGVSLLTSLDDSDTRELYNNDFKKQFNNLINLATETKVDGIVCSSQELELITDPSLIKVVPGIRNQESSDDQKRVMTSSEAYSNGADYIVVGRPITQAKYIAEAVKD

SEQ ID NO: 175603 - protein, 216 aa, Unknown
  Bacterial polypetide isolated from the Sargasso Sea
MNKKLIVALDFDSADLALNFLENLNPQKCLVKVGLELFISEGWKVLDLISEKGFEIFLDLKLHDIPNTVANSVRKISNFNVALTTIHLNGGKDMIEAALSEKGNIKILGVSILTSLSENDIFEITHTEFDAYFNNLISIASNANIDGVVCSPNELIKLKNFKKLKVVPGIRNDISDDDQKRVMSSMEAYEKGADFIVVGRPITKSEDPRKALELFL

SEQ ID NO: 175604 - protein, 216 aa, Unknown
  Bacterial polypetide isolated from the Sargasso Sea
MNNKLIVALDFDSAELALNFLENLDPQKCLVKVGLELFISEGWNVLDLISEKGFEIFLDLKLHDIPNTVANSVRKISNFNVALTTIHLNGGKDMIEAASSEKGNIKILGVSILTSLSESDIFEITHTKFDAYFNNLISMATSTNIDGVVCSPNELIKLKNFKKLKVVPGIRNDISNDDQKRVMSSTEAYEKGADYIVVGRPITKSKDPRKALELFL

SEQ ID NO: 175605 - protein, 212 aa, Unknown
  Bacterial polypetide isolated from the Sargasso Sea
MLEYTAIYGAKFVKKRIIVALDFDTPSKALNFLDHLDPDLCRVKIGKELFTAGGPDLVSSVVSKNFDVFLDLKFHDIPNTVAGAVRVASELGVWMLNVHIAGGSRMMRAAKEALSRSRGQPPILIGVTVLTSLSKEDLFEVGVNNDLAEHVMNLASLAHKSGLDGVVCSADEAKLLRASLSKDFKLITPGIRRVQDSTGDQKRVISPSEAIQ

SEQ ID NO: 175606 - protein, 191 aa, Unknown
  Bacterial polypetide isolated from the Sargasso Sea
KKIRKGHIFGVKVGLELFISEGPKVVEKLKKDGWTVFLDLKLHDIPNTVKKATKSANNLGADFLTIHIASGKDALQEASSSKNDSLKILGVSQALTSSTMDAKMSKGVSEDFLLAKQCGIDGVICPPSEIERTKNLYDLIVTPGIRLNNDTKDDQKNTTTPENAILAGAKYIVMGRSIINNLDYVMNELDI

SEQ ID NO: 175607 - protein, 221 aa, Unknown
  Bacterial polypetide isolated from the Sargasso Sea
MTNQPTLPANPVFAALDTPDLEQALAWAEVLRGQVGGVKAGLEFFSANGADGVRRIVDLGLPLFLDLKFHDIPNTVAGAVRAVADLGAAIVNVHAAGGPAMLEAAREAAEVAGGANRPLVIAVTVLTSMDDSDLTAVGQATPAGEQVVRLAQLAEAQGLDGVVCSPAEITAIRAACGPDFKLIVPGIRPEWAATGDQKRITTPRQARDDGADVLVIGRPIT

SEQ ID NO: 175608 - protein, 180 aa, Unknown
  Bacterial polypetide isolated from the Sargasso Sea
MIIVAIDETDFSIIKSIINSLDNKKCMLKIGSVAYNSIGNEVIFYASKKGFDVFLDLKLHDIPNTVKKSIKGMAFLPIQMLTIHISGGKEMMIAAMEAVSGYDIKVLGVTALTSLDDEDTNEIYQRTVKKQVIAMLDLAEASGIDGVVCSPHELELVSKRENLISVTPGIRLKSLVDDQK

SEQ ID NO: 175609 - protein, 215 aa, Unknown
  Bacterial polypetide isolated from the Sargasso Sea
MNNTSPIVVALDFEQKSAALNLVSQLDPALCRLKVGKEMFTHFGPDFVKELQQRKFDVFLDLKFHDIPNTVAKAVKASADLGVWMVNVHACGGSRMMIAAREALESFGKEKPLLIAVTVLTSMEQSDLVELGINLTPQQQVLRLAGLVDKSGLDGVVCSAQEAVELKQQFGKEFCLVTPGIRPSFATADDQKRVMTPADALKAGVDYMVIGRPNT

SEQ ID NO: 175610 - protein, 234 aa, Unknown
  Bacterial polypetide isolated from the Sargasso Sea
MTTKPILVALDYDNKNHALQLIDQLDPNMCRLKVGKEMFTLFGPQLVKDIHDRGFDLFLDLKFHDIPNTVAKAVAAAAELGVWMTNVHASGGLAMMEAAKKALQPYGKDAPLLIAVTVLTSMSDEDLKLIGIDVPAFEHVQRLAKLTKQAGLDGVVCSAQEASVLKSLLGQDFKLITPGIRPVGSDVGDQHRVMTPPEALAAGSDYLVIGRPITKAADPLAALQAIHQSLAREA

SEQ ID NO: 175611 - protein, 231 aa, Unknown
  Bacterial polypetide isolated from the Sargasso Sea
MTTKPILVALDYDNKNHALQLIDQLDPNMCRLKVGKEMFTLFGPQLVKDIHDRGFDLFLDLKFHDIPNTVAKAVAAAAELGVWMTNVHASGGLAMMEAARKALLPYGNEAPMLIAVTVLTSMSDDDLKLIGIDVPAFEHVQRLAKLTKQAGLDGVVCSAQEASVLKSLLGQDFKLITPGIRPVGSEVGDQHRVMTPPEALAAGSDYLVIGRPITKATDPLAALQAIHQSLL

SEQ ID NO: 175612 - protein, 227 aa, Unknown
  Bacterial polypetide isolated from the Sargasso Sea
MENKIIIPLDLDGKEASELAKTLDPKICRLKVGNQLFTSSGPKIVKEFQQQGFDIFLDLKFHDIPNTVHEAVKSAADLGVWMVNVHAAGGRKMLEASRKALEDYSNPPLLIGVTVLTSFSEDSLLDIGLSNLSEQVIRLTRLAKNSGLDGVVCAASDTKFVKTEFGKDFLTVTPGIRPSGSRLDDQSRVSTPLEAIRNGSDYLVIGRPITGSPDPKNTLEEIYKEIS

SEQ ID NO: 175613 - protein, 216 aa, Unknown
  Bacterial polypetide isolated from the Sargasso Sea
MKKKLIVALDFDSAELALNFLENLDPQKCLVKVGLELFISEGWKVLDLISEKGFEIFLDLKLHDIPNTVANSVRKISNFNVALTTIHLNGGKDMIEAASSEKGNIKILGVSILTSLSENDIFEITHTEFDTYFNNLISIASNTNIDGVVCSPNELDKLKNFNKLKVVPGIRNDFLDDDQKRVMSPFEAYKNGADFIVVGRPITKSEDPRKALELFL

SEQ ID NO: 175614 - protein, 227 aa, Unknown
  Bacterial polypetide isolated from the Sargasso Sea
MSSPIIIPLDTNYDKAITLARSFDPDLCRLKVGNQLFTSSGPRVIDELSSLGYDVFLDLKFHDIPNTVFEAVKSVADLGVWMTNIHISGGSNMLDSAKRALDSYKNPPLLIGVTMLTSLSNEDVKELGINDLSTSIINLAQLAKYHDLDGVVCSAQEVSEIKRLLGDDFIAVTPGIRPVSTDDDQTRVSTPQEAIKNGSDYLVIGRPITATKNPLESLEKILRDINL

SEQ ID NO: 175615 - protein, 217 aa, Unknown
  Bacterial polypetide isolated from the Sargasso Sea
MSQKKLIIALDFANLDEVKKIIEHINPEQSMVKVGLQLYVSEGKRVLDYLTEKGFEIFLDLKLHDIPNTVDRTVKEISNFNVAMTTIHLQGGRDMIEAALESSSKTKIIGVSVLTSLNDKDMNEMHGSSFNDQFGRLMKLAESTKIDGIVCSPQELKQLKEFNRIKVVPGIRNELTSDDQKRTMSSKEAYENGADFIVVGRPITQADNIKETILNYI

SEQ ID NO: 175616 - protein, 216 aa, Unknown
  Bacterial polypetide isolated from the Sargasso Sea
MKKKLIVALDFDSTELALNFLENLDPQKCLVKVGLELFISEGWKVLDLISEKGFEIFLDLKLHDIPNTVANSVRQISNFNVALTTIHLNGGKDMIEAASSEKGNIKILGVSILTSLSENDIFEITHTEFDAYFDNLISIASNTNIDGVVCSPNELDKLKNFNKLKVVPGIRNHISDDDQKRVMSPLEAYQKGADFIVVGRPITKSEDPRKALELFL

SEQ ID NO: 175617 - protein, 216 aa, Unknown
  Bacterial polypetide isolated from the Sargasso Sea
MKKKLIVALDFESAELALDVLENLDPQKCLVKVGLELFISEGWKVLDLISEKGFEIFLDLKLHDIPNTVANSIKKISNFNVALTTIHLNGGKDMIEAASSEKGDIKILGVSILTSLSENDIFEITHTEFDTYFNNLISIASNTNIDGVVCSPNELDKLKNFNKLKVVPGIRNDISDDDQKRVMSSLEAYQKGADFIVVGRPITKSEDPRKALELFL

SEQ ID NO: 175618 - protein, 80 aa, Unknown
  Bacterial polypetide isolated from the Sargasso Sea
KVGKEKFTHFGPDFVKELHQRKFDVFLDLKFHDIPNTVAKAVKASADLGVWMVNVHASGGSRMMIAAREALESFGKEKPL

SEQ ID NO: 175619 - protein, 227 aa, Unknown
  Bacterial polypetide isolated from the Sargasso Sea
MKNRIIIPLDLDHINALNIAKTLDPKICRLKVGNQLFTSSGPQVITDLKGLGFEIFLDLKFHDIPNTVYEAVRSAADLGVWMVNVHASGGIKMLEASRRALEGYDHPPLLIGVTVLTSLSEDALKEVGLQGVSEQVLRLATLAKECELDGVVCASSDTKGIKEKFGENFLTVTPGIRPLLSDSNDQSRVSTPEEAVKNGSDFLVIGRPITGSQNPRATLEEINLKIA

SEQ ID NO: 175620 - protein, 212 aa, Unknown
  Bacterial polypetide isolated from the Sargasso Sea
MSVKPIFFALDGKSLKEFEKQLDILKDHIYGVKVGLELFTSEGPSCVEQLKSDGWVVFLDLKLHDIPNTVGQAATSVSNIGADYLTLHISSGQEALSEAVNKKSKDLNLLGVSSALTSKAVNSSTSKIVENEFQIAKDSNLDGVICPASEIANTTKLFDLIVTPGIRLENDLRGDQKNITTPKKAIELGAKYIVMGRSIKNNPSMVINELEV

SEQ ID NO: 175621 - protein, 231 aa, Unknown
  Bacterial polypetide isolated from the Sargasso Sea
MTTKPILVALDYDNKNHALQLIDQLDPNMCRLKVGKEMFTLFGPQLVKDIHDRGFDLFLDLKFHDIPNTVAKAVAAAAELGVWMTNVHASGGLAMMEAAKKALQPYGNDAPMLIAVTVLTSMSDEDLKLIGIDVPAFEHVQRLAKLTKQAGLDGVVCSAQESNVLKSLLGQDFKLITPGIRPVGSDVGDQHRVMTPPQALAAGSDYLVIGRPITKAADPLAALQAIHQSLT

SEQ ID NO: 175622 - protein, 217 aa, Unknown
  Bacterial polypetide isolated from the Sargasso Sea
MSQRKLIIALDFANLNDVKKIVEHIDPQQSMVKVGLQLYLAEGKRALDYLSEKGFTIFLDLKLHDIPNTVNKAVKEISNFNVAMTTIHLNGGRNMIEAALEGASNTKIIGVSVLTSLNDDDVEEMHGSNFDNQFKRIIKLAETTEIDGIVCSPQELSNLKELNKIKVVPGIRNELSGDDQKRTMSSTEAYKNGADFIVVGRPITQAENVKTAILDYI

SEQ ID NO: 175623 - protein, 206 aa, Unknown
  Bacterial polypetide isolated from the Sargasso Sea
FFALDGKSINEFEFELKKLEGHIYGVKVGLELFISEGPSVVERLKKQGWKVFLDLKLHDIPNTVKEATKSAANLGADFLTIHIASTSEALIEASSNKGNTLQILGVSSALTSKAMSSSISENVNKEFKEAKDCGVDGVICPASEISKTKEIFDLIVTPGIRLKNDDKNDQKNVATPNFAINEGANYIVMGRTIRNNLDYIINDLQL

SEQ ID NO: 175624 - protein, 284 aa, Unknown
  Bacterial polypetide isolated from the Sargasso Sea
KPEPVAELLQLLQNKNVSKSRIEQAVADLSIELVLTAHPTEVTRRTLIHKLTEIASCLAELEQDLAPAQQEKTENRLYQLITQAWHTNEIREQRPTPVDEAKSGFAVIETSLWDAIPEFIRDLDTALIPVLGHGLALDAAPIRFSSWMGGDRDGNPFVTAKVTRQVLLLSRWKAADLFSRDLDILANELSMNQANDALRAVVGEASEPYRKLLNDVRYKLLHTRDWLTEALKHDRLQRPEGLIWHNQQLLEPLLLCYQSLLDCKMQVVAEGLLKDTIRRAYAFG

SEQ ID NO: 175625 - protein, 324 aa, Unknown
  Bacterial polypetide isolated from the Sargasso Sea
MGKGLPKNFNPIEFGSWMGGDRDGNPFVTSEVTKRVILLSRWEAAKLYEKSLTKLIRSYSMEKCSNKILKATGKTFEPYRVYLRPLRDKLRTTHREIEQHLNYGKPLNEKKLLSEREEILKPLRVVRESLEQNQNENIASGDLLDLMRRAKCFGINLARLDIRQESSRHSQLLNEFIKRKSRQNYNSWSEIEKIKYLSDKIRGKNLINKFIFKNKENKEVWSTFKALSSQPKECLGAYVISMTSSASDILSVMFLQKEANIKSKLRVVPLFETLEDLINGKEIMEKLFSLNWYRKYINNKQEIMIGYSDSSKDAGKLSASWHQV

SEQ ID NO: 175626 - protein, 300 aa, Unknown
  Bacterial polypetide isolated from the Sargasso Sea
CLGAYVISMTSSASDILSVLYLQKEANIKNRLRVVPLFETLDDLINAKSIMASLFSLKWYRDLIKNKQEVMIGYSDSSKDAGKICASWHQYKAQEEIIKIAKKYKIDVTFFHGRGGSAGRGGGPIQATLKSQPPNTVNGKIRITDQGEVIQQKYGYQPLAIYNLCSYIGAVMEATLTPPPVPKKDWRNLIEKMSDISKSSYRKNINQSSDFIKYFKTVTPHVSLGKLSIGSRPSKRKNIDNIKGLRAIPWVFAWTQIRLMLPAWLGSAEALRYSSIKNFEKTIIDMEKNWPFFNSMMDIL

SEQ ID NO: 175627 - protein, 255 aa, Unknown
  Bacterial polypetide isolated from the Sargasso Sea
MNEQYSALRSNVSMLGKVLGETIKDALGENILDRVETIRKLSKSSRAGNEAHRQELLTTLQNLSNDELLPVARAFSQFLNLANTAEQYHSSSPKGEGASNPEVIARTLRKLKNQPDLNDAIIKKAVESLSLELVLTAHPTEITRRTLIHKMGEINACLKQLDNKDIVEYERHQLMRRLRQLIAQSWHTDEIRKLRPSPVDEAKWGFAVVENSLWQGVPNYLRELNEQLEENLGYQLPVDFVPVRFTSWMGGDRDG

SEQ ID NO: 175628 - protein, 282 aa, Unknown
  Bacterial polypetide isolated from the Sargasso Sea
MGGDRDGNPFVTAEVTKRVILLSRWEAAKLYEKSMTKLIRSYSMEKCSKKILKTTGKTFEPYRVYLRPLRDKLRKTHRAIEGYLTNNKSFNDKDLLSEREEILKPLRVVRESLEQNQSENIASGDLLDLMRRAKCFGINLARLDIRQESSRHSQLLAEYIKKKLNQNYSSWDEDRKIKYLSNKMQSKNVLKKFQFKNKENKEVWSTFKVLASQPKECLGAYVISMTSSASDILSVMFFQKEANIKNRLRVVPLFETLDDLINAKPIMEKLFSLKWYRKDINN

SEQ ID NO: 175629 - protein, 226 aa, Unknown
  Bacterial polypetide isolated from the Sargasso Sea
LPKQYDQMSEKEKIQWLNEELNTKRPLIPSEVNWNKSTEETFSVFKMVKRLQEEFGSRICHSYVISMSHSASDLLEVLLLAKEMGLIDQGSQKSTLLVVPLFETVEDLQRAPDVMEQLFQLDFYKSLLPKVGESFKPLQELMLGYSDSNKDSGFLSSNWEIHRAQIALQNLSSKNNILLRLFHGRGGSVGRGGGPAYQAILAQPSGTLKGRIKITEQGEVLASKYS

SEQ ID NO: 175630 - protein, 315 aa, Unknown
  Bacterial polypetide isolated from the Sargasso Sea
VGDSFEPYRVFLRPLRNKMRLTHRSIEQYLINKKPLNKNNLLSSKEEILKPLRVVRESLEQNQNENIASGELLDLMRRAKCFGVNLARLDIRQESSRHKQVIAELIKKKYRKDYYSFTEKQKIDFLKSKLVSNKNIINKFKFSNKENNEVWSTFKILANEPPECLGAYVISMTTSASDILAVLFLQKEARIKDKLRVVPLFETLDDLINAKPIMLNLFSQKWYRKLIKNNQEVMIGYSDSSKDAGKICASWHQYKAQEEIVKLGRKFGVNVTFFHGRGGSPGRGGGPIQATLRSQPPNSVNGKIRITDQGEVIQQ

SEQ ID NO: 175631 - protein, 294 aa, Unknown
  Bacterial polypetide isolated from the Sargasso Sea
ILADEPSECLGAYVISMTTSASDILAVSFLQKEAKIKHKLRVVPLFETLDDLVNASQIIKNLFSKKWYRKLINNKQEVMIGYSDSSKDAGKICASWHQYKAQEQIVKLAKKYSVNASFFHGRGGSPGRGGGPIQATLRSQPPNSVNGKIRITDQGEVIQQKYGYEPIAEYNLCSYIGAVTEATLNPPPKPKPDWRSLIEKMSDISKSSYRKNINQSSEFIKYFKNVTPHQALGKLSIGSRPSKRKNLDNIKSLRAIPWVFAWTQIRLMLPAWLGSAEALRYAYIKKFRRTLIDM

SEQ ID NO: 175632 - protein, 318 aa, Unknown
  Bacterial polypetide isolated from the Sargasso Sea
TKNIDKVENLYYKSVTEFTYDLELIKNSLISTDLTCEAVDTLLTQVHIFGFSLASLDIRQESTRHSDAIQELTNYLDLPVLYDQMSEEEKIKWLIEELNTKRPLIPSDVNWTKTTEETFSVFKMVRRLQQEFGSRICHSYVISMSHSASDLLEVLLLAKEMGLLDQNSQKSKLLVVPLFETVEDLKRAPKVMEKLFELDFYRSLLPKVGESFKPLQELMLGYSDSNKDSGFVSSNWEIHRAQIALQNLASRNNILLRLFHGRGGSVGRGGGPAYQAILAQPSGTLKGRIKITEQGEVLASKYSLPELALYNLETVTTA

SEQ ID NO: 175633 - protein, 293 aa, Unknown
  Bacterial polypetide isolated from the Sargasso Sea
EIHQAQIALQTLASSHGVALRLFHGRGGSVSRGGGPAYQAILAQPSGTLQGRIKITEQGEVLASKYGLPELALYNLETVTTAVVQNSLVTNQLDATPSWNQLMSRVAKRSREHYRALVHDNPDLVAFFQQVTPIEEISKLQISSRPARRKTGARDLSSLRAIPWVFGWTQSRFLLPSWFGVGTALAEEVNDDPEQLDLLRRLHQRWPFFRMLISKVEMTLSKVDLDLAHHYMSSLGNPEQRDAFEGIFKVIADEYGRTLKLVLEITGQSRLLGADQNLQLSVDLRNRTIVPLG

SEQ ID NO: 175634 - protein, 262 aa, Unknown
  Bacterial polypetide isolated from the Sargasso Sea
ANINKRLRVVPLFETLDDLKNAKSIMENLFSLSWYRKLIKNNHEIMIGYSDSSKDAGKLSASWHQYKLQEEIVKLGKKYKIDLTFFHGRGGSAGRGGGPIQSTLRSQPPGSVNGKIRITDQGEMIQQKYGYEPIAKYNLCSYIGAVMQATLNPPPKPKDSWRNLIEDMTQISTRSYRKNIRENTDFIRYFKTVTPHLALGKLSIGSRPSKRKNVDNIKGLRAIPWVFAWTQIRLMLPAWLGTGEALKYSSVKKFKSILVDME

SEQ ID NO: 175635 - protein, 304 aa, Unknown
  Bacterial polypetide isolated from the Sargasso Sea
SAGPGLALEAAPIRFSSWMGGDRDGNPFVTAKVTRQVLLLSRWKAADLFSRDLDVLANELSMNQVNDAVRAVVGDVSEPYRKLLNDFRHKLLHTRDWLTEALKHDRLQRPDDLIWHNQQLLEPLLLCYQSLLDCKMQVVAEGLLKDTIRRAYAFGLTLLKLDVRQESGRHTAVFSEFTRYLGIGDYAEWDESTRQAFLLNELSSKRPLFPRNWSPSPEVKEVLDTCDIVARHGPEALSTYVISMAGKPSDVLAVQLLLKDAGITFPMRVAPLFETLADLPMRRNVSASCWPSIGTEVISTVVRK

SEQ ID NO: 175636 - protein, 304 aa, Unknown
  Bacterial polypetide isolated from the Sargasso Sea
SEKERIKWLIDELNTKRPLIPSEVSWTKSTEETFSVFKMVKRLQEEFGSRICHSYVISMSHSASDLLEVILLAKEMGLIDQGSQKSKLLVVPLFETVEDLKRAPEVMEQLFQLDFYRSLLPKVGESFKPIQELMLGYSDSNKDSGFLSSNWEIHRAQIALQNLSSKYNILLRLFHGRGGSVGRGGGPAYQAILAQPSGTLKGRIKITEQGEVLASKYSLPELALYNLETVTTAVIQNSLVNNRLDATPEWNQLMTRLAETSRIQYRKLVHENPNLLTFFSEVTPIEEISKLQISSRPCRRKKGA

SEQ ID NO: 175637 - protein, 321 aa, Unknown
  Bacterial polypetide isolated from the Sargasso Sea
VRQDSERHADVFSELTRYLGLGDYAQWSEADKQAFLLRELSSKRPLFPAQWDASDDVKEVLDTCKVIAKHSKHGFGIYIISMASEPSDVMAVQLLLQESGVDWPMPVAPLFETLDDLNNSPDVMRKLLSIDWYRGYVKGRQFVMIGYSDSAKDAGALAAGWAQYQSQEALVAIAEEFDVSLTLFHGRGGTIGRGGLPAHAAIYSQPPGSLDGGFRVTEQGETIRYKFGMPKLAKRSLGIYASAIIEAMLFPPPAPKEEWRELITAMAAQGRDNYRATVRHDKEFVPYFRVATPEQELGKLPLGSRPAKRKHKAVLRAYVRF

SEQ ID NO: 175638 - protein, 282 aa, Unknown
  Bacterial polypetide isolated from the Sargasso Sea
LTKIIRSYSMKKCSKKIINKVGKSFEPYRVFLRPLRDKMRMTHRSIEQHLVNKRPLNRKILLSSTEEILKPLRTVRESLEENQNENIASGELLDLMRRAKCFGINLARLDIRQESSRHSQLIAEFVKKKFKKNYNKFTEEEKINFLKSKIVNKKNIINKFKFTNRENNEVWSTFKTLADEPSECLGAYVISMTTSASDILSVLFLQKEANIRNKLRVVPLFETLDDLINAKSIMQSLFSKIWYKNLINNKQEVMIGYSDSSKDAGKICASWHQYKAQEDIVK

SEQ ID NO: 175639 - protein, 305 aa, Unknown
  Bacterial polypetide isolated from the Sargasso Sea
RDKMRLTHRSIEQYLISKKPLNKNNLLSSKEEILKPLRVVRESLEQNQNENIASGELLDLMRRAKCFGVNLARLDIRQESSRHRQVIAELIKKKFRKDYYSFTENEKIHFLKSKLVSNKNIINKFKFSNKENNEVWSTFKILADEPSECLGAYVISMTASASDILTVLFLQKEARIKDRLRVVPLFETLDDLINAKPIMLNLFSQKWYRKLIKNNQEVMIGYSDSSKDAGKICASWHQYKAQEEIVKLGRKFGVNVTFFHGRGGSPGRGGGPIQATLRSQPPHSVNGKIRITDQGEVIQQKYGYE

SEQ ID NO: 175640 - protein, 316 aa, Unknown
  Bacterial polypetide isolated from the Sargasso Sea
RSQLGDAVLERVEQIRLLSKAARQGEELQADKLKQVLHSLSDDELLPVARAFAQFLNLANLAEQHHTISRIGHASIEKPEPLQELFSLLEDKKLDNAKVDQAVASLSIELVLTAHPTEVSRRTLIHKLTEIAACLAELEHELSPAQQQAVELRLSELIAQAWHTNEIREQRPTPVDEAKSGFAVIESSLWRAIPDFLRELDAKLLSATGKGLALDAAPVKFSSWMGGDRDGNPFVTSKVTRQVLLLSRWKAADLFSQDLDLLSSELSMFQASPALRDIAGDSSEPYRQVLNTLRSGLLRTRDWLTEALKHDRLQRA

SEQ ID NO: 175641 - protein, 275 aa, Unknown
  Bacterial polypetide isolated from the Sargasso Sea
TLGETIKNQLGQEWLDRIEKIRKGGRASYQGDATCSEELKETFKTMSDSDLLTVGRAFAQFLNLGNIAEQEYNAAMNVDASIDALFKHLDKADLTAEKVQDAVAKLNIDLVLTAHPTEVTRRTLIHKHKELANCLQAIHQESLNDVERKKIETRIADLIAQAWHTEEIRSVRPTPVDEARWGFSVIENSLWEAVPDFMRELDDRLNEDYDVSLPLDASPVQFSSWMGGDRDGNPFVTSKVTEQVLLLARKRAAKLFAIDLDRLQVELSMYDCNDA

SEQ ID NO: 175642 - protein, 281 aa, Unknown
  Bacterial polypetide isolated from the Sargasso Sea
HAEAVAEMVEYLGLGDYSSWPEQQRQEFLLRELQGRRPLVPRNWEPSEPVREVLATCEVVAQQTPEALGSYVISMASTPSDVLSVILLLREAGMKFPMRVVPLFETLSDLQGAPDSMAALYEVDWYREYCQGRQEVMIGYSDSSKDAGQLMAAWAQYQAQEKLTRVAGQYGVHLTLFHGRGGTVGRGGGPANRAILSQPPGSVNGSFRITEQGEMIRFKFGLPRLAVQSLTLYTTAVIEATLAPPPEPEDSWRETMDWLTERSLKAYRDVVRENPDFVPYF

SEQ ID NO: 175643 - protein, 274 aa, Unknown
  Bacterial polypetide isolated from the Sargasso Sea
KKLRTQLMETQAWLEARLKGQKLPKPAGLITQNEQLWEPLYACYKSLQSCGMGIIANGELLDTLRRVKSFGVPLVRIDIRQESTRHTEALGEMTRYLGIGDYESWSEADKQAFLIRELNSKRPLLPRQWEPSNETREVLDTCRVIAEAPHGSIAAYVISMAKTPSDVLAVHLLLKESGIGFALPVAPLFETLDDLNNANDVMTQLLNIDWYRGFIQGKQMVMIGYSDSAKDAGVMAASWAQYQAQDALIKTCEKAGIELTLFHGRGGSIGRGGA

SEQ ID NO: 175644 - protein, 292 aa, Unknown
  Bacterial polypetide isolated from the Sargasso Sea
TWILGIVLTAHPTEVKRRTLFQKYANLTTLMEQRHLYKKYPSKIIEIDRKLYSEIAIIWKTDELKRTKPSALDEAKWGLAVIEDSLWDTIPRVYKRLNDIFRKNLNKDLPRNFNPIQFGSWMGGDRDGNPNVTSEVTKKVILFSRWQAAKLYERELTKLIQDLSMEECSQSIKKVTGNSFEPYRVYLRPLRDKARRTHQLIEAYINYNKALDENKLLKDKYEIINPLREVRTSLNMNKGQHIANADLLDLIRRVRCFGINLARLDIRQESDRHEKLLNEIFKKKNKINYSQL

SEQ ID NO: 175645 - protein, 311 aa, Unknown
  Bacterial polypetide isolated from the Sargasso Sea
RNNLLSDNGWKFELEGENDNKNLDKVESLYYKSVNEFTYDLELIKNSLNSTDLTCDSVNTLLTQVHIFGFSLASLDIRQESTRHSDAIQELTNYLDLSMQYDQMSEEEKIKWLIEELNTKRPLIPSDVNWTKTTEETFSVFKMVKRLQQEFGSRICHSYVISMSHSASDLLEVLLLAKEMGLLDQNSQKSKLLVVPLFETVEDLKRAPEVMENLFKLDFYKSLLPKVGESFKPLQELMLGYSDSNKDSGFVSSNWEIHRAQIALQNLSSRNNILLRLFHGRGGSVGRGGGPAYQAILAQPSGTLKGRIKIT

SEQ ID NO: 175646 - protein, 309 aa, Unknown
  Bacterial polypetide isolated from the Sargasso Sea
MLGYSDSNKDSGFVSSNWEIHRAQIALQNLASRNNILLRLFHGRGGSVGRGGGPAYQAILAQPSGTLKGRIKITEQGEVLASKYSLPELALYNLETVTTAVIQNSLVNNRLDATPEWNQLMSRLAETSRSHYRKLVHENPDLLNFFQEVTPIEEISKLQISSRPARRKKGAKDLSSLRAIPWVFGWTQSRFLLPSWFGVGTALSSELNSDPQQIELLRVLHQRWPFFRMLISKVEMTLSKVDLEVAKYYVDTLGSKENKDSFDVIFEVISKEYNLTKSLILEITGKNKLLESDRDLKSSVSLRNKTISH

SEQ ID NO: 175647 - protein, 296 aa, Unknown
  Bacterial polypetide isolated from the Sargasso Sea
KGLPKNFNPFEFGSWMGGDRDGNPNVTSKVTKEVILLSRWEAAKLYEKELTKLIRSLSIEKCSKKILSKVGNSFEPYRVFLRPLRNKMRLTHKLIEQHLVNKVPLDQKKLLSSREEILKPLRVVRESLEENQNENIASGDLLDLMRRAKCFGINLARLDIRQESSRHSQLISEFLIRKYKINYNKMSEDKKIKFLSSKIKSKRNLINKFSFKNKENKEVWSTFKILSDEPKECLGAYVISMTSSASDILTVAYLQKEANIKDPLRVVPLFETLDDLINAKPIMQKLFSLNWYRKSI

SEQ ID NO: 175648 - protein, 261 aa, Unknown
  Bacterial polypetide isolated from the Sargasso Sea
IEQYFINKTPLDKNILLSSTEEILKPLRVVRESLEQNQNENVASGELLDLMRRAKCFGINLARLDIRQESSRHRQLIAELIKKKFNKNYYNFTEEEKINFLKSKLTSTKSYINKFKFSNKENNEVWSTFKVLADEPSECLGAYVISMTTSVSDILSVSFLQKEAKINNKLRVVPLFETLDDLINAKSIMESLFSKKWYRKLINNKQEVMIGYSDSSKDAGKICASWHQYKAQEEIVRLGKKFDVNVTFFHGRGGSPGRGGG

SEQ ID NO: 175649 - protein, 261 aa, Unknown
  Bacterial polypetide isolated from the Sargasso Sea
ISTDLTCESVNTLLTQVHIFGFSLASLDIRQESTRHSDAIQELTKYLDLSVQYDQMSEDEKIKWLIDELNTKRPLIPSDVNWTKTTEETFSVFKMVKRLQQEFGSRICHSYVISMSHSASDLLEVLLLAKEMGLLDQNSQKSKLLVVPLFETVEDLKRAPEVMEKLFKLDFYRSLLPKVGESFKPLQELMLGYSDSNKDSGFVSSNWEIHRAQIALQNLSSRNNILLRLFHGRGGSVGRGGGPAYQAILAQPSGTLKGRIK

SEQ ID NO: 175650 - protein, 334 aa, Unknown
  Bacterial polypetide isolated from the Sargasso Sea
KLLNKSIKEKKFFIDKIKIKDKENKEVWNTFKQIAKTPIECLGAYVISMTSTASDILSVYFLQQQAKMKNLIRVVPLFETLDDLKNANDVMKNLFKLSWYRKMINSKQEVMIGYSDSSKDAGKLSASWHQYKLQEKLRSLAKKHKIDLVFFHGRGGSPGRGGGPIQATLKSQPSGTVNGKIRITDQGEVIQQKYGYKPLAEYNLCSYIGAVMDASLNPPPRSKNNWRELIQKMSEISTSTYRKYLNQSQDFIRYFKTVTPHKSLGKLSIGSRPTRRKKVDNIQSLRAIPWVFAWTQIRLMLPAWLGTTEALRYGSIKKFKKTLTDMERNWPLLV

SEQ ID NO: 175651 - protein, 287 aa, Unknown
  Bacterial polypetide isolated from the Sargasso Sea
DKVENLYYKSVNEFTYDLELIKNSLISTDLTCEAVSTLLTQVHIFGFSLASLDIRQESTRHSDAIQELTNYLDLSVRYDQMSEEEKIKWLVDELNTKRPLIPYEVNWTKNTEETFSVFKMVKRLQQEFGSRICHSYVISMSHSASDLLEVLLLAKEMGLLDQKSQKSKLLVVPLFETVEDLKRAPEVMEKLFKLDFYRSLLPKVGESFKPLQELMLGYSDSNKDSGFVSSNWEIHRAQIALQNLASRNNIFLRLFHGRGGSVGRGGGPAYQAILAQPSGTLKGRIKI

SEQ ID NO: 175652 - protein, 295 aa, Unknown
  Bacterial polypetide isolated from the Sargasso Sea
KINKVSSNNKIKLTLFHGRGGSVGRGGGPVYAQLLSQPPGTVNGRTRVTEQGEVIQQKYSSESLAEYSLGTYIGSVLEATLSPPIKPKKNWIKLMEQMSIVSSKAYRNYLNDDINFLKYYETITPQNILGKLYIGSRPAKRKKSHEIKNLRAIPWVFAWTQIRLLLPAWLGITEAIEIASKSKNRSTLNQMISKWPFFYEMMDMLDMVLTKTDQRVIKFYEECLADDDLKKVGNDIRQKLSSLIILDKKIMPKHILNQRKEFRKSIKIRDTYAEILNLLQADIMKKMNKKNKDEV

SEQ ID NO: 175653 - protein, 250 aa, Unknown
  Bacterial polypetide isolated from the Sargasso Sea
TDLTCEAVNNLLTQVHIFGFSLASLDIRQESTRHSDAIQELTNYLDLSMLYDQMSEEEKIKWLVDELNTKRPLIPSDVNWTKSTEETFSVFKMVKRLQQEFGSRICHSYVISMSHSASDLLEVLLLAKEMGLIDQSSQKSQLLVVPLFETVEDLKRAPEVMEKLFKLDFYRSLLPKVGESFKPLQELMLGYSDSNKDSGFVSSNWEIHRAQIALQDLASSNDILLRLFHGRGGSVGRGGGPAYQAILAQP

SEQ ID NO: 175654 - protein, 289 aa, Unknown
  Bacterial polypetide isolated from the Sargasso Sea
ELKNRRPLLPGHFKPSGETEEVLATCREVARAPAASLGSYVISMAGAASDVLAVQLLLKEAGLQRPMRVVPLFETLADLDNAGPVISRLLALHGYRAWLHGPQEVMIGYSDSAKDAGTTAAAWAQYRAQETLVQVCREQDVELLLFHGRGGTVGRGGGPAHAAILSQPPGSVAGRFRTTEQGEMIRFKFGLPDIAEQNLNLYLAAVLEATLLPPPSPEPAWRDLMDKLASDGVSAYRAVVREHPQFVAYFRQATPEQELGRLPLGSRPAKRREGGVESLRAIPWIFAWT

SEQ ID NO: 175655 - protein, 270 aa, Unknown
  Bacterial polypetide isolated from the Sargasso Sea
MKSICKHLGLGDFEKWPEEKKISFLSKEFKSKRPLVSKNISLDKEDKETWSTFKMISKLPRECLGAYIISMSSKASDILTVLVLQKEAGIKSCLRTVPLFETLNDLENAHHVMKEIYRISWYLKYFKNKQEVMIGYSDSSKDAGKLAASWAQYCTQEKLQALSNKYKVDLTLFHGRGGSVGRGGGPIYEALLSQPPGTVNGRTRVTEQGEIIQQKYATESLAEYSLGTYIGSVLEATLAPPVKPKKNWRELMDAMSAVSTNAYRNNFFNK

SEQ ID NO: 175656 - protein, 277 aa, Unknown
  Bacterial polypetide isolated from the Sargasso Sea
DAGALAAGWAQYQSQEALVAIADEFDVSLTLFHGRGGTIGRGGLPAHAAIYSQPPGSLDGGFRVTEQGETIRYKFGMPKLAKRSLGIYASAIIEAMLFPPPAPKEEWRELITAMAAQGRDNYRATVRHDKEFVPYFRVATPEQELGKLPLGSRPAKRKPQGGIESLRAIPWIFAWAQTRLVLPSWLGVMRAIDSVKTPENEKVVNEMFSEWPFYRSRLSMLDMVFHKADPRISEAYDERLVPKELKHFGEALRAELKESISSLLAITGDGDIMKNDP

SEQ ID NO: 175657 - protein, 277 aa, Unknown
  Bacterial polypetide isolated from the Sargasso Sea
RVFLRPLRDKIRLTHRSIEQHLVNKKSLNHKELVSSREEILKPLRVVRESLEQNQNENIASGELLDLMRRAKCFGINLARLDIRQESSRHSQLINEFVKRKYNKSYLKFSEDKKIEFLKKHILTKKNQINDLQIRNKENKEVWSTFKILANEPSESLGAYVISMTTSASDILSVVFLQKEAKIKDKLRVVPLFETLDDLINSRSIMQTLFSQKWYRKLINNKQEVMIGYSDSSKDAGKICASWHQYKAQEEIVNLAKKFKIEVIFFHGRSGSARRGG

SEQ ID NO: 175658 - protein, 299 aa, Unknown
  Bacterial polypetide isolated from the Sargasso Sea
NYLDLSVHYDQMSEEEKIKWLIDELNTKRPLIPSDVNWTKTTEETFSVFKMVKRLQREFGSRICHSYVISMSHSASDLLEVLLLAKEMGLLDQNSQKSKLLVVPLFETVEDLKRAPEVMGKLFKLDFYRSLLPKVGESFKPLQELMLGYSDSNKDSGFVSSNWEIHRAQIALQNLSSRNNILLRLFHGRGGSVGRGGGPAYQAILAQPSGTLKGRIKITEQGEVLASKYSLPELALYNLETVTTAVIQNSLVNNRLDATPEWNQLMSRLAETSRSHYRKLVHENPDLLNFFQEVTPIEE

SEQ ID NO: 175659 - protein, 276 aa, Unknown
  Bacterial polypetide isolated from the Sargasso Sea
NEKILLNSREEILKPLRVVRKSLEENQNENLASGELLDLMRRAKCFGINLARLDIRQESSRHSQLIAEYIKRKYKQNYYKWSERKKINFLANQIKKKRNLLTNFEFKNKENKEVWSTFKTISKQPDECLGAYVISMTSSISDIVTVSFLQKEAQIKNKLRVVPLFETLDDLINSKAIMHSLFQEKWYRKLINNKQEVMIGYSDSSKDAGKICASWHQYKAQEEIVKLAKKYKIDVTFFHGRGGSAGRGGGPIQATLRSQPPYSVNGKIRITDQGEV

SEQ ID NO: 175660 - protein, 296 aa, Unknown
  Bacterial polypetide isolated from the Sargasso Sea
RVAAVHGRGGTVGRGGGPAHAAILSQPPGSVAGRFRTTEQGEMIRFKFGLPDIAEQNLNLYLAAVLEATLLPPPAPEPSWRAMMDRLASAGVQAYRGVVREHPQFVEYFRQATPEQELGRLPLGSRPAKRRAGGVESLRAIPWIFAWTQTRLMLPAWLGWEQALGQALAGGDGELLKHMREHWPFFRTRIDMLEMVLSKADASIAALYDERLVEPALQPLGGQLRDLLSQACSAVLELTGQSRLLAHSPETLESISVRNTYLDPLHLLQAELLARCRLREQAPESPLEQALLVSVA

SEQ ID NO: 175661 - protein, 273 aa, Unknown
  Bacterial polypetide isolated from the Sargasso Sea
LRVTEQGEMIRFKFGLNGLAQRSLALYASAVLEGVLLPPPVPEQSWRELMQQLATASCEAYRAVVRHHPDFVPYFRAATPELELGQLPLGSRPPKRNPNGGVESLRAIPWIFAWSQNRLMLPAWLGAGNALAVVVEQGKTELLAQMRAQWPFFATRLSMLEMVYLKADAEIAAYYDEKLVPEHLLPLGLQLRQQLAADTALLLKLIQSDTLMANEVWIRESIMLRNTYVDPLHILQVELLNRVRHAPETVNDSIKRALMVTIAGIAAGMRNSG

SEQ ID NO: 175662 - protein, 64 aa, Unknown
  Bacterial polypetide isolated from the Sargasso Sea
DYERHQLMRRLRQLIAQSWHTDEIRKHRPSPFDEAKWGFAVVKTVCGKVCLTIFASLTNSWKRT

SEQ ID NO: 175663 - protein, 351 aa, Unknown
  Bacterial polypetide isolated from the Sargasso Sea
KPSPFDEARWGLAIIEDSLWDTVPKVYRKLNSIFVKNMGKNLPKNFNPIVFGSWMGGDRDGNPNVTSEVTRKVILLSRWEATKLYEKALTKIIRSYSMEKASKKILSKVGKSFEPYRVFLRPLRDKMRITHRSIEQHLVHNKPLDQKKLLSSREEILKPLRVVRESLEQNQNENIASGELLDLMRRAKCFGINLARLDIRQESARHKQLISEFVKTKYKKNYSNFTEKEKIKFLKKFITSKSNKIRNFQFKNKENKEVWTTFNTLSKEPPECLGAYVISMTTSASDILSVSFLQKEANIKNKLRVVPLFETLDDLVNARSIVETLFSQKWYRKLINHEQEVMIGYSDSSKD

SEQ ID NO: 175664 - protein, 400 aa, Unknown
  Bacterial polypetide isolated from the Sargasso Sea
LLNNLIKQKKTFVNKIKLRDKENLEVWKTFKQISKEPEQCMGAYVISMTSKASDILSVYLLQLQADTKNLLRVVPLFETLDDLKNAKGVMQNLFKLPWYRKIINSKQEVMIGYSDSSKDAGKLSASWHQYKLQEELRNLAKKYKIDLVFFHGRGGSPGRGGGPIQATLKSQPSGTVNGKIRITDQGEVIQQKYGYKPLAEYNLCSYIGAVMEATLNPPPRSKPNWRELIQKMSEISTSAYRKYLNQSEDFIRYFKTVTPHKSLGKLAIGSRPTKRKNVDNIQSLRAIPWVFAWTQIRLMLPGWLGTTEALRYGSIKKFKKTLTDMERNWPYFVSTMDILDMVISKVDPEISVIYENNLADQSLIRIGKRLRFQFDALVKLHNKITPKEVIKERKEFRKAI

SEQ ID NO: 175665 - protein, 895 aa, Unknown
  Bacterial polypetide isolated from the Sargasso Sea
MKKRDLYYERIPTKFFRENVKYLGNILGRVIKEQEGQKFFELVEKVRKLSKANKINSKNNQTNEKVIKAIKKLSPKNSFKLTRAFTHFMNFINLADLIDASRKLNEYENSNKKISNNNIFIEEIFEDLFRNKKISETKIYNTAKNLKIGIVLTAHPTEVKRRTLIQKYHSIIEILEQRDLLKNFQSKLVVLEKKLFDELTIIWNTDDLKRIKPSPFDEARWGLAIIEDSLWDTIPKVYRRLNSIFVQNMNKGLPKNFNPIEFGSWMGGDRDGNPNVTADVTRKVILLSRWEAAKLYEKALTKIIRSYSMEKCSKKILKSVGTSFEPYRVFLRPLRDKMRITHRSIEQHLVNKKPLNHNNLLSSREEILKPLRVVRESLEQNQNENLASGELLDLMRRAKCFGINLARLDIRQESSRHSQLISEYVKKKYKKNYLKFSENEKIKFLKKQILSKKNQLNKFQFSNRENKEVWSTFKILANEPSECLGAYVISMTNSASDLLSVIFLQKEANIKNKLRVVPLFETLDDLINAKEIMEKLFSQSWYRKVIKNEQEVMIGYSDSSKDAGKICASWHQYKAQEEIIKLSKKYNINVTFFHGRGGSPGRGGGPIQSTLRSQPPNSVRGKIRITDQGEVIQQKYGYEPLAKYNLCSYIGAVTEATLKPSPVPKASWRSLIEKMSEISKNSYRKNINQSSDFIKYFETVTPHKALGKLSIGSRPSKRKNIDTIKSLRAIPWVFAWTQIRLMLPAWLGSAEALRYSYIKQFRKTLFDMERNWPFFNSMLDILDMVITKADPEISKIYEEHLADESLKRVGKKLRFQFDVIKKLNKKITPKEIIAARKQFRTSIGVRNIYSEVLNIVQPIAIKKIKTIKNKKDKEYLNDTLLTSIAGIAAAMKNTG

SEQ ID NO: 175666 - protein, 372 aa, Unknown
  Bacterial polypetide isolated from the Sargasso Sea
LQELMLGYSDSNKDSGFVSSNWEIHRAQIALQNLSSRNNILLRLFHGRGGSVGRGGGPAYQAILAQPSGTLKGRIKITEQGEVLASKYSLPELALYNLETVTTAVIQNSLVNNRLDATPEWNQLMSRLAETSRSHYRKLVHENPDLLNFFQEVTPIEEISKLQISSRPARRKKGAKDLSSLRAIPWVFGWTQSRFLLPSWFGVGTALSSELNSDPQQIELLRVLHQRWPFFRMLISKVEMTLSKVDLEVARYYVDTLGSKENKDSFDDIFEVISKEYNLTKSLILEITGKNKLLESDRDLKSSVSLRNKTIIPLGFLQVSLLRRLRDQTRQPPISEFIIDKDESRRAYSRSELLRGALLTINGIAAGMRNTG

SEQ ID NO: 175667 - protein, 470 aa, Unknown
  Bacterial polypetide isolated from the Sargasso Sea
RKISGLINELDTKRPLIPSDVNWTKTTEETFSVFKMVKRLQQEFGSRICHSYVISMSHSASDLLEVLLLAKEMGLLYQNSLKSKLLVVPLFETVEDLKRAPEVMEKLFQLDFYRSLLPKVGESFKPLQELMLGYSDSNKDSGFVSSNWEIHRAQIALQNLASRSNILLRLFHGRGGSVGRGGGPAYQAILAQPSGTLKGRIKITEQGEVLASKYSLPELALYNLETVTTAVIQNSLVNNRLDATPEWNQLMSRLAETSRSHYRKLVHENPDLLNFFQEVTPIEEISKLQISSRPARRKKGAKDLSSLRAIPWVFGWTQSRFLLPSWFGVGTALSSELNSDPQQIELLRVLHQRWPFFRMLISKVEMTLSKVDLEVARYYVDTLGSKANKVSFDNIFEVISKEYNLTKTLILEITGKNKLLESDRDLRSSVILRNKTIIPLGFLQVSLLRRLRDQTRQPPVSEFLIDKDEC

SEQ ID NO: 175668 - protein, 878 aa, Unknown
  Bacterial polypetide isolated from the Sargasso Sea
MYASLRSNVSMLGQILGDTMRTHLGDSFLEKVEQIRKLAKDSRRGDEAAREQMLELLTALPDEELVPFAKAFNQFLNLANLSEQFHTISRNCDELVCVPDPVEQLLGRMLNGRIDQTKMLDCLKTLDIDLVLTAHPTEISRRTLIQKYAAIVDCLAEQENNQLSDRERRQINLRLRQLIAQIWHTNEIRRERPTPVDEARWGLSTIEESLWHAVPDFLRQLNDQVQDRTGQQLPIDIAPVRFSSWMGGDRDGNPFVTAKVTQEVLDRNRHAAARLFLKDIVLLVGELSMEEANSELMAFTNNSCEPYRFVLRSLRQKLRDTIDYLNARIEGHNPEVDKSALIWQESDLKAPLEMLYKSLCDCGMRLIANGLLLDILRRLACFGIHMLRLDIRQDAGRHCDVLAELTRYLGMGDFNHWDETEKQAFLLRELSNRRPLIPSNWQPSADVAEVLNTCRLIAKHPAKALGSYVISMASKPSDVLTVLLLLKETGCTHPMRVVPLFETLSDLNNAAECITALLDIDWYRGYTKGMQEVMIGYSDSAKDAGVMAAAWAQYRAQEQLVAVCKQAGVKLTLFHGRGGSIGRGGGPAHKAILSQPPGSVDGRIRVTEQGEMIRFKFGLPKLAVQSLALYTSAVLEATLLPPPEPKQEWRNCMERIAEESVSAYRGIVREEPDFVPYFRAATPEVELGKLPLGSRPAKRRVDGGIESLRAIPWIFAWSQNRLMLPAWLGAGEALQAACQRGEMGLLQDMEREWPFFSTRISMLEMVYAKAEPNLARYYETCLVPTNLHHLGETLRQRLDLGIKVVLELTKSDTLMAHTPWNRESVKLRNPYIDPLNFLQTELLARTRKETTEAPASEHVQLALMLTIAGVAAGMRNTG

SEQ ID NO: 175669 - protein, 707 aa, Unknown
  Bacterial polypetide isolated from the Sargasso Sea
MAKRLKHKIANIELSKLVSLLGKILGVVVKEQEGKLLYNKIEQIRYLSKASRGAKSKQKIKLNETKQFRKLISSISKLNPSQSLIIARSFSKFLNFSNLAESLDNVHKVEEGKIQQARGNDEFTLLEEVIEKLLKKKKISKEKFYNLSKSLNIELVLTAHPTEVKRRTLIQKYTKVNDILEKFNKSRIFKIKNIEKENKILEKKLHEQITSIWKTDELKRSKPTPVQEAKWGLAVIEDSLWNSIPKICSRLDEAVQRYSGKQLPINYSPFKFGSWMGGDRDGNPNVNHKITKEVILLSRWEAANLYEKEITKIIQDLSMHECSNEIKRKTGESQEPYRVYLRPVRSKLQKTQKEIELYLLKRKKFNDKLIVNSINEIINPLVVVYNSLCKIKCKALADGSVLDLIRRAYAFGLNLAKLDIRQEASRHTDIISKIYKHKFKKDYLKIDEKEKISFLIKSLKSNKKIFNKRIKFTKDEKETWETFNMLSHTPYECLGAYIISMASSASDILSVMLLQKEAGMKQYLRIVPLFETLQDLNNSELVMKEIYKIKFYLKKFKNLQEVMIGYSDSSKDAGKFAAAWAQYRAQENLQNLSNKFKVKLTLFHGRGGSVGRGGGPIYHALLSQPPGTVNGRTRVTEQGEIIQQKYATESLAEYTLGTYLGSVVEASLSPPPKPKSQWRLLMEKMCEISKNSYRKNLMDKEFLDYYF

SEQ ID NO: 175670 - protein, 847 aa, Unknown
  Bacterial polypetide isolated from the Sargasso Sea
MARFLRKHEAITDRQLRTTIKLLGTLLGRVIKTQAGKQVYNAVEKLRKGFIGLRENKNSSKHDQLIRYIGKLNRNTLTDVIRSYSKYFALANVAEEAFQHINRERILKSGYDSWEGSFDSTLRDFVNQNINKVNLQKLLDHLKYIPVFTAHPTEAKRRSEMHLMRRIFSMILELQQYKGQSIKKEELLEKLESEILILWKTDEVRLKKPTVIDEVENGLYYFRTSLFKAVPQIYSDLEKAVSRTYKDNHVTKKIVVPSFIRFGSWIGGDRDGNPFVTSDVTCQAVYMHAETVITEYIERTKDLSKYLTHSIQHTDLSKDFLDSLSIDDELSRDVFKDNSQDFIKEPYRRKLKFIEFRLTESLKTISDHKNKNPEQKRTHAYKNEHELLKDLYLIRDSLIYDKDEKLVGFQLKDLIRLVETFGFFLVNLDIREESTKHSNAIHEIINVLTKEDYLSLNENKRVSCLESLIKSDSNIDSIYMTLSDDTKKVVDVFLTMVKLRKQISKEAFGHYIISMTHEASHVLEVLALAKLSGMVKKDNDKGWISAVKVSPLFETIDDLSRISHILENLLDNSLYAEVLKNSNNRQEIMLGYSDSCKDGGILSSSWNLYKAQKEITEIANKYSIECRMFHGRGGTVGRGGGPTHNAIVAQPAGTVNGMIKITEQGEVLSYKYASYETAVYELETAIGGLMKASQHLVTENLKTDNVIEKNMELMSQRGEEHYRELTDKTPGLIDYFYEATPVQELGQLNIGSRPSHRNTADRSKQSIRAIPWVFGWSLSRHTLPAWYGLGSALQKILDSNEKNLNLLQNMYKKWPYFKVLLANVRMALAKADLNIARDYSELAKDQK

SEQ ID NO: 175671 - protein, 476 aa, Unknown
  Bacterial polypetide isolated from the Sargasso Sea
EILKPLRVVRESLEQNQCENIASGELLDLMRRAKCFGINLARLDIRQESARHSQLLDEYFLKKFNKRYYKLSEIDKLKFFKSTLTSKRNFINKFNFKNKENKEVWSTFKILSNEPKECLGAYVISMTTSASDILSVSFLQKEAKIKDKLRVVPLFETLDDLINSKKIMETLFSQSWYRNLIKNNQEVMIGYSDSSKDAGKICASWHQYKAQEEIVKLAKKYKINITFFHGRGGSAGRGGGPIQATLKSQPPYSVNGNIRITDQGEVIQQKYGYEPLAKYNLCSYIGAVTEASLNPPPVPKKKWRNLIEKMSEISKSSYRKNINQSSEFIKYFKTVTPHVALGKLSIGSRPSKRKKTDNIKSLRAIPWVFAWTQIRLMLPAWLGSAEALRYSYIKKFRKTLFDMEKNWPFFNSMLDILDMVISKADPNISKIYEQYLADENLKRVGKKLRFQFKQIKRLNTNITPKEILNNRKKYRT

SEQ ID NO: 175672 - protein, 569 aa, Unknown
  Bacterial polypetide isolated from the Sargasso Sea
MTKKIELSSTIHLLGEILGSVIKKQENTAIFDKIEKIRTLSKNSRGSNEGLNKQSFKKLKNQISNLTSTETLIIAKSFSRFLDFSNIAESLYSIHNIHDHVIRKTQETNEIVILEEALLDVQKNPNVSKNKFFNVAKNISIDLVLTAHPTEVKRRTLIQKYANVNNILDELNNIQILKKQNIKREKGILEKKLKEEITSVWKTDEIKRSRPTAVEEAKWGLAVIEDSLWNSIPKICSRFDNAVNKFTNKNLPINYSPIKVSSWMGGDRDGNPNVTSKTTMEVVLLSRWEAASLYEKEFTKLIQSLSLFDCSKKIKKQVGKTWEPYRVFLRPIRNKLQQTQREIEDALLEKREPKKKLLVNSINEILDPLNEVYNSLCSVKCDIIANGLVLDIIRLSHTFGLNLAKLDIRQESSRHTSLLNTICKKLALKEYTKLSEQEKIKFLTREYKSKRPLIPNKIKFNNTDKETWETFKMIANTSNEFLGAYVISMTSKVSDILGVLLLQKEAGVKNPLRIVPLFETLSDLQNSSKIVDNLFKNRWYTNIFSNEQEIMIGYSDSSKDAGKFAASWA

SEQ ID NO: 175673 - protein, 736 aa, Unknown
  Bacterial polypetide isolated from the Sargasso Sea
MWRTDEVRLKKPTVIDEVENGLYYFRTSLFKAIPEVYKDLEKAIKRIYHSNSVKIPSFIKFGSWIGGDRDGNPFVTPEITKEAVYMHAETAILEYIRRAQSLSTLLTHSVQLTNPSDDFIKSSQEDLKYLDGALEDSTQDFAKEPYRRKLKIVRYRLKQKLQDIRNLRNQTEKSVNHAYASERELLRDLYLIRDSLISDEDAILLDYGLNDFIRLVETFGFHLVSLDIREESTKHTNAISEVLDLEGYGDYKALKEDERINLLVKLISSDKTIDNIYEKLTDESKKVLDVFRVMNELRTEVSDRALGNYIISMTHDASHIFEVIALAKLNGLVNHDSDKYQSFIQVTPLFETIEDLDRIEEILENLFGNETYRSLITENDSRKLQEVMLGYSDSCKDGGILSSSWNLYKAQQEVLGISEKYNIESRLFHGRGGTVGRGGGPTHNAILAQPNKTVNGMIKITEQGEVLSYKYAVPQSASYELELAVGGLMKASKHLIVEDSSSNDKFEDIMKTMAKLGEEKYRKLTDEKEGIMDYFYEATPVQELAELNIGSRPSHRKKTERSKYSIRAIPWVFGWSLSRHTLPAWYGLGSALRRTIEKNNNSIDNLKRMYSEWPFFRVLVENIQMALAKADLDIAKDYAELVENKVAAKEIINDISEEYDSTVAMLLSIVESQALLSENKKLSISLDRRKPYLDPLNYIQVMLIKKHRNLSEKNEDIFDMLLRTIHAIAIGMRNTG

SEQ ID NO: 175674 - protein, 819 aa, Unknown
  Bacterial polypetide isolated from the Sargasso Sea
MKKRDLYYERIPTKLLREDIRLLGTFLGRVIKDQEGRAFFEIVEKFRLLSKNTLSDKNKSKIFSKISKEVKKLSPKNTFKLTRAFSHILNLMNLAESLDASRKLNEFENPYFKSKNQNLFIEDIIESLFKNKKISDKKIYEQATKLDIGIVLTAHPTEVKRRTLIQKYANLIEIMEQRHLYKKYPSKIIELDRKLYSEIAIIWKTDELKRTKPSPLDEARWGLAVIEDSLWDTIPKVYKRLNDIFRKNLKKDLPRDFNPIQFGSWMGGDRDGNPNVTAEVTKKVILFSRWQAAKLYEKELTKLIQDLSMAECSTKIKRATGNSYEPYRVYLRPIRDKVRLTHQLIENHLNNGADLDEKKLIQNKNEITLPLREVRKSLKANRGEYIANADLLDLMRRVRCFGINLARLDIRQEADRHEKLLNEIFKMKKNIKYSSLTEVEKVKLLNKSIKEKKFFVDKIKIKDKENKEVWNTFKQIAKTPIECLGAYVISMTSTASDILSVYFLQMQAQNKNLLRVVPLFETLDDLKNANSVMTNLFKLSWYRKMINSKQEVMIGYSDSSKDAGKLSASWHQYKLQEELRSLAKKYRINLVFFHGRGGSPGRGGGPIQATLKSQPSGTVNGKIRITDQGEVIQQKYGYKPLAEYNLCSYIGSVMDASLNPPPRSKSNWRDLIQKMSEISTSSYRKYLNQSEDFIRYFKTVTPHKSLGKLAIGSRPTKRKNVDNIQSLRAIPWVFAWTQIRLMLPAWLGTTEALRYGSIKKFKRTMTDMERNWPYFVSTMDILDMVISKVDPEISVIYENNLADASLKRIGKKLRFQFEA

SEQ ID NO: 175675 - protein, 579 aa, Unknown
  Bacterial polypetide isolated from the Sargasso Sea
SIVRHKEELSEPLIACYESLIEVGDAQVANAYLLDVIRKVQCFGMGLVKLDIRQESDRHAEAIDAVTRFVGLGSYLEWSEEKKIEWLTSELENKRPLLPTDLECSAEVKEVLDTCKMIARLQQTCPGSLGTYVISMATCASDVLAVVLLQRECGCRREDLLRVAPLFERLDDLNDAPRVLRQLFSVSWYREHIAGFQEIMIGYSDSGKDAGRMAAAWALYDGQERVVEAGKEFGVALTLFHGRGGTVGRGGGPAHIAMLSQPPGTVNGSIRVTIQGEVIETDFGEKENCFHTLDLYTAAVLEHTLKPPALPRDEWRQVMNKMSEYSCAHYRKTVFQTPEFVGYFAQATPGAELGSLNIGSRPAKRKPNAGVTALRAIPWIFAWTQSRFHLPVWLGISASFKRLIEEGHLETLRDMYKNWPFFEVTIDLVEMVLAKADPVVVEYYERALVDPSLHEFGSKLRQELQESIDCLLSVSEHIGLLAKPEKVEATDAARVHQNLAYKLFKRSLYITPLNVCQVRYLIAARALENEEDGDKLSMEKLRITLLEGYPFQDYNYRGAVNDVLKITMKGIAAGMQNTG

SEQ ID NO: 175676 - protein, 1018 aa, Unknown
  Bacterial polypetide isolated from the Sargasso Sea
MTRAFPRKPIVKSSGSARTARRNAALSSSDASTDTVATAANGRAKTATKPKDPIRQTKRTTKAAGPAARTATRPAAAPKSGTRTRDDKDGPLFDDIRFLGRLLGDVVREQEGDTVFDVVETIRQTAVKFRREDDNEAAQTLEKKLRKLTPEQTVSVVRAFSYFSHLANIAEDRHHNRRRRIHALAGSASQPGTVAYALEQLKTTGNASKRLLQRFFDDALIVPVLTAHPTEVQRKSILDAQHDIARLLAERDQELTSRERQYNESMLRARVTALWQTRMLRDSRLTVGDEIENALSYYRATFLDELPALYGDIEAALAEHGLSARVPAFFQMGSWIGGDRDGNPNVTAATLDEAINRQAAVILEHYLEQVHKLGAELSVSNLLVGANDAVKALAAASPDQSPHRVDEPYRRALIGIYTRLAASARVRLGEGTVPVRSAGRGAPPVRAVPYADSEAFVADLKVLTASLDEHHGTSLAAPRLAPLVRAAEVFGFHLASIDLRQSSDIHEAVVAELFARAGVEADYAALAEEDKLRVLLAALADPRPLRLPYFEYSALAQSELGVFEKAREVRAQFGARAVRNYIISHTETVSDLVEVLLLQKETGLLEGALGVPGGDAKNSLMVIPLFETIPDLRDAARIMREYFALPGIDALIAHQGAEQEVMLGYSDSNKDGGFLTSNWELYRAELALVDLFRDRKITLRLFHGRGGTVGRGGGPTYQAILSQPPGTVNGQIRLTEQGEVIASKFANPEIGRRNLETVVAATLEATLLPQNNAPAQLPAFEAAMQTLSDSAMAAYRALVYETPGFTDYFFSSTPITEIAELNIGSRPASRKLQDPKQRKIEDLRAIPWGFSWGQCRLLLTGWYGFGSAVSAYLDGAQDDAERTKRVALLKKMNKTWPFFSNLLSNMDMVLAKTDLAVASRYAQLVSDRKLRKHVFERIVAEWERTSQALAEITGHEGRLATNPLLARSIKNRFPYLDPLNHLQVELIKRHRAGDTNARLRRGIHLTINGIAAGLRNTG

SEQ ID NO: 175677 - protein, 879 aa, Unknown
  Bacterial polypetide isolated from the Sargasso Sea
MLKRDLYYERIPTKSLRDDVRFLGNILGRVIKEQEGQKFYDLVEKIRLLSKANIANKNRKDPFKKILNEIKKLPPHLLFKLTRAFNHFMNFYNLAESIDASRTLDLYENVKQEKKFQNIFIEEIFENFFKNKKISNNKIYNIAKSLNIGIVLTAHPTEVKRRTLIQKYHSLTEILEQRNLLKNYPSKLKVLDRKVFDEITIIWNTDEIKRSKPTPAEEARWGLAIIEDSLWDTIPKVYRRLNQIFEKNMGKGLPKNFNPIEFGSWMGGDRDGNPFVTAEVTKRVILLSRWEAAKLYEKSMTKLIRSYSMEKCSKKILKTTGRTFEPYRVYLRPLRDKLRKTHRAIEGYLANNKPLNEKDLLSEREEILKPLRVVRESLEQNQSENIASGDLLDLMRRAKCFGINLARLDIRQESSRHSQLLAEYIKKKLNQNYSTWDEDQKINYLSNKMQSKNVLKNFQFKNKENKEVWSTFKVLASQPKECLGAYVISMTSSASDILSVMFFQKEAKIENRLRVVPLFETLDDLINAKPIMEKLFSLKWYRKDINNKQEIMIGYSDSSKDAGKLSASWHQFKLQEEIIKLAKKFKIDVTFFHGRGGSAGRGGGPIQATLRSQPAGSVNGKIRITDQGEVIQQKYGYEPLAKYNLCSYIGSVMEATLNPPPKPKDSWRQLIQSMSEISTSSYRKNINQSSDFIRYFKTVTPHMALGKLSIGSRPSKRKNVDNINSLRAIPWVFAWTQIRLMLPAWLGTAEALRYSSIKKFKKTLIDMEKNWPYFNSTMDLLDMVISKVDPEISKIYEKNLADDKLIRVGKKLRFQFDAVKKLNDQITPKEIFKQRKIFRGPAIIRNIYSEILNVFTAVVMNKTLKRNFNKKIKKILMIA

SEQ ID NO: 175678 - protein, 420 aa, Unknown
  Bacterial polypetide isolated from the Sargasso Sea
LQKYFEERELFKDHAIKIKSLNKKIHDEFTIIWNTDDLKRSKPSPADEARWGLAIIEDSLWETIPKVYRRLNDIFLKNMGKGLPKNFNPIEFGSWMGGDRDGNPNVTSKVTKEVLLLSRWEAAKLYEKELTKLIRSYSMKKCSKKIQKLTGKSFEPYRVFLRPLRDKMRFTHRAIEQFIVNKKPLDYNKLLNSKEEILKPLRIVRESLEENQSENIASGELLDLMRRAKCFGINLAKLDIRQESSRHSQLINELVQKKNKHNYLKWSEEEKIKFLSSKMKKKFNFIKNFNFKNKENKEVWSTFKILSEEPPECLGAYVISMTSSASDILSVLYLQKEANIKNRLRVVPLFETLDDLINAKSIMASLFSLKWYRDLIKNKQEVMIGYSDSSKDAGKICASWHQYKAQEEIIKIAKKYKIDV

SEQ ID NO: 175679 - protein, 819 aa, Unknown
  Bacterial polypetide isolated from the Sargasso Sea
MKGFKIYPHFNTLSGTINLLASELGNVIKEQAGVKYFKLVEDIRVSSKEYRRTNNSKYLNKVYKKLKNLEPSEILIVTKSFTLFFYLSNIAEQVFRGSFDIKINRKNTISKNEDIFFFPVFTAHPTESARQSTLKKIYRIGEIVSLNESEDLDEINNLITKLWYTREIRSNKPNPIDEVKSLIYYLDILYRNVYEDINEELRKEDLIDKNIIRFGTWVGGDRDGNPNVNNKITEESLKIYSNQIIGIYKEKIIKLSDEFSISNKYTDIPKGLNDRINEYSTILKKEHSHYSLINFDEPFRIFLSLIFHRLDNFQNTASGYKSFTEFKEDIELFNKSVSECFKHKSPNKNILKFIDYIDEFEFHGVSMDIREDSSVLKNASSKEYKEFINLLKKIPEWKALYGSKVINSIILSMTKDEEDILNLFKLCKKYIVNVQDIPMLVPLLEQIDDLQRGDAILNGLLSSKQYKDHLIKNFKSTQEIMLGYSDSNKDGGIVSSQWNVYKAQISLFKTGKKNQINTIFFHGRGGTISRGGGPTYNSILSQPDGTITNQIRYTEQGEVISDKYSTSNLAKENLKLGAYAFLKARKGKIINNKDEYKFIEELSDISTKKYKNLINDPNLFRYFETVTPVNLLSILNIGSRPAKRTKESTSQSYRAIPWVFGWAQTRQTITGWYGSGTALLELIDKYGINFLRKQYKTSSFFRDLLSNIEMTIVKSDLKISEIYINELLTEDMKYIFEDISEEANKVRESVKQITRNRELLDSNEILKTTLKIRNTYLDPLSLIQILLMKKLVKKEITEEEKTSLLLSINGLAAGLRNTG

SEQ ID NO: 175680 - protein, 588 aa, Unknown
  Bacterial polypetide isolated from the Sargasso Sea
LGNILGKVIKEQEGKNFFNLVEKIRRLSKANNKSLNTKQTNRKVIKAIQDLDPKNTFKLTRAFTHFMNFINLAELIDASRSLNEYENNKKKISNHNLFIEEIFEGLFKSKNLSDKKIYDTAKNLDIGIVLTAHPTEVKRRTLIQKYHKIIEILEQRDLLKAFPSKLEILDKELFDELTIIWNTDDLKRSKPSPFDEARWGLAIIEDSLWDTIPKVYRRLNSIFLKNMNKNLPKNFNPIQFGSWMGGDRDGNPNVTADVTRKVILLSRWEAAKLYEKALTKIIRSYSMDKCSKKIQAKVGKSYEPYRVFLRPLRDKMRITHRSIEQYLVNKKPLDRNKLLTTREEILKPLRIVRESLEQNQNENLASGELLDLMRRAKCFGINLARLDIRQESSRHSQLISEFVKKKYKKNYSKMSENEKIQFIKSKLLSKNNHINKFHFRNRENKEVWSTFKILAEEPTECLGAYVISMTNSASDILSVSFLQKEANIKHKLRVVPLFETLNDLINSKEIMKSLFSQTWYRKLIHNKQEVMIGYSDSSKDAGKICASWNQYKAQEEIIKLGKKFGIEIIFFHGRGGSAGRGGGPIQAT

SEQ ID NO: 175681 - protein, 413 aa, Unknown
  Bacterial polypetide isolated from the Sargasso Sea
LALAKLCGLISLKEGKLTASIQVTPLFETIDDLTRIEEILEDLFSNDTYTNLLGSYENSKLQEVMLGYSDSCKDGGILSSSWSLYKAQQQVLDISKKYHIECRLFHGRGGTVGRGGGPTHNAILAQPNKTVRGMIKITEQGEVLSYKYAVPQSASYELELAISGLIKASKHLVIDDTVCTNNFEEIMSEMSIVGEKKYRDLTDDKEGIMDYFYEATPVQELAELNIGSRPSHRKKTQRSKYSIRAIPWVFGWSLSRHTLPAWYGLGSALNQMVASDQSSMDKLKTMYSEWPFFRVLLDNIQMALAKSDLGIARDYSLLVKDRNAANQIIDDIEKEFESTVQTLLRIVGSDQLLSDNTKLSLSLSRRQPYLDPLNYIQVMLLKAHREIPDEDTVNLDPLLRTIHAIATGMKNTG

SEQ ID NO: 175682 - protein, 415 aa, Unknown
  Bacterial polypetide isolated from the Sargasso Sea
MLKRDLYYERIPTKSLRDDVRFLGNILGRVIKEQEGQKFYDLVEKIRLLSKANIANKNRKDPFKKILNEIKKLPPHLLFKLTRAFNHFMNFYNLAESIDASRTLDLYENVKQEKKFQNIFIEEIFENFFKNKKISNNKIYNIAKSLNIGIVLTAHPTEVKRRTLIQKYHSLTEILEQRNLLKNYPSKLKILDRKVFDEITIIWNTDEIKRSKPTPAEEARWGLAIIEDSLWDTIPKVYRRLNQIFEKNMGKGLPKNFNPIEFGSWMGGDRDGNPFVTAEVTKRVILLSRWEAAKLYEKSMTKLIRSYSMEKCSKKILKTTGKTFEPYRVYLRPLRDKLRKTHRAIEGYLTNNKSLNEKDLLSEREEILKPLRVVRESLEQNQSENIASGDLLDLMRRAKCFGINLARLDIRQESS

SEQ ID NO: 175683 - protein, 728 aa, Unknown
  Bacterial polypetide isolated from the Sargasso Sea
MLKRDLYYERIPTKALRDDVRYLGNILGKVIKEQEGQQFFNLVEKIRLLSKANVANKNQKNPFKKISSEIKKLDAEKLFKLTRAFNHFMNFYNLAESIDATRTLDQYENKKIDNKLNNIFIEEIFENFFKDKKIPNNKIYNIAKSLNIGIVLTAHPTEVKRRTLIQKYHTLTEVLEQRNLLKDYPSKIKILDKKMYDEITIVWNTDEIKRTRPTPFEEARWGLAIIEDSLWETIPKVYRRLNQIFVKNMKKGLPKNFNPIEFGSWMGGDRDGNPFVTSAVTKEVILLSRWEAAKLYEKALTKIIRSFSMQKCSKEITKATGKSFEPYRVYLRPLRDKIRKTHRAIEQHLVQKMPLDESKLISSREDILKPLRVVRKSLEENQCENIASGELLDLMRRTKCFGINLARLDIRQESSRHSQLISEIVRKKYKQNYETWNEETKINFLSKKLKGKNFIKNFKFRNKENKETWDTFKILASQPKECLGAYVISMTSSASDILSVMLLQKEANIKNILRVVPLFETLEDLINAKPIMKSLFSLKWYKKLIKNEQEIMIGYSDSSKDAGKLSASWHQYKLQEEIHKLSKKFKINVSFFHGRGGSAGRGGGPIQATLRSQPPNTVQGKIRITDQGEVIQQKYGYEPLAKYNLCSYIGSVMQATLNPPPEPKKSWRDLIQKMSEVSTSAYRKNINQSTDFIRYFKTVTPHMALGKLFIGSRPSKRKNVDNIKSLRA

SEQ ID NO: 175684 - protein, 590 aa, Unknown
  Bacterial polypetide isolated from the Sargasso Sea
MNEKYAALRANVGMLGQLLGKSIKDHQGQAFLDKIETIRQLAKSSRKGNETDRERLLDTLRNLSDDELLPVARAFSQFLNLANVAEQFHTISRRCEEQVCTPDPLEQMFDKLKASNLSQESIIQAVRELDIDLVLTAHPTEVTRRTLIHKHVQLNDCLEALELSDLLPRERDKILNRIEQLVNQAWHTNEIREQRPTPVDEAKWGFAVVENSLWPAIPEFMRNLDERLQHHLGVRLPLDAAPVKFTSWMGGDRDGNPFVTAKVTAEVLELGRWMAVSLFYKDIKELTSELSMSDCTDAVRERVGDHPEPYRALVRELREQLRETQEFLTAKVQGQASESRDLVKTTAQLREPLELCYHSLHACGMGNIADGMLLDVLRKLACFGIHLVKLDIRQDGERHGQVFSELTRYLGMGDYAEWSEDDKQAFLLNELNSRRPLIPTDWEPSDETRETLDTCKVIAQHDPDAFGIYIISMAGAPSDVLAVQLLLKEAGCKFRMPVAPLFETQEDLMAGTAVMERLLSVDWYRGYIQGRQYVMIGYSDSAKDAGMMAAGWAQYAAMESLVALAEANNLRLTLFHGRGGTVGRGGAPAH

SEQ ID NO: 175685 - protein, 547 aa, Unknown
  Bacterial polypetide isolated from the Sargasso Sea
YLIKDSLISDNDNILNDFCLNDFIRLVETFGFYLVNLDIREESTNHTNAISEIFKNHNNIEYDQLDESSRIASLEKIIKSDLTLDDIYSPLSDETKKVLDVFTVMKELRNEVSEHAFGNYVISMTHHASHVFEVLALAKLCGLISLKEGKLAASIQVTPLFETIDDLTRIEEILEDLFSNDTYINLIGSYKNKKLQEVMLGYSDSCKDGGILSSSWSLYKAQQQVLDISKKYQIECRLFHGRGGTVGRGGGPTHNAILAQPNKTVRGMIKITEQGEVLSYKYAVPQSASYELELAISGLIKASKHLVIDDTVCTNNFEEVMSEMSIVGEKKYRDLTDDKEGIMDYFYEATPVQELAELNIGSRPSHRKKTQRSKYSIRAIPWVFGWSLSRHTLPAWYGLGSALNKMVASDQSSMGKLKEMYSEWPFFRVLLDNIQMALAKSDLGIARDYSLLVKDRNAANQIIDDIEKEFESTVQTLLKIVDADQLLSDNTKLSLSLSRRQPYLDPLNYIQVMLLKAHREIPDEDTVNLDPLLRTIHAIATGMKNTG

SEQ ID NO: 175686 - protein, 520 aa, Unknown
  Bacterial polypetide isolated from the Sargasso Sea
IVLTAHPTEVKRRTLIQKYHKIIEILEDRELLKNYPSKLKILENQLFDELTIIWNTDDLKRIKPSPFDEARWGLAIIEDSLWDTIPKVYRKLNSIFVRNMNKNLPKNFNPIVFGSWMGGDRDGNPNVTAEVTRKVILLSRWEAAKLYEKGLTKIIRSYSMEKCSKKILKKVGNSFEPYRIFLRPLRDKMRITHRLIEQHLVQKKPLDQKKLLSSREEILRPLRVVRESLEENQNENIASGDLLDLMRRAKCFGINLARLDIRQESSRHKQLISELVKAKYNKNYSNFSEKEKLNFLRLSINSKSKKIGNFQFRNKENKEVWSTFKTLSKEPPECLGAYIISMTTSASDILSVSFLQKEAEIKDKLRVVPLFETLNDLINAKSIMENLFSQNWYRKLINYNQEVMIGYSDSSKDAGKICASWHQYKAQEEIIKLGKKFKIKITFFHGRGGSPGRGGGPIQATLRSQPPNSVNGNIRITDQGEVIQQKYGYEPLANYNLCSYIGAVTESTLNPPPIPKEEWR

SEQ ID NO: 175687 - protein, 894 aa, Unknown
  Bacterial polypetide isolated from the Sargasso Sea
MIKKIELSTTIHLLGEILGSVIKKQENTAIFDKIEKIRTLSKYSRGSNERLNNQSFKKLKNQISNLTATETLIIAKSFSRFLDFSNIAESLYSIQNIHDHVIRKTQETNEIVILEEALIDVQKNPNVSKNKFFNVAKNINIDLVLTAHPTEVKRRTLIQKYANVNNILDELNNLQILKKQNIKREKGILEKKLKEEITSVWKTDEIKRSRPTAVEEAKWGLAVIEDSLWNSIPKICSRFDSAVKKFTNKNLPINYSPIKISSWMGGDRDGNPNVTSKTTMEVVLLSRWEAASLYEKEFTKLIQSLSLFDCSKKIKKQVGKTWEPYRVFLRPIRNKLQQTQREIEDALLEKREPKKQLLVNSINEILDPLNEVYNSLCSVKCDIIANGLVLDIIRLSHTFGLNLAKLDIRQESSRHTSLLNTICKKLALKEYTKLSEQEKIKFLTREYKSKRPLIPNKIKFNNTDKETWETFKMIANTSNEFLGAYVISMTSKVSDILGVLLLQKEAGVKNPLRIVPLFETLSDLQNSSKIVDNLFKNRWYTNIFSNEQEIMIGYSDSSKDAGKFAASWAQYCAQEKLCSVANKHKIKLNFFHGRGGSVGRGGGPVYAALLSQPPGTVMGMTRVTEQGEVIQQKYGSESMAEYSLGTYIGAVLEATLSPPSKPSKEWRTLIDSMSIISSKAYRHYLLEDEDFLKYFDKVTPKNIIGKLYIGSRPSKRNASKDIKSLRAIPWVFAWTQIRMLLPAWLGTYEALNFASKGKNKKILDEMIKNWPFFYEMMDMLDMVLIKTDQRVIRYYEECLATPELKKIGNELRAKLTELIEINKKIIPNNIINQRKAFRKSIKLRNTYAEILNLLQADIMKRLNKKNINTKSKKILMDAMIVTISGISASMKNTG

SEQ ID NO: 175688 - protein, 889 aa, Unknown
  Bacterial polypetide isolated from the Sargasso Sea
MAGNVADNVTDMYASLRSNVSMLGQILGDTMRTHLGDSFLEKVEQIRKLAKDSRRGDEAAREQMLELLTALPDEELVPFAKAFNQFLNLANLSEQFHTISRNCDELVCVPDPVEQLLGRMLNGRIDQTKMLDCLKTLDIDLVLTAHPTEISRRTLIQKYAAIVDCLAEQENDQLSDRERRQINLRLRQLIAQIWHTNEIRRERPTPVDEARWGLSTIEESLWHAVPDFLRQLNDQVQERTGQQLPIDIAPVRFSSWMGGDRDGNPFVTAKVTQEVLDRNRHAAARLFLKDIVLLVGELSMEEANDELKAYTNNSCEPYRFVLRSLRQKLRDTIDYLNARIEGHNPEVDKSTLIWQESDLKAPLEMLYKSLCDCGMRLIANGLLLDILRRLACFGIHMLRLDIRQDAGRHCDVLAELTRYLGMGDFNHWDETEKQAFLLRELSNRRPLIPSNWQPSADVAEVLNTCRLIAKHPAKALGSYVISMASKPSDVLTVLLLLKETGCTHPMRVVPLFETLSDLNNAAECITALLDIDWYRGYTKGMQEVMIGYSDSAKDAGVMAAAWAQYRAQEQLVAVCKQAGVKLTLFHGRGGSIGRGGGPAHKAILSQPPGSVDGRIRVTEQGEMIRFKFGLPKLAVQSLALYTSAVLEATLLPPPEPKQEWRNCMERIAQESVSAYRGIVREEPDFVPYFRAATPEVELGKLPLGSRPAKRRVDGGIESLRAIPWIFAWSQNRLMLPAWLGAGEALQAACQRGEMGLLQDMDREWPFFSTRISMLEMVYAKAEPNLARYYETCLVPPNLHHLGETLRQRLDLGIKVVLELTKSDTLMAHTPWNRESVKLRNPYIDPLNFLQTELLARTRKETTEAPASEHVQLALMLTIAGVAAGMRNTG

SEQ ID NO: 175689 - protein, 205 aa, Unknown
  Bacterial polypetide isolated from the Sargasso Sea
PDFVPYFRAATPEMELGKLPLGSRPSKRKPNGGVESLRAIPWIFAWTQNRLMLPAWLGAHKGLQQAIADGQKGVLEEMSRQWPFFRTRLEMLEMVFLKADVWLAEYYDTRLVPKELWGLGKQLRQELADSIQVVLELRPQGDLLDDQPWIKESIKLRNPYTDPLNVLQVELLGRSRNHAETLHPELDQALMVTIAGIAAGMRNTG

SEQ ID NO: 175690 - protein, 814 aa, Unknown
  Bacterial polypetide isolated from the Sargasso Sea
PPRLFAIRVRHKHRRVAHLIQRLEGLTDENDSFDDRQGLRQQLLEEIRVWWRTDELHQFKPSVLDEVDYALHFFQQVLFQAMPLLHERIRKALQDSYPDVTPPEDGFCTFGSWVGSDRDGNPSVTPEITWRTACYQRQLMLERYLSSVRNLRNQLSISMQWSQVSPALLESLEMDRLRFPEIYEKLAARYRLEPYRLKLCYVLQRLELTHERNAQLAELGWESPPSATEPEEQALSSLAPQQELHYSTYQDFRSDLELVRSSLEATGLSCEPLNRLLSQVQIFGFCLASLDIRQESTRHSEALAELTRYLQLPQDYEAMNEPQRVEWLLEQLQTRRPLIPTGPLWSDATAETFAVFQMLRRLQEEFGQRICRTYVISMSHTESDLLEVLLLAKEAGLVDPVEGTTRLQVIPLFETVEDLRCAPEVMGALLARPFYKRLLENEEVPLQEVMLGYSDSNKDSGFLSSNWEIHRAQIALQALSSKHDISLRIFHGRGGSVSRGGGPAYQAILAQPSGTLKGRIKITEQGEVLASKYALPELALYNLETVTTAVLQNSLLSSGVDDTPSWNELMERLASRSRQHYRALVHEHPDLVAFFEQVTPIEEISKLQISSRPARRRTGARDLSSLRAIPWVFGWTQSRFLLPSWFGVGAAISDEMGDDTEGLETLRTLYQRWPFFRMLISKVEMTLAKVDLSLAKYYVDSLGSADRADAFQEIFATIAAEYSLTKELVLKITGHERLLDGDPPLQLSVELRNRTIVPLGFLQVALLRRLRNQNRQPPMNESDLADTRTYSRGELLRGALLTINGIAAGLRNTG

SEQ ID NO: 175691 - protein, 349 aa, Unknown
  Bacterial polypetide isolated from the Sargasso Sea
LINFNNSQEIMLGYSDSNKDGGIVSSQWSVYKSQIALFSTGQKHDINISFFHGRGGTISRGGGPTYNSILSQPKGTIKNAIRYTEQGEVISDKYSTANLAIENLKLGLFAFFKANKTKNHEIKYEHSFLDELSKLSSQKYKSLINDENLIYYFESVTPVNLLSILNIGSRPSKRSKVSSVKNYRAIPWVFGWAQTRQTITGWYGSGSALEELINKFGINEVRKIYNSSSFFQNLLSNIEMTLAKTDLNISRFYTENLVEKEISYLYENIVEESLKVESAIKRITKSKELLDSNKILKNTLAIRDTYLDPLSLIQVLLLQKLQKNELTDYEKTSLLLSVNGLAAGLRNTG

SEQ ID NO: 175692 - protein, 425 aa, Unknown
  Bacterial polypetide isolated from the Sargasso Sea
RLSTGKTFEPYRVYLRPLRNKMRITHTHIEQHLNHNKPLDQKKLLSNREEILKPLRVVRESLEKNQSENIASGELLDLMRRAKCFGINLARLDIRQESSRHTQVISEVVKKKLKSNYDKWTEQRKIKFLISKITSKSKFFSDKIISNKENKEVWKTFKVLADEPPECLGAYVISMTSKASDILAVSLLQKEAGIKNKLRVVPLFETLDDLKNAKSTMDSLFSIKWYRKYIKNEQEIMIGYSDSSKDAGKLSAGWHQYKLQEELTQLGKKYKIEIIFFHGRGGSAGRGGGPIQATLKSQPPGSVNAKIRITDQGEVIQQKYGYEPLAKYNLCSYLGAVMEATLNPPPKPKESWRKLIEKMTLISTDSYRHNINDNSDFIRYFKTVTPHVSLGKLSIGSRPSKRKNVDNIQSLRAIPWVFAWTQIRL

SEQ ID NO: 175693 - protein, 459 aa, Unknown
  Bacterial polypetide isolated from the Sargasso Sea
MKIVYAETIPKVYRRLNQIFVKNMGRGLPKNFNPIEFGSWMGGDRDGNPFVTSEVTKEVILLSRWEAAKLYEKAMTKLIRSYSMVKCSTKISRVTGNSFEPYRVFLRPLRDKLRTTHREIEQHLINNKPLNEKKLLSSREEILKPLRVVRESLEENQSENIASGELLDLMRRAKCFGINLARLDIRQESSRHSQLLSEFIKKKYKINYNNLNEDKKIKFLSNKLKSKNIIKNFKFKNKENKEVWSTFKMLASQPQECLGAYVISMTSSASDILSVMFLQKEANIKNKLRVVPLFETLDDLINAKPIMQKLFSLKWYKKIIDSKQEIMIGYSDSSKDAGKLSASWHQYKLQEEIIKLSKKYKINVNFFHGRGGSAGRGGGPIQATLRSQPPNSVNGKIRITDQGEVIQQKYGYEPLAKYNLCSYIGSVMQATLNPPPQPKNEWRKLIQKMSEISTSSYRK

SEQ ID NO: 175694 - protein, 414 aa, Unknown
  Bacterial polypetide isolated from the Sargasso Sea
FHGVTLDIRQNSSVINSKKGKIYKDFINLIKEIPQLQNTYGQNVFNSIILSMTKSHQDLLNLFNLCSSLIPDKNIPSLTPLIEEIQELQSSDMILDEMLKNKKYNKFIKNLKRNNQEVMLGYSDSNKDGGIIASQWNVYKAQISLFNIAKKNNININFFHGRGGTISRGGGPTYDSIMSQPKGTISSQIRYTEQGEVISDKYSTHYLAFENLKLGSAAFINTSSSTLESKLKYENIFEELSHNSYSKYRSLIDKNNLINYFENVTPVNLLSTLNIGSRPVKRSNKITSLDNYRAIPWVFGWAQTRSTLTGWYGAGTAFESLINKYGIQKVRSIYETSNFFQNLISNIEMTVFKSDLKISKLYVDELVGEEYQDIYEDILIESKLVIKMIKQIKQNSELLNDNKVLKNTLNIRNA

SEQ ID NO: 175695 - protein, 565 aa, Unknown
  Bacterial polypetide isolated from the Sargasso Sea
MEQRHLYKKYPSKIIELDRKLYSEIAIIWKTDELKRTKPSPLDEARWGLAVIEDSLWDTIPKVYKRLNDIFRKNLKKDLPRDFNPIQFGSWMGGDRDGNPNVTAEVTKKVILFSRWQAAKLYEKELTKLIQDLSMEECSTKIKRATGNSYEPYRVYLRPIRDKVRLTHQLIENHLNNDADLDEKKLIQNKNEITLPLREVRKSLKANRGEYIANADLLDLMRRVRCFGINLARLDIRQEADRHEKLLNEIFKKKKNIKYSSLTEIEKVKLLNKSIKEKKFFVDKIKIKDKENKEVWNTFKQIAKTPIECLGAYVISMTSTASDILSVYFLQMQAQNKNLLRVVPLFETLDDLKNANGVMTNLFKLSWYRKMINSKQEVMIGYSDSSKDAGKLSASWHQYKLQEELRSLAKKYKIDLVFFHGRGGSPGRGGGPIQATLKSQPSGTVNGKIRITDQGEVIQQKYGYKPLAEYNLCSYIGSVMDASLNPPPRSKSNWRDLIQKMSEISTSSYRKYLNQSEDFIRYFKTVTPHKSLGKLAIGSRPTKRKNVDNIQSLRAIPLGICLDTN

SEQ ID NO: 175696 - protein, 536 aa, Unknown
  Bacterial polypetide isolated from the Sargasso Sea
SNKNIFIEEIFEGFFKNRKISTNKIYDIAKNLNIGIVLTAHPTEVKRRTLILKYHKIIEIMEQRDLLKKYPFKLKILDKKLFDEFTIIWNTDELKRSRPTPPDEARWGLAIIEDSLWETIPKVYRRLNDIFVKNIGKGLPKNFNPIEFGSWMGGDRDGNPNVTAKVTKEVILLSRWEAAKLYEKELTKLIRSLSIDKCSKKIISKTGKTFEPYRVYLRPLRNKMRLTHKLIEQHLVENIPLDQKKLLCNREEILKPLRVVRESLEENNSENIASGDLLDLMRRAKCFGINLARLDIRQESSRHSQLIAELLKRKYKFNYNNLSEDKKIKLLSSKIKSKINLINKFSFKNKENKEVWETFKILSNEPKECLGAYVISMTSAASDILSVAFLQKEAKIKDLLRIVPLFETLEDLINAKSIMKKLFSLNWYRKMINNKQEVMIGYSDSSKDAGKLSASWHQYKAQEEIIKLAKKYKIDVTFFHGRGGSAGRGGGPIQATLRSQPPNSVNGKIRITDQGEVIQQKYGYEPMAKYNLCSYI

SEQ ID NO: 175697 - protein, 399 aa, Unknown
  Bacterial polypetide isolated from the Sargasso Sea
DVLAVQLLLKDAGITFPMRVAPLFETLADLTNAPECISKLLAIDWYRGYINGRQEVMIGYSDSAKDAGAFAAAWAQYSAQEALVAICQQAKVQLTLFHGRGGTIGRGGGPAHAAILSQPPGSLAGGMRVTEQGEMIRFKFGLNGLAQRSLALYASAVLEGVLLPPPVPEQSWRELMQQLATVSCEAYRAVVRHHPDFVPYFRAATPELELGQLPLGSRPPKRNPNGGVESLRAIPWIFAWSQNRLMLPAWLGAGNALAVVVEQGKTELLAQMRAQWPFFATRLSMLEMVYLKADAEIAAYYDEKLVPEHLLPLGLQLRQQLAADTALLLKLIQSDTLMANEAWIRESIMLRNTYVDPLHILQVELLNRVRHAPETVNDSIKRALMVTIAGIAAGMRNSG

SEQ ID NO: 175698 - protein, 989 aa, Unknown
  Bacterial polypetide isolated from the Sargasso Sea
MESIRQIKNNNVDLISNNDPLDKNRLLIEDLWESVLREECPNDQAERLIQLKELSYSKQIDGDSSKTFKNEIVDIVNSMDLAESIAAARAFSLYFQLVNILEQRVEEDRYIQSFTNKDVQKSPDNLDPFAPALARQNAPVTFRELFYRLRKLNVPPGKLEELLQEMDIRLVFTAHPTEIVRHTIRHKQTRVANLLKKIQIEQFLTKEEKNSLKNQLKEEVRLWWRTDELHQFKPSVLDEVDYALHYFQQVLFNAMPQLRGRIAEALTENYPDVQLPSESFCNFGSWVGSDRDGNPSVTPEITWRTACYQRQLMLERYIIATSNLRDQLSVSMQWSQVSSSLLESLETDRVKFPEIYEARATRYRSEPYRLKLSYILEKLRLTQERNNLLADSGWKFDLEGETDKKNLDKVENLYYKSVNEFTYDLELIKNSLISTDLTCESVNTLLTQVHIFGFSLASLDIRQESTRHSDAIQELTSYLDLSVQYDQMSEEEKIKWLIDELNTKRPLIPSDVNWTKTTEETFSVFKMVKRLQQEFGSRICHSYVISMSHSASDLLEVLLLAKEMGLLDQNSQKSKLLVVPLFETVEDLKRAPEVMEKLFKLDFYRSLLPKVGESFKPLQELMLGYSDSNKDSGFVSSNWEIHRAQIALQNLSSRNNILLRLFHGRGGSVGRGGGPAYQAILAQPSGTLKGRIKITEQGEVLASKYSLPELALYNLETVTTAVIQNSLVNNRLDATPEWNQLMSRLAETSRSHYRKLVHENPDLLNFFQEVTPIEEISKLQISSRPARRKKGAKDLSSLRAIPWVFGWTQSRFLLPSWFGVGTALSSELNSDPQQIELLRVLHQRWPFFRMLISKVEMTLSKVDLEVARYYVDTLGSKENKDSFDDIFEVISKEYNLTKSLILEITCKNKLLESDRDLKSSVSLRNKTIIPLGFLQVSLLRRLRDQTRQPPISEFMIDKDESRRAYSRSELLRGALLTINGIAAGMRNTG

SEQ ID NO: 175699 - protein, 534 aa, Unknown
  Bacterial polypetide isolated from the Sargasso Sea
ESDLKAPLEMLYKSLCDCGMRLIANGLLLDILRRLACFGIHMLRLDIRQDAGRHCDVLAELTRYLGMGDFNHWDETEKQAFLLRELSNRRPLIPSNWQPSADVAEVLNTCRLIAKHPAKALGSYVISMASKPSDVLTVLLLLKETGCTHPMRVVPLFETLSDLNNAAECITALLDIDWYRGYTKGMQEVMIGYSDSAKDAGVMAAAWAQYRAQEQLVAVCKQAGVKLTLFHGRGGSIGRGGGPAHKAILSQPPGSVDGRIRVTEQGEMIRFKFGLPKLAVQSLALYTSAVLEATLLPPPEPKQEWRNCMERIAEESVSAYRGIVREEPDFVPYFRAATPEVELGKLPLGSRPAKRRVDGGIESLRAIPWIFAWSQNRLMLPAWLGAGEALQAACQRGEMGLLQDMEREWPFFSTRISMLEMVYAKAEPNLARYYETCLVPTNLHHLGETLRQRLDLGIKVVLELTKSDTLMAHTPWNRESVKLRNPYIDPLNFLQTELLARTRKETTEAPASEHVQLALMLTIAGVAAGMRNTG

SEQ ID NO: 175700 - protein, 425 aa, Unknown
  Bacterial polypetide isolated from the Sargasso Sea
MNEQYSALRSNVSMLGKVLGETIKDALGENILDRVETIRKLSKSSRAGNEINRQELLTTLQNLSNDELLPVARAFSQFLNLANTAEQYHSISPKGEAASNPEVIARTLRKLKEQPNLNDAAIKKAVESLSLELVLTAHPTEITRRTLIHKMGEVNACLKQLDNKDLVDYERNQLMRRLRQLIAQSWHTDEIRKLRPSPVDEAKWGFAVVENSLWEGVPNYLRELNEQLEEHLGYKLPVDFVPVRFTSWMGGDRDGNPNVTADITRHVLLLSRWKATDLFLKDIQFLISELSMVDATPELMALVGEEGAAEPYRYLMKTLRSRLMATQAWLEARLKGEKLPKPAGLLTQNEQLWDPLYACYQSLQACGMGIIANGELLDTLRRVKCFGVPLVRIDIRQESTRHTEALGELTRYLGIGDYENWSEAD

SEQ ID NO: 175701 - protein, 485 aa, Unknown
  Bacterial polypetide isolated from the Sargasso Sea
MRLTHRAIENHLVRHKPLDQNKLLSSREEILKPLRVVRDSLEKNQNENIASGELLDLMRRAKCFGINLARLDIRQESSRHSQLLYEFIKKKYRADYYKWSEKQRINFLSKHLKTNKKIIKNFRFKNRENLEVWSTFKILADQPEECLGAYIISMTSSASDILAVSFLQKEANINKRLRVVPLFETLDDLKNAKSIMENLFSLSWYRKLIKNNHEIMIGYSDSSKDAGKLSASWHQYKLQEEIVKLGKKYKIDLTFFHGRGGSAGRGGGPIQSTLRSQPPGSVNGKIRITDQGEMIQQKYGYEPIAKYNLCSYIGAVMQATLNPPPKPKDSWRNLIEDMTQISTRSYRKNIRENTDFIRYFKTVTPHLALGKLSIGSRPSKRKNVDNIKGLRAIPWVFAWTQIRLMLPAWLGTGEALKYSSVKKFKSILVDMERNWPFFNSTMDILDMVISKVDPEISEVYEQGLADAKLKKVGDKLRLQFDNIKK

SEQ ID NO: 175702 - protein, 899 aa, Unknown
  Bacterial polypetide isolated from the Sargasso Sea
FSLYFQLVNILEQRVEEDRYIQSFTNKNVQKSPDNLDPFAPALARQNAPVTFRELFYRLRNLNVPPGKLEELLQEMDIRLVFTAHPTEIVRHTIRHKQTRVANLLKKIQVEEFLTKEEKNSLKTQLKEEVRLWWRTDELHQFKPSVLDEVDYALHYFQQVLFNAMPQLRGRIAEALTENYPDVQMPSESFCNFGSWVGSDRDGNPSVTPEITWRTACYQRQLMLERYIIATSNLRDQLSVSMQWSQVSSSLLESLETDRVKFPEIYEARATRYRSEPYRLKLSYILEKLRLTQERNNLLSDSGWKFDLEREIDTKNIDKVENLYYKSVNEFTYDLELIKNSLISTDLTCEAVNTLLTQVHIFGFSLASLDIRQESTRHSDAIQELTNYLDLYVQYDQMSEEEKIKWLIAELNTKRPLIPSDVNWTKTTEETFSVFKMVKRLQQEFGSRICHSYVISMSHSASDLLEVLLLAKEMGLLAQDSQKSKLLVVPLFETVEDLKRAPEVMEKLFKLDVYRSLLPKVGESFKPLQELMLGYSDSNKDSGFVSSNWEIHRAQIALQNLASRNDILLRLFHGRGGSVGRGGGPAYQAILAQPSGTLKGRIKITEQGEVLASKYSLPELALYNLETVTTAVIQNSLVNNRLDATPEWNQLMSRLAETSRSHYRKLVHENPDLLNFFQEVTPIEEISKLQISSRPARRKKGAKDLSSLRAIPWVFGWTQSRFLLPSWFGVGTALSAELNSDPQQIELLRVLHQRWPFFRMLISKVEMTLSKVDLEVARYYVDTLGSTENKDSFDVIFEVISKEYNLTKSLILEITGKNKLLESDRDLKSSVSLRNKTIIPLGFLQVSLLRRLRDQTRQPPISEFLMDKDESTRAYSRSELLRGALLTINGIAAGMRNTG

SEQ ID NO: 175703 - protein, 459 aa, Unknown
  Bacterial polypetide isolated from the Sargasso Sea
MKEEKINFLKSKLTSTKSYINKFKFSDKENNEVWSTFKVLADEPSECLGAYVISMTTSVSDILSVSFLQKEAKINNKLRVVPLFETLDDLINAKSIMESLFSKKWYRKLINNKQEVMIGYSDSSKDAGKICASWHQYKAQEEIVRLGKKFDVNVTFFHGRGGSPGRGGGPIQATLRSQPPGSVNGKIRITDQGEVIQQKYGYEPIAEYNLCSYIGAVTEATLNPPPTPKQNWRSLIEKMSDISKSSYRKNINQSSEFIKYFKTVTPSAALGKLSIGSRPSKRKNVDNIKSLRAIPWVFAWTQIRLMLPAWLGSAEALRYAYIKKFRRTLIDMEKNWPFFNSMLDILDMVITKADPDISKIYEKYLADDALKKIGKKLRFQFEVIKKLNKKITTKEVILTRKQFRTLITVRAIYSEVLNIIQPIVIYKLKKNKIMSDKKYLNDALLTSIAGISAAMKNTG

SEQ ID NO: 175704 - protein, 483 aa, Unknown
  Bacterial polypetide isolated from the Sargasso Sea
AISNKRRKNFSKNPIKRGSKTWWRTDELHQFKPSVLDEVDYALHYFQQVLFNAMPQLRGRIAEALTENYPDVQLPSESFCNFGSWVGSDRDGNPSVTPDITWRTACYQRQLMLERYIIATSNLRDQLSVSMQWSQVSSSLLESLETDRVKFPEIYEARATRYRSEPYRLKLSYILEKLRLTQERNNLLADSGWKFDLEGETDNKNLDKVENLYYKSVNEFTYDLELIKNSLISTDLTCESVNTLLTQVHIFGFSLASLDIRQESTRHSDAIQELTNYLDLSVQYDQMSEEEKIKWLIDELNTKRPLIPSDVNWTKTTEETFSVFKMVKRLQQEFGSRICHSYVISMSHSASDLLEVLLLAKEMGLLDQNSQKSKLLVVPLFETVEDLKRAPEVMEKLFKLDFYRSLLPKVGESFKPLQELMLGYSDSNKDSGFVSSNWEIHRAQIALQNLSSRNNILLRLFHGRGGSVGRGGGPAYQAILAQP

SEQ ID NO: 175705 - protein, 444 aa, Unknown
  Bacterial polypetide isolated from the Sargasso Sea
KSFVDKINIRDKENKEVWNTFKQIAKEPTQCLGAYVISMTSKASDILSVYFLQMQAQTKNLLRVVPLFETLDDLINANSVMTNLFKLSWYRKMIKSKQEVMIGYSDSSKDAGKLSASWHQYKLQEELRNLAKKYKIDLVFFHGRGGSPGRGGGPIQATLKSQPSGTVNGKIRITDQGEVIQQKYGYKPLAEYNLCSYIGAVMDASLNPPPRSKTNWRELIQKMSEISTSSYRKYLNQSQDFIRYFKTVTPHKSLGKLAIGSRPTKRKNVDNIQSLRAIPWVFAWTQIRLMLPAWLGTTEALRYGSIKKFKRTMTDMERNWPYFVSTMDILDMVISKVDPEISVIYENNLADASLKRIGKKLRFQFDALVKLHNKITPKEVVKERKEFRKSLFIRNNYTEMLNILQANVMNKLTNKKYKNLDKKFLEDALMTSIAGISAAMKNTG

SEQ ID NO: 175706 - protein, 515 aa, Unknown
  Bacterial polypetide isolated from the Sargasso Sea
NQSENIASGELLDLMRRAKCFGINLARLDIRQEASRHSQLITEIIKNKYGQDYNSWNEEKKIKFLSQKLKGKNFINKFKFKNRENKEVWSTFKVLSSQPKECLGAYVISMTSSASDILSVMLLQKEANIKDRLRVVPLFETLDDLINAKPIMNSLFKLGWYKKLVNSNQEIMIGYSDSSKDAGKLSASWHQYKLQEEILKLSKRYKIEVTFFHGRGGSAGRGGGPIQATLRSQPPGSVNGKIRITDQGEVIQQKYGYEPLAKYNLCSYIGSVMEATLNPPPLPKNQWRNLIQKMSEISTSSYRKNITPNSEFIRYFKTVTPHMALGKLSIGSRPSKRKNVDSIKGLRAIPWVFAWTQIRLMLPAWLGTAEALRYSSIKTFKKTLTDMEKNWPYFNSTMDLLDMVLSKVDPEISKVYEDNLADASLKRVGKKLRFQFDAVKKLNHDITPIEILKQRKIFRGPAIVRNVYSEVLNVLQAVVMNKLSKKKLKKHAKNELNDALMTSIAGISAAIKNTG

SEQ ID NO: 175707 - protein, 166 aa, Unknown
  Bacterial polypetide isolated from the Sargasso Sea
MATENKKLQQWVEDMVALCQPDNVVWCDGSKDEWSRMWDILVKGGTAKKLDEKKRPNSYYIRSVPADVARVEDRTFICSEKEEDAGPTNNWCEPAEMRETLNKLFTGCMKGRTMYVIPFSMGPIGSDIAKIGVEISDSPYVVTNMHIMARVGKKVLDVLGADGDFV

SEQ ID NO: 175708 - protein, 300 aa, Unknown
  Bacterial polypetide isolated from the Sargasso Sea
GWKVETIGDDIAWMKFGEDGQLYAINPEAGFFGVAPGTGQETNPNALATLSGNCVFTNVAETDDGDVWWEGLSDEAPARLIDWKGQTWTPESESPAAHPNARFTVPASQCPSIAPSWEDPAGVPISAILFGGRRATTVPLVAEALSWEHGVFLGSVMSSEKTAAAAGTVGQVRRDPFAMLPFCGYNFGDYFQHWLDIGDHPGANLPKLFYVNWFRKNDEGNFIWPGFGENARVLKWVLERIGGTTEAVETAIGMVPKPEDLDVSGLDLEPEELQTLLAVNEDEWKSELALIEEHYESMAK

SEQ ID NO: 175709 - protein, 296 aa, Unknown
  Bacterial polypetide isolated from the Sargasso Sea
GDLDPEKRFIMHFPDEKIIRSIGSGYGGNALLGKKCHALRIASYQALEEKWLAEHMLIVEIENPQGEIFNIAAAFPSACGKTNLAMLIPPDEYKGWKVRTIGDDIAWLHMDDAGQIWAINPEAGYFGVVPGTNEDDNENAYKAIQSNAIFTNVGLTDNNEPWWEGRKDGNPVIDWKGDRIEQGEDAVFAHPNSRFTVSAKNNPKYSDLADSSNGVPISAIVFGGRRSELAPLVYESKDWNHGVLVGASVGSETTAAAIGEVGVIRRDPMAMKPFCGYNFADYWTHWLSFSERSNNL

SEQ ID NO: 175710 - protein, 275 aa, Unknown
  Bacterial polypetide isolated from the Sargasso Sea
MTRVGSAVIDELGEDGAFVPCIHSVGKPLVDGVEDVPWPCNPENLYIAHFPASREIWSFGSGYGGNALLGKKCFALRIASTMARDEGWLAEHMLILKITSPQGAHRYIAGAFPSACGKTNLAMLIPSMPGWKVETVGDDICWMKFGEDGQLYAINPEAGFFGVAPGTGMDTNPNAMLTLHGNCIFTNVGETDEGDVWWEGMTSEPPDHLIDWRGNDWTPNNDSPAAHPNARFTVSAAQCPAIADEWEDLRGVPISAILFGGRRATVVPLVNEANS

SEQ ID NO: 175711 - protein, 248 aa, Unknown
  Bacterial polypetide isolated from the Sargasso Sea
VARVEHLTFICTEDSADAGPNNNWMDPKEAHAKLDDLFENCMEGRTMYVIPYCMGPIGSELSRCGVEITDSPYVVANMYLMTRMGDEALSRIEKEGGFVKGIHSTGDLNPDKRFIMHFPDEKVIRSIGSGYGGNALLGKKCHALRIASYQALEEKWLAEHMLIVEIENPQGEIFNIAAAFPSACGKTNLAMLIPPDEYKGWKVRTIGDDIAWLHMDDAGQIWAINPEAGYFGVVPGTNEDDNENAYKA

SEQ ID NO: 175712 - protein, 304 aa, Unknown
  Bacterial polypetide isolated from the Sargasso Sea
TFICTEDAADAGPNNNWMDPKQAHEKLDDLFENCMEGRTMYVIPYCMGPIGSELSRCGVEITDSPYVVANMYLMTRMGDEALSRIEREGGFVKGIHSTGDLDPEKRFIMHFPEEKTIRSIGSGYGGNALLGKKCHALRIASYQALEEKWLAEHMLIVEIENPEGEIFNIAAAFPSACGKTNLAMLIPPDEYKGWKVRTIGDDIAWLHMDDSGQIWAINPEAGYFGVVPGTNEDDNENAYKAIQSDAIFTNVGLTDNNEPWWEGKKDGNPVIDWRGNKIEQGEDAVFAHPNSRFTVSAKNNPKYS

SEQ ID NO: 175713 - protein, 273 aa, Unknown
  Bacterial polypetide isolated from the Sargasso Sea
ENAYKAIQSNAIFTNVGLTDNNEPWWEGRKDGNPVIDWKGDKIEQGENAVFAHPNSRFTVSAKNNPKYSDLADSSKGVPISAIVFGGRRSELAPLVYESKDWNHGVLVGASVGSETTAAAIGEVGVIRRDPMAMKPFCGYNFADYWTHWLSFSERSDNLPKIFHVNWFRKNENGFIWPGFGDNLRVLEWIIKRCNNEIDAQETPIGFLPKSEDINTSGLTITDEAMEELVLVDNQKWIDEMAGIREYFEEYEERLPEKLLEEHAKVIEALNAE

SEQ ID NO: 175714 - protein, 227 aa, Unknown
  Bacterial polypetide isolated from the Sargasso Sea
NKKLQQWVDDKIKLCQPDDVVWCDGSEEEWSRMWDILVKGGTAKKLDENKRPNSYYIRSVPADVARVEDRTFICSEKEEDAGPTNNWCAPTEMRGTLDKLFTGCMKGRTMYVIPFSMGPIGSDIAKIGVEISDSPYVVTNMHIMARVGKKVLDVLGTDGEFVPCLHSVGAPLAENEKDVPWPCNPDNRYIVHYPETREIWSFGSGYGGNALLGKKCLALRIASTMAR

SEQ ID NO: 175715 - protein, 298 aa, Unknown
  Bacterial polypetide isolated from the Sargasso Sea
MRATLQPLFDGCMKGRTMYVVPFSMGPLGSHIAHIGVELTDSAYVAVNQRLMTRMGKAVYDVLGVEGEFVPCMHTVGAPLAEGEKDTTSWPCNPKVKYIVHYPETREIWSYGSGYGGNALLGKKCLALRIASTMGRDQGWLAEHMLILGVTNPQGKKYHVAAAFPSACGKTNFSMLVPPEAGFAGWKVTTIGDDIAWIKPHADGKMYAINPEAGYFGVAPGTNMHTNPNCMRSLDKDVIFTNVALTDDGDVWWEGMEKDTGKLPDHLIDWQGKDWTPQIAKETGAKAAHPNSRFTVAA

SEQ ID NO: 175716 - protein, 247 aa, Unknown
  Bacterial polypetide isolated from the Sargasso Sea
HLVDWKGNDWTPESDTPAAHPNARFTAPAAQCPVIADEWEDPKGVPISAILFGGRRATTVPLVTEALDWNHGTFIGTIIASEMTAAAFGAIGQLRRDPMAMLPFCGYNMADYWGHWLNMGKKKGAVLPKIFYTNWFRKNDAGKFMWPGFGENSRVLKWVFERCVDSADAIDTPIGKMPTLDGIDFSDLEMDEADKANLLRVDIEGWLQELPGIEEYYDSFGDHLPEELRGQIKALKERLESAKQAVA

SEQ ID NO: 175717 - protein, 298 aa, Unknown
  Bacterial polypetide isolated from the Sargasso Sea
FPSACAKTNMAMMIPSLPGWKVETIGDDIAWMKFGEDGQLYAINPEAGFFGVAPGTGQETNPNALATLSGNCVFTNVAETDDGDVWWEGLSDEAPARLVDWKGQTWTPESESPAAHPNARFTVPASQCPSIAPSWEDPAGVPISAILFGGRRATTVPLVAEALSWEHGVFLGSVMSSEKTAAAAGTVGQVRRDPFAMLPFCGYNFGDYFQHWLDIGDHPGANLPKLFYVNWFRKNDDGNFIWPGFGENARVLKWVLERIGGTTEAVETAIGMVPKPEDLDVSGLDLKPEELQTLLAVN

SEQ ID NO: 175718 - protein, 294 aa, Unknown
  Bacterial polypetide isolated from the Sargasso Sea
GAFPSACGKTNLAMLVPTIPGYTVETVGDDICWMKFGDDGQLYAINPEAGFFGVAPGTGMSTNPNAMLALDENCIFTNVAETMDGDVWWEGMTSEAPDQLIDWRGQNWTPSSEAPAAHPNARFTVSAAQCPVIADEWEELKGVPISAILFGGRRATVVPLVNEATSWNQGTFFGSIVSSEKTAAASGTIGELRRDPMAMLPFCGYNMADYWQHWIDMGKREGARLPKIFYVNWFRKNEQGGFIWPGFGENSRVLEWIFKRCDGSVDAVETPIGLLPTLDGLNLDQLGLSEDAIA

SEQ ID NO: 175719 - protein, 170 aa, Unknown
  Bacterial polypetide isolated from the Sargasso Sea
MNQPVMQGVPALNVPDYVKHPRLVAWVGEVAALTKPERIVWCDGSQEEYDRLCAEMVAAGTMKQLNPAKRKNSYLALSDPSDVARVEDRTFICSQKKEDAGPTNNWTAPAEMRQTLNGLFDGSMRGRTLYVVPFSMGPLGSPIAHIGVELSDSPYVAVNMRIMTRMGRAV

SEQ ID NO: 175720 - protein, 291 aa, Unknown
  Bacterial polypetide isolated from the Sargasso Sea
SPGDGHKRFEHLLHRSMQGRTLYVVPYCMGPVDSPFSRFGVELTDSPYVVANMKIMTRMGKVALDKIEKEGKPFVKGVHSKGDLSLENRMILHFPQESMIKSIGSGYGGNALLGKKCHALRIASYQAKSEGWLAEHMLIVGVENPEGKVHYIAAAFPSACGKTNLAMLIPPEEYKGWKVWTVGDDIAWLHLGDDGRMYAVNPEAGFFGVAPGTSNSTNPNALSMLQKDAIFTNVALTEDKKPYWEGLSGCQAAWDWQGMPYKGSGAAAHPNSRFTVSSKQCPSYSSSAENP

SEQ ID NO: 175721 - protein, 298 aa, Unknown
  Bacterial polypetide isolated from the Sargasso Sea
EMKNPQGEIFNIAAAFPSACGKTNLAMLIPPDEYKGWKVRTIGDDIAWLHMDDGGQIWAINPEAGYFGVVPGTNEDDNENAYKAIQSNAIFTNVGLTDNNEPWWEGRKDGNPVIDWKGDKIEQGENAVFAHPNSRFTVSAKNNPKYSDLADSSKGVPISAIVFGGRRSELAPLVYESKDWNHGVLVGASVGSETTAAAIGEVGVIRRDPMAMKPFCGYNFADYWTHWLSFSERSDNLPKIFHVNWFRKNENGFIWPGFGDNLRVLEWILKRCNNEIDAQETPIGFLPKSEDINTSGLT

SEQ ID NO: 175722 - protein, 311 aa, Unknown
  Bacterial polypetide isolated from the Sargasso Sea
GSVPSACGKTNLAMLVPTIPGYTVETVGDDICWMKFGDDGQLYAINPEAGFFGVAPGTGMSTNPNAMLALNENCIFTNVAETMDGDVWWEGMTSEAPDQLIDWRGQNWTPSSEAPAAHPNARFTVSAAQCPVIADEWEELKGVPISAILFGGRRATVVPLVNEATSWNQGTFFGSIVSSEKTAAASGTIGELRRDPMAMLPFCGYNMADYWQHWIDIGKCDGARLPKIFYVNWFRKNEQGGFIWPGFGENSRVLEWIFKRCDGAVDAVETPIGLLPTLDGLNLDQLGLSEDAIASLLRVDADGLDGRTAFD

SEQ ID NO: 175723 - protein, 254 aa, Unknown
  Bacterial polypetide isolated from the Sargasso Sea
MTSEPPDHLIDWRGNDWTPNNETPAAHPNARFTVSAAQCPAIADEWEDLQGVPISAILFGGRRATVVPLVNEANSWNQGTFFGSIVASEKTAAASGSIGELRRDPMAMLPFCGYNMADYWQHWITMGKQDGAKMPGIYYVNWFRKDLEGGFIWPGFGENSRVLEWIFNRCEGTAEAVETPIGRLPTLDGLDFSGLDLSPDEIATLLKVDVEGWLSEIPLIEEYYKSFGDQVPSELWQELQLLKEQLETAKVGAA

SEQ ID NO: 175724 - protein, 225 aa, Unknown
  Bacterial polypetide isolated from the Sargasso Sea
WCTGTQEEYQSLTQYMVENKQLKKLNATTHPNCFLHLSNPNDVARTEHLTFVCTKEKEDVGPNNNWIDEDTANSQVRELFKNSMKNRTMYVIPYCMGPLNSPYSRLGVQITDSPYVVINMKHMTRMGDAARKAIESGKSFVRGLHGLGDLSLEKRRIMHFPNQEMIASFSSGYGGNALLGKKCHALRIASWQAKQEGWLAEHMLIVGLESPQGEKHYVAAAFPSA

SEQ ID NO: 175725 - protein, 204 aa, Unknown
  Bacterial polypetide isolated from the Sargasso Sea
ACGKTNLAMLIPPKSHKGWKIWTIGDDIAWLHLDKTGQMRAINPEAGYFGVAKGTNEATNKNAFDMIKKDTIFTNVGLTKNNEPWWESKDIGEPAIDWKGREFNSDNGPAAHPNSRFTVSAKNNPSYSSLAEAPDGVPISAIVFGGRRKKLAPLVYEAKNWKHGVFIGAGMASETTAAATVKKGVLRRDPMAMLPFCGYNFADY

SEQ ID NO: 175726 - protein, 294 aa, Unknown
  Bacterial polypetide isolated from the Sargasso Sea
KHWGIWKYLMTQHERLNQWIEQIKTLCQPDSIRVCDGSPEEYAEMMGLLEGAGVAKPLNPDLRPNSYLVRSDPADVARVESRTFICSDSPEEAGPTNNWSEPNQMRETLNGLFEGCMRGRTMFVIPFSMGPVGSPIAHIGVEISDSPYVVASMHIMTRVGSAVIDELGEDGAFVPCVHSVGKPLVDGAEDVPWPCNPENLYIAHFPASREIWSFGSGYGGNALLGKKCFALRIASTMARDEGWLAEHMLILKITSPQGAHRYIAGAFPSACGKTNLAMLIPSMPGGKSKRWVTT

SEQ ID NO: 175727 - protein, 288 aa, Unknown
  Bacterial polypetide isolated from the Sargasso Sea
MLKHERLADWLEEIRSLCEPDSLVICNGSTEEYNQMMNLLLKSGAARKLNETKRPNSYLVRSDPADVARVESRTYICSESEGEAGPNNNWENPKIMKATLHGLFKGCMRGRVMYVIPFSMGPVGSPIAHIGVEITDSPYVVASMHIMTRVGEKVLEKLGGDGDFVPCVHSVGVPLDSEDKDSIWPCNPESLYVAHFPETKEIWSFGSGYGGNALLGKKCFALRIASTMAKEQGWLAEHMLILKLTNPEGTSRYIAGAFPSACGKTNLAMLIPTIPDWKVETVGDDICW

SEQ ID NO: 175728 - protein, 355 aa, Unknown
  Bacterial polypetide isolated from the Sargasso Sea
HQKLDQLFENCMEGRTMYVIPYCMGPIGSELSRCGVEITDSPYVVANMYLMTRMGDEALSRIEKEGGFVKGIHSTGDLDPDKRFIMHFPDEKVIRSIGSGYGGNALLGKKCHALRIASYQALEEKWLAEHMLIVEIENPQGEIFNIAAAFPSACGKTNLAMLIPPDEYKGWKVRTIGDDIAWLHMDDAGQIWAINPEAGYFGVVPGTNEDDNENAYKAIQSNAIFTNVGLTDNNEPWWEGRKDGNPVIDWKGDKIEQGENAVFAHPNSRFTVSAKNNPKYSDLADSSKGVPISAIVFGGRRSELAPLVYESKDWNHGVLVGASVGSETTAAAIGEVGVIRRDPMAMKPFCGYNFA

SEQ ID NO: 175729 - protein, 622 aa, Unknown
  Bacterial polypetide isolated from the Sargasso Sea
MNHPSFEGQPNVEVSAAAPSWVKHRKLIDWVQRVAAMTRPDKIVWCDGSQEEYDRLCAQMVEAGTLKKLNPAKRPNSYLAWSDPSDVARVEDRTFICAQRREDAGPTNNWMEPAEMRATLDGLFDGAMRGRTMYVVPFSMGPLGSPIAHIGVELSDSPYVVTNMRIMTRMGRKVYDVLGEDGEFVPCVHSVGAPLAAGEKDVPWPCNKTKYIVHFPESREIWSYGSGYGGNALLGKKCFALRIASTMGRAEGWLAEHMLILGVTSPEGRKHHVAAAFPSACGKTNFAMLIPPEGLNGWKISTIGDDIAWIKPGKDGRLYAINPEAGYFGVAPGTSEKTNFNAMATLKENVIFTNVALTDDGDVWWEGMTDEPPAHLIDWQGKDWTPASAKESGRKAAHPNARFTAPASQCPSIDADWENPAGVAIDAFIFGGRRSTTVPLVTEARNWVEGVYMAATMGSETTAAAAGQQGVVRRDPFAMLPFCGYNMSDYFGHWLKTGERLEQLNAKLPKIFCVNWFRKGPDGKFVWPGFGENMRVLSWMVGRIEGKAQGQEHAFGVSPHYEDIDWSGLEFSREQFQQVISVDDAAWRDELELHAELFDTLQQGLPPALTEAKRAFEEKLAA

SEQ ID NO: 175730 - protein, 279 aa, Unknown
  Bacterial polypetide isolated from the Sargasso Sea
MTVNNLFLKQWVDEIEKLCKPKNVYWCDGSQEEYDRLCEEMVEAGTFIRLNKEKRPNCFLARSHPSDVARVEDRTFICTSQQEDVGPTNNWSDINTMKNKLDSLFEGCMSGRTMYIIPFSMGPLNSPISHIGIQISDSPYVVVNQRIMTRMGKEVLDILGEKNNFIKCMHSVGMPLENNQADISWPCAPNPEDKYIVHFPEERSIWSYGSGYGGNALLGKKCFALRIASKMANEEGWLAEHMLILGLEDPNGETTYVGAAFPSACGKTNLAMMMPPEGF

SEQ ID NO: 175731 - protein, 339 aa, Unknown
  Bacterial polypetide isolated from the Sargasso Sea
MSTSNKELQSWVEDVSKMTKPENIYWCNGSKEEYEEFIQKMLETGDLMQLNEETFPNCYLHRSDPSDVARVEHLTFICTEDSEDAGPNNNWMDPKEAHEKLDDLFENCMEGRTMYVIPYCMGPIGSELSRCGVEITDSPYVVANMYLMTRMGDEALARIEREGGFVKGIHSTGDLDPEKRFIMHFPDEKIIRSIGSGYGGNALLGKKCHALRIASYQALEEKWLAEHMLIVEIENPQGEIFNIAAAFPSACGKTNLAMLIPPDEYKGWKVRTIGDDIAWLHMDDAGQIWAINPEAGYFGVVPGTNEDDNENAYKAIQSNAIFTNVGLTDNNEPWWEGRK

SEQ ID NO: 175732 - protein, 600 aa, Unknown
  Bacterial polypetide isolated from the Sargasso Sea
MTQHERLNQWIEQIKTLCQPDSIRVCDGSPEEYAEMMGLLEGAGVAKPLNPDLRPNSYLVRSDPADVARVESRTFICSDAPEEAGPTNNWSEPNQMRETLNGLFEGCMRGRTMFVIPFSMGPVGSPIAHIGVEISDSPYVVASMHIMTRVGSAVIDELGEDGAFVPCVHSVGKPLVDGAEDVPWPCNPENLYIAHFPASREIWSFGSGYGGNALLGKKCFALRIASTMARDEGWLAEHMLILKITSPQGAHRYIAGAFPSACGKTNLAMLIPSMPGWKVETVGDDICWMKFGEDGQLYAINPEAGFFGVAPGTGMDTNPNAMLTLHGNCIFTNVGETDEGDVWWEGMTSEPPDHLIDWRGNDWTPNNETPAAHPNARFTVSAAQCPAIADEWEDLQGVPISAILFGGRRATVVPLVNEANSWNQGTFFGSIVASEKTAAASGSIGELRRDPMAMLPFCGYNMADYWQHWITMGKQDGAKMPGIYYVNWFRKDQEGGFIWPGFGENSRVLEWIFNRCEGTAEAVETPIGRLPTLDGLNFSGLDLSQDEIATLLKVDVEGWLSEIPLIEEYYKSFGDQVPSELWQELQLLKEQLETAKVGAA

SEQ ID NO: 175733 - protein, 297 aa, Unknown
  Bacterial polypetide isolated from the Sargasso Sea
MSTSNKELQSWIEEVSKMTKPESIYWCNGSKEEYEEFIQKMLETGDLMQLNEETFPNCYLHRSDPSDVARVEHLTFICTENSEDAGPNNNWMDPKEAHEKLDNLFDNCMKGRTMYVIPYCMGPIGSELSRCGVEITDSPYVVANMYLMTRMGDEALARIEKEGGFVKGIHSTGDLDPEKRFIMHFPDEKVIRSIGSGYGGNALLGKKCHALRIASYQALEEKWLAEHMLIVEIENPRGEIFNIAAAFPSACGKTNLAMLIPPDEYKGWKVRTIGDDIAWLHMDDAGQIWAINPEAGY

SEQ ID NO: 175734 - protein, 484 aa, Unknown
  Bacterial polypetide isolated from the Sargasso Sea
MDSSEKAGDKVREWVSSMAEILKPDSVHWCNGSKSEYHSLCSVMLDSGTIMKLDEEKRPNSFLARSDPMDVARVEDRTFICSKNKEDAGPTNNWVDPKEMAEKLGVLFDGSMRGRKMYVIPFSMGPLGSDISHIGIQLTDSPYVAASMAIMTRVGSDVLLELAEKEFVPCVHSVGAPLENGEQDVPWPCNDIKYIVHYPEDRSIWSFGSGYGGNALLGKKCFSLRIASVMARDEGWLAEHMLILGIENPEGEKIYVAAAFPSACGKTNLAMLVPPEGFDGWKITTVGDDIAWIKPGADGRLYAINPEAGYFGVVPGTSYKSNPTAMHMMERDTIFTNVALTDDGDVWWEGMGIEPPKHLIDWKGNDWTPKSPDSAAHPNARFTCSVQQCPSVDPEWDNPEGVPISAFIFGGRLSHTFPLVFQSFDWKHGVYMAATMGSEGTAAAVNQAAIRRDPMAMLPFCGYNMADYWAHWLSMKTKFKVTGY

SEQ ID NO: 175735 - protein, 342 aa, Unknown
  Bacterial polypetide isolated from the Sargasso Sea
FNIAAAFPSACEKTNLAMLIPPDEYKGWKVRTIGDDIAWLHMDDAGQIWAINPEAGYFGVVPGTNEDDNENAYKAIQSNAIFTNVGLTDNNEPWWEGRKDGNPVIDWKGDRIEQGEDAVFAHPNSRFTVSAKNNPKYSDLADSSNGVPISAIVFGGRRSELAPLVYESKDWNHGVLVGASVGSETTAAAIGEVGVIRRDPMAMKPFCGYNFADYWTHWLSFSERSNNLPKIFHVNWFRKNENGFIWPGFGDNLRVLEWIIKRCNNEIDALETPIGYLPKSEDINTSGLTISDDAMEELVFVDNQKWLDEMAGIREYFGEYEERLPEKLLEEHAKVIEALNAE

SEQ ID NO: 175736 - protein, 608 aa, Unknown
  Bacterial polypetide isolated from the Sargasso Sea
MIAPPAFVKHRKLIDWVSRIAALTEPERVVWCDGSQEENDALCQAMVDQGTLKRLNPAKRPNSYLAQSDPSDVARVEDRTFICAASRDDVGPTNNWIEPAEMRETLNGLFRGSMRGRTLYVVPFSMGPLGSPIAHVGVELSDSPYVVVNMRIMTRMGREVYDVLGEDGEFVPCVHSVGHPLEAGQQDVPWPCNPVKYIVHFPETREIWSFGSGYGGNALLGKKCFALRIASTMGRDQGWLAEHMLILGVTSPAGKKYHVAAAFPSACGKTNFAMLIPPQGFKGWKVTTIGDDIAWLKPGRDGRLYAINPEAGFFGVAPGTGVKTNPNAISTLTENVIFTNVALTEDGDVWWEGLTDTPPAKLTDWQGNPWTPEIGKETGRKAAHPNSRFTAPAAQCPSIDDDWENPAGVPIDAFIFGGRRSTTVPLVTEARDWVEGVYMAATMGSETTAAAVGQQGIVRRDPFAMLPFCGYNVSDYFAHWLTLGKQLEGAGAKLPKIYCVNWFRKDANGKFVWPGFGENMRVLKWMLDRLEGTGGGGEHAFGVSPAYEDLHWDGLDFTREQFDAVTAMNADEWREELKLHAALFDTLKLRLPAEMTDTMKKIEQRIGA

SEQ ID NO: 175737 - protein, 474 aa, Unknown
  Bacterial polypetide isolated from the Sargasso Sea
MSTSNTELQSWVEEVSEMTKPDNIYWCNGSKEEYEEFIQQMLGTGDLMQLNEETFPNCYLHRSDPSDVARVEHLTFICTEDSEDAGPNNNWMDPKEAHQKLDQLFENCMEGRTMYVIPYCMGPIGSELSRCGVEITDSPYVVANMYLMTRMGNEALSRIEKEGGFVKGIHSTGDLDPDKRFIMHFPDEKVIRSIGSGYGGNALLGKKCHALRIASYQALEEKWLAEHMLIVEIENPQGEIFNIAAAFPSACGKTNLAMLIPPDEYKGWKVRTIGDDIAWLHMDDGGQIWAINPEAGYFGVVPGTNEDDNENAYKAIQSNAIFTNVGLTDNNEPWWEGRKDGNPVIDWKGDKIEQGENAVFAHPNSRFTVSAKNNPKYSDLADSSKGVPISAIVFGGRRSELAPLVYESKDWNHGVLVGASVGSETTAAAIGEVGVIRRDPMAMKPFCGYNFADYWTHWLSFSERSDNLPKILPM

SEQ ID NO: 175738 - protein, 582 aa, Unknown
  Bacterial polypetide isolated from the Sargasso Sea
MSTSNKELQSWIEEVSKMTKPESIYWCNGSKEEYEEFIQKMLETGDLMQLNEETFPNCYLHRSDPSDVARVEHLTFICTEDSEDAGPNNNWMDPKEAHEKLDDLFDNCMEGRTMYVIPYCMGPIGSELSRCGVEITDSPYVVANMYLMTRMGDEALARIERERGFVKGIHSTGDLDPEKRFIMHFPDEKVIRSIGSGYGGNALLGKKCHALRIASYQALEEKWLAEHMLIVEIENPQGEIFNIAAAFPSACGKTNLAMLIPPDEYKGWKVRTIGDDIAWLHMDDAGQIWAINPEAGYFGVVPGTNEDDNENAYKAIQSNAIFTNVGLTDNNEPWWEGRKDGNPVIDWKGDRIEQGEDAVFAHPNSRFTVSAKNNPKYSNLADSSKGVPISAIVFGGRRSELAPLVYESKDWNHGVLVGASVGSETTAAAIGEVGVIRRDPMAMKPFCGYNFADYWTHWLSFSERSDNLPKIFHVNWFRKNENGFIWPGFGDNLRVLEWIIKRCNNEIDAQETPIGYLPKSEDINTSGLTISDNAMEELVLVDNQKWLDEMAGIREYFGEYEERLPEKLLEEHTKVIEALNAE

SEQ ID NO: 175739 - protein, 277 aa, Unknown
  Bacterial polypetide isolated from the Sargasso Sea
EDDNENAYKAIQSNAIFTNVGLTDNNEPWWEGRKDGNPVIDWKGDKIEQGENAVFAHPNSRFTVSAKNNPKYSDLADSSKGVPISAIVFGGRRSELAPLVYESKDWNHGVLVGASVGSETTAAAIGEVGVIRRDPMAMKPFCGYNFADYWTHWLSFSERSDNLPKIFHVNWFRKNENGFIWPGFGDNLRVLEWIIKRCNNEIDAQETPIGFLPKSEDINTSGLTITDEAMEELVLVDNQKWIDEMAGIREYFEEYEERLPEKLLEEHAKVIEALNAE

SEQ ID NO: 175740 - protein, 89 aa, Unknown
  Bacterial polypetide isolated from the Sargasso Sea
MTELKNDRYLRALLRQPVDVTPVWMMRQAGRYLPEYKATRTEAGDFMSLCKNAELACEVTLQPLRRYPLDAAILFSDILTIPDAMGLGL

SEQ ID NO: 175741 - protein, 307 aa, Unknown
  Bacterial polypetide isolated from the Sargasso Sea
KKEVNLRPIWLMRQAGRYLNEFREIRKSNTNFIKLCLNSNLSSEITLQPLRRFDLDAAIIFSDILIVPYALGQKVEFKKDFGPKLENIDLEAISKTSELEFFKKLLPVYKSIEKVKKNELVLKKDVIGFIGAPWTLLVYMINKCSPKKKLKEDFFKDKYLIEETILILENFLKVHIRNQIKYGATIIQIFDSWAGLLENENLQNYIYTPTLNLVKFIKSLNVPVICFPRGIKNYQEYCKIVKPDVINIDYLINPEKIRKEIDIVVQGGLDPKILLTNKDQLKAEAKKYMEIFKDHPYIFNLGHGVCQ

SEQ ID NO: 175742 - protein, 136 aa, Unknown
  Bacterial polypetide isolated from the Sargasso Sea
MGRNVALKNDRLLKALLGQEVDVTPVWMMRQAGRYLPEYRNTRKIAGDFMNLCRSPELACEVTLQPLRRYAFDAAILFSDILTIPDAMGQGLYFEAGEGPRFKKVIQTRADVDSLREISAIDDLSYVMSAVTLIRN

SEQ ID NO: 175743 - protein, 216 aa, Unknown
  Bacterial polypetide isolated from the Sargasso Sea
MGENLPLLLSAALGKKVNRPPVWMMRQAGRYMKIYRDLRERYPSFRERSENPELSYEISMQPFHAFKPDGVILFSDILTPLPGMGINFEIIESKGPIIEDPIRTLNQIENLKELNPSESLSFVGQVLSSLKKDVNNEATVLGFVGAPWTLAAYVVEGKSSKNYSLIKSMAFKEPDLLHKLLNHFAKSIGEYLKYQIKSGAQVVQIFDSWAGQLSPQ

SEQ ID NO: 175744 - protein, 104 aa, Unknown
  Bacterial polypetide isolated from the Sargasso Sea
MQLKNDRYLRALMKQPVDRTPIWMMRQAGRYLPEYRATRAIAGDFMSLCKNPELACEVTLQPLKRYPLDAAILFSDILTIPDAMGMGLYFGEGEGPRFTKQLTD

SEQ ID NO: 175745 - protein, 227 aa, Unknown
  Bacterial polypetide isolated from the Sargasso Sea
RELNPSESLSFVGQVLSSLKKDVNNEATVLGFVGAPWTLAAYVVEGKSSKNYSLIKSMAFNEPDLLHKLLDHFAKSIGEYLKYQIKSGAQVVQIFDSWAGQLSPQDYDIFAGPYQKKVVEIVKAEYPETPIILYISGSAGVIERMAKTGVDIISLDWTVDIEEACKRIPNGIGIQGNVDPGILFGNKESIKERIDNTFNKIKDRKYILNLGHGILPGTPEENAQTFF

SEQ ID NO: 175746 - protein, 154 aa, Unknown
  Bacterial polypetide isolated from the Sargasso Sea
MTFAPLQNDRFLRALNRETVDRTPIWMMRQAGRYLPEYRAAREHAGSFMDLCKNADLACEVTLQPLERYPLDAAILFSDILTIPDAMGLGLYFETGEGPKFRKVVRTEADVAALPIPDAESDLGYVMNAVSTIRGALNGRVPLIGFSGSPWTLA

SEQ ID NO: 175747 - protein, 186 aa, Unknown
  Bacterial polypetide isolated from the Sargasso Sea
MVSRYYCDGVTSIELSNSPFLKACRCEPPEHVPVWFMRQAGRSLPEYRAVRKEGSILDAIKDPTLSAEITLQPIRRYGVDAAILFSDIIVPVHAVGFGIDIKPGVGPVTKDPFRSASDLKRLNHLDPDVDTPYVIETVKLCVSQLDIPLIGFAGGPFTIASYLIEGGPSRTYQETKRLMFEDPELW

SEQ ID NO: 175748 - protein, 111 aa, Unknown
  Bacterial polypetide isolated from the Sargasso Sea
MVSLENDRFLRALLREPVDRTPLWMMRQAGRYLPEYRETRAEAGSFMGLCTNPELACEVTLQPLRRYAMDAAILFSDILTVPDALGLGLYFSEGEGPRFERPILQRRRSRR

SEQ ID NO: 175749 - protein, 229 aa, Unknown
  Bacterial polypetide isolated from the Sargasso Sea
GEVLGRLRQSVGNEAAVLGFVGAPWTLAAYVVEGKSSKNYAVIKAMAFREPELLHKLLDHFAESIANYLRYQIDSGAQVVQMFDSWAGQLSPADYDTFAAPYQKKVVDLVKQTHPETPFILYISGSAGVLERMATTGVDIISLDWTVDMAEALARLPEHIGVQGNVDPGLLFGTPDAIEARIDDCVRKARGRKHILNLGHGILPGTPEENGAAFFRSGKSVLDRIGAVA

SEQ ID NO: 175750 - protein, 290 aa, Unknown
  Bacterial polypetide isolated from the Sargasso Sea
YQAIRKDYSNFLDMCKQPKTCAELALQPIDRFNLDAAILFSDILTIPDAFNLGLAFHEGEGPRFANPISSIQDINNLISFDVNNLDYVFRAVEETKRLLPEDLPLIGFCGSPWTLAAYSVEGGGSKDFQKTKSFVRNHPSELQKFLEVLCDACYKYLKQQVLSGVNAIQIFDSWANLLSESDLEKFSLSYTRMLSQMLKADSITKDIPIILFEKAPNKKIIDLVFENLSCLSLHWQENIEHVSHQLRDKFAIQGNLDPKILVAPENIIWDETQKICKIMKNYPGFIFNLG

SEQ ID NO: 175751 - protein, 251 aa, Unknown
  Bacterial polypetide isolated from the Sargasso Sea
AGSFMGLATNVDYATEVTLQPLARFPLDAAILFSDILTVPDAMGLGLSFAEGEGPRFAKVVRDEAAVAELAVPDMDKLRYVFDAVTSIRKALNGRVPLIGFSGSPWTLACYMVEGKGSDDYRLVKSLMYARPDLMHRILAVNADSVAAYLNAQIDAGAQAVMIFDSWGGVLADGAFQEFSLAYTQRVLAQLQRTGVDGTDVPRIVFTKGGGTWLPDMKDIDCEVLGLDWTANLGKARAIVGGAVGGPGKAL

SEQ ID NO: 175752 - protein, 183 aa, Unknown
  Bacterial polypetide isolated from the Sargasso Sea
MSAPLANDTFLRALRRQPTDYTPLWLMRQAGRYLPEYNATRARAGSFLGLAKSPAYATEVTLQPLDRYPLDAAILFSDILTVPDAMGLGLSFAQGEGPRFAKPVRTEADVAALSVPDMSSLQYVFDAVAEIRRALVQDGRQRVPLIGFSGSPWTLACYMVEGGGSDDFRTVKSMLYARPDLMH

SEQ ID NO: 175753 - protein, 288 aa, Unknown
  Bacterial polypetide isolated from the Sargasso Sea
AEVTLQPLRRFGFDAAILFSDILVIPHALGQDVRFEAGEGPRLEPVRDAGGLSDLSLNGIHDRLYPIYCTVERVAEVLPDSTALIGFAGAPWTVATYMVEGCGSRDYPYAKGWALGDPDGFQELIDLLVQATSAYLIRQVEAGAEALQLFDTWAGVLPTHAFERFSAQPIIEIAKRVKAVHSHIPIIAFPRGAAIYLPELARAPEIDGIGIDYATDPDWAAREIQPYATVQGNFDPILLMAGGEELERRTRAIVNALSGGPHIFNLGHGILPKTPIAHVERLLKAVRG

SEQ ID NO: 175754 - protein, 283 aa, Unknown
  Bacterial polypetide isolated from the Sargasso Sea
GLGLSFAEGEGPRFAKVVRDEAAVNELAVPDMDKLRYVFDAVTSIRKALNGRVPLIGFSGSPWTLACYMVEGKGSDDYRLVKTLMYSRPDLMHRILAVNADSVAAYLNAQIDAGAQAVMIFDSWGGVLADGAFQEFSLAYTKRVLAQLKRKGVDGTDVPRIVFTKGGGIWLDDMKDIDCEVLGLDWTANLGKARAIVGGQVGGPGKALQGNIDPNVLFAPPAQIVTQVHAVLDSFGKPHTDRSTTGPTHIFNLGHGISQFTPPEHVAALVEAVHSHSRAQRQG

SEQ ID NO: 175755 - protein, 207 aa, Unknown
  Bacterial polypetide isolated from the Sargasso Sea
VLGFVGAPWTLAAYVVEGKSSKNYSLIKSMAFNEPDLLHKLLDHFAKSIGEYLKYQIKSGAQVVQIFDSWAGQLSPQDYDIFAGPYQKKVVEIVKAEYPETPIILYISGSAGVLERMAKTGVDIISLDWTVDIEEACKRIPSGIGIQGNVDPGILFGNKESIKERIDNTFNKIKDRKYILNLGHGILPGTPEENAQTFFEHGKKLTY

SEQ ID NO: 175756 - protein, 280 aa, Unknown
  Bacterial polypetide isolated from the Sargasso Sea
FDLDAAIIFSDILVIPDALGQKVSFEKGNGPKLGPMTLNHETLLKNKDKFLSHLRPVYESIRMVRKELSKDRTLIGFAGAPWTIATYMIEGGTTKTFSKVKAWSYKDPEGFGKFIDGLVEAIILHLKNQIDAGAEVIQIFDSWAGVLSPDSFHKWVIEPTVKIVESIKRSNPNIPIIGFPRGAGVGYVSYVKETMVDGISLDTTIPTSWAAKNIPQKCTLQGNLDPDILINGGKPMVDQALNILHDLSNRSHIFNLGHGILPDTPPDNVKMLIEVVHRYS

SEQ ID NO: 175757 - protein, 268 aa, Unknown
  Bacterial polypetide isolated from the Sargasso Sea
DKYPSFRERSENPDLSYEISMQPFHAFKPDGVILFSDILTPLPGMGIDFDIIESKGPQIGDPIRSMDQVDALRPLNPAESMPFVGEVLGRLRQSVGNEAAVLGFVGAPWTLAAYVVEGKSSKNYAVIKAMAFREPEILHKLLDHFAESIANYLRYQIDSGAQVVQMFDSWAGQLSPADYDTFAAPYQKKVVDLVKQTHPDTPFILYISGSAGVIERMANTGVDIVSLDWTVDMAEALARLPEHIGVQGNVDPGLLFGTPEAIEARIDD

SEQ ID NO: 175758 - protein, 246 aa, Unknown
  Bacterial polypetide isolated from the Sargasso Sea
MTILCKLSDGDKTWPPPIWLMRQAGRYLPEYNVIRNKAGSFLDLCYKPDYASEVTLQPIRRFDLDAAIIFADILLIIQNFGMGIKFEEKVGPVLEKPLIENPVLNVITEVEKSKLVNVGEAINLTRNKLPREKSLIGFCGAPWTVVTYMINGRSKKDLSQSVRWMEDNPSLGNDIIDVLVDLSAAYLILQIKAGADVVKIFDSWAGVLNENQFNNWVIKPTSKIIAKVKEIFPKTPIIVSPRAHIN

SEQ ID NO: 175759 - protein, 262 aa, Unknown
  Bacterial polypetide isolated from the Sargasso Sea
MKIYRDLRERYPSFRERSENPELSYEISMQPFHAFKPDGVILFSDILTPLPGMGINFEIIESKGPIIEDPIRNLNQIENLKELNPSESLSFVGQVLSSLKKDVNNEATVLGFVGAPWTLAAYVVEGKSSKNYSLIKSMAFKEPDLLHKLLDHFAKCIGEYLKYQIKSGAQVVQIFDSWAGQLSPQDYDIFAGPYQKKVVDIVKAEYPETPVILYISGSAGVIERMAKTGVDIISLDWTVDIEEACKKIPSGIGNSGNVDPGI

SEQ ID NO: 175760 - protein, 233 aa, Unknown
  Bacterial polypetide isolated from the Sargasso Sea
GYVMDAVRTIRRELNGRVPLIGFTGSPWTLATYMVEGGSSKDFRKSKAMLYDNPQAMHALLDKLAQSVTAYLNGQIKAGAQAVQIFDSWGGSLSAAAYQEFSLAYMQKIIDGLIREHDGRRVPVILFTKGGGLWLESMADSGAEALGLDWTCDIGSARARVGNKVALQGNMDPSVLYANPAAIRAEVGRILAAYGHGSGQVFNLGHGITPEVDPEHARAFFEAVHELSGQYHQ

SEQ ID NO: 175761 - protein, 242 aa, Unknown
  Bacterial polypetide isolated from the Sargasso Sea
MSDSNDFRFLKACRGEQVDKTPVWFMRQAGRYMKVYRDLKEKYTFLEMCKTPELACEVTMQPLGVLDIDAAIIFADILLPLEPMGTGLEFSAGDGPVIPRPVKDKKAVEKLLPVNANEQLGFVGDAIKLVRKEIDGKIPLIGFAGAPFTLCSYMIEGGKSRDFTTTKLMMYEATDVWNQLMDKVCTMLVDYLKMQVNAGAQALQIFDSWVGCLSPHDYQKYILPHLKRVFDGLQDLGVPLIN

SEQ ID NO: 175762 - protein, 251 aa, Unknown
  Bacterial polypetide isolated from the Sargasso Sea
MSVNESSFLRALNLEPTSKPPIWLMRQAGRYLPEYQDIRKHYKNFLDMCKEPKTCAELALQPIERYRLDASILFSDILTIPDAFNLGLSFSEGEGPRFANPISLASDIDNLNIFDVNNLDYVFKTVEETKKVLPESLPLIGFCGSPWTLAAYSIEGSGSKTFPRLMKFLQLHSNSLEKLLDLYTDACFKYLKQQIISGINAIQIFDSWADLLNEDKFKKYSVKPTKNLVKMLKNDNVTKTIPIILLKKLPP

SEQ ID NO: 175763 - protein, 217 aa, Unknown
  Bacterial polypetide isolated from the Sargasso Sea
MNTSRPELKNDRLMRALRRQEVDCTPVWIMRQAGRYLPEYRATRARAGDFLTLCKTPELACEVTLQPLERFDLDAAILFSDILTIPDAMGLGLSLKEGEGPRFSRPVRTAADVDALTLPDPEGELRYVMDAVRLIRQELHGRVPLIGFAGSPWTLATYMVEGQSSRDFSIAKNLIYQDSSVARRLLALLSDSIALYLTAQAHAGAQVLMLFDTWGGA

SEQ ID NO: 175764 - protein, 257 aa, Unknown
  Bacterial polypetide isolated from the Sargasso Sea
MNYNNKKLLKTLQGHKFDTPPVWLMRQAGRYLPEYREVRKQAGSFLDLCYNPTLTTEVTLQPLRRFNLDGAILFADILLIPNALGQHLEFKEGIGPILEPLKNNEDIENLRDIEDIHNILEPVYEAVTNIRSKLETNITFIGFAGSPWTVATYMIEGKGSKDHIKTKTFMLNYPEVFKKLIVKIQDATIEYLSKQIEGGVDVIKLFDSWANSLPATYIEKFSLDPMKVIAKEIKKRFPKIPVIVFPRGIGPMYKKFA

SEQ ID NO: 175765 - protein, 197 aa, Unknown
  Bacterial polypetide isolated from the Sargasso Sea
SCCYVVEGKSSKNYSLIKSMAFNEPDLLHKLLDHFAKSIGEYLKYQIKSGAQVVQIFDSWAGQLSPQDYDIFAGPYQKKVVEIVKAEYPETPVILYISGSAGVIERMAKTGVDIISLDWTVDIEEACKRIPSEIGIQGNVDPGILFGNKESIKERINNTFNKIKDRKYILNLGHGILPGTPEENAQTFFEHGKKLTY

SEQ ID NO: 175766 - protein, 327 aa, Unknown
  Bacterial polypetide isolated from the Sargasso Sea
DNDLLIKAALGENVERTPVWLMRQAGRILPEYRAIRNSLSGFKELVETPHLAAEVTIQPVDILDVDAAIIFSDILVVPEAMGLSYQMIEKKGPWFEKTIHTNEDVDSLVIPDVNDQLSYVMEAIRITKKELNGRVPLIGFAGAPWTIFSYMIEGQGSKTFSKAKKMLYTNPELAHNLLKKITLTTIKYLKAQISAGADVVQLFDSWAGILTHQQYIEFGIKYVNEICNAINEVPVTVFSKGAYFARKELGELKCNTIGLDWNMDIKESRELIGPEKTLQGNLDPCVLYSDFKNIQKQTNEMLCKFGKNRHIANLGHGVYPDITPDKV

SEQ ID NO: 175767 - protein, 243 aa, Unknown
  Bacterial polypetide isolated from the Sargasso Sea
MTKKILKALAGEKEKVPPIWMMRQAGRYLPEYRETRAQAGDFLSLCYNSELAAEVTLQPIRRYGFDAAILFADILLLPQALGADLWFVTGEGPRLSTVQAKKDFENLRRPEEINETLAPVYETVKILSKELPSETTLIGFAGAPWTVATYMVAGRGTPDQAPAHSLKNENPELFNNLINLLIEGTIEYLSHQIIAGAEVIKIFDSWAGSLKGNDFDKYALEPCKKIISALKAKHPHIPIIAFP

SEQ ID NO: 175768 - protein, 139 aa, Unknown
  Bacterial polypetide isolated from the Sargasso Sea
SWAGQLSPQDYDIFAGPYQKKVVDIVKEDYPETPVILYISGSAGVIERMAKTGVDIISLDWTVDIEEACKRIPSGIGIQGNVDPGILFGNKESIKERIDNTFNKINNRKYILNLGHGILPGTPEENAQTFFEHGKKLTY

SEQ ID NO: 175769 - protein, 282 aa, Unknown
  Bacterial polypetide isolated from the Sargasso Sea
RYDLDAAILFSDILTIPDAFDLGLKFYEGEGPVFERPINTVNDISSLCEFDEGKLSYVYRAVEITKENLSSTIPLIGFCGSPWTLVAYSIQGRSSKDFKKTKDFISMHPSEVNQLLEKITSACFLYLKEQVKSGIDAIQIFDSWADLLDVNQFNEFSLKFTKDLVRMLKDDDVTNHVPIILFEKAPPIEVAKIPFDGLACMSLHHSNSLNDAKNKLQDKYAIQGNLDPKVLTLSEKEITQETEMILDTMTDYPGFIFNLGHGITPNIHPDKIQVMIDTIRNP

SEQ ID NO: 175770 - protein, 309 aa, Unknown
  Bacterial polypetide isolated from the Sargasso Sea
ITNKDTSFNPIWIMRQAGRYLPEFREIRKENPNFINLCLNEDLSSEITLQPLKRFDLDAAIIFSDILMLPYGLGQKVEFEKNFGPKLGELNLNEIAKIDEIDFVEKTHPVYKALKKVSSDTVLNNKNTIGFVGAPWTLLVYMINKQSPKKSLKKDFFKDEFLINRILLIIEKFLKVHIKNQIDNGANVIQIFDSWAGLLEEKDLPNYVYSPTLNLVNYVKSLNVPVICFPREIKNYKEFCDVVKPDAVSIDYNLDPKKILKDIKIPIQGGLDPKILLTNNEILKQEASKYLEIFRDHPYIFNLGHGILP

SEQ ID NO: 175771 - protein, 187 aa, Unknown
  Bacterial polypetide isolated from the Sargasso Sea
MTELKNDRYLRALLKQPVDYTPVWMMRQAGRYLPEYKATRAEAGDFMSLCKNAELASEVTLQPLRRFPLDAAILFSDILTIPDAMGLGLYFETGEGPKFERPITCKADVEKIGLPDPEGELQYVMNAVRQIRKDLKGEVPLIGFSGSPWTLATYMVEGGSSKAFTKIKKMMYAEPQTLHLLLDKLAD

SEQ ID NO: 175772 - protein, 217 aa, Unknown
  Bacterial polypetide isolated from the Sargasso Sea
KLIRSELPADIPLIGFGGAPFTLASYAVEGQGSRNYIHVKRLMLSDPGAFSALMGKMTSAAIDYLNYQIEEGVQAIQIFDSWVGALSVNDYREHVFSHSQRLIKAVSGKVPVIHFGTGNSSLLPLMAAAGGDVIALDWRAPLLESWDLMGVKAVQGNLDPVALFAERASVLRSAQAVLDDVGGRPGHIFNLGHGILPETPVDNVKALVDFVHESTDR

SEQ ID NO: 175773 - protein, 255 aa, Unknown
  Bacterial polypetide isolated from the Sargasso Sea
IWLMRQAGRYLPEYRAVREKTETFLDLCYNPKLAAEVTLQPLRRFDLDAAIIFADILLISDALGVEVRFVNGEGPRLDSEYLNNNLSKLTFKNNKINNIYETIEYVKSSLSENVTLIGFAGSPWTVAAYMIEGKSSKDFLNAKSWLENENKLLVLFNSIIDSTIIYLKNQIKAGAEVIQLFDSWAGLLDDVQFIKWSIEPTKKIVSELKSYNPNIRIIGFPRNVSIENAFLYAKNTGVDCISIDYNIDIKDMKNF

SEQ ID NO: 175774 - protein, 141 aa, Unknown
  Bacterial polypetide isolated from the Sargasso Sea
MIHGAGQLSPQDYDIFAGPYQKKVVDIVKKEYPNTPIILYISGSAGVIERMAKTGVDIISLDWTVDIEEACQRIPNEIGIQGNVDPGILFGKKQSIKERINDTFNKIKDRKYILNLGHGILPGTPEENAQTFFEHGKKLTY

SEQ ID NO: 175775 - protein, 61 aa, Unknown
  Bacterial polypetide isolated from the Sargasso Sea
MKNDRYLRALLKQPVDMTPVWMMRQAGRYLPEYKATRAEAGDFMSLCKNAELACEVTLQPL

SEQ ID NO: 175776 - protein, 233 aa, Unknown
  Bacterial polypetide isolated from the Sargasso Sea
FDPDELQYVYQAVTNIKNSLSDNIPLIGFSGSPWTLAAYSIEGKSSKDFKKTLNFINKNNDKSHTFLNALTDACFLYLREQVKAGADVIQIFDSWANILDENRFNEFSMQYINKLTYALKNDKVTSKTPIILFSRDPKCSNQTLVNNSGADCLSLYWNMKDFDLNIARNKVSLQGNLDPRILLEPKDKIKYQTHKILDKFKDYPGYIFNLGHGITPDINPDNIKYLTEVVREY

SEQ ID NO: 175777 - protein, 246 aa, Unknown
  Bacterial polypetide isolated from the Sargasso Sea
QVNALRPLNPSESMPFVGEVLGRLRESVGNEAAVLGFVGAPWTLAAYVVEGKSSKNYAVIKAMAFREPELLHKLLDHFAESIANYLRFQIDSGAQVVQMFDSWAGQLSPADYDTFAAPYQKKVVDLVKQTHPDIPFILYISGSAGVLERMATTGVDIISLDWTVDMGEALARLPEHIGVQGNVDPGLLFGTPDAIEARIDDCVRKARGRKHILNLGHGILPGTPEENGAAFFRSGKSVIDRIGAFA

SEQ ID NO: 175778 - protein, 257 aa, Unknown
  Bacterial polypetide isolated from the Sargasso Sea
MKDSKFLRALDLQKNSIPPVWFMRQAGRYLPEYQEIRKNYSNFLDMCKQPKICAELALQPIDRFGLDASILFSDILTIPDALNLGLGFYEGEGPKFSNPISSPEDIDKLIPFDVNNLDYVFKAVEDTKNLLPKNIPLIGFCGSPWTLAAYSIEGGGSKDFKKTKIFMEEHPDELQKFLEILSNACYEYLRQQVLSGVNALQIFDSWADLLSEDMLEEFSVKYTRILTQLLKADPVTADIPIILFEKAPKKKIKDILF

SEQ ID NO: 175779 - protein, 274 aa, Unknown
  Bacterial polypetide isolated from the Sargasso Sea
ILFSDILTIPDAFGLGVEFLEGEGPVFNNPIKTSKDITNLPEFNPEDLSYVYKAVFNIKSALPSNIPLIGFCGSPWTLAAYSIEGKSSKDFNYTRNFIQQNKDSAHLFLEKLTNACFQYLKKQVHAGADVIQIFDSWANLLNEEEYNLYSMCYIKKLIALLKEDEETSKIPIILFARDPSFSTNKMTESNSDCLSLFWNIDKIDKSYLQGKVALQGNLNPKILLEDDNLIKAELNKVLNIFSNYPGYIFNLGHGITPDINPDKIKFITELIRSQ

SEQ ID NO: 175780 - protein, 190 aa, Unknown
  Bacterial polypetide isolated from the Sargasso Sea
MSDSDNFRFLKACRGEQVDKTPVWFMRQAGRYMKVYRDLKEKYTFLEMCKTPELACEVTMQPLGVLEIDAAIIFADILLPLEPMGTGLEFSAGDGPVIPRPVKDKKAVEKLLPVNVNEQLGFVGDAIKLVRKEIDGKIPLIGFAGAPFTLCSYMIEGGKSRDFTTTKLMMYEATDVWNQLMDKVCNMLVD

SEQ ID NO: 175781 - protein, 217 aa, Unknown
  Bacterial polypetide isolated from the Sargasso Sea
KVPLIGFSGSPWTLATYMVEGGSTKNFSVVKKLMFADPQAMHLLLDKLADSVATYLNAQIAAGAQAVMIFDTWGGVLSPRDYREFSLNYMQKIVSRLTREADGRRVPVTLFTKGGGAWLADMAATGADALGVDWTTDLGVARQTVQDKVALQGNMDPSVLYAPPARIEDEVATILASYGQGHGHVFNLGHGIHPEVDPDHAGAFIEAVHKLSPAYHR

SEQ ID NO: 175782 - protein, 181 aa, Unknown
  Bacterial polypetide isolated from the Sargasso Sea
QDSSVARRLLALLSNAIALYLTAQAHAGAQVLMLFDTWGGALGHAEYRHFSLDPMAQIVEALRADAVARELPIIVFTKGGGQWLARISQIGCDALGCDWTTSLREARRLVQDRVALQGNLDPAVLNASPEKIRSAVRDVLEDYGTGPGHVFNLGHGITPGIDPENVKVLVDSVHELSRTPI

SEQ ID NO: 175783 - protein, 280 aa, Unknown
  Bacterial polypetide isolated from the Sargasso Sea
KATRAQAGDFMSLCRNAELACEVTLQPLRRYDLDAAILFSDILTVPDAMGLGLYFETGEGPRFERPTDTIDAIKKLSIPDPEDELGYVMRAVSTIRRELNGAVPLIGFSGSPWTLATYMVEGGSSKTFEKIKRMAYAEPAALHMLLDKLADSVVLYLNAQVANGAQSLMIFDSWGGALSHHAYREFSLRYMQKIVDGLTRFADGRKVPVTLFTKGGGLWLEAMAETGCDALGLDWTVDIGDARRRVGDKVALQGNMDPSMLYASPERIHQEVDQILASYG

SEQ ID NO: 175784 - protein, 373 aa, Unknown
  Bacterial polypetide isolated from the Sargasso Sea
MPSVVRNVAHKLLNDTFLRALLRQPTDYTPIWLMRQAGRYLPEYNATRARAGSFLGLAKNPAYATEVTLQPLERYPLDAAILFSDILTVPDAMGLGLEFVAGEGPKFARPVRTEDDVARLAVPDIDATLRYVTDAVREIRTALIDAQGRQRVPLIGFSGSPWTLACYMVEGSGSADFRTVKSMLYARPDLMHRILDVNAKSVAAYLNAQIEAGAQAVMIFDTWGGALADGVYQRFSLQYIQQVVSQLKRDHDGEKVPVITFTKGGGLWLDEIANTGVDAVGLDWTVNLGRARERVGSKVALQGNIDPSVLFAPPASIRMEARAVLDSFGNHPGHIFNLGHGISQFTPPENVAELVDEVHRHSRAIRSGAHAPT

SEQ ID NO: 175785 - protein, 318 aa, Unknown
  Bacterial polypetide isolated from the Sargasso Sea
MNRLLNCINNKKTGDTPVWFMRQAGRYLPEFMKIRKQNTDFVKLCLNSDLAKEITIQPIKRFDLDAAIIFSDILMIPYGLGQNVNFKKGYGPKLNELQIDVLTKIDNKTFTNNLNPVYETIKKVKKEIEKKSLIGFVGAPWTLFLYMVNKQSPKKNFNFNEITKNNVLTKRLYKKLEEIICVHIKNQVDAGANIIQIFDSWAGLLPENQLKDYCYEPTKKIVEYVKHLNIPVICFPRGIDKNYEDFCSSVKPDCISIDYEVDPNWIKKNIKTPVIQGGLDPKVLLKNKEEIEKEVRKYLDIFREQPYIFNLGHGVLPE

SEQ ID NO: 175786 - protein, 344 aa, Unknown
  Bacterial polypetide isolated from the Sargasso Sea
MNSESSFLKALNKESPITPPIWYMRQAGRYMPEYQNVRKKFKNFLDMCKEPDICCELALQPINAFELDAAILFSDILTIPDSFGLGVKFIEKEGPVFKNPISNSTDIKNLNHFDPESLDYVYKAVNNIKNSLPEEIPLIGFCGSPWTLAAYSIEGRSSKDFEKTLSFLESNQEDVHDLLTKYTDACFLYLRKQVQSGADVIQIFDSWANLLTKEDLIEYSFNYINSLISALKLDPITRNIPVIIFARNPKCNIEELINTSADCISLFWSMNDLNFEVAKNKVAIQGNLDPKILLESDEIIKRETYKILEKFKEYPGYIFNLGHGITPDISPNKIKYLTNIVREY

SEQ ID NO: 175787 - protein, 316 aa, Unknown
  Bacterial polypetide isolated from the Sargasso Sea
VTLQPLRRYKLDAAILFSDILTIPDAMGLGLYFEAGEGPRFTSPITSKADVDKLPIPDPEDGLGYVMNAVRTIRRELKGEVPLIGFSGSPWTLATYMVEGGSSKAFTVIKKMMYADPKALHLLLDKLAKSVTLYLNAQIKAGAQSVMIFDTWGGVLTGRDYQQFSLYYMHKIVDGLLRENEGRRVPVTLFTKGGGQWLEAMAETGCDALGLDWTTDIADARRRVGHKVALQGNMDPSMLYAPPARIEEEVATILAGFGQGEGHVFNWATAFIRTSRQNMRVSLWRRYIVCPNSTTAKESLWILRHYARSSLNWPLH

SEQ ID NO: 175788 - protein, 357 aa, Unknown
  Bacterial polypetide isolated from the Sargasso Sea
MPEQLKNNRLIKALLREPVDMTPVWIMRQAGRYLPEYRETRKKAGDFVTLCQTPELACEVTMQPLHRYPLDAAIIFSDILTIPDAMGLGLKLVESVGPRFERSITNSNDIKNLPLPDPEQELKYVMDSIRLVRRELNGDVPLIGFSGSPWTLATYMIEGGSSREFSKVKGMLEAEPASLHLLLKHLSDSITLYLKAQINAGAQAIMIFDTWGGILKTPNYMNFSLYYMKIICEHLKNEHSEVKVPVILFTKGADKWIEKIVEADCDAISIDWNSNIGQVRERIGKRVAIQGNMEPRILKESEKKIVDEVESILRSYGSGSGHVFNLGHGITPDIEPDKVGILVDAVHNLSRQYHKTK

SEQ ID NO: 175789 - protein, 336 aa, Unknown
  Bacterial polypetide isolated from the Sargasso Sea
MKKLINCLTKRDTTCMPIWFMRQAGRYLPEFREIRAKNPDFMKLCLNSNLSSKITLQPIKRFNIDAAIIFSDILVVPYALGQDVNFKKNEGPKLTNFNFKTFINNKEDDFVSKLKPVYDAIKKTKKKLKRNQTLISFVGAPWTLLIYMLEMRESKSKLNIKKINENKFDKKIIIDELNKYLCLHIKKQQEAGADVIQIFDSWAGLIPENKIHDYCYKPNLTLVDFCKKKGIPVICFPKGLREKYKEFLEIVKPDGLNIDYEVDPIWAKKNLKDVCLQGGLDPKILLGNENEMFKEIDKYLNIFKDSPYIFNLGHGLLPETNPDVLAKVIKRVNLFK

SEQ ID NO: 175790 - protein, 334 aa, Unknown
  Bacterial polypetide isolated from the Sargasso Sea
MKPLNKVIINKDTSFNPIWIMRQAGRYLPEFREIRKENPNFINLCLNDNLSSEITLQPLKRFDLDAAIIFSDILMLPYGLGQKVEFEKNFGPKLGELNLNEIARTDEIDFVEKIHRVYKALKKVSADSSLKNKNTIGFTGAPWTLLVYMINQQSPKKNLKKDFFKDEFLINRILLIIEKFLKVHIKNQVDNGANVIQIFDSWAGLLEEKDLPNYVYSPTLNLVNYVKSLNVPVICFPREIKNYKEFCDIVKPDAVSIDYNIDPKKILRDISIPIQGGLDPKILLTDKETLKKEAFNYLEIFRDHPYIFNLGHGILPETNPEMVENLIKIVKNFK

SEQ ID NO: 175791 - protein, 294 aa, Unknown
  Bacterial polypetide isolated from the Sargasso Sea
MSELKNDRYLRALAKQPVDVTPVWMMRQAGRYLPEYRATRAQAGDFMSLCRNAELACEVTLQPLRRYPLDAAILFSDILTIPDAMGLGLYFETGEGPKFERPISSLADVKKIPKLDPTDELGYVMNAVSTIRRELKGEVPLIGFSGSPWTLATYMVEGGSSKVFGKIKKMAFAEPQTLHLLLDKLADSVIDYLNAQVKAGAQSLMVFDSWGGVLSPRDYNEFSLQYMHKIVDGLIREYDGRKVPVTLFTKNGGQWIEAIAATGCDAVGLDWTINIGDAKRRVGDKVALQGNMDP

SEQ ID NO: 175792 - protein, 354 aa, Unknown
  Bacterial polypetide isolated from the Sargasso Sea
MAELKNDRYLRALLKQPVDMTPVWMMRQAGRYLPEYKATRAQAGDFMSLCKNHELACEVTLQPLRRYELDAAILFSDILTVPDAMGLGLYFEAGEGPRFERPTDTIDAIKKLAVPDPEDDLGYVMKAVSTIRRELNGQVPLIGFSGSPWTLATYMVEGGSSKTFEKIKKMAYAEPAALHMLLDKLADSVTLYLNAQVANGAQSLMIFDSWGGALSHTAYREFSLRYMQKIVDGLTRFADGRQVPVTLFTKGGGLWLEAMAETGCDALGLDWTVDIADARRRVGHKVALQGNMDPSMLYAPIPRIEEEVAQILAGYGEGTGHVFNLGHGIHQHVDPEHAGAFIKAVHAQSKQYHK

SEQ ID NO: 175793 - protein, 357 aa, Unknown
  Bacterial polypetide isolated from the Sargasso Sea
MGRNVVLKNDRLLKALLGQEVDVTPVWMMRQAGRYLPEYRNTRKIAGDFMNLCRSPEMACEVTLQPLRRYSFDAAILFSDILTIPDAMGQGLYFETGEGPRFKKVIQTRADVDSLREITAVDDLSYVMSAVTLIRNELNGSIPLIGFSGSPWTLATYMIEGGGSKDFSKVKAFMYNEPEAMHLLLEKLTDAVIDYLNSQIRAGAQAVQIFDTWGGVLNTPGYFDFSLNYMKRIVSKLIRQHDSRDVPIILFTKNGGQWLSQIVDAGAHAIGLDWTIEIGAAKNLVGSKCALQGNMDPSILYSSPQTIREEVDRILSDFGKQNGHVFNLGHGITPGVNPDHVKVFVDSVHEISAQYHI

SEQ ID NO: 175794 - protein, 333 aa, Unknown
  Bacterial polypetide isolated from the Sargasso Sea
MSNIKKVIKDRKTDLNPVWIMRQAGRYLPEFREIRKKNTDFIKLCLNSSLSAEITLQPLKRFDLDAAIIFSDILILPYGLKQKVEFKKNVGPILGDLNLDQAFEVTENDFIERIDPVYKAINLVKNNNLTENKSTIGFVGAPWTLLVYILNKQSPKIKLKENFFKDFSIIEKTLKIIDKFLKIHIKNQIDSGAEIIQIFDSWAGLLEDKDYDFYIYNPTCSLVEFTKSLNVPVICFPRGINDYKKYCEIVKPDAICIDYEVDPIKIEKEIKIPVQGGMDPKVLLTDKDNLKKEATKYLDIFKDHPYIFNLGHGILPETDPSMMDYLVKTIKDY

SEQ ID NO: 175795 - protein, 333 aa, Unknown
  Bacterial polypetide isolated from the Sargasso Sea
MTPLHEVIVNKKTTINPVWIMRQAGRYLPEFREIRKKNPNFIELCLNHNLSSEITLQPIKRFDLDAAIIFSDILMLPYGLNQKVDFKKDFGPVLGNLDMGTMSMIDEIDFVEKIYPIYKAIKSVSSKMTSMNKNTIGFVGAPWTLLVYMINQQSPKKNVKKDFFKDDFLINRILLIIEKFLKIHIKNQIENGANIIQIFDSWAGLLEERDYPNYIYTPTLNLVDYVKSLNVPVICFPREIRNYKEFCEIVKPDAINIDYSVDPLMISKNIKIPVQGGLDPKILLTDKENLKKEILKYLDIFKDHPYIFNLGHGILPETNPDMVEFLIKTVKDH

SEQ ID NO: 175796 - protein, 348 aa, Unknown
  Bacterial polypetide isolated from the Sargasso Sea
MTELNRNFIAALDRKTQKTPPVWVMRQAGRYLPEYRKVRSNFKNFLDMCKTPEVCCELVLQPIERYDFDAAIIFSDILTIPDALGLGVSFVEGKGPIFSNPIKRPEDISKMTNFNPDSLDYVYKTAELTKKELNQSIPLIGFAGSPWTLAAYSIEGSSSKNFDLTKSFIESHSDDAHKFLDILSDACFEYLKRQIISGVDAVQIFDSWANLLSEEQYLEYSLKYIKKILKKLSEDPVTSKTPTIVFARDPKCSLSEFQLNDLSCYGMFTSINPNTAISVFEGSHALQGNLDPKILLEEDSVIKESVLRILSDFKDYPGYIFNLGHGITPDINPDKVKVLVEAIRDSGS

SEQ ID NO: 175797 - protein, 345 aa, Unknown
  Bacterial polypetide isolated from the Sargasso Sea
MNDRDSLLLKALKRENLTTPPIWYMRQAGRYMPEYRNIRKKFKNFLDMCKNPEVCCELAMQPLNAFELDAAILFSDILTIPDAMGLGVTFEENKGPIFKNPIKSVVDINNIGPFNPDDLSYVYQAVTNIRNTIPENIPLIGFCGSPWTLAAYSIEGKSSKEFNKTKKFIAENIDEVHLFLSKLTDACFLYLRKQVQAGANVIQIFDSWANLLNKKDLQTFSLNYINSLILALKQDSITSDIPIILFSRDPKCDDNTLIETTADCISLYWSMENFNLDLAKGKTAIQGNLNPKVLLESKETIRNETYKLLDKFKNFPGYIFNLGHGITPDINPEKIKYLTDIVRDY

SEQ ID NO: 175798 - protein, 342 aa, Unknown
  Bacterial polypetide isolated from the Sargasso Sea
MKNKKILASLRGEIFKVPPVWLMRQAGRYLPEYRETRKNAGGFLDLCFNSDLATEVTLQPIRRYNFDAAILFADILLIPKALGMNVWFAPGEGPRLDGIREGFPLNSLKKADDIHDTLLPIYQTVKNLSEELPKETALIGFAGAPWTVATYMINGKGSPDQLIAKKYMYNKLEEFEKLIEILTESTIEYLSKQIEHGAEVIKIFDSWAGALSGTMVEKFSLKPMTIIAEQLKSRHPTVPIIVFPRGIGTNYDQFSMNKQFDGLAIDGTVSAGWAAKNLQVKKTVQGNLDPLLLVTGGQALKSECKHLLNTLSNGPFIFNLGHGITPDADPKNVDLLLECIRT

SEQ ID NO: 175799 - protein, 332 aa, Unknown
  Bacterial polypetide isolated from the Sargasso Sea
MQLKNDRYLRALMKQPVDCTPIWMMRQAGRYLPEYRATRAIAGDFMSLCKNPELACEVTLQPLKRYPLDAAILFSDILTIPDAMGMGLYFGEGEGPRFTKQLTDFMDVMQLPVPDPEVELRYVMDAVRTIRRELNGEVPLIGFSGSPWTLATYMFEGGSSKTFSKIKKLMYTEPEVVHILLDKLTQSVILYLNAQIAAGAQSVMIFDTWGGVLTPHDYREYSLSYMQQIVSGLTRFADGRPVPVTLFTKNGGLWLEEIAATGCDGVGLDWTIDIRHARARIGDKVALQGNMDPSILLGTPERIRQEVQAILDGYGMGSGHVFNLGHGITPDV

SEQ ID NO: 175800 - protein, 336 aa, Unknown
  Bacterial polypetide isolated from the Sargasso Sea
MSLIRNCIIEKSNKKVPVWFMRQAGRYLPEFREIRKKNPNFIELCLNRNLVPEITLQPIKRFNLLDAAIIFSDILMIPHALGQKVEFKKDFGPILNEINIDKTLKIDEIEFTKNLLPVYDSMKIISNNEIVKNKDTIGFVGAPWTLLVYMLNKKSPKKEISKEILNNKSLVKNLLNIIDKFTKLHIKNQIDNGATLIQIFDSWAGLLKEENEISELIYNPTLSLVDYVKSLNTPVICFPRSIKNYELYCKIVSPDAINIDYEIDPKNIEKKIKIPVQGGLDPKILLSDKENLKKEALKYLNIFKDHPYIFNLGHGVLPETKPEMVEYLVNLIKDFK

SEQ ID NO: 175801 - protein, 351 aa, Unknown
  Bacterial polypetide isolated from the Sargasso Sea
MPIQNQIILDVLSGKKVARTPMWIMRQAGRYLPEYQEVRKQAGSFINLCKSPELASEVTIQPLRRFALDAAIIFSDILTIPDAMGMDLKFEDNKGPYFEEALSSQKDLKRLDQKNAGEKLEYVYDAIKQTKIKLDNKVPLIGFAGSPWTLCVYMVEGKATKEFRKVRSLVYKDSAFIEELNESLCSTITSYLVNQVKAGANVVMLFDSWGGLLNKNNYEKFSLEPMKQIIKEFKKESDVPVILFTRGGGNWLPLIIESGCDCIGLDWTVDINHAKSLVGNNIALQGNLDPCALHGDERSLRCAAKKVLEGYGEGHRHIFNLGHGIDQFVNPDNVNLLVEILKEESPAFHQN

SEQ ID NO: 175802 - protein, 346 aa, Unknown
  Bacterial polypetide isolated from the Sargasso Sea
MGQDLPLLLSAALGKKVHRPPVWMMRQAGRYMKIYRDLRERYPSFRERSENPELSYEISMQPFHAFKPDGVILFSDILTPLPGMGINFEIIESKGPIIEDPIRTLNQVENLRELNPSESLSFVGQVLSSLKKDVNNEATVLGFVGAPWTLAAYVVEGKSSKNYSLIKSMAFNEPDLLHKLLDHFAKSIGEYLKYQIKSGAQVVQIFDSWAGQLSPQDYDIFAGPYQKKVVEIVKAEYPETPIILYISGSAGVLERMAKTGVDIISLDWTVDIEEACKRIPRGIGIQGNVDPGILFGNKESIKERIDNTFNKIKDRKYILNLGHGILPGTPEENAQTFFEHGKKLTY

SEQ ID NO: 175803 - protein, 344 aa, Unknown
  Bacterial polypetide isolated from the Sargasso Sea
MNSDSSFLKALNKESLPTPPIWYMRQAGRYMPEYQNVRKKFKNFLDMCKEPDICCELALQPINAFKLDAAILFSDILTIPDSFGLGVEFIEKEGPVFRNPISKSTDIKNLNHFDPESLDYVYKAVNNIKSSLPKEIPLIGFCGSPWTLAAYSIEGRSSKDFEKTLGFLESNHKDVHDLLIKYTDACFLYLRKQVQSGADVIQIFDSWANLLTKEDLIEFSFNYINSLISALKLDPVTKNIPVIIFARNPKCNIEELINTSADCISLFWSMNDLNFEVAKNKVAIQGNLDPKILLESDETIKRETYKILERFKEYPGYIFNLGHGITPDISPDKIKYLTNIVREY

SEQ ID NO: 175804 - protein, 344 aa, Unknown
  Bacterial polypetide isolated from the Sargasso Sea
MNSDSSFLKALNKEILPTPPIWYMRQAGRYMPEYQNVRKKFKNFLDMCKEPDVCCELALQPINAFKLDAAILFSDILTIPDSFGLGVEFVEKEGPVFNNPINSSTDISNLDHFDPESLDYVYKAVKNIKNSLSEEIPLIGFCGSPWTLAAYSIEGRSSKDFEKTLNFLVSNQKDVHNLLTKYTDACFLYLRRQVQSGADVIQIFDSWANLLTKEGLIEYSFNYINALISALKLDPVTKNIPVIVFARNPKCNIEELINTSADCISLFWSMNDLNFELAKNKVAIQGNLDPKILLESDEIIKRETYKILEKFEKYPGYIFNLGHGITPDINPDKIKYLTNIVREY

SEQ ID NO: 175805 - protein, 333 aa, Unknown
  Bacterial polypetide isolated from the Sargasso Sea
MSPIINCIKNKDIKTNPIWLMRQAGRYLPEFREIRKKNTDFIKLCLNSDLASEITLQPIKRFDFDGAVIFSDILMLPYGLGQKVEFKKNFGPKLGEIELDNIKNVDEINFTEKVYKVYKAISKTSQDPLMDNKDMIGFVGAPWTILVYMINRSSPKKGLTGEFFKDEFLINRLLGIIEKFLKVHIKNQVEAGAKVIQIFDSWAGLLENKIPEYIYVPTLNIVEYVKQLGIPVICFPRGIKDYKNFCEIVKPDAVNIDYDVDPKKIVKEIKIPIQGGLDPKILLTDKEILKKEVEKYLHIFKDHPYIFNLGHGILPETKIEMVEDLIKIVRDFK

SEQ ID NO: 175806 - protein, 346 aa, Unknown
  Bacterial polypetide isolated from the Sargasso Sea
MGQDLPLLLSAALGKKVNRPPVWMMRQAGRYMKIYRDLRERYPSFRERSENPELSYEISMQPFHAFKPDGVILFSDILTPLPGMGINFEIIESKGPIIEDPIRTLNQVENLKELNPSESLGFVGQVLTSLKKDVNNEATVLGFVGAPWTLAAYVVEGKSSKNYSLIKSMAFNEPDLLHKLLDHFAKSIGEYLKYQIKSGAQVVQIFDSWAGQLSPQDYDIFAGPYQKKVIEIVKSEYPETPIILYISGSAGVFERMAKTGVDIISLDWTVDIEEACKRIPSGIGIQGNVDPGILFGNKESIKERIDNTFNKIKDRKYILNLGHGILPGTPEENAQTFFEHGKKLTY

SEQ ID NO: 175807 - protein, 333 aa, Unknown
  Bacterial polypetide isolated from the Sargasso Sea
MTPIQDCIKNKNTGLNPIWIMRQAGRYLPEFRKIRAQNTDFIKLCLNESLSTEITLQPIKRFDFDAAIIFSDILMLPFGLGQEVKFEKGLGPKLGELNLDLIENVSKDEFIKKLNPIYKSISNISTNSICKNKDIIGFVGAPWTILVYMINKMSPKKNLSKEIFNDKLFINKLLSIIEKFLKIHIENQIKAGATLIQIFDSWAGLLEENIPEFIYEPTLNLVNHVKKLNVPVICFPRGIKDYKNFCEFVKPNMVNIDYNIDPKKIINEVQIPIQGGLDPKVLLTDKENLHREVVKYLRIFKDHPYVFNLGHGILPETQIEMVEELVKTVRDFN

SEQ ID NO: 175808 - protein, 360 aa, Unknown
  Bacterial polypetide isolated from the Sargasso Sea
MLNDTFLRALLREPTDYTPIWLMRQAGRYLPEYNATRARAGSFLGLAKNPDYATEVTLQPLERFPLDAAILFSDILTIPDAMGLGLDFQVGEGPKFAHPVRTEADVAKLAVPDIEATLGYVTGAVREIRRALTDGQGRQRVPLIGFSGSPWTLACYMVEGGGSDDFRTVKSMAYSRPDLMHRILDVNAQAVAAYLNAQIEAGAQAVMIFDTWGGALADGAYQRFSLDYIRRVVSQLKREHDGERVPVITFTKGGGLWLEEIAATGVDAVGLDWTVNLGKARERVAGKVALQGNLDPTILFAPPAAVREQARAVLDSYGNHPGHVFNLGHGISQFTSPDHVAELVDEVHSHSRAIRSGAAG

SEQ ID NO: 175809 - protein, 346 aa, Unknown
  Bacterial polypetide isolated from the Sargasso Sea
FMSYSNSLIQKALDKQILKTPPIWYMRQAGRYMPEYRAIRKKFKNFLDMCKNPEVCCELALQPLDAFKLDAAILFSDILTIPDALNLGVSFIENEGPVFKNPISTASDVDDLISFDPNKLNYVYKAVSNIKNTLSDDIPLIGFCGSPWTLAAYSIEGRSSKDFNKTKNFIEENNQATHLFLTKITDACFLYLRKQVEAGADVIQIFDSWANLLDANAFIDLSINYTKSLINALKNDPITKHIPIVLFSRDPKCDTKTLIGTSADCISLFWNMENFDISLAKNSVAIQGNLNPRVLLESRDTIKKETYSILDKYNGYPGYIFNLGHGITPDIDPNNIKFLTDIVRDY

SEQ ID NO: 175810 - protein, 111 aa, Unknown
  Bacterial polypetide isolated from the Sargasso Sea
MKELKNDRYLRALLRQEVDMTPVWMMRQAGRYLPEYKATRAQAGDFMSLCRNAELACEVTLQPLRRYPLDAAILFSDILTVPDAMGLGLYFEQGEGPRFERPITSMADVQG

SEQ ID NO: 175811 - protein, 329 aa, Unknown
  Bacterial polypetide isolated from the Sargasso Sea
MTPIKECLINNKTNLIPIWLMRQAGRYLPEFREIRKDNPNFINLCLNSKLSKEITLQPIKRFGFDAAIIFSDILMIPYGLGQKVEFKKNFGPKLDDFEIDKLLEIDEEKFTKNLSPIYQLLVDLKKSEDLEKKDIIGFVGAPWTLLVYMINKVSPKNGLTTNFFSDIGLINNLLKILDKFIKTHIKNQVNAGATIIQIFDSWSGLIKSDLDKYLYNPTLSLVNYTKSLGVPVICFPRGITDYSQFCKIVKPNMINIDYDVDPKNLLKNIDIPVQGGLHPEVLLTNKDHLKKEVNKYLEIFKNHPYVFNLGHGILPETKIEMVEELVKIV

SEQ ID NO: 175812 - protein, 266 aa, Unknown
  Bacterial polypetide isolated from the Sargasso Sea
IPDALNLGLAFHEGEGPKFSNPISSPQDIKKLTRFDVNSLDYVFKAVEETKKLLPNNLPLIGFCGSPWTLAAYSIEGGGSKDFYKTKSFIKEHPKELLEFLEILSNACYEYLKQQVLSGVNALQIFDSWADLLLENELEKFSLQYTQRLTGLLKADPVTSNIPIILFEKAPKIKIDDLVFADISCMSLYWQEDIESVAKNFKNQYAIQGNLDPKVLLGSDELIWNETQKICSIMNEYPGFIFNLGHGITPDINPSKVKVMIDAIRQ

SEQ ID NO: 175813 - protein, 343 aa, Unknown
  Bacterial polypetide isolated from the Sargasso Sea
MNDSKFLNALKLKPNSTPPIWFMRQAGRYLPEYQEIRKNYSNFLDMCKEPKTCAKLALQPIERFDLDASILFSDILTIPDALDLGLAFHEGEGPKFSNPISKPEDINTLISFDENTLSYVFNAVEETKKLLPADLPLIGFCGSPWTLAAYSIEGGGSKDFKKTKNFMQDHPSALHDFLEILCDACYRYLRQQVLSGVNALQIFDSWADLLSAQELEIFSLQYTKKITKKLKSDPITKDIPIILFEKDPKQKITDLLFDDLSCISLHWKNDIEAISKSVKNNIAIQGNLNPMILSKSDEIIHQEVQRICSIMCEYPGFIFNLGHGITPDINPQKVQTMIKAARE

SEQ ID NO: 175814 - protein, 328 aa, Unknown
  Bacterial polypetide isolated from the Sargasso Sea
NCIKNKDTKTNPIWLMRQAGRYLPEFRDIRKRNVDFIKLCLNSDLASEITLQPIKRFGFDGAVIFSDILMLPYGLGQKVEFQKNFGPKLGEIELDNIKNIDEINFTEKVYKVYKAISKTSQDPLMDNRDMIGFVGAPWTILVYMINRSSPKKGLTDEFFKDEFLINRLLQIIEKFLKVHIKNQVEAGAKVIQIFDSWAGLLDDKIPEYIYIPTLNIVEYVKQLGVPVICFPRGIKDYKNFCEIVKPDAVNIDYDVDPEKIVKEIKIPIQGGLDPKILLTDKKILKKEVEKYLHIFKDHPYIFNLGHGILPETKIEMVEDLIKIVRNFK

SEQ ID NO: 175815 - protein, 255 aa, Unknown
  Bacterial polypetide isolated from the Sargasso Sea
MFLRALRRESVTHTPIWIMRQAGRYLPEYRALRKEAGSFMNLCSNPELACEVTMQPLRRFNLDAAILFSDILTVPDAMGLGLYFEEGEGPKFKFPVDNETSIKKLFVPDVQDELSYVFSAVSRIKRELQSSIPLIGFAGSPWTVATYMVEGGSSKTHSKIKNLLYKNPETLKFLLNKVATVTIDYLNAQIEAGVDVIMLFDTWGAVLGDEHYVEFSLDYMRKISDELNLNSNRKKIPVIFFTKGAGSLLTEMSRN

SEQ ID NO: 175816 - protein, 354 aa, Unknown
  Bacterial polypetide isolated from the Sargasso Sea
MAELKNDRYLRALLKQPVDMTPVWMMRQAGRYLPEYKATRAQAGDFMSLCKNHELACEVTLQPLRRYELDAAILFSDILTVPDAMGLGLYFEAGEGPRFERPTDTIDAIKKLSIPDPEDELGYVMKAVSTIRRELNGQVPLIGFSGSPWTLATYMVEGGSSKTFEKIKKMAYAEPAALHMLLDKLADSVTLYLNAQVANGAQSLMIFDSWGGALSHTAYREFSLRYMQKIVDGLTRFADGRQVPVTLFTKGGGLWLEAMAETGCDALGLDWTVDIADARRRVGHKVALQGNMDPSMLYAPIPRIEEEVAQILAGYGEGTGHVFNLGHGIHQHVDPEHAGAFIKAVHAQSKQYHK

SEQ ID NO: 175817 - protein, 333 aa, Unknown
  Bacterial polypetide isolated from the Sargasso Sea
MNPITKCIRNKDTKVNPIWMMRQAGRYLPEFREIRKDNQDFIKLCLNSDLASEITLQPIKRFGFDGAVIFSDILMLPYGLGQKVEFEKNFGPKLGEIDLDNIKNVDEINFTEKVYKVYKAISKTSHDPLMDNRDVIGFVGAPWTILVYMINRSSPKKGLTSEFFKDDFLINRLLGIIEKFLKVHIKNQVNAGAKVIQIFDSWAGLLEDKIPEYVYIPTLNIVEYVKQLGVPVICFPRGIKDYKNFCEIVKPDAINIDYDVDPKKIINEINIPVQGGLDPKILLTDKETLQRESEKYLNIFKDHPYIFNLGHGILPETKIEMVEELIKIVRNFK

SEQ ID NO: 175818 - protein, 355 aa, Unknown
  Bacterial polypetide isolated from the Sargasso Sea
MTALKNDRFLRALLKQPVDVTPIWMMRQAGRYLPEYRATRAKAGDFVSLMKNPELACEVTIQPLDRYPQLDAAILFSDILTIPDAMGQGLYFETGEGPRFKKVVSSLADIEALSVPDPEKDLGYVMDAVRTIRRELNGRVPLIGFSGSPWTLATYMVEGGSSKDFRKTKAMLYDNPQALHALLDKLAQSVTAYLNGQILAGAQAVQIFDSWGGALSAAAYQEFSLAYMKKIVDGLIREHDGRRVPVILFTKGGGLWLESLADTGAEALGLDWTCDIGSARARVGAKVALQGNMDPAVLYAKPAAIRAEVARILAAYGDGSGHVFNLGHGITPEVDPAHAGAFFEAVHELSAQYHQ

SEQ ID NO: 175819 - protein, 346 aa, Unknown
  Bacterial polypetide isolated from the Sargasso Sea
MGENLPLLLSAALGKKVNRPPVWMMRQAGRYMKIYRDLRERYPSFRERSENPELSYEISMQPFHAFKPDGVILFSDILTPLPGMGINFEIIESKGPIIEDPIRTLSQIENLKELNPSESLSFVGQVLSSLKKDVNNEATVLGFVGAPWTLAAYVVEGKSSKNYSLIKSMAFKEPDLLHKLLDHFAKSIGEYLKYQIKSGAQVVQIFDSWAGQLSPQDYDVFAGPYQKKVVDIVKKDYPNTPIILYISGSAGVIERMAKTGVDIISLDWTVDIEEACQRIPNEIGIQGNVDPGILFGNKQSIKARINDTFNKIKDRKYILNLGHGILPGTPEENAQTFFEHGKKLTY

SEQ ID NO: 175820 - protein, 346 aa, Unknown
  Bacterial polypetide isolated from the Sargasso Sea
MTNSNPLFLRALNKEGLKTPPIWYMRQAGRYMPEYRAVRKKFSNFLDMCKNPDVCCELALQPINAFDLDAAILFSDILTIPDALGLGVNFVENEGPVFNNPINNSKDIDNLNLFNPDDLKYVYQAVTNIKNSLPNNIPLIGFSGSPWTLAAYSIEGRSSKDFKKTLNFINANADDSHTLLNTLTDACFLYLREQVKAGADVIQIFDSWANILDENKLNEFSMQYINKLTYALKNDKVTSETPIILFSRDPKCSNLALVNDSGADCLSLYWNMKDFDLNLARNKVSLQGNLDPRILLEPKNEIKYQTHKVLNNFKDYPGYIFNLGHGITPDINPDNIKYLTEVVREY

SEQ ID NO: 175821 - protein, 139 aa, Unknown
  Bacterial polypetide isolated from the Sargasso Sea
SPQDYDVFAAPYQQKVVNLVKEKHPDTPMILYISGSAGVLERMGQTGVDIVSLDWTVDMADGLKRLPQAVGVQGNVDPGLLFGTPDAIRSRIVDVVKKAKGRKHILNLGHGILPGTPEENARVFFEAGKNVNELIKVSS

SEQ ID NO: 175822 - protein, 313 aa, Unknown
  Bacterial polypetide isolated from the Sargasso Sea
MRQAGRYLPEFREIRKDNPNFINLCLNDDLSSEITLQPLRRFDLDAAIIFSDILMLPYGLGQKVEFEKNFGPKLGELNLNEIAKIDEIDFVEKIHRVYKAIKKVSLNPILNDKNTIGFVGAPWTLLVYMINQQSPKKKLKKGFFEDKFLINRILLIIEKFLKIHIKNQVEHGANIIQIFDSWAGLLEEKDLPNYVYTPTLNLVNYVKSLNVPVICFPREIKNYKEFCDIVKPDAVSIDYNVDPKEMLRDIKIPIQGGLDPKILLTDKETLKKEASKYLDIFKDHPYIFNLGHGVLPETDPNMFEYLVKTVKNY

SEQ ID NO: 175823 - protein, 333 aa, Unknown
  Bacterial polypetide isolated from the Sargasso Sea
MSLLTNCIKNKDTKTNPIWLMRQAGRYLPEFREIRKKNTDFIKLCLNSDLASEITLQPIKRFGFDGAVIFSDILMLPYGLGQKVEFEKNFGPKLGEIELDNIKNVDEINFTEKVYKVYKAISKTSQDPLMNNKDMIGFVGAPWTILVYMINRSSPKKGLTGEFFKDEFLINRLLQIIEKFLKVHIKNQIEAGAKVIQIFDSWAGLLDDKIPEYIYIPTLNIVEYVKQLGIPVICFPRGIKDYKNFCEIVKPDAINIDYDVDPEKIVKEIKIPIQGGLDPKILLTDREILKKEVEKYLHIFKDHPYIFNLGHGILPETKIEMVENLIKIVRNFK

SEQ ID NO: 175824 - protein, 231 aa, Unknown
  Bacterial polypetide isolated from the Sargasso Sea
MNAVRTIRRELKGEVPLIGFSGSPWTLATYMVEGGSSKAFTKIKQMMYAEPQTLHLLLDKLADSVISYLNAQIKAGAQAVMVFDTWGGVLTPRDYRDFSLQYMHKIVDGLIREHDGRRVPVTLFTKNGGQWLEQIAATGCDALGLDWTTDIADAKRRVGDKVALQGNMDPSMLYASPARIREEVASILAGFGHGNGHVFNLGHGIHQDVNPEHAGVFVNAVHELSAQYHGR

SEQ ID NO: 175825 - protein, 342 aa, Unknown
  Bacterial polypetide isolated from the Sargasso Sea
MDSILIRTLNGEKTNRPPVWFMRQAGRILPNYMQLKELYTFHELMNDKDLASKVTLLPIQDLNVDAAILFSDILVIPHALGLDVEFKKTGPIFNNPLNFNSKAADLEFDSSKLNYIYNNIKQVQSDKNQNTPLIGFCGGPLTVFLFMFKREGSKDHMKKAIKYLYENREESKKILELITESSIDYVKGQCKAGIDVFQLFETYCGSIPYELYVDLILPYAKRILTTAKKENCPTIFFPKDFGFGISYIGKDICDYVSIDWHTSIFHAREILNNEIGIQGNMDPRIFYEDYKKIETYLNTLTNFGNQNFDWIFNLGHGFLPDIDHKKVKFVVEWIKNKNWNRA

SEQ ID NO: 175826 - protein, 344 aa, Unknown
  Bacterial polypetide isolated from the Sargasso Sea
MNSDSSFLKALNKESLPTPPIWYMRQAGRYMPEYQNVRKKFKNFLDMCKEPDICCELALQPINAFELDAAILFSDILTIPDSFGLGVEFIENEGPVFKNPISNSTDIKNLNHFDPESLDYVYKAVNNIKSSLPEEIPLIGFCGSPWTLAAYSIEGRSSKDFEKTLGFLESNQKDVHDLLIKYTDACFLYLRKQVQSGADVIQIFDSWANLLTKEDLIEFSFNYINSLISALKLDPITKNIPVIIFARNPKCNIEELINTSADCISLFWSMNDLNFEVAKNKVAIQGNLDPKILLESDETIKRETYKILERFKEYPGYIFNLGHGITPDISPDKIKYLTNIVREY

SEQ ID NO: 175827 - protein, 334 aa, Unknown
  Bacterial polypetide isolated from the Sargasso Sea
MSPIQKCIKNKDTKINTIWLMRQAGRYLPEFREIRSKNPDFVKLCLNEKLSSEITLQPLKRFNLDAAIIFSDILMLPYGLGQNVKFEKNFGPRLDKLNVDDILKITENQFTNKLDSVYKLIDISSKNDLLQKKDLFGFVGAPWTILVYMINQVSPKKKLKKDFFDNQILIEKLLTVIVKFLKLHIKNQINSGATIIQIFDSWAGLVEEKKLDLLIYKPTLDLVNFIKSLNVPVICFPREIKDYKKFVNKVKPDVINIDYSVDPKEIVKNIEIPVQGGLDPKVLLTDKDNVKKNAIKYMEIFRDHPYIFNLGHGVLPETNPDMVKYLVNTVKDFK

SEQ ID NO: 175828 - protein, 330 aa, Unknown
  Bacterial polypetide isolated from the Sargasso Sea
MHEVIINNKTTVNPVWIMRQAGRYLPEFREIRKENSNFIELCLNHKLSSEITLQPIKRFDFDAAIIFSDILMLPYGLNQKVEFKKNFGPTLGNLDIKSMSKIDEIDFVEKIYPVYKAIKSVSLEMNSKNKNTIGFVGAPWTLLVYMINQQSPKKNVKKDFFKDDFLINRILLIIEKFLKIHIKNQIENGANVIQIFDSWAGLLEERDYPNYIYTPTLNLVNYVKALNVPVICFPRGIKKYKEFCDIVKPDAVNIDYNVDPLMISKNIKIPVQGGLDPRILLTDKENLKKEISKYLDIFKDHPYIFNLGHGILPETNPDMVEFLINTVKDH

SEQ ID NO: 175829 - protein, 269 aa, Unknown
  Bacterial polypetide isolated from the Sargasso Sea
IPDALGLGVSFVEGKGPVFSNPIKRPEDISNMINFNPDSLDYVYKTAELTRKELNPSIPLIGFAGSPWTLAAYSIEGSSSKNFDLTKSFIESHSYDAHKFLEILADACFEYLKRQIVSGVDAIQIFDSWANLLSEEQYLEYSLKYIKKILKKLSEDPVTNKTPTIVFARDPKCNLDEFKLDDLSCYGMFTSIDPSSAIRVFEGSHALQGNLDPKILLEEDSVIKESVLKILSEFKDFPGYIFNLGHGITPDINPDKVKVLVEAIRESGS

SEQ ID NO: 175830 - protein, 347 aa, Unknown
  Bacterial polypetide isolated from the Sargasso Sea
VVDSPPSSGPFLAACRAEPHDYTPVWFMRQAGRSLPEYRAVRGSGSILDAIADPELSAEITLQPVRRYGVDAAILYSDIVVPASAVGFGVDVKPGLGPVVEQPFERTADLQRLRPLEPEIDTPYVLETVRRVVAEASVPLIGFAGAPFTVASYLIEGAPSRTYGRTKALMLGDPALWNDLMERLVDMAITSLRSQIAAGASAVQLFDSWAGALSPPVYERCVLPHSRRVFEGVADTCVPRIHFGVGTGEILPLMAKAGADVVGVDWRVPLDEARRRLGPDTILQGNLDPAVCLGPPEVVEAEVADVLSRNGRHPGHVFNLGHGVLPETNPAVLEQVVAQVHAYSIGG

SEQ ID NO: 175831 - protein, 177 aa, Unknown
  Bacterial polypetide isolated from the Sargasso Sea
LHALLAKLADSVTEYLNAQIAAGAQSVMVFDTWGGVLSPRDYKEFSLQYMERIVSGLTRENEGRKVPVTLFTKNGGMWLESIAATGCDAVGLDWTIDIKEARARIGDKVALQGNMDPSMLYAQPKRIEQEVASILEGYGEGSGHVFNLGHGIHLDVPPENAGVFVNAVHELSKQYHK

SEQ ID NO: 175832 - protein, 348 aa, Unknown
  Bacterial polypetide isolated from the Sargasso Sea
MTELNRNFIAALNRKTQKTPPIWIMRQAGRYLPEYRKVRSNFKNFLDMCKTPEICCELVLQPIERYDFDAAIIFSDILTIPDALGLGVSFVEGKGPIFSNPIKRPEDISNMANFNPDSLNYVYKTAELTRKELNPSIPLIGFAGSPWTLAAYSIEGSSSKNFDLTKSFIENHSDDAHKFLDILADACFEYLKRQIVSGVDAIQIFDSWANLLSEKQYLEYSLKYIKKILKKLSEDPLTNKTPTIVFARDPKCNLNEFKLDNLSCYGMFTSIDPSNAIGVFEGTHALQGNLDPKILLEEDSVIKKSVLKMLSEFKDFPGYIFNLGHGITPDINPDKVKVLVEAIRESGS

SEQ ID NO: 175833 - protein, 111 aa, Unknown
  Bacterial polypetide isolated from the Sargasso Sea
GSMPGVFAVASGGIHVWHMPALLAIFGDDSCLQFGGGTHGHPWGSAAGAAANRVALEACVKARNAGREIEKESRDILMEAAKHSPELAIALETWKEIKFEFDTVDKLDVQG

SEQ ID NO: 175834 - protein, 320 aa, Unknown
  Bacterial polypetide isolated from the Sargasso Sea
RLYYNVLTSLVGNVFGFKALRHLRLEDIRFPIAFIKTCGGPPNGIVVERDRLNKYGRPLLGCTIKPKLGLSGKNYGRVVYECLRGGLDLTKDDENINSQPFQRWRERFEFVAEAVKLAQRETGEVKGHYLNCTANTPEELYERAEFAKELDMPIIMHDYITGGFTANTGLANWCRKNGMLLHIHRAMHAVIDRHPKHGIHFRVLAKCLRLSGGDQLHTGTVVGKLEGDRQTTLGYIDNLRESFVPEDRSRGNFFDQDWGSMPGVFAVASGGIHVWHMPALLAIFGDDSCLQFGGGTHGHPWGSAAGAAANRVALEACVKA

SEQ ID NO: 175835 - protein, 196 aa, Unknown
  Bacterial polypetide isolated from the Sargasso Sea
MSKKYDAGVKEYRDTYWTPEYVPLDTDLLACFKCTGQEGVPREEVAAAVAAESSTGTWSTVWSELLTDLEFYKGRCYRIEDVPGDPEAFYAFIAYPLDLFEEGSITNVLTSLVGNVFGFKALRHLRLEDIRFPIAFIKTCGGPPNGIVVERDRLNKYGRPLLGCTIKPKLGLSGKNYGRVVYECLRGGLDLTKDDE

SEQ ID NO: 175836 - protein, 186 aa, Unknown
  Bacterial polypetide isolated from the Sargasso Sea
MPDGDKKLDAKARYSAGVLEYKKMGYWEPDYSPKDTDVIALFRITPQDGVDPIEAAAAVAGESSTATWTVVWTDRLTACEKYRAKAYRVDPTPNNPNEYFAYIAYELDLFEPGSIANLTASIIGNVFGFKPLKALRLEDMRLPVAYVKTFQGPATGIVVERERLNCYGRPLLGATVKPKLGLSGRN

SEQ ID NO: 175837 - protein, 141 aa, Unknown
  Bacterial polypetide isolated from the Sargasso Sea
FYNTLLSTQSEISLTQGLFFAQDWAALNKCLPVASGGIHCGQMHQLIHYLGDDVVLQFGGGTIGHPDGIQAGATANRVALESMVVARNEGRDYLSEGPGILKNAAKSCGPLQTALDLWKDITFNYASTDTADFVETATSNR

SEQ ID NO: 175838 - protein, 258 aa, Unknown
  Bacterial polypetide isolated from the Sargasso Sea
AEAVKLAQQETGEVKGHYLNCTANTPEELYERAEFAKELDMPIIMHDYITGGFTANTGLANWCRKNGMLLHIHRAMHAVIDRHPKHGIHFRVLAKCLRLSGGDQLHTGTVVGKLEGDRQTTLGYIDNLRESFVPEDRSRGNFFDQDWGSMPGVFAVASGGIHVWHMPALLAIFGDDSCLQFGGGTHGHPWGSAAGAAANRVALEACVKARNAGREIEKESRDILMEAAKHSPELAIALETWKEIKFEFDTVDKLDVQG

SEQ ID NO: 175839 - protein, 249 aa, Unknown
  Bacterial polypetide isolated from the Sargasso Sea
ETGEVKGHYLNCTANTPEELYERAEFAKELDMPIIMHDYITGGFTANTGLANWCRKNGMLLHIHRAMHAVIDRHPKHGIHFRVLAKCLRLSGGDQLHTGTVVGKLEGDRQTTLGYIDNLRESFVPEDRSRGNFFDQDWGSMPGVFAVASGGIHVWHMPALLAIFGDDSCLQFGGGTHGHPWGSAAGAAANRVALEACVKARNAGREIEKESRDILMEAAKHSPELAIALETWKEIKFEFDTVDKLDVQG

SEQ ID NO: 175840 - protein, 151 aa, Unknown
  Bacterial polypetide isolated from the Sargasso Sea
GTVVGKLEGDRQTTLGYIDNLRESFVPEDRSRGNFFDQDWGSMPGVFAVASGGIHVWHMPALLAIFGDDSCLQFGGGTHGHPWGSAAGAAANRVALEACVKARNAGREIEKESRDILMEAAKHSPELAIALETWKEIKFEFDTVDKLDVQG

SEQ ID NO: 175841 - protein, 232 aa, Unknown
  Bacterial polypetide isolated from the Sargasso Sea
KRAEFAKELGSVIIMIDLVIGYTAIQSMAKWARDNDMILHLHRAGHGTYTRQKSHGVSFRVIAKWMRLAGVDHIHAGTVVGKLEGDPSTTKGFYDILREEYNEVALENGVFFDQDWASLNKVMPVASGGIHAGQMHQLVHYLGEDVVLQFGGGTIGHPQGIEAGATANRVALEAMIYARNAGRDYLAEGPAILAEAARTCTPLKQALDVWKGVTFDYESTDAPDFVPTTSVS

SEQ ID NO: 175842 - protein, 103 aa, Unknown
  Bacterial polypetide isolated from the Sargasso Sea
CASGGIHVWHMPALVSIFGDDSVLQFGGGTHGHPWGSAAGAAANRVALEACVKARNAGREIEKESRDILTEAAKHSPELAIALETWKEIKFEFDTVDKLDVQN

SEQ ID NO: 175843 - protein, 241 aa, Unknown
  Bacterial polypetide isolated from the Sargasso Sea
YLNCTANTPEELYERAEFAKELDMPIIMHDYITGGFTANTGLANWCRKNGMLLHIHRAMHAVIDRHPKHGIHFRVLAKCLRLSGGDQLHTGTVVGKLEGDRQTTLGYIDNLRESFVPEDRSRGNFFDQDWGSMPGVFAVASGGIHVWHMPALLAIFGDDSCLQFGGGTHGHPWGSAAGAAANRVALEACVKARNAGREIEKESRDILMEAAKHSPELAIALETWKEIKFEFDTVDKLDVQG

SEQ ID NO: 175844 - protein, 227 aa, Unknown
  Bacterial polypetide isolated from the Sargasso Sea
MSKKYDAGVKEYRDTYWTPDYVPLDTDLLACFKCTGQEGVPKEEVAAAVAAESSTGTWSTVWSELLTDLDFYKGRCYRIEDVPGDKESFYAFIAYPLDLFEEGSITNVLTSLVGNVFGFKALRHLRLEDLRFPLAFIKTCYGPPNGIQVERDRMNKYGRPLLGCTIKPKLGLSGKNYGRVVYECLRGGLDFTKDDENINSQPFQRWQNRFEFVAEAIKLSEQETGEK

SEQ ID NO: 175845 - protein, 169 aa, Unknown
  Bacterial polypetide isolated from the Sargasso Sea
MSKKYDAGVKEYRDTYWTPEYVPLDTDLLACFKCTGQEGVPREEVAAAVAAESSTGTWSTVWSELLTDLEFYKGRCYRIEDVPGDPEAFYAFIAYPLDLFEEGSITNVLTSLVGNVFGFKALRHLRLEDIRFPIAFIKTCGGPPNGIVVERDRLNKYGRPLLGCTIKPK

SEQ ID NO: 175846 - protein, 332 aa, Unknown
  Bacterial polypetide isolated from the Sargasso Sea
MAKARYSAGVLEYKKMGYWEPDYEPKDTDIISLFRITPQDGVDPIEAAAAVAGESSTATWTVVWTDRLTACEKYRAKAYRVDPVPNSPGQYFAYIAYDLDLFEPGSIANLTASIIGNVFGFKPLKALRLEDMRLPIAYIKTFNGPATGIVVERERLNCFGRPLLGATVKPKLGLSGRNYGRVVYEALKGGLDFTKDDENINSQPFMHWRDRFLYCMEAVNRASAATGEVKGTYLNVTAGTMEEMYKRAEFAKDLGSVIIMIDLVIGYTAIQSMANWARDNDMILHLHRAGHSTYTRQRNHGVSFRVIAKWMRLAGVDHIHAGTVVGKLEGDP

SEQ ID NO: 175847 - protein, 303 aa, Unknown
  Bacterial polypetide isolated from the Sargasso Sea
STVWSELLTDLEFYKGRCYRIEDVPGDPEAFYAFIAYPLDLFEEGSITNVLTSLVGNVFGFKALRHLRLEDIRFPIAFIKTCGGPPNGIVVERDRLNKYGRPLLGCTIKPKLGLSGKNYGRVVYECLRGGLDLTKDDENINSQPFQRWRERFEFVAEAVKLAQRETGEVKGHYLNCTANTPEELYERAEFAKELDMPIIMHDYITGGFTANTGLANWCRKNGMLLHIHRAMHAVIDRHPKHGIHFRVLAKCLRLSGGDQLHTGTVVGKLEGDRQTTLGYIDNLRESFVPEDRSRGNFFDPGLG

SEQ ID NO: 175848 - protein, 191 aa, Unknown
  Bacterial polypetide isolated from the Sargasso Sea
MSKKYDAGVKEYRDTYWTPEYVPLDTDLLACFKCTGQEGVPREEVAAAVAAESSTGTWSTVWSELLTDLEFYKGRCYRIEDVPGDPEAFYAFIAYPLDLFEEGSITNVLTSLVGNVFGFKALRHLRLEDIRFPIAFIKTCGGPPNGIVVERDRLNKYGRPLLGCTIKPKLGLSGKNYGRVVYECLRGGLDL

SEQ ID NO: 175849 - protein, 304 aa, Unknown
  Bacterial polypetide isolated from the Sargasso Sea
AFYAFIAYPLDLFEEGSITNVLTSLVGNVFGFKALRHLRLEDIRFPIAFIKTCGGPPNGIVVERDRLNKYGRPLLGCTIKPKLGLSGKNYGRVVYECLRGGLDLTKDDENINSQPFQRWRERFEFVAEAVKLAQRETGEVKGHYLNCTANTPEELYERAEFAKELDMPIIMHDYITGGFTANTGLANWCRKNGMLLHIHRAMHAVIDRHPKHGIHFRVLAKCLRLSGGDQLHTGTVVGKLEGDRQTTLGYIDNLRESFVPEDRSRGNFFDQDWGSMPGVFAVASGGIHVWHMPALLAIFGDDSL

SEQ ID NO: 175850 - protein, 166 aa, Unknown
  Bacterial polypetide isolated from the Sargasso Sea
MSQSVSERTRIKSERYESGVIPYAKMGYWDATYTVKDTDVLALFRITPQPGVDPVEATAAVAGESSTATWTVVWTDLLTACDIYRAKAYRVDPVPNTPDQYFGYIAYECELFEEGSLANLTASIIGNVFGFKAVKALRLEDMRIPFAYLKTFQGPATGVIVERERL

SEQ ID NO: 175851 - protein, 295 aa, Unknown
  Bacterial polypetide isolated from the Sargasso Sea
RERLNIYGRPLLGATVKPKLGLSGRNYGRVVYEALKGGLDFTKDDENINSQPFMHWRDRFLYCMEGVNKAIAATGEIKGTYLNVTAATMEDMYERAEFARDLGSTIIMIDLVIGYTAIQSMAKWARNNDMILHLHRAGHSTYTRQKSHGVSFRVIAKWMRLAGVDHIHAGTVVGKLEGDPLTTKGYYDICREEYNPTSLETGIFFDQDWASLNKMMPVASGGIHAGQMHQLIDHLGEDVVLQFGGGTIGHPHGIASGATANRVALESMIFARNSGRDYLAEGPQILAEAAKTCTP

SEQ ID NO: 175852 - protein, 242 aa, Unknown
  Bacterial polypetide isolated from the Sargasso Sea
MYRSRSVPREEVAAAVAAESSTGTWSTVWSELLTDLEFYKGRCYRIEDVPGDPEAFYAFIAYPLDLFEEGSITNVLTSLVGNVFGFKALRHLRLEDIRFPIAFIKTCGGPPNGIVVERDRLNKYGRPLLGCTIKPKLGLSGKNYGRVVYECLRGGLDLTKDDENINSQPFQRWRERFEFVAEAVKLAQQETGEVKGHYLNCTANTPEELYERAEFAKELDMPIIMHDYITGGFTENTGLANW

SEQ ID NO: 175853 - protein, 221 aa, Unknown
  Bacterial polypetide isolated from the Sargasso Sea
GEVKGHYLNCTANTPEELYERAEFAKELDMPIIMHDYITGGFTANTGLANWCRKNGMLLHIHRAMHAVIDRHPKHGIHFRVLAKCLRLSGGDQLHTGTVVGKIEGDRQTTLGYIDNLRESFVPEDRSRGNFFDQDWGSMPGVFAVASGGIHVWHMPALLAIFGDDSCLQFGGGTHGHPWGSAAGAAANRVALEACVKARNAGREIEKESRDILMEAGKHSP

SEQ ID NO: 175854 - protein, 270 aa, Unknown
  Bacterial polypetide isolated from the Sargasso Sea
DGVDPIEAAAAVAGESSTATWTVVWTDRLTACEKYRAKAYRVDPVPNEPGQFFAYIAYDLDLFEGGSIANLTASIIGNVFGFKPLKGLRLEDMRLPVAYVKTFQGPATGIVVERERLGVFGRPLLGATVKPKLGLSGRNYGRVVYEALKGGLDFTKDDENINSQPFMHWRDRFLYCMEAVNRASAATGEVKGTYLNVTAGTMEEMYKRAEFAKELGSVIIMIDLVIGYTAIQSMAKWARDNDMILHLHRAGHSTYTRQKSHGVSFRVISK

SEQ ID NO: 175855 - protein, 152 aa, Unknown
  Bacterial polypetide isolated from the Sargasso Sea
DHLHSGTVVGKLEGERNVTLGFVDLMRDAVVEKDRDRGVYFTQEWGSLPGVMPVASGGIHVWHMPALVEIFGDDACLQFGGGTLGHPWGNAPGASANRVALEACTQARNEGRDLAREGGDVIRAACKWSPELAAACEVWKEIKFEFDTVDTL

SEQ ID NO: 175856 - protein, 170 aa, Unknown
  Bacterial polypetide isolated from the Sargasso Sea
MSKKYDAGVKEYRDTYWTPDYVPLDTDLLACFKCTGQEGVPKEEVAAAVAAESSTGTWSTVWSELLADLDFYKGRCYRIEDVPGDKESFYAFIAYPLDLFEEGSITNVLTSLVGNVFGFKALRHLRLEDIRFPLAFIKTCYGPPNGIVVERDRMNKYGRPLLGCTIKPKL

SEQ ID NO: 175857 - protein, 159 aa, Unknown
  Bacterial polypetide isolated from the Sargasso Sea
MSKKYDAGVKEYRDTYWTPEYVPLDTDLLACFKCTGQEGVPREEVAAAVAAESSTGTWSTVWSELLTDLEFYKGRCYRIEDVPGDPEAFYAFIAYPLDLFEEGSITNVLTSLVGNVFGFKALRHLRLEDIRFPIAFIKTCGGPPNGIVVERDRLNKYGR

SEQ ID NO: 175858 - protein, 362 aa, Unknown
  Bacterial polypetide isolated from the Sargasso Sea
MSKKYDAGVKEYRDTYWTPEYVPLDTDLLACFKCTGQEGVPREEVAAAVAAESSTGTWSTVWSELLTDLEFYKGRCYRIEDVPGDPEAFYAFIAYPLDLFEEGSITNVLTSLVGNVFGFKALRHLRLEDIRFPIAFIKTCGGPPNGIVVERDRLNKYGRPLLGCTIKPKLGLSGKNYGRVVYECLRGGLDLTKDDENINSQPFQRWRERFEFVAEAVKLAQQETGEVKGHYLNCTANTPEELYERAEFAKELDMPIIMHDYITGGFTANTGLANWCRKNGMLLHIHRAMHAVIDRHPKHGIHFRVLAKCLRLSGGDQLHTGTVVGKLEGDRQTTLGYIDNLRESFVPEDRSRGNFFDQRLGI

SEQ ID NO: 175859 - protein, 362 aa, Unknown
  Bacterial polypetide isolated from the Sargasso Sea
IAYPLDLFEEGSITNVLTSLVGNVFGFKALRHLRLEDIRFPIAFIKTCGGPPNGIVVERDRLNKYGRPLLGCTIKPKLGLSGKNYGRVVYECLRGGLDLTKDDENINSQPFQRWRERFEFVAEAVKLAQQETGEVKGHYLNCTANTPEELYERAEFAKELDMPIIMHDYITGGFTANTGLANWCRKNGMLLHIHRAMHAVIDRHPKHGIHFRVLAKCLRLSGGDQLHTGTVVGKLEGDRQTTLGYIDNLRESFVPEDRSRGNFFDQDWGSMPGVFAVASGGIHVWHMPALLAIFGDDSCLQFGGGTHGHPWGSAAGAAANRVALEACVKARNAGREIEKESRDILMEAAKHSPELAIALETW

SEQ ID NO: 175860 - protein, 352 aa, Unknown
  Bacterial polypetide isolated from the Sargasso Sea
ALRLEDMRLPVAYIKTYNGPATGIVVERERLNCFGRPLLGATVKPKLGLSGRNYGRVVYEALKGGLDFTKDDENINSQPFMHWRDRFLYCMEAVNRASAATGEVKGTYLNVTAGTMEEMYKRAEFAKDLGSVIIMIDLVIGYTAIQSMANWARDNDMILHLHRAGHSTYTRQRTHGVSFRVIAKWMRLAGVDHIHAGTVVGKLEGDPATTKGFYDVMREEYNPQSLETGIFFDQHWASLNKMMPVASGGIHAGQMHQLIHYLGEDVVLQFGGGTIGHPQGIQAGAEANRVALEAMIFARNAGDDYLQNGPEILARAAKNCTPLKQALDVWKGVTFNYESTDAPDFVVTPTTS

SEQ ID NO: 175861 - protein, 439 aa, Unknown
  Bacterial polypetide isolated from the Sargasso Sea
LAAFRMTPQPGVPAEECGAAVAAESSTGTWTTVWTDGLTQLDRYKGRCYDIEPVPGEDNQYIAYVSYPLDLFEEGSVTNLFTSIVGNVFGFKALRALRLEDLRIPVAYCKTFQGAPHGIQVERDKLNKYGRGLLGCTIKPKLGLSAKNYGRAVYECLRGGLDFTKDDENVNSQPFMRWRDRFLFVAEAIYKSQAETGEVKGHYLNATAGHVDEMLKRAQCAKELGMPIVMHDYLTAGFTANTTLATYCRDHGLLLHIHRAMHAVIDRQRNHGIHFRVLAKALRLSGGDHLHSGTVVGKLEGERNVTLGFVDLMRDAVVEKDRDRGVYFTQEWGSLPGVMPVASGGIHVWHMPALVEIFGDDACLQFGGGTLGHPWGNAPGASANRVALEACTQARNEGRDLAREGGDVIRAACKWSPELAAACEVWKEIKFEFDTVDTL

SEQ ID NO: 175862 - protein, 403 aa, Unknown
  Bacterial polypetide isolated from the Sargasso Sea
LEFYKGRCYRIEDVPGDPEAFYAFIAYPLDLFEEGSITNVLTSLVGNVFGFKALRHLRLEDIRFPIAFIKTCGGPPNGIVVERDRLNKYGRPLLGCTIKPKLGLSGKNYGRVVYECLRGGLDLTKDDENINSQPFQRWRERFEFVAEAVKLAQQETGEVKGHYLNCTANTPEELYERAEFAKELDMPIIMHDYITGGFTANTGLANWCRKNGMLLHIHRAMHAVIDRHPKHGIHFRVLAKCLRLSGGDQLHTGTVVGKLEGDRQTTLGYIDNLRESFVPEDRSRGNFFDQDWGSMPGVFAVASGGIHVWHMPALLAIFGDDSCLQFGGGTHGHPWGSAAGAAANRVALEACVKARNAGREIEKESRDILMEAAKHSPELAIALETWKEIKFEFDTVDKLDVQG

SEQ ID NO: 175863 - protein, 144 aa, Unknown
  Bacterial polypetide isolated from the Sargasso Sea
MSKKYDAGVKEYRDTYWTPEYVPLDTDLLACFKCTGQEGVPREEVAAAVAAESSTGTWSTVWSELLTDLEFYKGRCYRIEDVPGDPEAFYAFIAYPLDLFEEGSITNVLTSLVGNVFGFKALRHLRLEDIRFPIAFIKTCGGPP

SEQ ID NO: 175864 - protein, 176 aa, Unknown
  Bacterial polypetide isolated from the Sargasso Sea
VSFRVIAKWMRLAGVDHIHAGTVVGKLEGDPLTTKGFYDILREEYNEVALENGVFFDQDWASLNKVMPVASGGIHAGQMHQLVHYLGEDVVLQFGGGTIGHPQGIEAGATANRVALEAMVYARNAGRDYLAEGPTILAEAARTCTPLKQALDVWKGVTFDYASTDAPDFVPTTSVS

SEQ ID NO: 175865 - protein, 141 aa, Unknown
  Bacterial polypetide isolated from the Sargasso Sea
MSKKYDAGVKEYRDTYWTPEYVPLDTDLLACFKCTGQEGVPREEVAAAVAAESSTGTWSTVWSELLTDLEFYKGRCYRIEDVPGDPEAFYAFIAYPLDLFEEGSITNVLTSLVGNVFGFKALRHLRLEDIRFPNRFIQNCG

SEQ ID NO: 175866 - protein, 471 aa, Unknown
  Bacterial polypetide isolated from the Sargasso Sea
MSKKYDAGVKEYRDTYWTPEYVPLDTDLLACFKCTGQEGVPREEVAAAVAAESSTGTWSTVWSELLTDLEFYKGRCYRIEDVPGDPEAFYAFIAYPLDLFEEGSITNVLTSLVGNVFGFKALRHLRLEDIRFPIAFIKTCGGPPNGIVVERDRLNKYGRPLLGCTIKPKLGLSGKNYGRVVYECLRGGLDLTKDDENINSQPFQRWRERFEFVAEAVKLAQQETGEVKGHYLNCTANTPEELYERAEFAKELDMPIIMHDYITGGFTANTGLANWCRKNGMLLHIHRAMHAVIDRHPKHGIHFRVLAKCLRLSGGDQLHTGTVVGKLEGDRQTTLGYIDNLRESFVPEDRSRGNFFDQDWGSMPGVFAVASGGIHVWHMPALLAIFGDDSCLQFGGGTHGHPWGSAAGAAANRVALEACVKARNAGREIEKESRDILMEAAKHSPELAIALETWKEIKFEFDTVDKLDVQG

SEQ ID NO: 175867 - protein, 194 aa, Unknown
  Bacterial polypetide isolated from the Sargasso Sea
KNGMLLHIHRAMHAVIDRHPKHGIHFRVLAKCLRLSGGDQLHTGTVVGKLEGDRQTTLGYIDQLRESFVPEDRSRGNFFDQDWGSMPGVFAVASGGIHVWHMPALVTIFGDDSVLQFGGGTHGHPWGSAAGAAANRVALEACVKARNAGRHLEKESRDILMEAGKHSPELAIALETWKEIKFEFDTVDKLDVQN

SEQ ID NO: 175868 - protein, 471 aa, Unknown
  Bacterial polypetide isolated from the Sargasso Sea
MSKKYDAGVKEYRDTYWTPDYVPLDTDLLACFKCTGQEGVPKEEVAAAVAAESSTGTWSTVWSELLTDLDFYKGRCYRIEDVPGDKESFYAFIAYPLDLFEEGSITNVLTSLVGNVFGFKALRHLRLEDIRFPMAFIKSCYGPPNGIQVERDRMNKYGRPLLGCTIKPKLGLSGKNYGRVVYECLRGGLDFTKDDENINSQPFQRWQNRFEFVAEAIKLSEQETGERKGHYLNVTANTPEEMYERAEFAKELGMPIIMHDFITGGFTANTGLSKWCRKNGMLLHIHRAMHAVIDRHPKHGIHFRVLAKCLRLSGGDQLHTGTVVGKLEGDRQTTLGYIDQLRESFVPEDRSRGNFFDQDWGSMPGVFAVASGGIHVWHMPALVAIFGDDSVLQFGGGTHGHPWGSAAGAAANRVALEACVKARNAGREIEKESRDILMEAGKHSPELAIALETWKEIKFEFDTVDKLDVQN

SEQ ID NO: 175869 - protein, 370 aa, Unknown
  Bacterial polypetide isolated from the Sargasso Sea
MSKKYDAGVKEYRDTYWTPDYVPLDTDLLACFKCTGQEGVPKEEVAAAVAAESSTGTWSTVWSELLTDLDFYKGRCYRIEDVPGDKESFYAFIAYPLDLFEEGSITNVLTSLVGNVFGFKALRHLRLEDIRFPVAFIKTCYGPPNGIVVERDRMNKYGRPLLGCTIKPKLGLSGKNYGRVVYECLRGGLDFTKDDENINSQPFQRWQNRFEFVAEAIRLAEQETGEKKGHYLNVTANTPEEMYERAEFAKELGMPIVMHDFITGGFTANTGLSKWCRKNGMLLHIHRAMHAVIDRHPKHGIHFRVLAKCLRLSGGDQLHTGTVVGKLEGDRQTTLGYIDQLRESFVPEDSSRGNFFDQDWGSMPGSSLCS

SEQ ID NO: 175870 - protein, 302 aa, Unknown
  Bacterial polypetide isolated from the Sargasso Sea
LGLSGKNYGRVVYECLRGGLDLTKDDENINSQPFQRWRERFEFVAEAVKLAQRETGEVKGHYLNCTANTPEELYERAEFAKELDMPIIMHDYITGGFTANTGLANWCRKNGMLLHIHRAMHAVIDRHPKHGIHFRVLAKCLRLSGGDQLHTGTVVGKLEGDRQTTLGYIDNLRESFVPEDRSRGNFFDQDWGSMPGVFAVASGGIHVWHMPALLAIFGDDSCLQFGGGTHGHPWGSAAGAAANRVALEACVKARNAGREIEKESRDILMEAAKHSPELAIALETWKEIKFEFDTVDKLDVQG

SEQ ID NO: 175871 - protein, 239 aa, Unknown
  Bacterial polypetide isolated from the Sargasso Sea
FEKEIINIETPRKFSDILISASNDKFGLIAEVKKASPSKGIIRKDFNPEKIAIDYKKAGAACLSVLTDQNFFHGKSEYLEKIKKIVDLPILRKDFIIDEFQIFESRFIGADCILLIVACLNDTELNDFYNISKSLKMDALIEVHNEDELQRALKLNPKMIGINNRNLKNMTVTLDTSIKLVKKIPKNILVVSESGFKNHSDLKLMEQYGIKSFLIGETFMKSKNIQSSVENILFGRNNA

SEQ ID NO: 175872 - protein, 270 aa, Unknown
  Bacterial polypetide isolated from the Sargasso Sea
MTTKLAAPTVLKKIFDRKIEEVAERKQQRSLAELEKLAADGDLARGFRRALSDRVAQGQPAVIAEVKKASPSKGVIREAFHPAEIAASYEAGGAACLSVLTDIDFFQGADEYLQAARGACSLPVLRKDFTLDPYQIWEARALGADAILLIVACLELPHLKDLHDCALEAGLDVLVEVHDEAELEEALTLGGDLVGINNRDLHTFETSLDTTYRLLERIPVEVQVVTESGFSSAAQVLEMRGRGVHTFLIGEAFMRSEDPGAALATMFTDD

SEQ ID NO: 175873 - protein, 216 aa, Unknown
  Bacterial polypetide isolated from the Sargasso Sea
MKTLSDIIEYKKEEVNIKKKLLSLTQIKEESSNYIPTRPFLKKIEANKSEISIISEIKKASPSKGVIRSDFNPVEIGQIYEKNGATCLSILTDKNFFQGDDEFIKAVKSKVSLPVLRKDFIIDEWQIEESRYLGADCILLILSCLSFDQAREYEEYAFSLGMNVIVEVHDLQELELANKLKAKLIGINNRNLKTMDVNISTSINLINYIEKSKIPI

SEQ ID NO: 175874 - protein, 234 aa, Unknown
  Bacterial polypetide isolated from the Sargasso Sea
MTDVLTKICDDKHKHIKKQKAFYSLANQEEFASNADKTRGFAKRLLDSSQSNKYGVIAEIKKASPSKGLIRNDFDPAIIAAEYQLGGAACMSVLTDEPYFQGKDSDLVDARKVVSLPVLRKDFIIDSYQIPESRGLGADCILLIVAALDRSLAKELAAQAHEWNMDVLIEVHNKDELEKALLIEADLIGINNRNLKTLEVDISTTENLAPLVPKEKITVSESGLFTTNDLKRMS

SEQ ID NO: 175875 - protein, 276 aa, Unknown
  Bacterial polypetide isolated from the Sargasso Sea
MEIRRRPPNPKVRVAHLEYAVPHDEEEPRNILEKIVWAKDREVDAARDRVPLQTLKCQIEDLPPTRDFLAALREAPVQPAVIAEVKKASPSKGVIRDDFDPVAIAKAYAAGGARCLSVLTDKTFFQGGFDVLVEVRQAVELPLLCKEFVLSPYQLFQARAAGADAVLLIAAILTDQDLQYLQKAAAALGLDVLVEVHDAAEMERVLNLGGFPLIGINNRDLASFETDLATTEQLMKRFGERLRDQGALLVSESGLFERSDLDRVQTAGADAVLVGE

SEQ ID NO: 175876 - protein, 245 aa, Unknown
  Bacterial polypetide isolated from the Sargasso Sea
MSSDILNKIVAVKHEEVAAAKKRLPFDAMRADAESRVLTRDFEGALRAKIAKGQAAVIAEVKKASPSKGVLRANFEPADIAQSYMEGDGKVSAACLSVLTDRQFFQGQPDYLKQARASTTLPVLRKDFMVDAYQIYESRAMGADAVLLIAACLDDAQMVDFEAIARSLDMAVLVEVHDRAELERALKLKTPLVGINNRNLRTFEVTLDTTLGMLKDVPADRLLVTESGILKPADVKTMRDAGVHA

SEQ ID NO: 175877 - protein, 268 aa, Unknown
  Bacterial polypetide isolated from the Sargasso Sea
MKNVLLEICEQKLIHIERCKQQKTENQLLNEIKNASKQRGFLKALERKSKHGYGLIGEIKKASPSKGLIRKEFDVVHLAKAYEEGGAACLSVLTDIPYFQGDDKFLVAARESTSLPVLRKDFMLDTYQVIESRVLGADCILLIMAALEDDAAQNLEDCAIELGMDVLVEIHNEDELHRALKLKTKLLGVNNRNLKTMITDIGMTEKLASLAPTEKILISESGLQTRADLDRMASAGARCFLIGESIMKQKDIEKATKLLLKKSTQENV

SEQ ID NO: 175878 - protein, 205 aa, Unknown
  Bacterial polypetide isolated from the Sargasso Sea
LIRQESGIIAEIKKASPSAGLIAEAFDPIKKAKEYEEIGAIALSVLTEEDFFMGCDQDLIDVRLNSALPILRKDFIIDEYQIYESKIIGADCILLIASILNDAQLNEFTKLADTLNLDYLIEVHDADELKRIENFDDAIVGINNRNLKTFEVNLENSITLRKSFNKDNIFISESGIQSKADIEYLQRNKISYYLIGESLMRNAFN

SEQ ID NO: 175879 - protein, 252 aa, Unknown
  Bacterial polypetide isolated from the Sargasso Sea
EELAVLPTAEVTKDSLSAALAERGGARDFIAALAAPRAGDVGLIAEVKKASPSAGVIRADFDPVTIAKEYAAAGASCLSVLTDEKYFQGSPEYLRQIRAAVDLPLLRKDFVIDARQIAEAVEWGADAVLLIVAILDDAQLQEFHELATGAGIAALVEVHDADELRRASALKAPLIGVNNRNLKNFTVDLGTTESLAAQLDLSQTLLVSESGIHTRVDVERLTTAGAKAILVGESLMREADIAAKVRELGGQA

SEQ ID NO: 175880 - protein, 240 aa, Unknown
  Bacterial polypetide isolated from the Sargasso Sea
MGSKVTILEEIIDHKKQEVSIAKQHLSLEDIENQLKDCPNPRPFISPLRSAVANQEPAVIAEIKKASPSKGLIRSDFNPREHAKDYEVSGATCLSVLTDARYFKGSDRYLTEVKQVSLLPILRKDFIIDPYQVAQSKLMGADCILLIVAALSRSQLQELVAYADQISIDVLIEVHNKAELDCALDLDNDLIGVNNRNLHNFETSLQTTLELKKYIPEDKLVITESGIHSVKDVKLMNANG

SEQ ID NO: 175881 - protein, 236 aa, Unknown
  Bacterial polypetide isolated from the Sargasso Sea
EIINVKSPRKFSDTLITASNAKFGLIAEVKKASPSKGIIRKDFNPEKIAIDYEKAGAACLSVLTDQNFFHGKNEYLEKIKKIVDLPILRKDFIIDEFQIFESRFIGADCILLIVACLNDTELNDFYNISKSLKMDALIEVHNEDELQRALKLNPKMIGINNRNLKNMTVTLDTSIKLVKKIPNNILVVSESGFKNHSDLKLMEYYGIRSFLIGETFMKSKNIQSSVENILFGRNNA

SEQ ID NO: 175882 - protein, 274 aa, Unknown
  Bacterial polypetide isolated from the Sargasso Sea
MEIRRRPPNPKVRVAHLEYAVPHDEEEPKNILEKIVWAKDREVDAARERVPLQTLKRQIEDLPPTRDFLASLREARVQPAVIAEVKKASPSKGMIREDFDPVAIAKAYAAGGARCLSVLTDKTFFQGGFDVLVEVRQAVDLPLLCKEFVLSPYQLFQARAAGADAVLLIAAILTDQDLQYLKKAAAALGLDVLVEVHDAAELERVLNLGGFPLIGINNRDLTSFETDLATTEQLMERFGDRLQDQGALLVSESGLFDRSDLDRVKAAGADAVLV

SEQ ID NO: 175883 - protein, 240 aa, Unknown
  Bacterial polypetide isolated from the Sargasso Sea
RGFRHALSDRVAQGQAAVIAEIKKASPSRGVIREEFHPAEIGASYEAGGAACLSVLTDIDFFQGADNYLQAARGACSLPVLRKDFTLDPYQIWEARALGADAILLIVACLELPHLKDLHDCACEAGLDVLVEVHDETELDEALTLGGDLIGINNRDLHTFETSLDTTYGLLERIPAGVQVVTESGFSSAAQVLEMRGRGVHTFLIGETFMRAEDPGVALATMFTGDSFGRLVGQRRDFGE

SEQ ID NO: 175884 - protein, 242 aa, Unknown
  Bacterial polypetide isolated from the Sargasso Sea
MEIRRRPPNPKVRVAHLEYAVPHDEEEPKNILEKIVWAKDREVDAARERVPLQTLKRQIEDLPPTRDFLAALREAHVQPAVIAEVKKASPSKGVIRGDFDPVAIAKAYAAGGARCLSVLTDKTFFQGGFDVLVEVRQAVDLPLLCKEFVLSPYQLFQARAAGADAVLLIAAILTDQDLQYLKKAAAALGLDVLVEVHDAAELERVLNLGGFPLIGINNRDLASFETDLATTEQLMERFGDRL

SEQ ID NO: 175885 - protein, 226 aa, Unknown
  Bacterial polypetide isolated from the Sargasso Sea
MITKLEEIINYKREEFIFRRNQTNNFYLQSKIDKQTKPRRFIENLNNSNKFNLIAEIKKASPSKGIIRKNFDPLELAKCYQNGGASCLSVLTDEKYFQGNNKYIGIIKKEIDLPILRKDFIVDPWQIKESRSLGADCILLIMAALKLEEAILLEKEAIDLGMDVLIETHTHEEIKMANKLKSKLVGVNNRNLKTMEVDINNTLKLKKFINPDKILVAESGLKTHSD

SEQ ID NO: 175886 - protein, 244 aa, Unknown
  Bacterial polypetide isolated from the Sargasso Sea
MSLHELHHQAAAAPAPAGFAAALKAASVSGYGLIAELKKASPSKGLIRDDFDIPSLARAYADGGASCLSVLTDKHYFQGDDAFLMAARTVSSLPVLRKDFMIDPFQIVHSRALGADCILLIMAALSDAQAQELEAAAHELGMDVLIEIHDSTELDRAIQLTSPLMGINNRNLKTMEISLQVGLDMLPRLPKDRIAIAESGLFTADDLALMAATGARCFLIGESLMRSDDVTSATAALLANPVPA

SEQ ID NO: 175887 - protein, 212 aa, Unknown
  Bacterial polypetide isolated from the Sargasso Sea
ADLDAAAAAADPARGFAAALADASKEGYGLIAELKKASPSKGLIRTDFEPAILAAAYEAGGATCLSVLTDVPWFQGSPDYLVAARAAVSLPVLRKDFMIDPIQITESRALGADCILLIMAALNDDQALELEACAMELGMDVLIEVHDKSELERACRLKSPLMGINNRNLKTMEISLDVGAAMLPALPSDRIAVAESGLFAPVDLARMAGTGA

SEQ ID NO: 175888 - protein, 261 aa, Unknown
  Bacterial polypetide isolated from the Sargasso Sea
MSDILDRIIAVKREEVRAAEQSAPLEELRLEASSRDIRDFVGALRAKHAAGLAAVISEVKKASPSKGVLREHFVPAEIARSYEKHGAACLSVLTDVQFFQGSVAYLEEARAACNLPVLRKDFIVDPYQIVEARAMGADAILLIAAALETSEMQDLEALAHSLGLAVLVEVHDHNELMESLKLKTPLIGINNRNLRTFETSIETTIGMLESIPDDRIVVTESGILSRVDVERLRAMDVHTFLVGEAFMRAEEPGVELARMFF

SEQ ID NO: 175889 - protein, 249 aa, Unknown
  Bacterial polypetide isolated from the Sargasso Sea
MNILDEIVSKKRTRVNEAKSIVSIEDIQNQLAKSSSLKSNFKNNLENQAQAIIAEIKKASPSAGIIAEDFNPILKAQEYEKMGARALSILTEEDFFQGSNKVLQDVKKVTNLPILRKDFIIDDYQIYESKLIGADCILLITSILSDSQIEEYVSKAEAINLDVLIEVHDEEELARVSRFHNALIGVNNRNLKTFEVDLMNAVRLRKNYDGNQIFIAESGIKSSADMEYLVSNDINVFLIGESLMRGNLF

SEQ ID NO: 175890 - protein, 255 aa, Unknown
  Bacterial polypetide isolated from the Sargasso Sea
MSDILKQITDYKKSEVLELKKKQSIKDFEKEIINIENPRKFSDTLISASNNKFRLIAEVKKASPSKGIIRKNFNPEKIAIDYEKAGAACLSVLTDQNFFHGKNEYLEKIKKIVDLPILRKDFIIDEFQIFESRFIGADCILLIVACLNDTELNDFYNISKALKMDALIEVHNEDELQRALELNPKMIGINNRNLKNMTVTLDTSVKLVKKIPKNILVVSESGFKNHSDLKLMEQYGIKSFLIGETFMKSRTFNRL

SEQ ID NO: 175891 - protein, 249 aa, Unknown
  Bacterial polypetide isolated from the Sargasso Sea
MNILDEIVSKKRTRVNEAKSIVSIEDIQNQLAKSSSLKSNFKKNLENQTQAIIAEIKKASPSAGIIAEDFNPILKAQEYEKMGARALSILTEEDFFQGSNKVLQDVKKVTNLPILRKDFIIDDYQIYESKLIGADCILLIKSILSDSQIEEYVSKAEAINLDVLIEVHDEEELARVSKFHNALIGVNNRNLKTFEVDLINAVRLRKNYDGNQIFIAESGIKSTADIEYLVSNDINVFLIGESLMRGNLF

SEQ ID NO: 175892 - protein, 268 aa, Unknown
  Bacterial polypetide isolated from the Sargasso Sea
MSKETPNILKKILDYKKEYIENVKRDLPLKELKSMALDCPPARGFTNSILKTIENDKPAIIAEIKKASPSKGIICENFNPSVIAKSYEDAGACCLSVLTDIKFFEGSDEYLKEAHKASILPILRKDFMIDTYQIYETKKIGGDCILIIISALSDVQAQEIVGIAHEIGLDVLVEVHDREELERGMMLRTPLIGINNRNLHTFETSLNTTLSLLTDVFQDRTVITESGIHTPDHVKLMRKNNVHAFLVGEAFMQAKDPGDELKRLFYNK

SEQ ID NO: 175893 - protein, 249 aa, Unknown
  Bacterial polypetide isolated from the Sargasso Sea
MNILNEIVANTRSKLEDKKLKESLDDLLSKIDMDNLGKNIFKKSLEGKSESIIAEIKKASPSAGLISKNFDPVSKAKEYESFGASALSILTEEDYFQGDIQYLIDVKNASNLPILRKDFIIDEYQIYESKLIGADCILLIASILNDEELKIFSQIADKLFLDYIIEVHDKDELLRVKNFSKAIIGVNNRNLKTFEVDIENSIKLRKEFQEDNIFVSESGIKSQKDIDKLKEHNINVFLIGESLMKGDLF

SEQ ID NO: 175894 - protein, 265 aa, Unknown
  Bacterial polypetide isolated from the Sargasso Sea
MSAAPDILERILARKREEINERQREHSLTDLYARAADRAPPRGFVSSLKKSIGAGQAGVIAEVKKASPSKGLIREHFDPAAIAVSYESGGASCLSVLTDHDFFMGSEADLEAARGACALPVLRKDFVIDPWQVAESRAIGADCILLIVAALEQAQMAELSAAAADLAMDVLVEVHDGEELDRALALDPALLGINNRNLRTFETTLKTTLALAPTVPKDTLLVTESGIHSVADVSAMREADIHAFLVGEAFMRQDDPGSHLAALFG

SEQ ID NO: 175895 - protein, 268 aa, Unknown
  Bacterial polypetide isolated from the Sargasso Sea
MSTPTILKRIVARKLEEVAERQAQVPVSELLPTIVANSVGPMAPRGFCQAMLDKVASGQPAVIAEAKKASPSKGVIRADFDPAQIAQSYAAGGATCLSVLTDADFFQGSEAYLRAAREACDLPVIRKDFIVDPYQVYEARAIGADCILLIVACLEDAQMQDLAELAEDLGMDVLVESHDADELERALQLTTPLIGINNRNLHTFDLTLQTTFDLLAMIPDERLVITESGIHTPADVAIMQQHKVNAFLVGESFMRAADPGAKLAELFT

SEQ ID NO: 175896 - protein, 263 aa, Unknown
  Bacterial polypetide isolated from the Sargasso Sea
MSDILKKILSTKREEIMQRKQKLSLSDQKRLGESQEEPRDFVNALKSAAINNRAGVIAEIKKASPSQGIIRENFDPVSIAKSYEQHGAACLSVLTDSQYFQGSDDFISLVKAHVGLPVLRKDFTIDPYQVYEARAIGADCILLIVAALDTKMLRELFELAHSLKLGVLVEVHNRAELQEALELDLTLVGINNRNLKTFETSLETTTKLLEQIPQSITVVTESGIRDKSDVSLMQKNQVNCFLVGETFMRSEIPGEALSDLFYS

SEQ ID NO: 175897 - protein, 295 aa, Unknown
  Bacterial polypetide isolated from the Sargasso Sea
MEIRRRPPNPKVRVAHLEYAVPHDDEEPRHILEKIVWEKDREIDAARDKVPLDDLKQQIAKLPPTKDFLGALEAAATKPAVIAEVKKASPSKGVIREDFDPVAIAKAYAAGGASCLSVLTDKTFFQGGFDVLVQVRQAVDLPLLCKEFVLSPYQLFQARAAGADAVLLIAAILSDQDLRYLNKAAAALGLTVLVEVHDATEMDRVLNIGGFPLIGINNRDLTSFETDLATTERLLVDFNDRLNQQGVLLVSESGLFSRADLDRVQAAGAGAVLVGEALMRQPDVEAGLVQLIQPG

SEQ ID NO: 175898 - protein, 261 aa, Unknown
  Bacterial polypetide isolated from the Sargasso Sea
MSDILDRIIAVKREEVAAAMRSAPLEALKLEASARDLRDFVGALRAKHAAGRAAVIAEIKKASPSKGVLREHFVPADIARSYAAHGAACLSVLTDEQFFQGSVRYLEEARAACTLPVLRKDFIVDAYQIIEARAMGADAILLIAAALDTPLMQDLEAYAHSLGLAVLVEVHDRNEMEQALTLKTPLLGINNRNLRTFETSIQTTLDMLDMIPADRIVVTESGILSRTDVDTMRAANVNTFLVGEAFMRADQPGEELARMFF

SEQ ID NO: 175899 - protein, 228 aa, Unknown
  Bacterial polypetide isolated from the Sargasso Sea
VLNDGVPDYSDISLTQNSRCCYPRTHIEKAVPENYAGEPNTVIFLTCDLTGVLPPVSILSKEAAAYHFLSGYTAKVGSTEIGSSSDIESTFSTCFGAPFFPRPAGIYADLLMKRVENFGSKVFLVNTGWTGGPYGVGKRFDIPTTRRIVNAVQNGELDDVETQMLNGLNLEIPLSIQGVDSNLLNPRETWEDKGAYDAAAADLIKLFQNNFERFDVSEEIISAGPSTQ

SEQ ID NO: 175900 - protein, 254 aa, Unknown
  Bacterial polypetide isolated from the Sargasso Sea
LSEEAEPEIYATTQMKQTVIENAILKSDGTLDLDDNSITENTRGAYPLEFIPNVTLSGKTNHPTNIIMLTADAFGVLPPISKLSPSQAMYHFLSGYTAKVAGTEMGLGKEPQATFSTCFGSPFMPRNPIEYGDLLKNKISEHNVNCWLVNTGWIGGVYGVGKRISIKDTRTLLNAALSGELADAEMRKDENFGFLVPLNVNNVDTKILDPKNSWEDPSAYDAQAKKLVSMFIDNFTQFENDVDENVKSSGPVSI

SEQ ID NO: 175901 - protein, 219 aa, Unknown
  Bacterial polypetide isolated from the Sargasso Sea
NSLTENTRGAYPLDYIPGVTVSGKTGHPKNIIMLTADAFGVLPPIAKLSADQAMYHFLSGYTAKVAGTEIGLSNEPQATFSTCFGAPFMPRNPIEYGNLLKKKISDHKVDCWLVNTGWSGGVYGVGKRISIKNTRALLNAALSGKLTNAEMRKDPNFGFSVPVKVDEISEQILDPKKTWQSESDYDAQAKKLVQMFISNFTKFESDVEENIKTSGPIAN

SEQ ID NO: 175902 - protein, 162 aa, Unknown
  Bacterial polypetide isolated from the Sargasso Sea
HFLSGYTAKVGSTEIGSSSDIESTFSTCFGAPFFPRPAGIYADLLMKRVENFGSKVFLVNTGWTGGPYGVGKRFDIPTTRRIVNAVQNGELDDVETQMLNGLNLEVPLSIQGVDSNLLNPRETWEDKDAYDAAAADLIKLFQSNFERFDVSEEIISAGPSDQ

SEQ ID NO: 175903 - protein, 308 aa, Unknown
  Bacterial polypetide isolated from the Sargasso Sea
MGGADRNHSLKVTIITEYAWHGLFARHLLVRPTSEEVDSFIADFTIINFPSLKMDPKYHGTNSETAIIVNLKEKVILISGTEYAGETKKSVFTLLNYLLPEKKVMPMHCSVNSGNNGDSAIFFGLSGTGKTTLSADPKRSLLGDDEHGWSDDGLFNFEGGCYAKLIRLSEEAEPEIYQTTQMKGTVIENAVMKDDGILDLNDNSLTENTRGAYPLDYIPGVIKSGKANHPKNIIMLTADAFGVLPPIAKLSPDQAMYHFLSGYTAKVAGTEIGLSSEPQATFSTCFGAPFMPRNPIEYGNLLKDKISK

SEQ ID NO: 175904 - protein, 297 aa, Unknown
  Bacterial polypetide isolated from the Sargasso Sea
NDLMGGADRNHSLNVSIITEYAWHGLFARHLLVRPTADEIKNFVADYTIINFPSLKLDPEFHGTNSETAIIVNLKEKVILIAGTEYAGETKKSVFTLLNFLLPEKKVMPMHCSVNSGEKGDSAIFFGLSGTGKTTLSADPNRSLLGDDEHGWSDEGLFNFEGGCYAKLIRLSKDAEPEIYKTTQMKGTVIENAVMNNDGLLDLDDNSLTENTRGAYPLDYIPGVIKSGKAPHPNNIIMLTADAFGILPPIAKLTPEQAMYHFLSGYTAKVAGTEIGLSNEPQATFSTCLELLLCPEI

SEQ ID NO: 175905 - protein, 316 aa, Unknown
  Bacterial polypetide isolated from the Sargasso Sea
NLLIEVKEDEKSSFNPEFVIIDIPSFKADTSRHGCSSETLIAVNFEKKLVIIVGTSYAGEIKKSVFSMLNYLLPPKNVMPMHCSVNVGEENDPAIFFGLSGTGKTTLSADPDRILIGDDEHGWSSNGVFNFEGGCYAKMIRLSEKAEPEIYQTTKLRGTILENVVIDKDSGEIDLDDSSLAENTRGAYPLSFIPNASETGRTDIPKNIILLTCDAFGVLPPIAKLSSSQTMYHFLSGYTAKVAGTEKGVTEPEATFSACFGAPFMPRHPSEYGKLLQKLIAKHSVKCWLVNTGWTGGPYGKGERMPIDATRKLLSS

SEQ ID NO: 175906 - protein, 309 aa, Unknown
  Bacterial polypetide isolated from the Sargasso Sea
ILSAANYECIPEEDGTNSESCIVINFSERKVLIAGMKYAGELKKSMFSVQNFLLTDEDVLPMHCSANINKNSNVTLFFGLSGTGKTTLSADLKCSLIGDDEHGWSKGAVFNFEGGCYAKTVNLSKENEPVIYSAIKHGSVIENVYIDDNNEPDYSNISISENGRCCYPRSHIENAVKENAAGEPKTIIFLTCDLTGVMPPVSILSRESAAYHFLSGYTAKLGSTERGSGAPIQSTFSTCFGAPFFPRPASVYADLLMKRVEEFDSKVFLVNTGWTGGPYGVGSRFDIPITRRIVNAIQDGELNNVETLK

SEQ ID NO: 175907 - protein, 261 aa, Unknown
  Bacterial polypetide isolated from the Sargasso Sea
KKGMFSMMNYFLPLRGIASMHCSANVGQDGDVAIFFGLSGTGKTTLSTDPKRQLIGDDEHGWDDDGVFNFEGGCYAKTIKLSKEAEPDIYNAIRRDALLENVTVAADGTIDFDDGSKTENTRVSYPIYHIENIVKPVSKAGHANKVIFLTADAFGVLPPVSKLTKEQTKYHFLSGFTAKLAGTERGITEPTPTFSSCFGAAFLSLHPTKYGQELVKRMEAAGAEAYLVNTGWNGTGKRISIKDTRAIIDAILDGSIEKAET

SEQ ID NO: 175908 - protein, 302 aa, Unknown
  Bacterial polypetide isolated from the Sargasso Sea
PSEDGTNSDSCVIINFAKRKVILAGMKYAGEMKKSMFSVQNFLLPEKGVLPMHCSANVNSNGNVALFFGLSGTGKTTLSADPKCSLIGDDEHGWSKGSVFNFEGGCYAKTINLTEENEPVIYRAIKHGSVIENVFINEDGTPDYSNTSLSENGRCCYPRSHIKNAVDSNAAGEPKTVIFLTCDLTGLIPPVSVLSKEAAAYHFLSGYTAKVGSTEMGSGSDIESTFSTCFGAPFFPRPANEYADLLMERIEGFNSKVFLVNTGWTGGPYGVGTRFKIPTTRRIVNAIQDGELDNVETNTLPG

SEQ ID NO: 175909 - protein, 235 aa, Unknown
  Bacterial polypetide isolated from the Sargasso Sea
IVENVMIDPETREPDYTDVSLTENSRCAYPLEHVEKRVIENRAGEPSHIIFLTCDMTGVLPPVSVLSREAAAYHFLSGYTALVGSTEMGSSSKLKSTFSTCFGAPFFPRPAGVYAELLMKRIDEFGSKVFLVNTGWTGGPYGEGKRFSIPTTRAIIAAIQNGDLDDVETEHLDDLNLDVPRHIPGVETELLNPRNTWTSPEYYDGKAQELIGQFVENFKKFDVADTIVEAGPKLA

SEQ ID NO: 175910 - protein, 314 aa, Unknown
  Bacterial polypetide isolated from the Sargasso Sea
ALSGAKQHFSPDFTVIHVPGLQAAGATDGVNSETFILVNFDRKMVLIGGSHYAGEIKKSIFGILNYLLPDRDVMPMHCSANVGRNGDSAIFFGLSGTGKTTLSADKSRALIGDDEHGWSQNGIFNFEGGCYAKVINLSEKAEPEIYATTHRFGTVLENVVFEPESRNLDLWDKSLTENTRACYPLEFIENASSTGIASHPKNIVLLAADAFGVLPPISKLSPEQAMYHFLSGYTAKVAGTEKGMGSQPEATFSTCFGGPFMPRRPTVYGEMLRERLSKHGGSCWLVNTGWSGGSVADGAERMKISYTRAMLRAA

SEQ ID NO: 175911 - protein, 282 aa, Unknown
  Bacterial polypetide isolated from the Sargasso Sea
NKKIDESIFDELYESVTDYYNSDSSKTYLFDGFAGFDPAYSINVRIIAKKAWQAHFVNNMFIRPEMDQLKDFIPDFTIINASNVQNKSFEKHGMNSETFIMFHLGRKVAIIGGTEYAGEMKKGIFSLLHYVLPQKGVLSMHCSANVDEDGLNPAIFFGLSGTGKTTLSTDPKRPLIGDDEHGWSDDGVFNFEGGCYAKTINLNPEDEPDIYNAIRHGALLENVVYDPHTRIVDYNDNSKTENTRVSYPLNFIENSVFAKGKPALSAHPKTIIFLTCDAYGVI

SEQ ID NO: 175912 - protein, 318 aa, Unknown
  Bacterial polypetide isolated from the Sargasso Sea
GNEKRYFSVLHYILPQKGVLSMHCSANVDNNGENSALFFGLSGTGKTTLSTDPQRPLVGDDEHGWSENGVFNFEGGCYAKTINLDPNQEPDIYNAIKPGALLENVVFDENSKEVDYSDGSKTENTRVSYPIDYIKNSVFAQGRPSLSGHPEKIIFLTCDAYGVLPPVAKLDPNQAMYHFISGYTAKVAGTERGITEPTATFSPCFGGPFLTLHPYEYARLLEKKMSEFKVPVYLVNTGWVGANANSGTKRISLPLTRKIIHAILNGSIEKVNFKTDPYFGFSMPESLEDIDPLILNPQSSWSSEKEYTKAAKSLVKNQ

SEQ ID NO: 175913 - protein, 261 aa, Unknown
  Bacterial polypetide isolated from the Sargasso Sea
CYAKTIDLSSEKEPQIYNAIKYGAILENIGFYENSSTPDYEDATITENTRVSYPLHHIDNIMIPSSASGPKNIFFLTADAFGVLPPISKLTTDQAMYHFMSGYTAKVAGTEVGITEPTTTFSAGFGAAFLPLHPVAYAELLGEKLRGTDINVWLINTGWTGGSYGVGSRMKLSYTRAMITAALNGELDNATFKKLPIFELNYPTSCPNVPSELLNPRDTWSDKAKYDDTATDLASQFVKNFEQYVSEASKEVLAAAPKVLV

SEQ ID NO: 175914 - protein, 270 aa, Unknown
  Bacterial polypetide isolated from the Sargasso Sea
MLTPYGIHCQTNFRNASPAILYEEALLYETDSAVSDTGALIVSSSKKTGRSPKDKRIVTTPEFIDDIWWGDVNIGIDEDTFLIVRERAIDYLNICDRLYITDGFAGWDPKYRIKVRVVASRPYHALFMHNMLIRPDDAQLEEFGKPDYVIFNAGKFPANPHTKYMTSRTSVDLSFARGEFVILGTEYAGEMKKGVFTIMNYIMPKKGILSMHSSANVGKKGDVSLFFGLSGTGKTTLSADPNRSLIGDDEHCWTDDGIFNIEGGMLCQMH

SEQ ID NO: 175915 - protein, 308 aa, Unknown
  Bacterial polypetide isolated from the Sargasso Sea
MVGSHPDHYLPIEVITETAWQSLFSRLIFIDPDEFNPKAKSNWKILSAANFECVPETDGTNSDGCVIINFKEQKVLIAGMKYAGEMKKSMFSVQNFLLPAKDILPMHCSSNINDKNSVALFFGLSGTGKTTLSADPACTLIGDDEHGWSSGSVFNFEGGCYAKCIDLSEENEPVIWKAIKEGSILENVVLNDGVPDYSDISLTQNSRCCYPRTHIEKAVPENYAGEPKTVIFLTCDLTGVLPPVSILSKEAAAYHFLSGYTAKVGSTEIGSSSDIESTFSTCFGAPFFPRPAGIYADLLMKRVEEFRL

SEQ ID NO: 175916 - protein, 209 aa, Unknown
  Bacterial polypetide isolated from the Sargasso Sea
YPLDFIPGVTLEGKTSHPRNIIMLTADAFGVLPPIAKLTPAQAMYHFLSGYTAKVAGTEMGLSSEPTATFSTCFGAPFMPRNPIEYGNLLKRKISEFNVTCWLVNTGWSGGVYGVGKRISIKDTRQLLNEALIGNLSNIEMRKDDNFGFEIPKSVNGIDSNILNPRNCWSDPTAYDLQAIKLVNMFIENFKKFETDVDENIKSSGPVIN

SEQ ID NO: 175917 - protein, 248 aa, Unknown
  Bacterial polypetide isolated from the Sargasso Sea
MRKTTLSTDPKRQLIGDDEHGWDNEGVFNFEGGCYAKTIDLDKDKEPDIFKAVRRDALLENVTVNENGIVDYSDTSVTQNTRVSYPIHHIDNIVKPISKGGHASKIIFLTADAFGVLPPISKLSYEQAEYHFLSGFTAKLAGTERGVTEPQPAFSACYGAAFLMLHPTRYSNVLSKKMKESNSQVFLVNTGWNGKGNRISLKDTRLIIDAILNDELKDIETEIIPFFNLSIPKNLKNISSNVIDPRKS

SEQ ID NO: 175918 - protein, 166 aa, Unknown
  Bacterial polypetide isolated from the Sargasso Sea
AAYHFLSGYTAKLGSTERGVGAPIQSTFSTCFGAPFFPRPANVYADLLIKRIEEFGSKVFLVNTGWTGGPYGVGSRFDIPVTRRIVNAIQDGELHEVETEKVPGLNLEIPLLVRGVDSKLLNPINNWNDKDEYQKQLKDLVSQFQENFKKYNVQPEIVSAGPGFDD

SEQ ID NO: 175919 - protein, 277 aa, Unknown
  Bacterial polypetide isolated from the Sargasso Sea
AFFSVLNYVLPVRGVLPMHCAANRGEDGDVALFFGLSGTGKTTLSADPKRQLIGDDEHGWFAEGVFNFEGGCYAKCINLTEKSEPMIWQAAHQSTAILENVVLKEGGIPDFHDTSITSNTRAAYPRDVISNIVPENMGSTPKSVVFLTCDLYGVLPPVSVLSHDQAIFWFLNGYTALVGSTEVGSSREINPTFSTCFGAAFFPRNPTVYGDLLLQKLKSSEAQVYLVNTGWHSGSYACQGQRFELSFTRKIIDFIHDGTILSSEKENFSVFDLQIPC

SEQ ID NO: 175920 - protein, 243 aa, Unknown
  Bacterial polypetide isolated from the Sargasso Sea
NGCVMINFAKRKALLAGMHYAGEMKKAMFSVQNFLLPEKDVLPMHCSANVGEDGETCLFFGLSGTGKTTLSADPHRFLIGDDEHGWGPGTVFNIEGGCYAKCIDLTRKNEPIIWDAIRFGAIVENVTIDPETREPDYTDVSLTENSRCAYPLEHVEKRVIENRAGEPSHIVFLTCDMTGVLPPVSILSREGAAYHFLSGYTALVGSTEMGSSSKLKSTFSTCFGAPFFPRPAGVYAELLMKRM

SEQ ID NO: 175921 - protein, 252 aa, Unknown
  Bacterial polypetide isolated from the Sargasso Sea
MKIYGNDLGLDSLGLNNLKNVHRNLSVSELVDDIVNNNEGIIGLRGAAMVDTGIYTGRSPQDKYIVDEPSSNEKLWWGPVNKKISEDIFDMLYEKITDYYNSTDHNKTYVFDGFAGADPNYSLNVRIIAKKAWQAHFVNNMFIRPKNGELDEFKPGFTIINASDVSNERFDEFGMNSETFIIFHMEKRIAIIGGTEYGGEMKKGIFSVLHYLLPQKGVLSMHCSANVQEDQKNPAIFFGLSGTGKTTLSTDP

SEQ ID NO: 175922 - protein, 242 aa, Unknown
  Bacterial polypetide isolated from the Sargasso Sea
ILYKRVIEYYNKSDSSKTYVFDGFAGADPNYALSVRILAKKAWQAHFVHNMFIRPKLNDLDSFKPDFTIINASDLKNVDYKKFGMNSETFIIFHLTKKIAIIGGTEYGGEMKKGIFSVLHYILPQKGVLSMHCSANVYKDGENPAIFFGLSGTGKTTLSTDSDRPLVGDDEHGWSNDGIFNFEGGCYAKVINLNPEEEPDIYNAIRDGALLENVVYDKKSKKIDFSDGSKTENTRVSYPLNH

SEQ ID NO: 175923 - protein, 301 aa, Unknown
  Bacterial polypetide isolated from the Sargasso Sea
EKKIAIIGGTEYAGEMKKGIFSMMHYYLPMKNVLSMHCSANVSKTQDQSTVFFGLSGTGKTTLSTNANRPLIGDDEHGWSDNGIFNFEGGCYAKAINLDKDKEPEIYNAIKHGTILENVVYDFETKEVDFDDSTKSENSRICYPINFVENSLGSKGLKSSGPHPNSIIFLTCDAYGIMPPLAKMTKKQAMYHFISGYTAKMAGTETGVTEPIAAFSPCYGGPFLTLHPLRYAELLEQKLNDYNSSVFLVNTGWSGSSATSGSSRIDLKKTKHIINLITDGNLDFNKSVFDKFFNLEIPLDV

SEQ ID NO: 175924 - protein, 212 aa, Unknown
  Bacterial polypetide isolated from the Sargasso Sea
SSYPIDFLENISESGMGGHPDNIVMLTADAFGVLPPISKMTAEQAMYHFLSGYTAKVAGTERGMTSGAEATFSTCFGAPFLPRHPTVYAKILGERIAKHKSTCWLVNTGWSGGAYGVGERMKIAHTRAMVRAALDGKLATTGVAEDPNFGLLVPEGCPDVPSDVLAPRNTWSDKGEYDNTAQHLAKKFEENFKQFESHVDDEVNQAGIHAAA

SEQ ID NO: 175925 - protein, 308 aa, Unknown
  Bacterial polypetide isolated from the Sargasso Sea
ILQREKVIIAGMKYAGEMKKAMFSVQNFLLPEKDVLPMHCSANVDANGKVALFFGLSGTGKTTLSADPSCHLIGDDEHGWSEGSVFNFEGGCYAKCIDLSEENEPVIWKAIKKGSIIENVILDDQLVPDYADTSLTQNSRCCYPRSHVEKAVPTNNGPEPEVVIFLTCDLTGVLPPVSILSKEAAAYHFLSGYTAKVGSTEVGSTSAIESTFSTCFGAPFFPRPAGVYADLLIKRIESFNSQVYLVNTGWTGGPHGVGERFSIPTTRRIVNAIQAGELKTTEKTMLDGLNLEIPNHMKGLIRTYSTLD

SEQ ID NO: 175926 - protein, 299 aa, Unknown
  Bacterial polypetide isolated from the Sargasso Sea
FGLSGTGKTTLSADPKRSLLGDDEHGWSDDGLFNFEGGCYAKLIRLSEEAEPEIYQTTQMKGTVIENVVMKENGLLDLDDNSLTENTRGAYPLDYIPGVIKSGKANHPKNIIMLTADAFGVLPPIAKLSPDQAMYHFLSGYTAKVAGTEIGLSNEPQATFSTCFGAPFMPRNPIEYGNLLKEKISKHNVDCWLVNTGWSGGVYGVGKRISIKNTRRLLDAALSGELSNVEMRKDDNFGFFVPLEVNGINGSVLDPRSTWADSSEYDLQAKKLVNMFIDNFVKFESDVEEKIINSGTSQI

SEQ ID NO: 175927 - protein, 323 aa, Unknown
  Bacterial polypetide isolated from the Sargasso Sea
DLATDTLSNKPLYIVDGFCGANKDTRLSVRLICEVAWQAHFFKNMFIRPSQDELENFKPDWTILNACKATCANYEELGLRSETFVTFNITERMTLIAGTWYGGEMKKGIFSMMNYFLPLKGIGALHCSANQGKNGDTALFFGLSGTGKTTLSADPKRKLIGDDEHGWDDEGIFNFEGGCYAKTIDLTEEKEPDIYRAIRKNALLENVVMNNDNIIDFEDGSKTENTRVSYPIDHIDNIVKPISSGTHPSKIIFLTCDAYGVLPPVSKLNNDQAMYQYLSGYTAKVAGTELGVTEPTATFSSCFGKRFLTVHPTQYAHTLGEKM

SEQ ID NO: 175928 - protein, 285 aa, Unknown
  Bacterial polypetide isolated from the Sargasso Sea
KGIFSIMHYILPLKGVLSMHCSANVDYDGTNSALFFGLSGTGKTTLSTDSKRPLIGDDEHGWSDNGIFNFEGGCYAKAINLDPDTEPDIYNAIRPGALLENVVYDEHTKVVDYFDGSKTENTRVSYPINFIENSVFAQGHPSVADHPEKIIFLTCDAYGILPPVAKLDPEQAMYHFISGYTAKVAGTERGITEPTATFSPCFGGPFLTLHPLRYAEILREKMNEFDVPAYLVNTGWIGASAQSGAKRISLPLTRKIIHKILDGSIESVSFDEDVYFGFLIPKSIR

SEQ ID NO: 175929 - protein, 233 aa, Unknown
  Bacterial polypetide isolated from the Sargasso Sea
MLNYILTDVGIMPMHCSANISKEKPENSAIFFGLSGTGKTTLSSDPDRILIGDDEHGWSDDGIFNFEGGCYAKTINLSPESEPDIYRTTSLFSTVIENMVYDERTKKLDFENDSLTANMRAAYPMHYIPNSSETGLAAKPEHVILLTCDAFGVMPPIARLTPAQAMYHFLSGFTSKAPGTERGVTEPEPTFSTCFGAPFLPRPPQVYGNLFKRKISENNSSCWLVNTGWTGGG

SEQ ID NO: 175930 - protein, 260 aa, Unknown
  Bacterial polypetide isolated from the Sargasso Sea
MHGLKNLGSIHWNLSAPALYQEAIRRKEGVVTAGGALTVATGIHTGRSPKDKFIVDTPSIHDHINWGNVNKPISEGNFESLFSKVTSYLQGRDVFVQDCFAGADPEYRLNVRVITESAWPNLFAQNMFIRPSVEQKLCFSPDFTVIHVPGLQAAGATDGVNSETFILVNFDRKMVLIGGSHYAGEIKKSIFGILNYLLPDRDVMPMHCSANVGSNGDSAIFFGLSGTGKTTLSADKSRALIGDDEHGWSQNGIFNFEGGC

SEQ ID NO: 175931 - protein, 257 aa, Unknown
  Bacterial polypetide isolated from the Sargasso Sea
MFSMMNYLLPRKGIASMHCSANCDAKGDVALFFGLSGTGKTTLSASADRSLIGDDEHGWDDGGIFNFEGGCYAKTSDLNEASEPEIYGAIRRDALLENVIVDDNGKIDFSDTSLTLNTRVSYPIYHIDNIVRPVSKAGHAKHVLFLTADAFGVLPPVSILDDAKTQYHFLSGFTAKMAGMERGMTEHQPTFSACFGAAFLSLHPTTYAEVLSKRMRDAGAKAYLINTGWNGKGARIPLKTTRALINAIFSGEIDKSE

SEQ ID NO: 175932 - protein, 307 aa, Unknown
  Bacterial polypetide isolated from the Sargasso Sea
RNLAILSAPEFVCVSEVDKTNSDGVVILDFTAKKVLLAGMPYAGEMKKSMFAVQNFLLPASEVLPMHCASNVSHDGEVCLFFGLSGTGKTTLSADPHRNLIGDDEHGWGPGTVFNFEGGCYAKCIDLTKKNEPVIWDAIKKGSVMENVVIDAQTKVPDYSDSSLTENTRVVYPREHIEKRADENAAGEPNAVIFLTCDLSGVIPPVSILSKEAAAYHFLSGYTAAIGSTEVGSTEAFKTTFSTCYGAPFFPRAAGVYADLLMKRIEEYGSNVYLVNTGWTGGPYGTGKRFDIPVTRSIISAIQSGEL

SEQ ID NO: 175933 - protein, 316 aa, Unknown
  Bacterial polypetide isolated from the Sargasso Sea
RSPKDKHIVRHEDSEKDVWWGSTNHPIEEHTFLLNRQRAIDYLNTRDQIYVFDGFAGWDPNHQIKVRVICARAYHALFMHNMLIRPTREELENFGDPDCVIYNAGQFPANSLTAQMTSRTSVDISLERKEQVILGTEYAGEMKKGVFTLMHWLLPPKGVLSMHCAANEGKSGDVSLFFGLSGTGKTTLSADPTRRLLGDDEHGWSDNGVFNIEGGCYAKCIGLALDKEPDIYRAIRFGTVLENVVYDKTTREVNYNSNAITENTRAAYPLKFIKNTRMPSLAGHPNHVIFLTCDASGVLPPVSRLTPEQAMYQFLS

SEQ ID NO: 175934 - protein, 227 aa, Unknown
  Bacterial polypetide isolated from the Sargasso Sea
VINDQGVPDYSDSIYTENTRVCYPRDFIDGAVPANEGDEPDNIIFLTCDLSGVLPPVSILNENAAAYHFLSGYTAKVGSTEIGASKSMDFTFSTCFGAPFFPRPARVYADLLIKRAKRNETKVFLVNTGWTGGGYGIGKRFPIPVTRAIINGIQDNKINFDNLTYLDKLNLYIPNELDGVDSSFLNPKTSWSSAEEYDLECNKLCERFKQNFKKFNVSQEIIDAGPK

SEQ ID NO: 175935 - protein, 287 aa, Unknown
  Bacterial polypetide isolated from the Sargasso Sea
EKTVIIGGTEYAGEIKKSIFSIMNHLLPARGHLPMHCSSNTTGDNTAVFFGLSGTGKTTLSADPNRALVGDDEHGWSAKGVFNFEGGCYAKLIDLSEEDEPAIFATTQMPGSILENIIVNDDGIPDFTDDTLTANTRGSYPIEFIENRTHDSMAGHPQNVVFLTCDAFGVLPPISRLNPAQAAYHFISGYTAKVAGTEVGVKEPQATFSACFGAPFMPRHPSVYADLLAEKMAQHGAKCWLLNTGWVSGGYGKSKRIRIKWTRALLNAALDGSLNDVEFVIDPKVWF

SEQ ID NO: 175936 - protein, 290 aa, Unknown
  Bacterial polypetide isolated from the Sargasso Sea
VDDIISNNEGVLASTGAAIVDTGKYTGRSPKDKYIVVEASSSENIWWGNVNQKISEEIFDDLYSEVLEYYNSSQSKTYLFDGFAGADSDYALSVRFLVKKAWQAHFVHNMFIRPQNGQLKNFNPDFTIINASDVKNLNYEKHGMNSETFIIFHLGKKIAIIGGTEYGGEMKKGIFSIMHYILPLKGVLSMHCSANVDYGGDNSALFFGLSGTGKTTLSTDSKRPLIGDDEHGWSDNGIFNFEGGCYAKAINLDPNAEPDIYNAIRPGALLENVVYDEDTKVVDYYDGSKT

SEQ ID NO: 175937 - protein, 293 aa, Unknown
  Bacterial polypetide isolated from the Sargasso Sea
ADLVEHAIRRNEGVLADNGALVVKTGHRTGRSPTDRFIVKEASTEQDIQWGNVNRPFDPVKFSALWARVSDFIATKEHFVSHLEVGADPEHYIPMTVTTETAWQHIFAKNLFITSAHWNKAGKETWQILNVPSFECDPERDGTNSDGTVMINFAERKVLLAGMRYAGEMKKAMFSVQNFLLPAKGVLPMHCSANVGEAGDTTLFFGLSGTGKTTLSADPKRFLIGDDEHGWAPNSVFNIEGGCYAKCIDLSKKNEPVIWDAIRFGTILENVVLDANRTPDYKDASLTQNSRAA

SEQ ID NO: 175938 - protein, 285 aa, Unknown
  Bacterial polypetide isolated from the Sargasso Sea
MNSKSQPFKPQTLTTEQLIDAAVENKEGVIASNGAFSTTTGDRSSRSPNDRFIVKEAHTENLIEWGEINKPFEREKFNTLWTKVESYLAEKDSYSSEVHVGAHPEHYLPVNVTTETAWHSLFARLIFICPEKFNPLNKIKWEILSAANFECIPKEDGTNSESCIIINFSERKVLIAGMKYAGELKKSMFSVQNFLLPDMDVLPMHCSANINKNNRVTLFFGLSGTGKTTLSADTKCSLIGDDEHGWSEGAVFNFEGGCYAKTVNLSVENEPVIYKAIKHGSVIEN

SEQ ID NO: 175939 - protein, 190 aa, Unknown
  Bacterial polypetide isolated from the Sargasso Sea
IEPDNIIFLTCDLSGVLPPVSILNKTSAAYHFLSGYTAKVGSTEVGSTKSMDFTFSTCFGAPFFPRPAGVYADLLIKRIEKMDTKVYLVNTGWTGGGYGVGKRFPIPVTRAIISAIQDNAIDHTDTYHMEPLNLIIPNKISGVDEKYLNPKEAWEDKDMYDSEAEKLAQRFKDNIKKFKVSEEILASGPK

SEQ ID NO: 175940 - protein, 249 aa, Unknown
  Bacterial polypetide isolated from the Sargasso Sea
EKFKIEWTVISAPNFHANPKEDGIDNENFSIINFSKKIIIIGGTGYTGEIKKGIFSVLNFTLPVQKNVLPMHCSANSGENGDTSIFFGLSGTGKTTLSTDSSRKLIGDDEHGWDQDDNIFNFEGGCYAKVLNLSKEKEPEIFGAISRGALLENVILDNNGEVDFKNKTITQNSRVSYPIYFINNIKQPSIGNNPKNIFFLTADAFGVLPPISKLTPSQSAYHFISGYTSKLAGTEDGVDEPVPSFSACF

SEQ ID NO: 175941 - protein, 289 aa, Unknown
  Bacterial polypetide isolated from the Sargasso Sea
DIWWGDVNKPISVEHFNQLHSKMLLHLNGCEVFIQNCYAGADPANRLKVRVITENAWHNLFARNMFIQPPADELHDFEPDFTVLQSPSVTADPSADGTTSPTFIVVNLTKRIILVGGSAYAGEIKKSIFSIMNYLMPPREILPMHCSANIGPEGESAIFFGLSGTGKTTLSADSSRVLIGDDEHGWGAKGLFNFEGGCYAKTINLTQEAEPEIYDLCHTFGSIIENVMMDPDTRELDFFDSTYSENGRVSYDISKVLNASATGQGGHPKNIIMLTCDAFGVLPPISQLT

SEQ ID NO: 175942 - protein, 303 aa, Unknown
  Bacterial polypetide isolated from the Sargasso Sea
SIMNYLMPPRDILPMHCSANIGPEGESAIFFGLSGTGKTTLSADSSRVLIGDDEHGWGANGLFNFEGGCYAKTINLTHEAEPEIYDLCHTFGSIIENVMMDSNTRELDFFDSTYSENGRVSYDISKVTNASVTGQGGHPKNIIMLTCDAFGVLPPISQLTPDQAMYHFLSGYTAKVAGTERGLKEPAATFSTCFGAPFMPRHPTIYAKLLGDKMAEHDAKCWLVNTGWSGGGYGVGARMKIAYTRAMVNAALNGKLGEVEVSPDPNFGVLVPQACPDVPGEVLNPRNTWSDSSAYDSQARNLT

SEQ ID NO: 175943 - protein, 291 aa, Unknown
  Bacterial polypetide isolated from the Sargasso Sea
QLIGGTWYGGEMKKGMFAVMNYLLPQKGIASMHCSANKGIKDDTVALFFGLSGTGKTTLSTDPKRSLIGDDEHGWDDDGIFNFEGGCYAKTVNLDPEKEPDIFKAIKKDALLENVIVNENGKVDYDDISLTENTRVSYPIYHIDNIVQPISKGGHANKVIFLTADAFGVLPAVSILSNEEAQYHFLSGFTAKLAGTERGVDKPTPTFSACFGAAFLTLHPTKYAEVLSRRMKMNSSKAYLVNTGWNGRGERISLKNTRTIIDNILNNKIDNVLTTKIPIFNLEVPTELNEI

SEQ ID NO: 175944 - protein, 268 aa, Unknown
  Bacterial polypetide isolated from the Sargasso Sea
SLWSKVESYLDDKERFLTKVHVGSHPDHYLPIEVITETAWQSFFSRLIFIDPNEFNPKGKSNWKILSAANFECVPEIDGTNSDGCVIINFKEEKVLIAGMKYAGEMKKSMFSVQNFLLPAKDILPMHCSSNINDKNSVALFFGLSGTGKTTLSADPACTLIGDDEHGWSPGSVFNFEGGCYAKCIDLSEENEPVIWKAIKEGSILENVVLNDGVPDYSDVSLTQNSRCCYPRTHIEKAVPENYAGEPKTVIFLTCDLTGVLPPVSILS

SEQ ID NO: 175945 - protein, 267 aa, Unknown
  Bacterial polypetide isolated from the Sargasso Sea
NFEGGCYAKTINLTHEAEPEIYDLCHTFGSIIENVMMDPDTRELDFFDSTYSENGRVSYDIAKVPNASATGQGGHPKNIVMLTCDAFGVLPPISQLTPDQAMYHFLSGYTAKVAGTERGLKEPAATFSTCFGAPFMPRHPTVYAKLLGDKMADHDAKCWLVNTGWSGGGYGVGERMKIAYTRTMVNAALNGSLGEVELAPDSNFGVLVPQTCPDVPVEVLNPRNTWSDVGAYDSQARNLTQRFEDNFKQFEDHVDDSVKAAAIRAAA

SEQ ID NO: 175946 - protein, 202 aa, Unknown
  Bacterial polypetide isolated from the Sargasso Sea
KKKQSLENYAGEPKTVIFLTCDLTGVLPPVSILSKEAAAYHFLSGYTAKVGSTEIGSSSDIESTFSTCFGAPFFPRPAGVYADLLMKRVENFGSKVFLVNTGWTGGPYGVGKRFDIPTTRRIVNAVQNGELDDVETQMLNGLNLEVPLSIEGIDSNLLNPRETWEDKGAYDAAATDLIKLFKNNFERFDVSEEIISAGPSDQ

SEQ ID NO: 175947 - protein, 262 aa, Unknown
  Bacterial polypetide isolated from the Sargasso Sea
MQNKGLLDLDNYYRNLPVEDLVHHIVQNNEGRVGLRGAAMVDTGIYTGRSPNDKYFVDESSSNDKIWWGSVNKKIDEEIFDDLYNKVVDYYNNGVSNSYIFDGFAGADKTYRINVRIIAKKAWQAHFAHNMFIRPDEKELKVFEPDFTIINASDIQNEDFQKHGLNSKTFVLFHIGRRIAIIGGTEYGGEMKKGIFSVLHYLLPQQGVLSMHCSANSDKNGDNSAIFFGLSGTGKTTLSTDPDRTLIGDDEHGWSDDGIFNF

SEQ ID NO: 175948 - protein, 246 aa, Unknown
  Bacterial polypetide isolated from the Sargasso Sea
GGTEYAGEIKKSIFSIMNHLLPARGHLPMHCSSNTTGDNTAVFFGLSGTGKTTLSADPNRALVGDDEHGWSAKGVFNFEGGCYAKLIDLSEVDEPAIFATTQMPGSILENIIVDEDGIPDFTDDSITANTRGSYPIEFIENRTHDSMAGHPQNVVFLTCDAFGVLPPISRLNPAQAAYHFISGYTAKVAGTEVGVKEPQATFSACFGAPFMPRHPSVYADLLAEKMAKHGAKCWLLNTGWVSGGYG

SEQ ID NO: 175949 - protein, 208 aa, Unknown
  Bacterial polypetide isolated from the Sargasso Sea
MNNKLQKELSKVGIKNISEIIHNPSYEFLYAEENKEKLEGFEKVQNTQNGAVNVMTGIYTGRSPKDKYILKDETTEDNLWWTSDFAKNDNKPINKNVWDHLYKIVSKQLSNKKLYVIDAFCGANKDTCLNVRFVVEVAWQAHFVKNMFIRPSEEELKTFKPDFHVLNGSKSTNKNFEEQGLNSETFIAFNLTDKIQIIGGSWYGGEMK

SEQ ID NO: 175950 - protein, 274 aa, Unknown
  Bacterial polypetide isolated from the Sargasso Sea
RRHHLILGLSGTGKTTLSADPKRFLIGDDEHGWAPNSVFNIEGGCYAKCIDLSKKNEPVIWDAIRFGTILENVVLDANRTPDYKDASLTQNSRAAYPLAHVEKRVLENRAGEPKAVVFLTCDVSGVLPPVSILSEEAAAYHFLSGYTAKVGSTEIGSTSAIESTFSTCFGAPFFPRPAGVYAELLIKRVREFGSKVYLVNTGWTGGPHGIGKRFDIPTTRGIIDAIVSGELATAETVHLAELNLNVPLKVTGVDSNLLNPRDTWADKAAYDQYA

SEQ ID NO: 175951 - protein, 259 aa, Unknown
  Bacterial polypetide isolated from the Sargasso Sea
MVFLPAAHQKIIYIVRDDTTRDTVWWSDQGKNDNKAITPDVWADLKSLVTKQLSGKRLFVVDTYCGANADTRLAVRFITEVAWQAHFVKNMFIRPTDAELKTYQPDFIVMNGAKCTNPDWQRHGLNSENFVAFNLTERIQLIGGTWYGGEMKKGMFSMMNYFLPLQGVASMHCSANVGKDGDVAVFFGLSGTGKTTLSTDPKRQLIGDDEHGWDDDGVFNFEGGCYAKTINLSKENEPDIYNAIRRDALLENVTVLADG

SEQ ID NO: 175952 - protein, 287 aa, Unknown
  Bacterial polypetide isolated from the Sargasso Sea
FEHLYIEENSSKLEGFEKVQKTEFGAVNVMTGIYTGRSPKDKYILKDETTKNNLWWTSKFSKNDNKPIDKETWDSLYGIVSNQLSNKKLYVVDAFCGANKDTCLSVRFVMEVAWQAHFVKNMFIRPTDEELKNFVPDFHVLNGSKSINKNFEKQGLNSETFIAFNLTDNIQIIGGSWYGGEMKKGMFSVMNYLLPQKNIASMHCSANKGDDGSVALFFGLSGTGKTTLSTDPKRQLIGDDEHGWDQEGVFNFEGGCYAKTVDLDKEKEPDIYKAIRRDALLENVSVN

SEQ ID NO: 175953 - protein, 316 aa, Unknown
  Bacterial polypetide isolated from the Sargasso Sea
STDHTKTYVFDGFAGADSNYSLNVRIIAKKAWQAHFVNNMFIRPKNGELDNFEPGFTIINASDVSNERFDEFGMNSETFIIFHLKKRIAIIGGTEYGGEMKKGIFSVLHYLLPQKGVLSMHCSANVQEDQKNPAIFFGLSGTGKTTLSTDPIRPLIGDDEHGWSDDGIFNFEGGCYAKVINLNPEEEPDIFNAIREGALLENVVYNENTLEIDFTDGSKTENTRVSYPLDHIDNSIAGKGMPSMASHPEKIIFLTCDAYGVLPPVAKLNSEQAMYHFISGYTAKVAGTERGITEPTATFSPCFGGPFLTLHPLRYA

SEQ ID NO: 175954 - protein, 228 aa, Unknown
  Bacterial polypetide isolated from the Sargasso Sea
NVITDDNGVVDYSDGSITENTRVSYPINYIDNIEPSETGGHPKHVIFLTCDAFGVLPPVAKLTPEMAMYHFLSGYTAKVAGTERGITEPVATFSTCFGAPFMPQFPTTYAELLGKKLKKHGAQAWLVNTGWSGGSYGIGNRIDLPVTRRMLTAILNGELENSKFVPDSNFKILVPEDVPGVDSEILNPRNTWKDKEAYDTKAKELIELFKNNFVKYESFGDYSKAGPD

SEQ ID NO: 175955 - protein, 281 aa, Unknown
  Bacterial polypetide isolated from the Sargasso Sea
IAKKAWQAHFVNNMFIRPKNGELDEFIPGFTIINASDVSNERFDEFGMNSETFIIFHMEKRIAIIGGTEYGGEMKKGIFSVLHYLLPQKGVLSMHCSANVQEDQKNPAIFFGLSGTGKTTLSTDPIRPLIGDDEHGWSNDGIFNFEGGCYAKVINLNPDEEPDIYNAIRKGALLENVVYDEETLEIDFTDGSKTENTRVSYPLDHIDNSISGKGMASMASHPEKIIFLTCDAYGILPPVAKLTSEQAMYHFISGYTAKVAGTERGITEPTATFSPCFGGPF

SEQ ID NO: 175956 - protein, 304 aa, Unknown
  Bacterial polypetide isolated from the Sargasso Sea
SVSIITEYAWHGLFARHLLVRPNEEEIKNFSSEFTIINFPNLKMDPDYHGTRSETVITVNLDKKIILIAGTKYAGETKKSVFTLLNFILPEKNIMPMHCSVNTGNNGDSAIFFGLSGTGKTTLSADPNRSLLGDDEHGWSDQGLFNFEGGCYAKLIRLSKEAEPEIYATTQMKNSVIENVVMNEKGDLDLDDNSLTENTRGAYPLDFIPGVTLSGKTSHPKNIIMLTADAFGILPPIAKLTPAQAMYHFLSGYTAKVAGTEIGLSNEPQATFSTCFGAPFMPRNPIEYGNLLKEKISKHNVNCW

SEQ ID NO: 175957 - protein, 286 aa, Unknown
  Bacterial polypetide isolated from the Sargasso Sea
IALNNKEGITASNGALIVTTGKRTGRSPKDRFIVEDSITREVVDWSENNQPIESEKFERLWNESEDYLKGKETYTADLHVGASAEHYQPVVVENELAWHNVFCQSLLIRPDAFNPKGKGLWNLRCVPSFVCDPKVHGTNSDGTVMINFTEKKVLILGIAYAGEMKKSMFGVLNFILPEHDVLPMHCAANAGENGDVSLFFGLSGTGKTTLSADPNRWLIGDDEHGWGEGIVFNFEGGCYAKTVNLSQKNEPIIWDAIKRGSVVENVVLKPNTIDIDYANQSITENT

SEQ ID NO: 175958 - protein, 209 aa, Unknown
  Bacterial polypetide isolated from the Sargasso Sea
MLYPRAHIEKAVPENYAGEPKTVIFLTCDWTGVLPPVSILSKEAAAYHFLSGYTAKVGSTEIGSSSDIESTFSTCFGAPFFPRPAGVYADLLMKRVENFGSRVFLVNTGWTGGPYGVGKRFDIPTTRRIVNAVQNGELDDVETQMLKGLNLEVPLSIQGVDGNLLNPRETWEDKSAYDAAAADLIKLFQNNFERFDVSKEIISAGPSDQ

SEQ ID NO: 175959 - protein, 139 aa, Unknown
  Bacterial polypetide isolated from the Sargasso Sea
MSMHCAANAGNDGDVSLFFGLSGTGKTTLSADPDRWLIGDDEHGWGDGIVFNIEGGCYAKTVDLSQKNEPVIWNAIKNGTILENVIFDPSSLEVDYADQTLTENTRACYPLSHVDQHLEKNYGGEPQNIIFLTCDLSGV

SEQ ID NO: 175960 - protein, 242 aa, Unknown
  Bacterial polypetide isolated from the Sargasso Sea
PSEDGTNSDGCVIINFAKRKVILAGMKYAGEMKKSMFSVQNFLLPEKGVLPMHCSANVNSNGNVALFFGLSGTGKTTLSADPKCSLIGDDEHGWSKGSVFNFEGGCYAKTINLTEENEPVIYKAIKHGSVIENVFINEDGTPDYSNTSLSENGRCCYPRSHIQDAVESNAAGEPKTVIFLTCDLTGLIPPVSLLSKEAAAYHFLSGYTAKVGSTEMGSGSDIESTFSTCFGAPFFPRPANEY

SEQ ID NO: 175961 - protein, 109 aa, Unknown
  Bacterial polypetide isolated from the Sargasso Sea
NMFIRPTDEELKNFVPDFHVLNGSKSINQNFEKQGLNSETFIAFYLTDNIQIIGGSWYGGEMKKGMFSVMNYLLPQKNIASMHCSANKGNDGSVALFFGLSGTGKTTLS

SEQ ID NO: 175962 - protein, 269 aa, Unknown
  Bacterial polypetide isolated from the Sargasso Sea
TRGRAIDYLNTQSRIYVVDGFAGWDVNYQIKVRIITTRPYHALFMHNMLIRPRDEQLDNFGEPDYVIFNAGQCPADPLTKHMTSKTSVELNFDRKEFVILGTEYAGEMKKGVFTIMNYIMPKQGILSMHSSTNVGKNNDVALFFGLSGTGKTTLSADPKRQLIGDDEHCWSDDGIFNIEGGCYAKCINLSEEKEPDIYKAIKFGTVLENVDYNKETHVVDYDGTSLTENTRASYPIEYIQNAKIPCVGGHPNNIIFLTCDAFGVLPPVS

SEQ ID NO: 175963 - protein, 290 aa, Unknown
  Bacterial polypetide isolated from the Sargasso Sea
IILLPKKGILPMHCAANIVSDQFSDSAIFFGLSGTGKTTLSTDGKRVLIGDDEHGWSESGIFNFEGGCYAKTLGLTEQTEPEILATTTKFSTVIENMVYDEQTKELDFFDSKLTFNMRAAYPMRYISKSAEDGLGMHPKHLIMLTCDAFGVLPPVARLSPEQTIYHFLSGFTSKAVGTERGVKVPEPTFSSCFGAPFLPLKPEVYGSILKQKIIANGTSCWLINTGWTGGSYGIGTRMPIKATRAILDALLTGKLDDAEFRKDDNFKFLVPVFIDGVERSLLNPRENWEN

SEQ ID NO: 175964 - protein, 186 aa, Unknown
  Bacterial polypetide isolated from the Sargasso Sea
IFLTCDLTGVLPPVSILSKEAAAYHFLSGYTAKVGSTEIGSSSEIESTFSTCFGAPFFPRPAGVYADLLMKRVENFDSKVFLVNTGWTGGPYGVGKRFDIPTTRRIVNAVQNGELDDVKTQMLNGLNLEVPLSIEGVDSNLLNPRETWEDKSAYDAAAADLIKLFQNNFERFDVSEEIISAGPSDQ

SEQ ID NO: 175965 - protein, 232 aa, Unknown
  Bacterial polypetide isolated from the Sargasso Sea
EYAGETKKSVFTLLNFLLPEKRVMPMHCSVNTGKDGDSAIFFGLSGTGKTTLSADPKRSLLGDDEHGWSDDGLFNFEGGCYAKLIRLSKEAEPEIYQTTQMKGTVIENVIMKENGLLDLDDNSLTENTRGAYPLDYIPGVIKSGKANHPKNIIMLTADAFGVLPPIAKLSPDQAMYHFLSGYTAKVAGTEIGLSNEPQATFSTCFGAPFMPRNPIEYGNLLKEKISKYNVDC

SEQ ID NO: 175966 - protein, 311 aa, Unknown
  Bacterial polypetide isolated from the Sargasso Sea
MPDFTLINCPSFKADPRKYGVRSETVIAINFKKKMVIVCGSEYAGENKKGVFSILNYILAKKGVMPMHCSANHAVGDQNEMAIFFGLSGTGKTTLSQDPDRILIGDDEHGWSDDGVFNFEGGCYAKTINLSATSEPEIFSTMTKFSTVVENMIFDPDTLEINYTDDTLTPNMRAAYPLSFIENASETGKGGTPKHIIFLTCDAFGVLPPIASLSSEQAIYHFLSGFTSKAPGTETGVIEPEPTFSPCFAAPFLPLRPEIYGNILKNKIEKYNAKCWLVNTGWTGGPYGVGERMPLAYTRSVLRGILNGSFE

SEQ ID NO: 175967 - protein, 227 aa, Unknown
  Bacterial polypetide isolated from the Sargasso Sea
VCLFFGLSGTGKTTLSADPDRNLIGDDEHGWGPGAVFNFEGGCYAKCIDLTKKNEPVIWDAIRKGSVMENVVIDSDTKEPDYSDSSLTENTRVVYPREHIEKRADENAAGEPNAVIFLTCDLSGVIPPVSILSKEAAAYHFLSGYTAAIGSTEVGSTEAFKTTFSTCYGAPFFPRAAGVYADLLMKRIEEFGSNVYLVNTGWTGGPYGTGKRFDIPVTRSIISAIQS

SEQ ID NO: 175968 - protein, 280 aa, Unknown
  Bacterial polypetide isolated from the Sargasso Sea
DLIGDDEHGWGIGSVFNFEGGCYAKCIDLSEKNEPVIWNAIKHGSVMENVVVDLSTKEPDYSDSSLTENTRVVYPREHIEKRSLENAGGEPSAVIFLTCDLSGVIPPVSILSKEAAAYHFLSGYTAAVGSTEVGSTEAFKTTFSTCYGAPFFPRPAGVYAQLLMKRIEEFNSQVYLVNTGWTGGPYGVGKRFDIPVTRSVISAIQTGSLLNTETETIEGINLEVPKEIEGIDSNLLNPIRNWKDKKSYYVYQENLVKEFTENFKRFDVSEAIVKAGPNLS

SEQ ID NO: 175969 - protein, 195 aa, Unknown
  Bacterial polypetide isolated from the Sargasso Sea
TSHPKNIIMLTADAFGVLPPIAKLSADQAMYHFLSGYTAKVAGTEIGLSNEPQATFSTCFGAPFMPRNPIEYGNLLKQKISDHEVDCWLVNTGWSGGVYGVGERISIKNTRTLLNAALSGKLANTEMRKDPNFGFLVPVKVDGINEQILDPKKTWQSESDYDAQAKKLVQMFISNFTKFESDVEENVKASGPIAN

SEQ ID NO: 175970 - protein, 286 aa, Unknown
  Bacterial polypetide isolated from the Sargasso Sea
AFTDSKRRLIGDDEHGWDDDGIFNFEGGCYAKTVDLDKEKEPDIYNAIKRDALLENVTVNSSGIINYKDTSITENTRVSYPIYHIKNIVEPVSKAGHANKIIFLTADAFGVLPAVSILSEEQSKYHFLSGFTAKLAGTERGINEPTPTFSACFGAAFLTLHPTKYAEVLSKRMRKANAEAYLVNTGWNGNGERISLRDTRAIIDSILNSEIVTSNTKKLPIFNLQMPFQIKGVSQEILDPRNSWKNEKLWEIKAKELANLFINNFKQFTDNDEGSKLVKFGPIVNN

SEQ ID NO: 175971 - protein, 240 aa, Unknown
  Bacterial polypetide isolated from the Sargasso Sea
MFGTILENVVMDPATRVLDLDDGSLTENTRASYPLSFIPNVEMSGVGGQPENVVMLTADAFGVLPPISRLSADQAMYHFLSGYTARVAGTERGLTEPQATFSTCFGAPFMPRHPTVYAKMLGERIANTGAKCWLVNTGWSGGAYGTGKRMEIAHTRAMVRAALDGRLAEAATTADPNFGLNIPQICPDVPNEVLQPRETWVDKGAYDTTARDLTQRFEANFKQFEEYVDANVKAAGVYAA

SEQ ID NO: 175972 - protein, 283 aa, Unknown
  Bacterial polypetide isolated from the Sargasso Sea
LINAAIENNEGVIASNGALSLETGLRTGRSPNDRFIVDEESTSSLIDWGEINKPFDAEKFNHLWDKVEAYLAEKNRYLSKVHVGAHIDHYIPVNVITESAAHSMFSKLIFIDPIKFNPQAKKEWQIMSALNYKCVPEEDGTNSDGCVIINFAARKVLLAGMKYAGEMKKSMFSAQNFLMPEKNVLPMHCSSNVNKDGKVSLFFGLSGTGKTTLSADPTCSLIGDDEHGWGEGTVFNFEGGCYAKTIDLSEKNEPVIWKAIKHGSIIENVFLDEEGTPDYSNTS

SEQ ID NO: 175973 - protein, 230 aa, Unknown
  Bacterial polypetide isolated from the Sargasso Sea
LCNYKIFAKRKVIIVGMKYAGEMKKSMFSVQNFLLPEKNVLPMHCSANVNKNNEVALFFGLSGTGKTTLSADPSCSLIGDDEHGWSNDSVFNFEGGCYAKTINLTEENEPVIFKAIKNGSVIENVFLDENNNPDYSNTSLSENGRCCYPRSHIDSAIKDNASGQPKTVIFLTCDLTGIIPPVSILSKEAAAYHFLSGYTAKVGSTEVGSGSDIESTFSTCFGAPFFPRPA

SEQ ID NO: 175974 - protein, 247 aa, Unknown
  Bacterial polypetide isolated from the Sargasso Sea
LNRGEGEIAANGALLVKTGKRTGRSPLDRFIVKDLITDSKVDWGEVNRPFDSEKFNSLWQRVEFYLSEKGIFVSSLHVGEHKEHYIPVEIQTEWAWHNLFGRQMFIRPEVFNPSNKETWSVMSAPEFVCDPERDGTNSDGAVIINFNEKKVLLAGMQYAGEMKKSMFSVQNFLLPEKNVLPMHCAANVGKDGDVCLFFGLSGTGKTTLSADADRDLIGDDEHGWSEGSVFNFEGGCYAKCIDLTQQK

SEQ ID NO: 175975 - protein, 316 aa, Unknown
  Bacterial polypetide isolated from the Sargasso Sea
MTSRTSIDLSLECREQVILGTEYAGEMKKGVFTMMHWLLPAQGILSMHCAANEGKSSNDVALFFGLSGTGKTTLSTDPARRLIGDDEHGWGDDGVFNIEGGCYAKCIHLSSLEEPEIYQAIRFGTVLENVVYEQATREVDFESSLVTENTRAAYPIDYIDNAKVPCVAGHPKNVIFLTCDASGALPPVSRLTREQAMYHFLSGYTARVAGTEMGVREPHLAFSPCFSAAFLVRHPAIYARLLAEKLDRHRSQAWLVNTGWTGGGYGQGKRIDLSITRKIINGIHSGVLLKAPLLQDAIFGLHAVCSVPGVDKGILV

SEQ ID NO: 175976 - protein, 324 aa, Unknown
  Bacterial polypetide isolated from the Sargasso Sea
LNSETFIAFNLTDKIQIIGGTWYGGEMKKGMFSIMNYLLPQKNIASMHCSANMGQDGSVALFFGLSGTGKTTLSTDPKRQLIGDDEHGWDNEGVFNFEGGCYAKTIDLDKNKEPDIFKAVRRDALLENVTVNENGIVDYSDTSVTQNTRVSYPIHHIDNIVKPISKGEHASKIIFLTADAFGVLPPISKLSYEQAEYHFLSGFTAKLAGTERGVTEPQPAFSACYGAAFLMLHPTRYSNVLSKKMKESNSQVFLVNTGWNGKGDRISLKDTRLIIDAILNDELKEIDTEIIPYFNLSIPKNLKNISFNVIDPRKSWNFTAEWEI

SEQ ID NO: 175977 - protein, 292 aa, Unknown
  Bacterial polypetide isolated from the Sargasso Sea
PFDSEAFINIWNKVEEYMNQRDTFVSSLHVGEHPDYYVPVKIRTEWAWHNLFGKQMFIRPNEFNPGDKDNWEIMSAPLFECDPEIDGTNSDGVVLLDFTRKKVLLAGMPYAGEMKKSMFAVQNFLLPEKDVLPMHCASNVGSNGEVCLFFGLSGTGKTTLSADPERDLIGDDEHGWGPGTVFNFEGGCYAKCIDLTQKNEPVIWDAIKRGSVMENVVIDSESKDPDFSDSSLTENTRVVYPREHIEKRADENSGGEPNAVIFLTCDLSGVIPPISILSKEAAAYHFLSGVYS

SEQ ID NO: 175978 - protein, 192 aa, Unknown
  Bacterial polypetide isolated from the Sargasso Sea
GHPNNIIFLTCDAFGVLPPVAKLNSGQAMYHFLSGYTAKVAGTERGITEPEATFSACFGAAFLTLHPTVYADLLQKKIEEHNCNVYLVNTGWVGGGYGVGERISIKDTRRCIDSILDGSILEAKFSNDKIFDFEVPLELNGVSKEICNPRDSWEDKKLYDNQAKKLADMFINNYENYIDPNFTDYSNYGPKY

SEQ ID NO: 175979 - protein, 263 aa, Unknown
  Bacterial polypetide isolated from the Sargasso Sea
DSDNSLNVRMITKKAWQSLFVNNMFIRPTKEELNDFNPDFTIINAYDVKEENWKDYGLNSENFIVFNIKKKIAIIGGTEYAGEMKKGIFSMMHYYLPLKNVLSMHCSANVSAAQDQTTVFFGLSGTGKTTLSTNANRPLIGDDEHGWSDNGIFNFEGGCYAKAINLDKDKEPEIYNAIKHGTLLENVVYDLETKEVDFDDNAKSENSRICYPINFVENSLGSKGLKSAGPHPNSIIFLTCDAYGIMPPLARMTKKQAMYHFIS

SEQ ID NO: 175980 - protein, 247 aa, Unknown
  Bacterial polypetide isolated from the Sargasso Sea
MSKEPDIFKAIKRNALLENVVVSNNGKINYKDTSHTENTRVSYPINHIDNIVRPISKAGHANKVIFLTADAFGVLPAVSILSNEQAQYHFLSGFTSKLAGTERGVDKPTPTFSACFGAAFLTLHPVNYAEVLLNRMKISNSKAYLVNTGWNGKGERISLKDTRIIIDKIINNEIDNVLTTKIPIFNLSIPVQLDGLDPNIFDPRKSWASLSSWEGKAKQLAKLFIQNFDQFCNKNTGKNLVKYGPII

SEQ ID NO: 175981 - protein, 513 aa, Unknown
  Bacterial polypetide isolated from the Sargasso Sea
MADGLNRVHYNPSTAQLVEFALLRGEGELTANGALVAKTGTRTGRSPGDRFIVKEPSSAADIEWGPVNQAFEPGAFEGLWARVEAFLADKELFVSDLEVGADPEHYQPVRVTTQYAWHQLFARNLFIIPEEFNRQDKPVWQIINAPDFVCVPERDGTNSDAAVILNFAERKVLLAGLKYAGEMKKSMFSVQNFLLPAQGVLPMHCSANVGKDGDTTLFFGLSGTGKTTLSADPKRFLIGDDEHGWAPGGVFNIEGGCYAKCIDLSQKNEPVIWDAIRFGTVLENVVMDEHRVPNYKDSSLTENTRAAYPLEHIAQRKEDNRGAEPHAVVFLTCDVSGVLPPVSILSKEQAAYHFLSGYTAKVGSTEIGSTSAIQSTFSTCFGAPFFPRPAGVYAELLMKRIESFGSQVYLVNTGWTGGPHGIGKRFDIPTTRAIVDAIVSGELKNVETVHLDTLNLAVPVAVSGVDSNLLNPVNTWSDKALYAEYAQKLAEAFTKNFAKYQVSDAIRNAGPKA

SEQ ID NO: 175982 - protein, 434 aa, Unknown
  Bacterial polypetide isolated from the Sargasso Sea
MVKVESYLDDKERFLTKVHVGSHPDHYLPIEVITETAWQSFFSRLIFIDPDEFNPKGKSNWKILSAANFECVPEIDGTNSDACVIINFKEEKVLIAGMKYAGEMKKSMFSVQNFLLPAKDILPMHCSSNINDKNSVALFFGLSGTGKTTLSADPACTLIGDDEHGWSPGSVFNFEGGCYAKCIDLSEENEPVIWKAIKEGSILENVVLNDGVPDYSDVSLTQNSRCCYPRTHIEKAVPENYAGEPKTVIFLTCDLTGVLPPVSILSKEAAAYHFLSGYTAKVGSTEIGSSSDIESTFSTCFGAPFFPRPAGIYADLLMKRVENFGSKVFLVNTGWTGGPYGVGKRFDIPTTRRIVNAVQNGELDDVETQMLNGLNLEVPLSIQGVDSNLLNPRETWEDKGAYDAAAADLIKLFQNNFERFDVSEEIISAGPSDQ

SEQ ID NO: 175983 - protein, 349 aa, Unknown
  Bacterial polypetide isolated from the Sargasso Sea
SYFTSRKVLLAGMPYAGEMKKSMFAVQNFLLPEKNVLPMHCASNVNSEGEVCLFFGLSGTGKTTLSADPDRNLIGDDEHGWGPGAVFNFEGGCYAKCIDLTKKNEPVIWDAIRKGSVMENVVIDSETKEPDYSDSSLTENTRVVYPREHIEKRADENAAGEPNAVIFLTCDLSGVIPPVSILSKEAAAYHFLSGYTAAIGSTEVGSTEAFKTTFSTCYGAPFFPRAAGVYADLLMKRIEEFGSNVYLVNTGWTGGPYGTGKRFDIPVTRSIISAIQSGNLAGSETEKIEGMNLEVPLNVDGVNSKLLNPINNWEDPSLYNSYEEKLVNQFKENFKKFDVSESIISAGPK

SEQ ID NO: 175984 - protein, 271 aa, Unknown
  Bacterial polypetide isolated from the Sargasso Sea
MRISGKELGLESLGITDIDQIYRNLSIDELIDETVNNNEGIIGANGASIVDTGKYTGRSPKDKYIVDEPSSTDNIWWGPVNKKIDEAIFDELYEKIVEYYNTDDSKTYLFDGFAGFDPTYSINVRILAKRAWQAHFVHNMFIRPETPEQLINFSPDFTIINASSVFNEKFKEHGMNSETFIIFHMGKRIAIIGGTEYGGEMKKGIFSVLHYLLPLKGVLSMHCSANVDEEGKNSAIFFGLSGTGKTTLSTDPKRPLIGDDEHGWSDDGIFI

SEQ ID NO: 175985 - protein, 513 aa, Unknown
  Bacterial polypetide isolated from the Sargasso Sea
MADGLNRVHYNPSTAQLVEFALLRGEGELTANGALVAKTGTRTGRSPGDRFIVKEDSSAADIEWGPVNQAFEPGAFEGLWARVEAFLADKELFVSDLEVGADPEHYQPVRVTTQYAWHQLFARNLFIIPEEFNRQDKPVWQIINAPDFVCVPERDGTNSDAAVILNFAERKVLLAGLKYAGEMKKSMFSVQNFLLPAQGVLPMHCSANVGKDGDTTLFFGLSGTGKTTLSADPKRFLIGDDEHGWAPGGVFNIEGGCYAKCIDLSQKNEPVIWDAIRFGTVLENVVMDEHRVPNYKDSSLTENTRAAYPLEHIAQRKEDNRGAEPHAVVFLTCDVSGVLPPVSILSKEQAAYHFLSGYTAKVGSTEIGSTSAIQSTFSTCFGAPFFPRPAGVYAELLMKRIESFGSQVYLVNTGWTGGPHGIGKRFDIPTTRAIVDAIVSGELKNVETVHLETLNLAVPVAVPGVDTNLLNPVNTWSDKALYAEYAQKLAEAFTKNFAKYQVSDAIRNAGPKA

SEQ ID NO: 175986 - protein, 286 aa, Unknown
  Bacterial polypetide isolated from the Sargasso Sea
MNKLDLGIKKLDSFYRNLPVKDLINHIVQNKEGRTGLRGAAMIDTGIYTGRSPNDKYFVDEPTSRDKIWWGEVNRKVDENIFDDLYGKVIDYYNSGVSNSYIFDGFAGADKKYRINVRIIAKKAWQAHFSHNMFIRSKNEEINQFEPDFTIINASDIQNEDFEKHGLNSKTFVLFHLGRRIAIIGGTEYGGEMKKGIFSVLHYLLPQQGVLSMHCSANTDKNGENSAIFFGLSGTGKTTLSTDPYRPLIGDDEHGWSDEGIFNFEGGCYAKVINLNPEHEPDIYNA

SEQ ID NO: 175987 - protein, 354 aa, Unknown
  Bacterial polypetide isolated from the Sargasso Sea
MQLFGGTEYAGEMKKGIFSMMHYYLPMKNVLSMHCSANVSATHDQSTVFFGLSGTGKTTLSTNANRPLIGDDEHGWSDNGIFNFEGGCYAKAINLDKDKEPEIYNAIKHGTLLENVVYDLETKEVDFDNNSKSENSRICYPINFVENSLGSKGLKSAGPHPNSIIFLTCDAYGIMPPLARMTKKQAMYHFISGYTAKMAGTEIGVTDPVAAFSPCYGGPFLTLHPLRYAELLEQKLNDYNSSVFLVNTGWSGSSAKSGSSRIDLKKTKHIINLITDGNLDFSKSVFDKFFNLEIPLDVYGLENDFLVPHHSWTNLEEYFSTGNMLTRLFNNNFEKFLIQDPDILAAGPKTDLSA

SEQ ID NO: 175988 - protein, 519 aa, Unknown
  Bacterial polypetide isolated from the Sargasso Sea
MIAFGITPHSIHRNLPVEKLVEQSIETNEGMLTSTGSLSVKTGKYTGRSPQDRYIIYDDETHETIDWGDVNRQFPTEKFNSIFEKMKKHAEGKDLYVFDGFVGADKENRLAIRVVNDHAWQNLFCRQLFVRPSNEELESHDPDFTIVCLNDFETIPEIDGTRTNIFILVNLSKKIVLIGGTNYAGEMKKSMFAVMNYLMPKKDVFPMHCSANIGKEGDTALFFGLSGTGKTSLSADPERMLIGDDEHGWSQNGVFNFEGGCYAKCINLNEDAEPQIWNAIKSGAVLENVVVNKDTLKPDFDDGSLTENTRAAYPLDYIPGAVIPSVGGHPKVIIFLTADALGVLPPVSKLTKEGAMFHFMSGYTSKLAGTERGIKEPKATFSACFGSPFMPRPASVYAKMLGEKILEHNTVVYLINTGWSGGPYGVGKRISIKYSRAMVTAALTGKFDLIKFRHDDTFNLDVPTECPGVPSDVLDPKNTWIDKDSYDLSAKKLAQMFGENFTKFKDASPEIKNAGPQIQ

SEQ ID NO: 175989 - protein, 516 aa, Unknown
  Bacterial polypetide isolated from the Sargasso Sea
MDNNTQTTSALELPTEVLIDIAVENNEGVIASNGAFSTTTGSRTGRSPNDRFIVREPGTDDLIDWGDINKPFDEDKFDSLWNKVDSYLAEKNRYVSHVHVGSHADHYLPVKVVTETAWHSLFARLIFVCTEDYNPSNKQEWQILSAANFKCNPESDGTNSEGCVIINFAKRKVILAGMKYAGEMKKSMFSVQNFLLPEKNVLPMHCSANMNSNGDVALFFGLSGTGKTTLSADPKCSLIGDDEHGWSEGSVFNFEGGCYAKTIDLSEENEPVIFKAIKHGSVIENVYLDNKGNPDYSNTSLSENGRCCYPRSHIEAAVPENAAGEPKTIIFLTCDLTGLIPPVSILSKEAAAYHFLSGYTAKVGSTEVGSSSDIESTFSTCFGAPFFPRPANEYAELLIKRIESFGSKVFLVNTGWTGGPYGVGSRFKIPTTRRIVNAIQDGELNDVETELVPGLNLSIPLSIEGVDSKLLNPINTWEDKEEYKKYLNELVEKFQDNFKRFNAKPEIIAAGPGFDG

SEQ ID NO: 175990 - protein, 325 aa, Unknown
  Bacterial polypetide isolated from the Sargasso Sea
MTSNIFSNLSQDELIQESINRGEGEIAANGALLVETGKRTGRSPLDRFIVKDETTEDSVDWGEVNRPFDSEDFDQLWQRVEKFLNDKDTFVSNLHVGQHEEHYIPVEIKTQWAWHNLFGCQMFIRPDSYNPKNKDPWTVMSAAEFECEPERDGTNSDGAVIINFTKRRVLLAGMKYAGEMKKSMFSVQNFILPEKDVLPMHCAANVNESGDVCLFFGLSGTGKTTLSADPDRDLIGDDEHGWGIGSVFNFEGGCYAKCIDLSEKNEPVIWNAIKHGSVMENVVVDPSTKEPDYSDSSLTENTRVVYPREHMKKDLWRMRAGSRAL

SEQ ID NO: 175991 - protein, 423 aa, Unknown
  Bacterial polypetide isolated from the Sargasso Sea
DSYWWNGNGTKNDNKSIDLGVWNELKALAGNQLSGKKLYVVDGFCGANKDTCMRVRFVMEVAWQAHFVKNMFIRPNDEELANFIPDFTVVNASTATNPDWERHGMNSPTFVAFNLTERMQLIGGTWYGGEMKKGLFSVMNYLLPQKGIASMHCSANCGACGDVALFFGLSGTGKTTLSASSNRSLIGDDEHGWDDDGVFNFEGGCYAKTSGLSAESEPEIYQAIRRNALLENVMVDDAGKVDFKDTSLTLNTRVSYPIHHIDNIVEPVSKAGHAKNVLFLTADAFGVLPAISILDEAATQYHFLSGFTAKMAGMERGMTDHQPTFSACFGAAFLTLHPTVYAKVLNERMNQAGAKAYLINTGWNGQGKRISLANTRRLINAIFDDELDDAETEILPIFKLKVPKALVGLDGSVLDPRSSYDDP

SEQ ID NO: 175992 - protein, 507 aa, Unknown
  Bacterial polypetide isolated from the Sargasso Sea
MSRELNLTNSKLIERAIANGEGELTNTGALLALTGSRTGRSPSDRFIVQENSTADKIDWGEVNIPFEADHFDNLWNKVSDYLDNKDCYMSEVHVGSNKDHYIPVLVKSEKAWHSLFSKLIFIVPEVFNEEEKETWKIMTAADYVCDPEVDHTNSESCVIINFLRRKVLIAGMKYAGEMKKSMFAVQNFLLPEKDVLPMHCSANQTKDKRTTLFFGLSGTGKTTLSADPKCALIGDDEHGWSDGSVFNLEGGCYAKCIKLSKENEPLIWDAIKFGSILENVVINENGVPDYDDDKYTENTRVCYPRDFIEGSVPENQGGEPDNIVFLTCDLSGVLPPVSILDENSAAYHFLSGYTAKVGSTEMGSTKSMDFAFSTCFGAPFFPRPAGVYADLLIKRVQKNNTKVFLVNTGWTGGSYGVGERFPIPVTRAIINAIQDNKIDTDDVEHLEKLNLNVPKDIKGVNQELLNPRNCWESVENYDEECDKLCMRFKENFRKFDVAQQIIDAGPR

SEQ ID NO: 175993 - protein, 475 aa, Unknown
  Bacterial polypetide isolated from the Sargasso Sea
MEKGTQTTSALELPTEELITIAVENNEGIIAKNGAFSTTTGTRTGRSPNDRFIVREPSTDALIEWGDINKPFDEEKFDVLWNKVDSYLAEKNRYVSHVHVGSHAEHYLPVKVITETAWHSLFARLIFVCTEDYNSSNKQEWQILSAANFKCDPETDGTNSEGCVIINFAKRKVILAGMKYAGEMKKSMFSVQNFLLPEKNVLPMHCSANVNANGNVALFFGLSGTGKTTLSADPKCSLIGDDEHGWSEGSVFNFEGGCYAKTIDLSEENEPVIFKAIKHGSVIENVYLDEEGNPDYSNTSLSENGRCCYPRSHIDAAVPENAAGEPKTIIFLTCDLTGLIPPVSILSKEAAAYHFLSGYTAKVGSTEVGSSADIESTFSTCFGAPFFPRPASEYADLLIKRIESFGSKVFLVNTGWTGGPYGIGSRFKIPTTRRIVNAIQDGELDDIETELVPGLNLSVPLSIEGVDTKLLNPIN

SEQ ID NO: 175994 - protein, 502 aa, Unknown
  Bacterial polypetide isolated from the Sargasso Sea
MPNAELIERAVKRGEGVLDKNGALVVETGKRTGRSPNDRFIVKEPTTENDIDWGKVNKPFDSDKFDALWDRVEAYLSTQEHFLSHLQVGSDPEHALWLEVRTQTAWQHVFARNLFIIPEQWNVKGDQPWQILNVPGFTCEPERDGTNSDGTVIINFAKKRVLLAGMRYAGEMKKAMFSVQNFLLPAKDVLPMHCSANVGEEGDVTLFFGLSGTGKTTLSADPKRFLIGDDEHGWAPGSVFNIEGGCYAKCIDLSQKNEPVIWNAIKFGTILENVVLDETRTPDYTDTSLTQNSRAAYPLSHIEKRVAENRGGEPRSVVFLTCDVSGVLPPVSVLSEEAAAYHFLSGYTAKVGSTEIGSTSDIESTFSTCFGAPFFPRPAGVYAELLIKRVKAFGAKVYLVNTGWTGGPYGTGSRFDIPTTRAIIDAIVSGNLADVETQHIDALNLDVPVAIDGVDSNLLVPQNTWADKEKYNEYAANLVNDFKQNFEKYDVSDAIVKAGPGN

SEQ ID NO: 175995 - protein, 536 aa, Unknown
  Bacterial polypetide isolated from the Sargasso Sea
MENVGENFSKVGTDSHGFKNLKKVNWNLNRDDIYDITISNGQGLLSKDEVLVVETGIHTGRSANDKFIVKNDQNEDSIWWDNNKSITEENFDNLYKDVLNFCEEKELYVQDLFGGADLDYRLSTRVYTEYAWHSLFIQNLLIEVKEEEKSEFNPEFIIIDIPSFKADTSRHGCSSETLIAVNFEKKLVIIVGTSYAGEIKKSVFSMLNYLLPPKNVMPMHCSVNVGQDEDPAIFFGLSGTGKTTLSADPNRILIGDDEHGWSSNGVFNFEGGCYAKMIRLSEQAEPEIYQTTKLRGTILENVVIDKSSGEIDLDDSSLAENTRGAYPLSFIPNASETGRTCMPKNIILLTCDAFGVLPPIAKLSASQTMYHFLSGYTAKVAGTEKGVTEPEATFSACFGAPFMPRHPSEYGKLLQKLIAEHSVKCWLVNTGWTGGPYGAGERMPIGATRKLLSSALTGSLLSSDMRIDENFGFEVPVAVEGVDTKILNPRETWEDKEGYDLQAQKLVKMFSDNFDVFKPYVDIDIIDAAPNLQAAE

SEQ ID NO: 175996 - protein, 509 aa, Unknown
  Bacterial polypetide isolated from the Sargasso Sea
MSKIFENLSVDDLITESLERGEGEIAANGALLVKTGKRTGRSPLDRFIVIDDSTKKEVDWGEVNRPFESLAFENLWNKVEAYLDSKDTFISSLHVGEHSEHYVPVNIRTQWAWHNLFGKQMFIRPDEFNPNNKETWQILSAPEFVCDPEVDKTNSDGVVILDFTAKKVLLAGMPYAGEMKKSMFAVQNFLLPASEVLPMHCASNVSHDGEVCLFFGLSGTGKTTLSADPHRNLIGDDEHGWGPGTVFNFEGGCYAKCIDLTQKNEPVIWDAIKKGSVMENVVIDAQTKVPDYSDSSLTENTRVVYPREHIEKRADENAAGEPNAVIFLTCDLSGVIPPVSILSKEAAAYHFLSGYTAAIGSTEVGSTEAFKTTFSTCYGAPFFPRAAGVYADLLMKRIEEHGSNVYLVNTGWTGGPYGTGKRFDIPVTRSIISAIQSGELVGCDTEKIDGMNLEVPLNVEGVDSKLLNPVKSWQDPSLYDSYEEKLVNQFKENFKKFDVADAIINAGPK

SEQ ID NO: 175997 - protein, 443 aa, Unknown
  Bacterial polypetide isolated from the Sargasso Sea
MESNAVAETLELNTEDLIKAAIENGEGVIASNGALSLETGARTGRSPNDRFIVKEDSTSHLIDWGEINRPFDADKFSLLWDKVDAYLAEKNRYLSKVHVGAHEDHYIPVHVTAESASHSMFSQLIFISPDEFNPQAKKEWQIMSALNYECSPEEDGTNSEGCVIINFAARKVLLAGMKYAGEMKKSMFSVQNFLMPEKDVLPMHCSSNVNKDGNVSLFFGLSGTGKTTLSADPTCSLIGDDEHGWGVGTVFNFEGGCYAKTIDLSEKNEPVIWKAIKHGSIIENVFLDETGTPDYSNTSLSENGRCCYPRSHIDDAIESNSAGEPETVIFLTCDLTGVIPPVSILSKEAAAYHFLSGYTAKVGSTEVGSTESIGTTFSTCFGAPFFPRPAGVYADLLMKRIDAFNSKVFLVNTGWTGGPHGIGSRFDIPTTRRIINAIQNGEK

SEQ ID NO: 175998 - protein, 399 aa, Unknown
  Bacterial polypetide isolated from the Sargasso Sea
MFARHLLVRPTSEEVNSFIADFTIINFPSLKMDPNYHGTNSETAIIVNLKEKVILISGTEYAGETKKSVFTLLNFLLPEKQVMPMHCSVNTGNDGSSAIFFGLSGTGKTTLSADPNRSLLGDDEHGWSDEGLFNFEGGCYAKLIRLSQEAEPEIYATTQKKLTVIENAVLKTDGDLDLDDNSLTENTRGAYPLEFIPNVTLNGKTSHPKNIIMLTADAFGVLPPISKLSPSQAMYHFLSGYTAKVAGTEIGLSNEPQATFSTCFGAPFMPRNPIEYGNLLKEKISKYNVDCWLVNTGWSGGVYGVGKRISIKNTRRLLDAALSGELSNVEMRKDDNFGFFVPLEVNGIDESVLDPRSTWANSTEYDLQAKKLVSMFIDNFVKFESDVEEKILNSGPSQI

SEQ ID NO: 175999 - protein, 258 aa, Unknown
  Bacterial polypetide isolated from the Sargasso Sea
KLIRLSKDAEPEIYKTTQMKGTVIENAVMNKDGLLDLDDNSLTENTRGAYPLDYIPGVIKSGKAPHPNNIIMLTADAFGILPPIAKLTPEQAMYHFLSGYTAKVAGTEIGLSNEPQATFSTCFGAPFMPRNPIEYGNLLKEKISKFAVDCWLVNTGWSGGVYGVGKRISIKDTRRLLDAALSGELSNSPMRKDKNFGFSVPLTVKGIDEAILDPRNTWSNASEYDEQAKKLVNMFIENFVKFESDVEDKILASGPVTS

SEQ ID NO: 176000 - protein, 439 aa, Unknown
  Bacterial polypetide isolated from the Sargasso Sea
MGGVAIQSSSQSRAVDLSQHGLEPSGNVHWNMGPEELHQMAVDLNEAKLTSDSVLLAVTGERTGRSPNDRFIVDEVGMAEEVWWGEVNRPTAPAVFDRLLVKVQEHLNSVENVFVKDAFCGADKDYRMPVRLVTEKAWHAAFMHNMFVRATEEEIASHIPEFTILHVPEMKSSMSDGVNSDVFVIIALDRGMVIIGGTHYAGEIKKAIFTIMNHILPSKGLLPMHCSANTDGENAALFFGLSGTGKTTLSADSNRALVGDDEHGWSDNGVFNFEGGCYAKLIRLSEEDEPAIYATTKMPGSILENVVLNADGSPDFDNGSLTQNTRGSYPIEFIENRTPDSMAGNPNNVVFLTCDAFGVLPPLSRLTPEQAAYHFMSGYTAKVAGTEMGVTEPQATFSTCFGAPFMPRHPSIYADLLSKKIRENDAKCWLINTGWIAGG

SEQ ID NO: 176001 - protein, 516 aa, Unknown
  Bacterial polypetide isolated from the Sargasso Sea
MAKAKKVHYNNSASQLIQLATELNEGILTIDGSFSVNTGKHTGRSPKDKHIIADNETEDNVWWGNNARIKRNDFNLLESDMLSHMQGKELFIQDLHAGTDPSEKIKVRVITEFAWQALFIQHLLILPENIEQQDFKEDLLIIDLPSFKTDPNKYGVRTDTTIACDFTNNKILIAGTYYAGEIKKSVFTYFNYTLPPKGIFPMHCSANSDPDGKNTAIFFGLSGTGKTTLSADPERLLVGDDEHGWSNKGVFNFEDGSYAKAINLSKDAEPQIYNAVRRSTTVLENVVVDENTGELDFNDGSLTENTRAAFPMSFVGENVSKEGMAGTPTNIVMLTCDAFGVMPPISRLDSNQAVYHFLSGYTAKVAGTERGVIDPSATFSTCFAAPFLPRHPIVYGRLLKEYMERYNVRTWLINTGWSGGPAGIGQRMPIKLTRSLLKAALNDDLDNAEMRQDKYFKLMVPLSINGDSSYLNPIDTWSNKDEFDIQAKKLVEMFVENFKRFQNEVDDDIVNAGPSN

SEQ ID NO: 176002 - protein, 459 aa, Unknown
  Bacterial polypetide isolated from the Sargasso Sea
KLSEENFDYLLNKVLDTYEGLHSSYYVFDGFAGDDTDNSLSVRMITKKAWQSLFVNNMFIRPTKEELNDFNPDFTIINAYDVKEENWKDYGLNSENFIVFNIKKKIAIIGGTEYAGEMKKGIFSMMHYYLPLKNVLSMHCSANVSASQDQTTVFFGLSGTGKTTLSTNANRPLIGDDEHGWSDNGIFNFEGGCYAKAINLDKDKEPEIYNAIKHGTLLENVVYDLETKEVDFDDNAKSENSRICYPINFVENSLGSKGLKSAGPHPNSIIFLTCDAYGIMPPLARMTKKQAMYHFISGYTAKMAGTETGITEPVAAFSPCYGGPFLTLHPLRYAELLEQKLNDYDSSVYLVNTGWSGSSATSGSSRIDLKLTKHIINLITDGSLDFSKSVFDKFFNLEIPLNVDGLENDFLVPHHSWDNLEEYFSTGNMLTRLFNNNFDKFEIRDSDILAAGPKTDLSA

SEQ ID NO: 176003 - protein, 420 aa, Unknown
  Bacterial polypetide isolated from the Sargasso Sea
EKTGRSPNDKRIVEHPSIEKHVWWGKINIGMDADTFIITRARAIDYLNTQKRIYVVDGLAGWDVNYQIKVRIITTRPYHALFMHNMLIRPSNEQLENFGEPDYVIFNAGKHPADPLIKHMTSKTSVELDFDRREFVILGTEYAGEMKKGVFTIMNYIMPKQGILSMHSSANVGNNNDVALFFGLSGTGKTTLSADPKRHLIGDDEHCWSDDGIFNIEGGCYAKCINLSEEKEPDIYKAIKFGTVLENVDYDKDTHVVDYDGTSLTENTRASYPIEYINNAKIPCVGGHPQNIIFLTCDAFGVLPPVSRLNSSQAMYHFISGYTAKVAGTEVGVTEPEATFSACFGAAFMVWHPSKYAELLAERIEKNGTLVWLVNTGWSGGGFGEGKRISLKYTRSIIGSILDGTMYNARVIKNKLFGFD

SEQ ID NO: 176004 - protein, 379 aa, Unknown
  Bacterial polypetide isolated from the Sargasso Sea
DYTIINFPSLKLDPEFHGTNSETAIIVNLKEKVILIAGTEYAGETKKSVFTLLNFLLPEKKVMPMHCSVNSGEKGDSAIFFGLSGTGKTTLSADPNRSLLGDDEHGWSDEGLFNFEGGCYAKLIRLSKDAEPEIYKTTQMKGTVIENAVMNNDGLLDLDDNSLTENTRGAYPLDYIPGVIKSGKAPHPNNIIMLTADAFGILPPIAKLTPEQAMYHFLSGYTAKVAGTEIGLSNEPQATFSTCFGAPFMPRNPIEYGNLLKDKISKFSVDCWLVNTGWSGGVYGVGKRISIKDTRRLLDAALSGELSNTQMRKDKNFGFSVPLTVKEIDEAILDPRNTWSNTSEYDEQAKKLVNMFIENFVKFESDVEDKILASGPVTN

SEQ ID NO: 176005 - protein, 208 aa, Unknown
  Bacterial polypetide isolated from the Sargasso Sea
RVVYPREHIEKRADENAGGEPNAVIFLTCDLSGVIPPVSILSKEAAAYHFLSGYTAAIGSTEVGSTEAFKTTFSTCYGAPFFPRAAGVYADLLMKRIEEFDSKVYLVNTGWTGGPYGVGKRFDIPVTRSIISAIQSGALSGVETETIEGMNLDVPLNVEGVDSNLLNPIKNWSDPSSYAEYENKLVTQFKDNFKKFDVSQSIVEAGPR

SEQ ID NO: 176006 - protein, 269 aa, Unknown
  Bacterial polypetide isolated from the Sargasso Sea
MSKEQILSNSKLIEEAVANDEGKLVSNGAFLALTGSRTGRSPKDRFIVEEASTRDQIEWGNVNQPFNSDDFNNLWDKVSDYLSNKKHYKTEVHVGSNKDHYIPVEVKCEKAWHSLFSKLIFIVPDKYNSENKEVWQLISAPDFVCDPEVDKTNSDGCVIINFHKRRVLIAGMKYAGEIKKSMFSVQNFLLPEKNVLPMHCSANQTSDGRTTLFFGLSGTGKTTLSADPKCSLIGDDEHGWGDGTVFNFEGGCYAKCIKLSKENEPLIWD

SEQ ID NO: 176007 - protein, 527 aa, Unknown
  Bacterial polypetide isolated from the Sargasso Sea
MIKNQDFKRNLHIDDLIKDAVENKEGVIGLNGALMVDTGEFSGRIPNDKFIVDEDSSNEDIWWGEVNQKLSQNNFDYLLKKVLDTYENLSSSYYVFDGFAGDDSDNSLNVRMITKKAWQSLFVNNMFIRPSKEQLNNFSPDFTIINAYDVKEENWDKYGLNSENFIVFNIKKKIAIIGGTEYAGEMKKGIFSMMHYYLPLKNVLSMHCSANVSASHNQSTVFFGLSGTGKTTLSTNANRPLIGDDEHGWSDNGIFNFEGGCYAKAINLDKDKEPEIFNAIKHGTLLENVVYDLDTKEVDFDDNSKSENSRICYPIEFVQNSLGSKGLKSAGPHPDSIIFLTCDAYGIMPPLARMTRKQAMYHFISGYTAKMAGTETGVTEPVAAFSPCYGGPFLTLHPLKYAELLEKKLNDHNSSVYLVNTGWSGSSATSGSSRIDLKLTKHIINLITEGSLDFSQSVYDKFFNLEIPMNVEGLENDFLIPHLSWSNLEEYFSTGNMLTRLFNNNFEKFNIKDPDILAAGPKTDLSA

SEQ ID NO: 176008 - protein, 254 aa, Unknown
  Bacterial polypetide isolated from the Sargasso Sea
MNHNLPLDSLLDIAIKNGEGTIVDNGALVVTTGKRTGRSPADRFLVNDEKTQHVVDWGENNQPTERETFEKLWDESEEYLKNKTVYTADLHVGASEEHYQPVRVENELAWHNMFCQSLFIRPPSFNPKNKTPWQLRCAPGFTCDPKRHGTNSDGTVMVNFTTHQILILGIAYAGEMKKSMFGIMNFIMPEEDVLSMHCAANAGKDGDVSLFFGLSGTGKTTLSADPDRWLIGDDEHGWGDGIVFNIEGGCYAKT

SEQ ID NO: 176009 - protein, 376 aa, Unknown
  Bacterial polypetide isolated from the Sargasso Sea
MVFELSNKDLISKALEREEGVLASNGALTVVTGKRTGRSPLDRYIVEEETTKNDIEWGEINRPFDEEKFHSLWSKVESYLDDKERFLTKVHVGSHPEHYLPIEVTTETAWQSLFSRLIFIDPDEFNPKDKSNWKILSAANFECVPEIDGTNSDGCVIINFKEEKVLIAGMKYAGEMKKSMFSVQNFLLPAKDILPMHCSSNINDKNSVALFFGLSGTGKTTLSADPACTLIGDDEHGWSPGSVFNFEGGCYAKCIDLSEENEPVIWKAIKEGSILENVVLNDGVPDYSDVSLTQNSRCCYPRTHIEKAVPENYAGEPKTVIFLTCDLTGVLPPVSILSKEAAAYHFLSGYTAKVGSTEIGSFSDIESTFSTCLEHH

SEQ ID NO: 176010 - protein, 515 aa, Unknown
  Bacterial polypetide isolated from the Sargasso Sea
MDTSSQTSEALELTNEELITAAVNNGEGVIANNGAFSTETGERTGRSPNDRFIVKEPGSSNLIDWGDVNIPFEEDNFNSLWDKVETYLAEKDRYVSRVHVGSHSEHYLPVRVTTETAWHSFFARLIFVCSENYNPNNKKEWEILSAANFQCDPESDGTNSESCVVINFAQRKVIIAGMKYAGEMKKSMFSVQNFLLPEKNVLPMHCSANVNKNGNVALFFGLSGTGKTTLSADPKCSLIGDDEHGWSPGSVFNFEGGCYAKTINLSEENEPVIFNAIKHGSVIENVFLNNNEPDYSNTSLSENGRCCYPRSHIENAVEANAAGEPKTVIFLTCDLTGLIPPVSILSKEAAAYHFLSGYTAKVGSTEMGSTSDIASTFSTCFGAPFFPRPADVYADLLMKRIEGYGSKVFLVNTGWTGGPYGKGSRFDIPVTRRIVNAIQDGELDNVETQMIPGLNLEVPLEIEGVESILLTPEKTWEDNEEYQKYLKDLIYKFQENFKKFNVNPDIVSAGPGFNE

SEQ ID NO: 176011 - protein, 454 aa, Unknown
  Bacterial polypetide isolated from the Sargasso Sea
NDIEWGEINRPFDERKFHSLLSKVESYLDDKEKFLTKVHVGSHPEHYLPIEVTTETAWQSLFSRLIFIDPDEFNPKGKSNWEILSAANFECVPEIDGTNSDGCVIINFKEEKVLIAGMKYAGEMKKSMFSVQNFLLPAKDILPMHCSSNINDKNSVALFFGLSGTGKTTLSADQACTLIGDDEHGWSPGSVFNFEGGCYAKCIDLSEENEPVIWKAIKEGSILENVVLNDGVPNYSDVSLTQNSRCCYPRTHIEKAVPENYAGEPKTVIFLTCDLTGVLPPVSILSKEAAAYHFLSGYTAKVGSTEIGSSSDIESTFSTCFGAPFFPRPAGVYADLLMKRVENFGSRVFLVNTGWTGGPYGVGKRFDIPTTRRIVNAVQNGELDDVETQMLNGLNLEVPLSIEGVDSNLLNPRETWEDKSAYDAAAANLIKLFQNNFERFDVSEEIISAGPSDK

SEQ ID NO: 176012 - protein, 308 aa, Unknown
  Bacterial polypetide isolated from the Sargasso Sea
MSSIHENLTVEELINAALERGEGEIASNGALLVKTGKRTGRSPLDRFIVKDDTTINSVDWGQVNKPFDSEAFINIWNKVEEYMNQRDTFVSSLHVGEHPDYYVPVKIRTEWAWHNLFGKQMFIRPQEFNPGGKDNWEIMSAPLFECDPETDGTNSDGVVLLDFTRKKVLLAGMPYAGEMKKSMFAVQNFLLPEKDVLPMHCASNVGSNGEVCLFFGLSGTGKTTLSADPERNLIGDDEHGWGPGTVFNFEGGCYAKCINLTKKNEPVIWDAIKRGSVMENVVIDSESKDPDFSDSSLTENTRVVYPRE

SEQ ID NO: 176013 - protein, 417 aa, Unknown
  Bacterial polypetide isolated from the Sargasso Sea
MNEYGRKAPKASISALGLGNVSAAYWNLDPAQLVEDTIVRGEGVLANNGALAIDTGEFTGRSPQDRFIVEDDITRDSVWWGDINKKFDAEKFDRLYNRVTSYLSGKEVYVRDASVCTKEKYGMNLRLVSEFPYSNLFAHNMFLRLSDQEIDNFEAEWNIICAPGFKADAEIDGTRQHNFAIMNFSKKILLIGGTGYTGEIKKGIFSALNFILPHEQDVLSMHCSANVGQNGDTAVFFGLSGTGKTTLSSDPNRRLIGDDEHGWDEDSVFNFEGGCYAKCIDLSREKEPQIYDAIKFGALLENINFKEGTTEVDYEDSEKTENTRVSYPIYHIDNIQEGSLGGTPKNIFFLTCDAYGVLPPISKLSKGQSMYHFISGYTAKVAGTEAGITEPQTAFSACFGAPFLPLHPTKYAMMLGK

SEQ ID NO: 176014 - protein, 367 aa, Unknown
  Bacterial polypetide isolated from the Sargasso Sea
EQLNNFSPDFTIINAYDVKEENWDQYGLNSENFIVFNIKKKIAIIGGTEYAGEMKKGIFSMMHYYLPIKNVLSMHCSANVSASHNQSTVFFGLSGTGKTTLSTNANRPLIGDDEHGWSDNGIFNFEGGCYAKAINLDKHKEPEIFNAIKHGTLLENVVYDLDTKEVDFDDNSKSENSRICYPIEFVENSLGSKGLKSAGPHPDSIIFLTCDAYGIMPPLARMTRKQAMYHFISGYTAKMAGTETGVTEPVAAFSPCYGGPFLTLHPLKYAELLEKKLNDHNSSVYLVNTGWSGSNATSGSSRIDLKLTKHIINLITEGSLDFSQSVYDKFFNLEIPMNIEGLENDFLVPHLSWSNLEEYFSTGNMLT

SEQ ID NO: 176015 - protein, 312 aa, Unknown
  Bacterial polypetide isolated from the Sargasso Sea
ALFCNIGKDGDTALFFGLSGTGKTSLSADPERMLIGDDEHGWSESGVFNFEGGCYAKCINLNEEAEPQIWNAIKSGAVLENVVVNKDTLKPDFDDGSLTENTRAAYPLDYIPGAVIPSVGGHPKVIIFLTADALGVLPPVSKLTKESAMFHFMSGYTSKLAGTERGIKEPKATFSACFGSPFMPRPASVYAKMLGEKISEHNTVVYLINTGWSGGPYGVGKRISIKYSRSMVTAALTGKFDLIKFRHDDTFNLDVPTECPGVPSDVLDPKNTWIDKDSYDLSAKKLAQMFSENFTKFKDASPEIKAAGPQIQ

SEQ ID NO: 176016 - protein, 330 aa, Unknown
  Bacterial polypetide isolated from the Sargasso Sea
MNNQSQPLEPLVLSNEELIKAAIDNDEGVIASNGAFSTTTGERTGRSPNDRFIVKEPGTDNLIDWGEINKPFDEKKFDQLWDKVESYLTESNCYSTNVHVGSHKEHYLPVKVTTETAWHSFFARLIFVCPDIYNPSSKEEWEIISAANFKCSPDEDGTNSESCVVINFAKRKVIIAGMKYAGEMKKSMFSVQNFLLPEKGVLPMHCSANVNRNGDVALFFGLSGTGKTTLSADPSCSLIGDDEHGWSEGSVFNFEGGCYAKTIDLSEENEPVIYKAIKHGSVIENVYLNENNEPEYSNTSLSENGRGGYPRSHIDAAVEENAPGEPKTVI

SEQ ID NO: 176017 - protein, 463 aa, Unknown
  Bacterial polypetide isolated from the Sargasso Sea
MRKQYGGDNNKSITEENFDNLYKDVLDFCEEKELYVQDLYGGADLDYRLSTRVYTEYAWHSLFIQNLLIEVKEDEKSSFNPEFVIIDIPSFKADTSRHGCSSETLIAVNFEKKLVIIVGTSYAGEIKKSVFSMLNYLLPPKNVMPMHCSVNVGAENDPAIFFGLSGTGKTTLSADPDRTLIGDDEHGWSSNGVFNFEGGCYAKMIRLSEKAEPEIYQTTKLRGTILENVVIDKDSGEIDLDDSSLAENTRGAYPLSFIPNASETGRTSMPKNIILLTCDAFGVLPPIAKLSSSQTMYHFLSGYTAKVAGTEKGVTEPEATFSACFGAPFMPRHPSEYGKLLQKLIAEHSVKCWLVNTGWTGGPYGKGERMPIDATRKLLTSALNGSLLSAEMRIDENFGFEVPSYVDGVDTQILNPRDTWEDKEGYDLQAQKLVKMFSDNFDVFKPYVDIDIIDAAPNLQAAE

SEQ ID NO: 176018 - protein, 328 aa, Unknown
  Bacterial polypetide isolated from the Sargasso Sea
PQKGVLSMHCSANVDEDGLNPAIFFGLSGTGKTTLSTDPKRPLIGDDEHGWSDDGVFNFEGGCYAKTINLNPEDEPDIYNAIRHGALLENVVYDPHTRVVDYNDNSKTENTRVSYPLNFIENSVYAKGKPALSAHPKTIIFLTCDAYGVIPPVSKLTPEQAMYHFISGYTAKVAGTERGVTEPTATFSPCFGGPFLTLHPLKYAELLREKMNHHNVPAYLVNTGWVGASAQSGAKRISLPITRKIIYAILDGSINSADYETDPYFGVQIPINLKDIDTEILIPSKAWSNQNEYIKIAEDLVQKFQKNFEDYSIEDQEIINAGPKLMRN

SEQ ID NO: 176019 - protein, 254 aa, Unknown
  Bacterial polypetide isolated from the Sargasso Sea
MIKNQNFKRNSNVDDLINDAVNNNEGVIGLNGALMVDTGEFSGRIPDDKFIVDEDSSTEKIWWGEVNQKLSEENFDYLLNKVLDTYESLPSSYYIFDGFAGDDSDNSLNVRMITKKAWQSLFVNNMFIRPTKEELNDFNPDFTIINAYDVKEENWKDYGLNSENFIVFNIKKKIAIIGGTEYAGEMKKGIFSMMHYYLPMKNVLSMHCSANVSASQDQSTVFFGLSGTGKTTLSTNANRPLIGDDEHGCQIMGY

SEQ ID NO: 176020 - protein, 221 aa, Unknown
  Bacterial polypetide isolated from the Sargasso Sea
SNTSLSENGRCCYPRSHIDAAVKNNAAGEPKTVIFLTCDLMGLIPPVSILSKESAAYHFLSGYTAKVGSTEMGSSSDIESTFSTCFGAPFFPRPAGIYADLLMERVESFGAKVYLVNTGWTGGPYGTGSRFKIPTTRRIVNAIQDGELENVETQRIPGLNLDVPTEVQGVDSNLLNPRNTWEDKKEYDKYLKELIKKFQDNFKKFDVKPEIVKAGPGFDDK

SEQ ID NO: 176021 - protein, 508 aa, Unknown
  Bacterial polypetide isolated from the Sargasso Sea
MDSNSLIKNSHKLSTDELIDAAVKNEEGVIASNGAFSTTTGDRSSRSPNDRFIVKEAHSEDLIDWGEVNKPFDRQNFNVLWNKVESYLAERDSYTSDVHVGAHPEHYLPVQVTTETAWHSLFARLIFICPDSFNPLNKIKWEILSAANYKCVPEEDGTNSESCIVINFSEKKVLIAGMKYAGELKKSMFSVQNFLLPDMDVLPMHCSANINKNNNVTLFFGLSGTGKTTLSADTKCSLIGDDEHGWSKGAVFNFEGGCYAKTVNLSEKNEPVIYKAIKHGSVIENVYLTDNNEPDYSNISISENGRCCYPRSHIENAVRENAAGEPTTIIFLTCDLTGVMPPVSILTRKSAAYHFLSGYTAKLGSTERGAGAPIQSTFSTCFGAPFFPRPANVYADLLIKRIEEFGSRVFLVNTGWTGGPYGVGSRFDIPVTRRIVNAIQDGELHDVETTKIPGLNLNVPLLLRGIDSKLLNPIENWKDKTEYQKQLENLISQFQENFKQYDVSPEIV

SEQ ID NO: 176022 - protein, 429 aa, Unknown
  Bacterial polypetide isolated from the Sargasso Sea
FDGFAGADKTYRLNVRIIAKKAWQAHFAHNMFIRPNSAELEKFEPDFTIINASDIQNEDFQQHGLNSKTFVLFHIGRRIAIIGGTEYGGEMKKGIFSVLHYLLPQQGVLSMHCSANTDKNGDNSAIFFGLSGTGKTTLSTDPDRSLIGDDEHGWSDDGIFNFEGGCYAKVINLNPEHEPDIYNAIREGALLENVVYDKASGLIDFSDDSKTQNTRVSYPLEHIDNSLLSQGRNSTAGHPKNIIFLACDAYGILPPVAKLSPEQAMYHFISGYTAKVAGTERGIIEPTATFSPCFGGPFLTLHPLKYAELLKEKMKNFKVPAYLVNTGWVGHNASSGSPRISLPITRKIIHKILDGTINSCEFEIDPFFGFQIPTKLDDLNSDLLLPKRVWKNEKNYFSAAKELIEKFQANFAEYEINDDLVKNSGPVII

SEQ ID NO: 176023 - protein, 514 aa, Unknown
  Bacterial polypetide isolated from the Sargasso Sea
MNTQTQEPLNLSTEQLIDAAVANKEGIIASNGAFSTNTGERSARSPNDRFIVKEAHTEDLIEWGEVNKPFNREKFNSLWDKVESYLSKGNSYTSDVHVGAHPEHYLPVKVTTETAWHSLFARLIFICTDDFNPLNKIKWEILSAANFECVPEEDGTNSESCIVINFSERKVIIAGMKYAGELKKSMFSVQNFLLTDKDVLPMHCSANINKNNNVTLFFGLSGTGKTTLSADTKCSLIGDDEHGWSKGSVFNFEGGCYAKTVNLSEENEPVIYKAIKHGSVIENVYLNDNNEPDYSNISISENGRCCYPRSHIENAIKENAAGEPKTIIFLTCDLTGVMPPVSILSRKSAAYHFLSGYTAKLGSTERGAGAPIQSTFSTCFGAPFFPRPANVYADLLIKRIEEFGSKVFLVNTGWTGGPYGVGSRFDIPVTRRIVNAIQDGELHEVETENIPGLNLEVPLLVRGVDSKLLNPINNWNDKEEYQKQLKDLVSQFQENFKKYNVQPEIVSAGPGFDD

SEQ ID NO: 176024 - protein, 324 aa, Unknown
  Bacterial polypetide isolated from the Sargasso Sea
MSTEQLIDAAVANNEGVIASNGAFSTTTGERSSRSPNDRFIVKEGHTEDLIEWGEINKPFDREKFNSLWEKVESFLANGNSYTSDVHVGAHPEHYLPVKVTTETAWHSLFARLIFICPDDFNPLNKIKWEILSAANYECVPKEDGTNSESCIVINFSERKVIIAGMKYAGELKKSMFSVQNFLLPDKDVLPMHCSANVNKNNNVTLFFGLSGTGKTTLSADTKCSLIGDDEHGWSKGSVFNFEGGCYAKTINLSEENEPVIYKAIKHGSVIENVYLNDSNEPDYSNISITENGRVCYPRSHIENAVKENAAGEPKTVIFLTCDL

SEQ ID NO: 176025 - protein, 225 aa, Unknown
  Bacterial polypetide isolated from the Sargasso Sea
TLDLDDNSLTENTRGAYPLDYIPGVTASGKTSHPKNIIMLTADAFGVLPPIAKLSASQAMYHFLSGYTAKVAGTEIGLSNEPQATFSTCFGAPFMPRNPIEYGNLLKKKISDHEVDCWLVNTGWSGGVYGVGERISIKNTRTLLNAALSGELTNTEMRKDPNFGFSVPVKVDGINEEILDPKKTWQSEADYDAQAKKLVQMFISNFTKFQSDVEENVRASGPIAN

SEQ ID NO: 176026 - protein, 425 aa, Unknown
  Bacterial polypetide isolated from the Sargasso Sea
MYGGADLDYRLSTRVYTEYAWHSLFIQNLLIEVKENEKSSFSPEFVIIDIPSFKADKSRHGCSSETLIAVNFEKKLVIIVGTSYAGEIKKSVFSMLNYLLPPKNVMPMHCSVNVGAENDPAIFFGLSGTGKTTLSADPDRILIGDDEHGWSSNGVFNFEGGCYAKMIRLSEKAEPEIYQTTKLRGTILENVVIDRDSGEIDLDDSSLAENTRGAYPLSFIPNASETGRTGMPKNIILLTCDAFGVLPPIAKLSSSQTMYHFLSGYTAKVAGTEKGVTEPEATFSACFGAPFMPRHPSEYGKLLQKLIAEHSVKCWLVNTGWTGGPYGKGERMPIDATRKLLSSALNGSLLSAEMRIDENFGFEVPSYVDGVDTNILNPRDTWEDKEGYDFQAQKLVKMFSDNFDVFKPYVDIDIIEAAPNLQAAE

SEQ ID NO: 176027 - protein, 507 aa, Unknown
  Bacterial polypetide isolated from the Sargasso Sea
MSRELNLTNSKLIEQAIANGEGELTNTGAFLALTGNRTGRSPSDRFIVQENSTADKIDWGEVNIPFEADHFDDLWSKVSDYLDSKDCYMSEVHVGSNKDHYIPVVVKSEKAWHSLFSKLIFIVPEIFNEEEKETWKIMTAADYVCDPEVDHTNSESCVIINFLRRKVLIAGMKYAGEMKKSMFAVQNFLLPEKDVLPMHCSANQTKDKRTTLFFGLSGTGKTTLSADPKCSLIGDDEHGWSDGAVFNLEGGCYAKCIKLSKENEPLIWDAIKFGSILENVAIDENGIPDYDDDRYTENTRVCYPRDFIEGSVPENQGGEPDNIIFLTCDLSGVLPPVSMLNENSAAYHFLSGYTAKVGSTEVGSTKSMDFAFSTCFGAPFFPRPAGEYADLLIKRMQKNNTKVFLVNTGWTGGGYGVGERFPIPVTRAIINAIQENEIDTDDFNHLEKLNLNVPKDIKGVKQELLNPRNCWASADDYDEECDKLCMKFKENFRKFDVAQQIIDAGPR

SEQ ID NO: 176028 - protein, 320 aa, Unknown
  Bacterial polypetide isolated from the Sargasso Sea
MDNQTKALHSLELTTEELIKAAVDNDEGIIASNGAFSTNTGKRTGRSPNDRFIVKEPGTDNLIDWGEVNKPFDEDKFDLLWNKVESYLAEKNRYLSKVHVGSHDEHYLPVSITTETAWHSLFARLIFVCAENYNSSMKQEWQIISAANFECDPDEDGTNSESCVIINFAKRKVIIAGMKYAGEMKKSMFSVQNFLLPEKDVLPMHCSANVNAKGDVALFFGLSGTGKTTLSADPQCSLIGDDEHGWSPGSVFNFEGGCYAKTINLTEENEPVIFKAIKHGSVIENVFLNKLNEPDYSNTSLSENGRCCYPRSHIDAAVKK

SEQ ID NO: 176029 - protein, 370 aa, Unknown
  Bacterial polypetide isolated from the Sargasso Sea
CYFVCDPSKDGTNSDGCVIINFAKRKVILAGMKYAGEMKKSMFSVQNFLLPEKGVLPMHCSANVNSNGNVALFFGLSGTGKTTLSADPKCSLIGDDEHGWSKGSVFNFEGGCYAKTINLTEENEPVIYKAIKHGSVIENVFINEDGTPDYSNTSLSENGRCCYPRSHIEDAVDSNAAGEPKTVIFLTCDLTGLIPPVSLLSKEAAAYHFLSGYTAKVGSTEMGSGSDIESTFSTCFGAPFFPRPANEYADLLMERIEGFNSKVFLVNTGWTGGPYGVGSRFKIPTTRRIVNAIQDGELDNVETTTIPGLNLSVPLKVDGVDSELLNPINTWKNKDEYEKYLSQLITKFQENFKKFNAKPEIVKAGPGFND

SEQ ID NO: 176030 - protein, 238 aa, Unknown
  Bacterial polypetide isolated from the Sargasso Sea
AIRRDALLENVTVREDGSIDFDDGSKTENTRVSYPIYHIDNIVKPVSKAGHATKVIFLTADAFGVLPPVSRLTADQTQYHFLSGFTAKLAGTERGVTEPTPTFSACFGAAFLSLHPTQYAEVLVKRMQAAGAQAYLVNTGWNGTGKRISIKDTRAIIDAILNGSLDDAETFRLPMFDLAIPTELPGVDTRILDPRNTYASPEQWQEKANALAKLFIENFEKYTDTPAGEALVSAGPKL

SEQ ID NO: 176031 - protein, 509 aa, Unknown
  Bacterial polypetide isolated from the Sargasso Sea
MSSVYENLSVEELIEKALERSEGEIASNGALLVKTGKRTGRSPLDRFIVKDELTENSVDWGDVNKPFASDAFDELWTRVESYLNERDTFISSLHVGEHSDYYVPVKIRTEWAWHNLFGKQMFIRPEVYNPNGKDNWEIMSAPEFVCEPDRDATNSDGVVLLDFSRKKVLLAGMPYAGEMKKSMFAVQNFLLPEKDVLPMHCASNVGSNGEVCLFFGLSGTGKTTLSADPERNLIGDDEHGWGPGTVFNFEGGCYAKCIDLTQENEPVIWDAIRKGSVMENVVIDPESKNPDYSNSSLTENTRVVYPREHIEKRADENAAGEPNAVIFLTCDLSGVIPPVSILSKEAAAYHFLSGYTAAIGSTEVGSTEAFKTTFSTCYGAPFFPRAAGVYADLLMKRIEEFDSKVYLVNTGWTGGPYGVGKRFDIPVTRAIISAIQSGTLVGAETETVAGMNLEVPVELDGVDSKLLNPIKNWADPSSYAEYEAKLVSQFKENFQKFNVSQSIVEAGPR

SEQ ID NO: 176032 - protein, 239 aa, Unknown
  Bacterial polypetide isolated from the Sargasso Sea
MKIYGNDLGLDSLGLNNLKNVHRNLSVSELVDDIVNNKEGLIGLRGAAMVDTGIYTGRSPQDKYIVDEPSSNEKLWWGPVNKKISEEIFDMLYGKITDYYNSTDHTKTYVFDGFAGADPNYSLNVRIIAKKAWQAHFVNNMFIRPKNGELDEFKPGFTIINASDVSNERFDDFGMNSETFIIFHMEKRIAIIGGTEYGGEMKKGIFSVLHYLLPQKGVLSMHCSANVQEDQKNPAIFFG

SEQ ID NO: 176033 - protein, 328 aa, Unknown
  Bacterial polypetide isolated from the Sargasso Sea
MDTSSQTSEALELTNEELITAAVNNGEGVIANNGAFSTETGERTGRSPNDRFIVKEPGSSNLIDWGDVNIPFEEDNFNSLWDKVETYLAEKDRYVSRVHVGSHSEHYLPVRVTTETAWHSFFARLIFVCSENYNPNNKKEWEILSAANFQCDPESDGTNSESCVVINFAQRKVIIAGMKYAGEMKKSMFSVQNFLLPEKNVLPMHCSANVNKNGNVALFFGLSGTGKTTLSADPKCSLIGDDEHGWSPGSVFNFEGGCYAKTINLSEENEPVIFNAIKHGSVIENVFLNNNEPDYSNTSLSENGRCCYPRSHIKNAVEANAAGEPKNL

SEQ ID NO: 176034 - protein, 221 aa, Unknown
  Bacterial polypetide isolated from the Sargasso Sea
MTIVAEPTLAKQLGLDQYGIKNSTEILRNPSYDQLFAEETRADLEGFERGVVTELGAVNVNTGIFTGRSPKDKYIVKDATTQNTVWWSDQGKNDNKAISPEVWSHLKSLVTKQLSGKRLFVVDGFCGANPDTRLAVRIITEVAWQAHFVKNMFIRPSDEELKTFKPDFVVMNGAKCTNPNWKEQGLNSENFVAFNLTEKIQLIGGTWYGGEMKKGMFSMMN

SEQ ID NO: 176035 - protein, 190 aa, Unknown
  Bacterial polypetide isolated from the Sargasso Sea
GEPNAVIFLTCDLSGVIPPVSILSKEAAAYHFLSGYTAAIGSTEVGSTEAFKTTFSTCYGAPFFPRAAGVYADLLMKRIEEFDSKVYLVNTGWTGGPYGVGKRFDIPVTRSIISAIQSGALSGVETETIEGMNLDVPLNVEGVDSNLLNPIKNWSDPSSYAEYENKLVTQFKDNFKKFDVSQSIVEAGPR

SEQ ID NO: 176036 - protein, 370 aa, Unknown
  Bacterial polypetide isolated from the Sargasso Sea
WGEINRPFDEEKFHSLWSKVESYLDDKESFLTKVHVGSHPEHYLPIEITTETAWQSLFSRLIFIDPDEFNPKDKSNWKILSAANFECVPEIDGTNSDGCVIINFKEEKVLIAGMKYAGEMKKSMFSVQNFLLPAKDILPMHCSSNINDKNSVALFFGLSGTGKTTLSADPACTLIGDDEHGWSQGSVFNFEGGCYAKCIDLSEENEPVIWKAIKDGSILENVVLNDGVPDYTDVSLTQNSRCCYPRTHIEKAVPENYAGEPKTVIFLTCDLTGVLPPVSILSKEAAAYHFLSGYTAKVGSTEIGSSSDIESTFSTCFGAPFFPRPAGVYADLLMKRVENFGSKVFLVNTGWTGGPYGVGKRFDIPTTRRI

SEQ ID NO: 176037 - protein, 256 aa, Unknown
  Bacterial polypetide isolated from the Sargasso Sea
RWQGFNNLTKALSFNIYDVCYARTEEERQRYIEYIDEEYNADRLTQILTDVAEIIGANILNVARQDYDPQGASVTILISEEPVIDKKLAGKELISDAVVAHMDKSHITVHTYPETHPQEGIATFRADIDVATCGVISPLKALNYLIESLESDIVIMDYRVRGFTRDVKGKKHYIDHKINSIQNFLAKNIKSRYEMFDVNVYQENIFHTKMHLKDFDLDQYLFEEKAKNISFKERMKIEALLKREIEELFHGRNLSE

SEQ ID NO: 176038 - protein, 121 aa, Unknown
  Bacterial polypetide isolated from the Sargasso Sea
MHGFNNLTKSLSFSIYDICYAPTEQDRQEYISYIDEQYNADRLTDILSEVVDIIGANILNVARQDYDPQGASVTILVCEEPIEKPEDAKNDNSEQPGPLPDAIVAHLDKSHICVHTYPEHH

SEQ ID NO: 176039 - protein, 248 aa, Unknown
  Bacterial polypetide isolated from the Sargasso Sea
SFSIYDICYAQTEQHRQEYISYIDEQYNADRLTDILSEVVDIIGANILNVARQDYDPQGASVTILVCEEPIEGSPDNSENPGPLPDSVVAHLDKSHICVHTYPEVHPHDGICTFRADIEVSTCGLISPLKALNFLIHSFESDIVTIDYRVRGFTRDVNGVKHYIDHPIHSIQNFMDEQTKNAFQMVDVNVYQENLFHTKMMLKEYDLNNYLFGTGVDELDDAARKVINKKVKREMREIFYGRNLPEME

SEQ ID NO: 176040 - protein, 270 aa, Unknown
  Bacterial polypetide isolated from the Sargasso Sea
MNKPFDKLKLHGFNNLTKSLSFSIYDICYAKTEQQRKEYIEYIDEQYSADRLTDILGEVVDIIGANILNVARQDYEPQGASVTILVSEEPVEEQQNYDADEAPGPLPDSVVAHLDKSHICVHTYPEAHPDDGICTFRADIEVSTCGIISPLKALNFLIHSLESDVVTIDYRVRGFTRDVNGVKHYIDHAINSIQNFMTDDTKEAYQMMDVNVYQENLFHTKMMLKETDLNTYLFGLSTTDLSDDEEEEIRSKLNREMQEIFYGRNLPETE

SEQ ID NO: 176041 - protein, 184 aa, Unknown
  Bacterial polypetide isolated from the Sargasso Sea
LVCEEPIEGSPDNSENPGPLPDSVVAHLDKSHICVHTYPEVHPHDGICTFRADIEVSTCGLISPLKALNFLIHSFESDIVTIDYRVRGFTRDVNGVKHYIDHPIHSIQNFMDEQTKNAFQMVDVNVYQENLFHTKMMLKEYDLNNYLFGTGVDELDDAARKVINKKVKREMREIFYGRNLPEME

SEQ ID NO: 176042 - protein, 233 aa, Unknown
  Bacterial polypetide isolated from the Sargasso Sea
ASDYASFNEFFTRPLKDGLRPINADADVVCQPVDGAISQLGDIVDGKLIQAKNHNYSLQALLGGDAATAAPYAGGKFATIYLAPKDYHRIHMPIAGTLREMIYVPGDLFSVNPLTAENVPDLFARNERVVTIFDTELGPMALVLVGATIVASIETVWAGTVTPPTGKDVFRWTYPATGPQAVTLEKGAEMGRFKLGSTVILAFQAGQIEFTDKQYPTAVTRMGEPFAEIVSKA

SEQ ID NO: 176043 - protein, 223 aa, Unknown
  Bacterial polypetide isolated from the Sargasso Sea
MSSAGDFPHFNAFFTRSLREGMRPLAASQWCHPADGVLSQRGAIAASELLQAKGRTYSVQQLLVGTPEEVDRYAQGSFATTYLSPRDYHRVHMPIRGHLVKTRYVPGDLFSVNAATVDRVDGLLARNERLVCFFETEHGGVVVVLVGAMIVAGIATVWGGREHPGAGEIREQMWAANEAPLLEQGQEMGRFFLGSTVVLVTEASDLSWANAAGDAVTVRSALA

SEQ ID NO: 176044 - protein, 214 aa, Unknown
  Bacterial polypetide isolated from the Sargasso Sea
MDNIFPKIHNEGYRFLIIFAVVTIILYFIHGFLGFVGLVLTIWCYYFFRDPERLSIDDDNYLISPADGTILQILETNGPKELELENKKFTKISIFMNVFDCHVNRTPCSGTVTEILYKPGKFINASLDKASEDNERNYYKIKNNKGEEIIVVQIAGLIARRIVCETKKEQELKQGSRIGMIRFGSRVDLYFENYKSLVKVNQKTIAGETLLASK

SEQ ID NO: 176045 - protein, 256 aa, Unknown
  Bacterial polypetide isolated from the Sargasso Sea
PFKNTLIKLFIKTFHVDMSIAEKENPHDYKSFNAFFTRKLKKDVRKMVIDDDYILSPVDGSISQMGYISKYKLIQAKNKNYTLEKLLGGDTDLADKFLNGCFATLYLSPRDYHRIHMPVTGRLIKSIYVPGNLFPVNRIGVENVDQLFSRNERFISIFETRHGMMAQIMVGAVLVGSMETVWLGEITPSEKCTLKITEYTEKFIDLNQGEEFGQFNMGSTVILLFQKDKLSWLPDIKNDRPIKVGQLLANSTASVK

SEQ ID NO: 176046 - protein, 223 aa, Unknown
  Bacterial polypetide isolated from the Sargasso Sea
MNIVDSIKASILTPIHPAGIPFIAIFFILTVIVGWFWSPLYFAGIVLTVWCIYFFRNPSRITPVLSGVNKNNLIISPADGKVIEIAKINPSEEMGLPEGDWTRVCVFMNVFDVHVNRSPMLGQITYKNYIPGSFFNASLDKASSQNERLILGMDTENGKKIAFVQIAGLVARRIICDVDIGSSLKAGEIFGLIRFGSRVDIYFPSDVAVMVLQGQKMIAGETI

SEQ ID NO: 176047 - protein, 140 aa, Unknown
  Bacterial polypetide isolated from the Sargasso Sea
PVVRVSVFMNVFDCHVNRIPCDGRIGKLVYVPGQFLNASLDKASEENERQMVRIDLESGAFIGAVQIAGLVARRIVCYLEEDQIVLAGERFGLIRFGSRVDIYLPHGAVSQAVIGQKCVSGETVLADLKSDEAARSGEVR

SEQ ID NO: 176048 - protein, 184 aa, Unknown
  Bacterial polypetide isolated from the Sargasso Sea
VHYFFRDPSRVTPDRDGLVISPADGVVQSIIEVTPPDELTMGSEPRTRIAVFMNVFNVHVNRIPIDGTISTAAYRPGKFINASFDKASEQNERQSLKITTESGQDVGCIQIAGLVARRIICHAKVGDRMRAGERFGMIRFGSRVDVYLPKGVAPKVLVGQLAVAGETVLADLGSDEATLHGETR

SEQ ID NO: 176049 - protein, 152 aa, Unknown
  Bacterial polypetide isolated from the Sargasso Sea
MDKVKIALQYMLPKHLLSRLVGKLAASEAGALTTAAIKWFIKQYKIDMSEAAQSEPEAYKSFNDFFTRALKPGIRPINTAANIMVHPVDGAVSQLGPIKDGRIFQAKGHHYSSLTLLGDQAEDAKRFEGGDFATIYLAPKDYHRIHMPIKGT

SEQ ID NO: 176050 - protein, 219 aa, Unknown
  Bacterial polypetide isolated from the Sargasso Sea
HPAGWPFIALFASAAIFMTWWFAPLGFAGLVLTAWCIYFFRDPPRVTPDRDGLIISPADGVVQSIVQAAPPDELEMGSEPRTRVAVFMNVFNVHVNRIPIHGTISAAAYRPGQFINASSDKASEQNERQSLKVTTEGGRDVGFVQIAGLVARRIICHAKVGDRMRAGERFGIIRFGSRVDVYLPDGVAPKVMVGQLAVAGETILADLSSDEVPQNGETR

SEQ ID NO: 176051 - protein, 135 aa, Unknown
  Bacterial polypetide isolated from the Sargasso Sea
VPLTRVSVFMSVFNCHVNRAPVPGKITAIAYRPGKFFNASLDKASKDNERNSLVIRMDDGQDIAVVQIAGLVARRIVCFVSKGDHVQAGGRFGLIRFGSRLDVYLPDGVKPLVRVGQTMIAGETVIAELAKDDQA

SEQ ID NO: 176052 - protein, 222 aa, Unknown
  Bacterial polypetide isolated from the Sargasso Sea
MVPIHSAGFPFIIIFALVSLILGSISDFLGWLGIFLTAWCVYFFRDPIRVVPNIKDSIISPADGKVLPIIEVQPPEEIGIKEKMKKISIFMNVFNVHVNRVPIGGKIKKLSYEPGAFFNASLDKASKLNERMSIKLEVEKGIEIVFVQIAGLIARRIKCELDENQIVKSGEKFGLIRFGSRLDIYLPLDSNINILEGQTVIAGETIIANLKRKKTGSKSIKT

SEQ ID NO: 176053 - protein, 188 aa, Unknown
  Bacterial polypetide isolated from the Sargasso Sea
MGVILTFWCVYFFRDPERVTPKKDNILVAPADGKILSISTELVPENLTEDKQNKMNKISIFMNVFNVHVNRIPVSGKVIWLKYVPGAFFNASLDKSSKKNERMISKIEIKKDVFVYVVQIAGLVARRIKCELEENQSVNIGDRFGIIRFGSRVDLYVPESFKINSLENQISIAGETILAEFDNKDVKK

SEQ ID NO: 176054 - protein, 185 aa, Unknown
  Bacterial polypetide isolated from the Sargasso Sea
FSQFGCVYFFRDPERVTPKKDNILVAPADGRILSISTELAPENLTEDKQKKMNKISIFMNVFNVHVNRIPVSGKVIWLKYVPGAFFNASLDKSSKKNERMISKIEIKRDVFVYVVQIAGLVARRIKCELEENQSVNIGDRFGIIRFGSRVDLYIPESFKINSLENQISVAGETIIAEFDNKDVKK

SEQ ID NO: 176055 - protein, 228 aa, Unknown
  Bacterial polypetide isolated from the Sargasso Sea
MLKAIFVPINRAGWPFIGIFFSITVIATVISEPLGWIGIILTAWCIYFFRDPERYTPTREGLVISPADGVIQSIEAAIPPSELDMGDEELNRIAIFMNVFDVHVNRIPIGGKISKLAYNRGRFFNASLDKASEFNERQSIRLTMPNKKDIAFVQIAGLIARRIKCDIKEKQLVITGERFGLIRFGSRVDVYLPKETPALVSTGQHCIAGETVIADFKSQELPRIGEIR

SEQ ID NO: 176056 - protein, 179 aa, Unknown
  Bacterial polypetide isolated from the Sargasso Sea
MYFRIHSEGWVFLVSCGVLTIIIFPFFPIIGFLLLIITFIVFYFFRDPVRSIPNDDVIISPADGQIVSIEDSELPEEINIKGNYLKISIFLDVFNVHVNRIPISGVVKEIHYIPGKFFRANVDKASKENERNIILIESEQKENIVVTQIAGLIARRIVCDLKLNQQVLKGNRFGIIKFG

SEQ ID NO: 176057 - protein, 227 aa, Unknown
  Bacterial polypetide isolated from the Sargasso Sea
LSVLATPIAREGWPFIAVFGIATLILFIYSTTLGWIGIVLTLWCIYFFRNPDRVTPQRAGLIISPADGIVQMITEVSPPIQLDMAASEVTRISVFMNVFDCHVNRAPCDGEIGRLVYVPGKFLNASFDKASDENERQMLRLDLDDGRSIGAVQIAGLVARRIVCYLEEGQQVLAGERFGLIRFGSRVDIYLPSGVMPQVIVGQRCIAGETVLADLSSDEVSRIGEIR

SEQ ID NO: 176058 - protein, 290 aa, Unknown
  Bacterial polypetide isolated from the Sargasso Sea
MSITDNLKIAGQYCLPKHALSRLVGKLAAAEAGNLTTRVIEAFIKQYQVDMSEALHESPAHYKSFNEFFTRELKPGIRPLVEDAMTLALPVDGTVSQLGPIQQGRIIQAKGHDYSARELLGGYEDLVAPFKDGDFATIYLAPKDYHRIHMPLDGVLESMVFVPGDLFSVNPLTAENVPNLFARNERVVATFRTPHGPMALVLVGATIVASIETIWAGNIAPTKEKRVVRWDYSGDEAITLQKGAEMGLFKLGSTVVCLFGPGMLAGFEPHLANGVTTRMGQPFAKLAAQA

SEQ ID NO: 176059 - protein, 213 aa, Unknown
  Bacterial polypetide isolated from the Sargasso Sea
MNKKYFGIHREGWKFFIAFISLSFVSFFFAKTIFFLFFLLSLFTLWFFRDPERHFDSKDNQLLSAADGKICFIGEENPPSETQFKEKMKKISIFMNVFNVHVNRSPVDGNIEKIIYKNGKFFNASLDKASEHNERNSFIIKTNTDKIVVVQIAGLIARRILSFISEGDKIDKGDRIGLIRFGSRVDIYFPPTYDIKVKQDDIVVAGETIIAER

SEQ ID NO: 176060 - protein, 292 aa, Unknown
  Bacterial polypetide isolated from the Sargasso Sea
MDKVKIALQYMLPKHLLSRLVGKLAASEAGALTTAAIKWFIKQYKIDMSEAAQSEPEAYKSFNDFFTRALKPGIRPINTAANIMVHPVDGAVSQLGPIKDGRIFQAKGHHYSSLTLLGDQAEDAKRFEGGDFATIYLAPKDYHRIHMPIKGTLSKMTYVPGELFSVNPLTARHVPGLFARNERVVAIFETELGPLAMVLVGATIVASIETVWAGTITPPTGKQVFTWEYPTVGPDAITLDKGEEMGRFKLGSTVVMLFAKDAIDTFAEGVEPEAVTRMGQAFANLKNQASAD

SEQ ID NO: 176061 - protein, 215 aa, Unknown
  Bacterial polypetide isolated from the Sargasso Sea
MFSKIFPKLHSEGYKFVVIAIILTIILYNFSGFLGALGLAISVWVYYFFRDPDRVIIEDDNYLVSPADGEVIKVEEVDGPKELNLENKKFNKISIFMNVFDCHVNRTPCAGSVEEILYKPGKFFNASLDKASEDNERNYYRIKDINENQIVVVQIAGLIARRIVCETNKNQELKQGERIGMIRFGSRVDIYYENFKPLVKIGQKAISGETLLAKK

SEQ ID NO: 176062 - protein, 233 aa, Unknown
  Bacterial polypetide isolated from the Sargasso Sea
MEKNLFSSVFATPIAREGWPFIAVFGIITLVLFIFSAVLGWVGVILTLWCIYFFRNPDRVTPQRTGLIISPADGVVQMITELSPPLQLDMTGTEVIRISVFMNVFDCHVNRAPCDGQIGRLVYVPGKFLNASFDKASEENERQMLRLDLEDGRFVGAVQIAGLVARRIVCYLEEGQKVLAGERFGLIRFGSRVDIYLPPGVMPQVVVGQRCVAGETVLADLISDEVSRTGEIR

SEQ ID NO: 176063 - protein, 210 aa, Unknown
  Bacterial polypetide isolated from the Sargasso Sea
MRSPIAKEGFIFIIPLAFLAAVFYSFSNYWATGLFEGLFLFCCWFFRDPERSIPQEPRVIVSPADGKVVEIIKEGDPLLPNDNYIRVSIFLNVFNVHVNRVPIAGKIEAKRYNKGKFLNAANHKASLDNEQNTILLNNGSTKILVKQIAGLIARRIVCYAKEGDDYRLGQRFGLIRFGSRTDIFVPEGTELKAKKGDIVSGGSSIIGYLK

SEQ ID NO: 176064 - protein, 292 aa, Unknown
  Bacterial polypetide isolated from the Sargasso Sea
MDKVKIALQYMLPKHLLSRLVGKLAASEAGALTTAAIKWFIKQYKIDMSEAAQSEPEAYKSFNDFFTRALKPGIRPINTAANIMVHPVDGAVSQLGPIKDGRIFQAKGHHYSSLTLLGDQAEDAKRFEGGDFATIYLAPKDYHRIHMPIKGTLSKMTYVPGELFSVNPLTARHVPGLFARNERVVAIFETELGPLAMVLVGATIVASIETVWAGTITPPTGKQVFTWEYPTVGPDAITLEKGEEMGRFKLGSTVVMLLAKDAIDTFAEGVEPEAVTRMGQAFANLKNQASAD

SEQ ID NO: 176065 - protein, 314 aa, Unknown
  Bacterial polypetide isolated from the Sargasso Sea
AFNVNNLEQVQAIMEAAYETDSPVILQASRGARNYAGEIFLRHLILAATETYPNIPVVMHQDHGNEPSTCYSAAINGFTSVMMDGSLEADAKTPASYEYNVAVTKKVVDFAHSVGVSVEGELGCLGSLETGKGEAEDGHGFEGELSTDMLLTDPEEAADFVAKTKVDALAIAIGTSHGAYKFTRKPTGEVLAISRIAEIHKALPNTHLVMHGSSSVPQEWLDIINKYGGEIPQTYGVPVEEIQEGIRNGVRKVNIDTDNRLAFTAAVREAAFADKANFDPRHFNKPARKYMKQVCLDRYKQFWCEGQASKIKQN

SEQ ID NO: 176066 - protein, 301 aa, Unknown
  Bacterial polypetide isolated from the Sargasso Sea
MDLSSLNSIAQSMVAPNKGILAADESTPTIGKRFATIDTESTEGNRQTYRNLLFTSPNVSEYISGVILFDETIRQSTDDGIPFPEHLTSLGIVPGIKVDKGIKGIPFCKGETVTEGLDGLAERLSEYYELGARFAKWRAVINISADLPSNNCIRLNAHALARYAALCQQAQMVPIVEPEVLMDGNHDIDRCFDVTSKVLQEVFAELNKQKVALNGIVLKPNMVISGMDAANRADIPTVASATVKCLTENVPDEVPGIAFLSGGQTSEEATAHLSSMNEMGSYPWQLTFSYGRSLQAEPLKV

SEQ ID NO: 176067 - protein, 207 aa, Unknown
  Bacterial polypetide isolated from the Sargasso Sea
MSLEEIANYIVSDGKGILAADESNPTCGKRFDSIEVENSEDNRRDYREMLFRSKGMKGNIGGVILFDETLRQDAKDGTPLKELISNMGALPGIKVDKGLVPLVDGLDEVVTQGLDGLDERCSEYDSLGAKFTKWRAVIKIGDSMPSDDCINANAKALADYAAIAQSNNMVPIVEPEVLMDGSHSIDLSYDACARSFQALFDALDNNG

SEQ ID NO: 176068 - protein, 303 aa, Unknown
  Bacterial polypetide isolated from the Sargasso Sea
MNDLSQTILPGVIVGDEVSAIYNHARANQYALPAVNVVSTTSINATLEAAKEMKSPVIIQLSNGGAQFFCGKGLSLPEQQGAVLGAVSAARYVHSVAAHYEIPVMLHTDHAAKKLLPWIDGLLDEGERHFRLTGKPLFNSHMIDLSEEPLEENIEICERYLARMAKIGMTLEIELGCTGGEEDGVDNSHLDSSALYTQPEDVAYAYERLSAISPNFIIAASFGNVHGVYKPGNVVLTPTILKDSQAYVAKKFNLPSNSINFVFHGGSGSEEEKIAESLTYGVVKMNIDTDTQWACWNGVLDYY

SEQ ID NO: 176069 - protein, 243 aa, Unknown
  Bacterial polypetide isolated from the Sargasso Sea
MDLSSLNSIAQSMVAANKGILAADESTPTIGKRFATIDTESTESNRQIYRNLLFTSPNVSEYISGVILFDETIRQSTNDGTPFAEHLTSLGIVPGIKVDKGVKGIPFCDGETVTEGLDGLDERLDEYYELGARFAKWRAVISISEDLPSKNCIRLNAHALARYAALCQQAQIVPIVEPEVLMDGTHDIDRCFDVTSEVLQEVFAELNNQQVALNGIVLKPNMVISGMNAANRADIPTVASATG

SEQ ID NO: 176070 - protein, 264 aa, Unknown
  Bacterial polypetide isolated from the Sargasso Sea
MSLEEIANYIVSDGKGILAADESNPTCGKRFDSIEVENSENNRRDYREMLFRSKGMKGNIGGVILFDETLRQDAKDGTPLKELISNSGALPGIKVDKGLVPLVDGSDEVVTQGLDGLDERCSEYDSLGAKFTKWRAVIKIGDSMPSDDCINANAKALADYAAIAQSNNMVPIVEPEVLMDGDHSIDLSFDACARSFQALFDALENNGVNIKGTILKPSMVTPGSLSEKVAIREVAEMTVRCLKENIPSDLPGVAFLSGGQTELE

SEQ ID NO: 176071 - protein, 253 aa, Unknown
  Bacterial polypetide isolated from the Sargasso Sea
MSLNSIEDIATYIVADGKGILAADESNPTCGKRFDSIGVESTEVNRRDYREMLFRSKGMKGNIGGVILFDETIRQSADDGTLLRDLISDQGALPGIKVDKGLQPIEDCPGETVTVGLEGLDERLKEYATMGAKFTKWRAVINIGDGIPTNKCIDANMEALADYAKCAQDNGMVPIVEPEVLMDGNHCIDECYDATERSLKSLFSYLKKKGVNIKGTLLKPNMVTSGKDAEEQAGINDVAEKTLDCLITNVPSS

SEQ ID NO: 176072 - protein, 223 aa, Unknown
  Bacterial polypetide isolated from the Sargasso Sea
MALNYYKNELKENAQLLATKGKGILAVDESTKTVGKRLAGIGVENTEDNRKAYRGMLFTTEGLGKYISGAILFEETLYKNHQDGESMVKKLNDLGIIPGIKVDKGLNPLPGGGDVETFCSGLDGLVERAAKYYEQGARFAKWRAVLQITNDGCPSKLSIQENAWGLARYARSVQESGLVPIIEPEILMDGDHTIEKTAEVQEEVIKQVYIALSANGVFLESTL

SEQ ID NO: 176073 - protein, 232 aa, Unknown
  Bacterial polypetide isolated from the Sargasso Sea
MSLEFESLNDIAEAMTVKGKGILAADESSPTCKKRFDSINVDSTEKNRNIYRDMLFTTKGMEEFISGVILFDETIRQSTIRDGFSFPDYLSGLGVIPGIKVDAGAKHLSGTDSEKITEGLDGLDGRLKDYYKMGARFAKWRAVITIGNNEPSGTCITANAHALARYASLCQENGIVPIVEPEILMDGDHTIEESFVVSEEVLHTVFYELYGQNVELEGMVLKPNMILSGYDC

SEQ ID NO: 176074 - protein, 305 aa, Unknown
  Bacterial polypetide isolated from the Sargasso Sea
YKIAKKILQNGKGILAADESTGTMKKRLDLVNVESNEKNRLIFRETLFSSNSMKECIGGVILYDETIKQKTLQNKSIPELISESGAVPGIKVDTGTKTLAGSKDEKITEGLDGLRERLKDYYQLGARFTKWRGVYVISDTFPSKLSISANAHALARYAALAQEAGMVPIVEPEVLMDGKHSAKDCFSKTSEVIKRCYEELNINKVDLKGTILKPNMILPGTMSNETISNIEVAEMTLECLKNNVPSEVPGVAFLSGGQSEIEATNNLNQINVENNTNFILTYSYGRALQQSALKIWSKDTNNIEG

SEQ ID NO: 176075 - protein, 244 aa, Unknown
  Bacterial polypetide isolated from the Sargasso Sea
VDKGAKLLAGSDKEKVTEGLDGLGERMEEYYELGARFAKWRAVYSISSKLPSEQCIKSNAHALARYAALVQESKMVPIVEPEVLMDGNHTIDNCYDVTSKVLKECYKELAIHNVNLRGTVLKPNMILPGSNCKQKATTEEIAKKTLECLKKNMPSEVPGVAFLSGGQSEVEATKNLNAINKINDTSFNFTFSYGRALQQSALKTWAKSMQDTKKIQKVFDHRAKMNGASTEAKWDEKLEQSFAA

SEQ ID NO: 176076 - protein, 302 aa, Unknown
  Bacterial polypetide isolated from the Sargasso Sea
MEIEKIAKLMVAKGKGILAADESNGTMGKRLQSVNVESTEKNRLHFRETLFTSNAMKTSISGVILYDETIRQKSSEGIPITELIKKSGSIPGIKVDTGAKPLAGSNDEKVTEGLDGLRERMFEYYKLGARFAKWRAVYDITSKHPSEQCIKANAHALARYAAIVQEANMVPIVEPEVLMDGDHTINKCYEVTSKVLIECYKELKINNVRLEGTILKPNMILPGASCKQKTTSDEIAKKTLECLKTTMPKEVPGAAFLSGGQSEIEATKNLNAINKINDTKFNFTFSYGRALPQSALKTGLSQ

SEQ ID NO: 176077 - protein, 291 aa, Unknown
  Bacterial polypetide isolated from the Sargasso Sea
PAFNVNNLEQVQAIMEAAYETDSPVILQASRGARNYAGEIFLRHLILAATETYPNIPVVMHQDHGNEPSTCYSAAINGFTSVMMDGSLEADAKTPASYEYNVAVTKKVVDFAHSVGVSVEGELGCLGSLETGKGEAEDGHGFEGELSTDMLLTDPEEAADFVAKTKVDALAIAIGTSHGAYKFTRKPTGEVLAISRIAEIHKALPNTHLVMHGSSSVPQEWLDIINKYGGEIPQTYGVPVEEIQEGIRNGVRKVNIDTDNRLAFTAAVREAAFADTANFRPRHFHKPCRNT

SEQ ID NO: 176078 - protein, 271 aa, Unknown
  Bacterial polypetide isolated from the Sargasso Sea
MSLNNIEDIAAYIVADGKGILAADESNPTCGKRFDSIGVESTEENRRDYREMLFSSKGMKGNIGGVILFDETIRQSAADGTLLRDLITSQDALPGIKVDKGLQPIDDCPGETVTVGLDGLDERLKEYSSMGAKFTKWRAVINIGEGIPTDKCIDANMQALADYAKCAQDNGMVPIVEPEVLMDGVHSIDDCYDASDRSLKSLFDHLDKKGVNIKGTILKPNMVTSGKDSDIQASIGEVAKRTLECLTENVPSDLPGIAFLSGGQSDILATA

SEQ ID NO: 176079 - protein, 281 aa, Unknown
  Bacterial polypetide isolated from the Sargasso Sea
EIISNGKGILAADESTGTMTKRLESVGVSSTSENRLSFRNILFSSSCMRKYIGGVILYDETIRQLYNNIKIPEIISNMGSHPGIKVDTGAKVLAGSKEEKITEGLDGLRERLKEYHSLGAKFTKWRGVYTISEKYPSKLSITSNAHALARYSAIVQECNMVPIVEPEVLMDGNHSANDCLKKTTEVIKKCFDELILHNVDLSGIILKPNMILPGNNSKQKISSQEVANLTIECLKNSVPSEVPGIAFLSGGQSEVEATENLNLINKNNNTKFIMTFSYGRA

SEQ ID NO: 176080 - protein, 291 aa, Unknown
  Bacterial polypetide isolated from the Sargasso Sea
MLPETLEEIANYIVADGKGILAADESTGTIEKRFKSIDVESTEENRRKYREMLFRSSAMTEAIGGVILFDETLRQNAADGTPLREVILSQKSLPGIKVDQGVQPFNGSDTEKITQGLDGLDERCKEYDNLGAKFTKWRAVINIGDSIPSNDCINDNMKSLAKYASIAQQNNMVPIVEPEVIMDGNHSVDQCYDTTKNVLQKLFDLLEKENVNIKGTLLKPNMVVSGTENEYQAPVQEVAEKTVECLKLSIPSDLPGVVFLSGGQSDLDATAHLDAMNKIGGFNWKLSFSYG

SEQ ID NO: 176081 - protein, 270 aa, Unknown
  Bacterial polypetide isolated from the Sargasso Sea
MLPKTLEDIAKYLVAEGKGILAADESSKTIEKRFKAIHVASTAENRRKYREMLFRSSSLPKAISGVILFDETLRQQAADGTFLRDILHAQGTLAGIKVDLGPKPFNEQTGETLTTGLEGLMERCREYKALGATFTKWRAVIHISDTKPSDSCIHANMQALAEYAAIVQQNQMVPIVEPEVIMDGNHTIDRCYDVTKKTLTVLFEQLKQKDVNIKGTLLKPNMVISGTENPHQASIQEVAEKTLRCLTATVPETLPGIVFLSGGQSDIDAT

SEQ ID NO: 176082 - protein, 276 aa, Unknown
  Bacterial polypetide isolated from the Sargasso Sea
MTILNNIALEIISDGKGILAADESTATMTRRLDSVGVSSTSENRLAFRNILFSSESMRKCIGGVILYEETIRQSYNSKRIPEIISNMGSHIGIKVDTGAKTLAGSPHEKITEGLDGLRERLKEYYNLGAKFTKWRGVYIISQKYPTKLSMKSNAHALARYAAIVQECKMVPIVEPEVLMDGSHSANECLEKTSKVIKECFNELMLHNVDLSGLILKPNMVLAGSDSGDKISGDEVAKLTLECLKNSVPKEVPGIAFLSGGQSEVEATENLNLINKY

SEQ ID NO: 176083 - protein, 287 aa, Unknown
  Bacterial polypetide isolated from the Sargasso Sea
MPLISMRQLLDHAAENDYGVPAFNVNNLEQIRAIMEGAQQMNSPVIIQASAGARKYSGPIFIKNMMQAAVEEFPTIPIVMHQDHGGTPDECEECIELGFTSVMMDGSLLSDQKTPSNFDYNVKVTKETVKIAHAKGVSVEGELGCLGSLETGMGEKEDGVGAEGVLSHSQLLTDPAEAADFVDQTQVDCLAIAIGTSHGAYKFTKPPTGEVLAINRIKDIHQKIPNTHLVMHGSSSVPKELLDIINDNGGKISETYGVPIKEIQEGIKNGVRKVNIDTDLRLAATAA

SEQ ID NO: 176084 - protein, 286 aa, Unknown
  Bacterial polypetide isolated from the Sargasso Sea
FNVNNLEQVQAIMEAAYETDSPVILQASRGARNYAGEIFLRHLILAATETYPNIPVVMHQDHGNEPSTCYSAAINGFTSVMMDGSLEADAKTPASYEYNVAVTKKVVDFAHSVGVSVEGELGCLGSLETGKGEAEDGHGFEGELSTDMLLTDPEEAADFVAKTKVDALAIAIGTSHGAYKFTRKPTGEVLAISRIAEIHKALPNTHLVMHGSSSVPQEWLDIINKYGGEIPQTYGVPVEEIQEGIRNGVRKVNIDTDNRLAFTAAVREAAFADTANFDPRHFNKPA

SEQ ID NO: 176085 - protein, 262 aa, Unknown
  Bacterial polypetide isolated from the Sargasso Sea
SGAKHVHAVAEAYGVPVILHTDHAAKKLLPWIDGLLDAGEKHFAETGKPLFSSHMLDLSEESLEENIDICCEYLTRMAKMNMTLELELGCTGGEEDGVDNSHMDQSALYTQPEDVAYAYERLSKISPRFTIAASFGNVHGVYKPGNVKLTPSILDASQKYVSEKFGLPAKSLDFVFHGGSGSTLEEIRESISYGVVKMNIDTDTQWATWEGILGFYKKNEAYLQGQLGNPEGADKPNKKFYDPRVWLRAGQTTMIARLEKAF

SEQ ID NO: 176086 - protein, 165 aa, Unknown
  Bacterial polypetide isolated from the Sargasso Sea
MALITLRQLLDHAAENQYGVPAFNINNMEQGLAILKAADSTDSPVILQASRGARAYAGDIMLSHIVAALAKMYPTIPICMHQDHGNNEATCMTAIGHGFTSVMMDGSLESDQKTPASYDYNVQITKKVAEIAHWVGASVEGELGVLGSLETGEAAKEDGSGAEGK

SEQ ID NO: 176087 - protein, 294 aa, Unknown
  Bacterial polypetide isolated from the Sargasso Sea
IGNRLKFRKTLFTSESMKSCIGGVILYDETIKQSVGSKSVSELISSSGAVAGIKVDTGAKTLSSSKEEKITEGLDGLRERLKEYYKLGARFAKWRGVYTISKTYPTKVAISTNAHALARYAALAQESGMVPIVEPEVLMDGTHNSKTCLEKTTEVIKKCFEELILQKIDLKGVILKPNMILPGTTSDEKINSEKIAELTLKCLNDSVPKEVPGMAFLSGGQSEIQATENLNMINLKNNSNFKMTFSYGRALQQSALKFWAKNQDEIKKTQEIFNHRANMCTLAAKGKWKKELEK

SEQ ID NO: 176088 - protein, 209 aa, Unknown
  Bacterial polypetide isolated from the Sargasso Sea
MTLEEIAKKMCAKGKGILAADESTGTIAKRFKSINVENTEKNRLVFRQTLFSSRSMKNYIGGVILFDETIKQKTTLGPTIPELISQNGAIPGIKVDKGAKPLAGSLDETVTEGLDGLRERLKEYYELGARFAKWRAVIKIGIKFPSSQSIKSNAHALARYAALVQESKMVPIVEPEVLMDGSHDIDKCYQVTTDVLNECYNELEIHKVD

SEQ ID NO: 176089 - protein, 249 aa, Unknown
  Bacterial polypetide isolated from the Sargasso Sea
MRDIISNQGALPGIKVDKGLQPIEDCPGETVTIGLDGLDERLKEYSSMGAKFTKWRAVINIGDGIPTDKCINANMQALADYAKCAQDNGMVPIVEPEVLMDGEHSIHDCYAATDRSLKTLFAHLEKNGVNIKGTLLKPNMVTSGKDFIEQAGIDEVAHKTLDCLIKNVPAELPGITFLSGGQSDILATAHLDAMNRIGGFTWKLSFSYGRALQAPALKAWNGKPENVFISQDELSHRAEMNKLASLGQW

SEQ ID NO: 176090 - protein, 244 aa, Unknown
  Bacterial polypetide isolated from the Sargasso Sea
MALNYYKNELKENAQLLASKGKGILAVDESTKTVGKRLAGIGVENTEENRKAYRGMLFTTEGLGKYISGAILFEETLYQNHPDGESMVKKLNDLGIIPGIKVDKGLNPLPGAGDVETFCSGLDGLVERAAKYYEQGARFAKWRAVLQITNDGCPSKLSIQENAWGLARYARSVQESGLVPIIEPEILMDGDHIIEKTAEVQEEVIKQVYIACPANGVFLEGTLLKPSMTVNGADCPQRLIPIKL

SEQ ID NO: 176091 - protein, 283 aa, Unknown
  Bacterial polypetide isolated from the Sargasso Sea
MSLNNIEDIAAYIVADGKGILAADESNPTCGKRFDSIGVESTEENRRDYREMLFRSKGMKGNIGGVILFDETIRQSAADGTLLRDLITSQDALPGIKVDKGLQPIDDCPGETVTVGLDGLDERLKEYSSMGAKFTKWRAVINIGEGIPTDKCIDANMQALADYAKCAQDNGMVPIVEPEVLMDGVHSIDDCYDASARSLKSLFDHLDNKGVNIKGTILKPNMVTSGKDSEIQASIGEVAKRTLECLTENVPSDLPGIAFLSGGQSDILATAHLDAMNKIGGFS

SEQ ID NO: 176092 - protein, 265 aa, Unknown
  Bacterial polypetide isolated from the Sargasso Sea
MAIISLRQLLDHAAANNYGVPAFNVNNLEQIRAIMEGANEVNSPVIVQASAGARKYAGPKFIKSMMEAAVEEFPQIPIVLHQDHGGSPADCKVCIDLGFSSVMMDGSLLEDQKTPSDFDYNVKVTRETVNMAHNLGVSVEGELGCLGSLETGMGDKEDGVGAEGVLSHDQLLTDPEEAAEFVKSTNVDALAIAIGTSHGAYKFSRPPSGDILAIDRIKEINNKLPNTHLVMHGSSSVPQDLIKIINENGGKIKETYGVPVSEIQE

SEQ ID NO: 176093 - protein, 277 aa, Unknown
  Bacterial polypetide isolated from the Sargasso Sea
SLAASRGARAYAGDRLLARLIDGLVETFPEVPVCMHLDHGSDLATCATAIQHGFTSVMMDGSLLADGKTPADYAYNRDITARVVEMAHACGVSVEGELGVLGSLETGMGDQEDGHGATEKLSEEQLLTDPEEAERFVRETGVDALAVAMGTSHGAYKFTRQPDGDILAMNVIEEINRRLPNTHLVMHGSSSVPEDLRQMINSYGGDMRPTWGVPVEEIQRGIRSGVRKVNIDTDNRMAMTAGVRKVLSETPGEFDPRKYLTEGKALMQQLCKARFEA

SEQ ID NO: 176094 - protein, 280 aa, Unknown
  Bacterial polypetide isolated from the Sargasso Sea
KIISRGKGILAADESNGTMTNRLTAVNVNSTPENRLLFREILFSSECMKDCIGGVILYDETINQTTSFGKSIPDLISASGAVPGIKVDTGAKELANSHNEKITEGLDGLRDRLKKYYELGARFTKWRGVYSISNKHPTKLAMNSNAHALARYSALVQENGMVPIVEPEVLMDGEHSADICLNKTSEIIKKCFEELILHKVDLSGIILKPNMILAGTQSKEKATSEEVADKTLECLKNSVPSDVPGIAFLSGGQSELEATENLNLIYKKNNTNFIMTYSYG

SEQ ID NO: 176095 - protein, 222 aa, Unknown
  Bacterial polypetide isolated from the Sargasso Sea
MTLEEIAKKMCAKGKGILAADESTGTIAKRFKSINVENTEKNRLVFRQTLFSSKAMKNYIGGVILFDETIKQKTTLGPTIPELISKNDAIPGIKVDKGAKSLAGSPDETITEGLDGLRERLKEYYELGARFTKWRAVYKIGNHYPSLTSIKSNAHALARYASLVQEAKMVPIVEPEVLMDGSHDIDKCYQVTTDVLNECYNELAIHKVNLKGTVLKPNMILP

SEQ ID NO: 176096 - protein, 297 aa, Unknown
  Bacterial polypetide isolated from the Sargasso Sea
MSELHKIAGDLVAAGKGILAADESTGTMTKRLKSVNIDSNETNRLMFRNFLFTSTEMKKCIGGVILFDETINQKVGEKSIPFIIKENGSIPGIKVDTGAKVLAGSENEKVTEGLDGLRERLKIYYKLGSRFTKWRGVYNISKSCPSRLAVHANAHALGRYAALAQESGMVPIVEPEVLMDGSHGSDVCLKVSCEVIKKCFDELLINKVDLKGIILKPNMILPGSESAEKSTSKVIAEMTLECLKDSVPSEVPGIAFLSGGQSEIQASENLNEINLINNTNFTITFSYGRALQHSALR

SEQ ID NO: 176097 - protein, 160 aa, Unknown
  Bacterial polypetide isolated from the Sargasso Sea
MAIISLRQLLDHAAENNYGVPAFNVNNLEQIRAIMEGAKEVNSPVIVQASAGARKYAGPRFIKSMMEAAVEEFPEIPIVMHQDHGGSPKDCKVCIDLGFSSVMMDGSLLEDQKTPSDFEYNVKVTKETVDMAHSVGVSVEGELGCLGSLETGMGEKKMVL

SEQ ID NO: 176098 - protein, 188 aa, Unknown
  Bacterial polypetide isolated from the Sargasso Sea
MPLISMRQLLDHAAENDYGVPAFNVNNLEQIRAIMEGAQYVNSPVIVQASAGARKYSGPIFIKNMMQAAVEEFPKIPIVMHQDHGGTPEECNECIELGFTSVMMDGSLLSDQKTPSNFEYNVKVTRETVKIAHSKGVSVEGELGCLGSLETGMGEKEDGVGAEGVLTHSQLLTDPQEASEFVDKTHLM

SEQ ID NO: 176099 - protein, 211 aa, Unknown
  Bacterial polypetide isolated from the Sargasso Sea
GARFAKWRAVYSISSKHPSEQCIKSNAHALARYAALVQEVKMVPIVEPEVLMDGDHTIEKCYDVTSRVLTECYKELAIHNVNLKGTVLKPNMILPGADCKQRATTEQIAKKTLECLKKNMPKEVPGVAFLSGGQSEVEATKNLNEINKINDTSFHFTFSYGRALQQSALKTWAKSMKDIAKIQKVFDHRAKMNGASTKAKWNEKLEQSFAA

SEQ ID NO: 176100 - protein, 235 aa, Unknown
  Bacterial polypetide isolated from the Sargasso Sea
MTIEEIAKLMVTKGKGILAADESTGTMGKRLKSVNIESNEKNRLHFRETLFTSDSMKTSISGVILYDETIRQTSSKGVLIPELIKKSGSIPGIKVDKGAKLLAGSDDEKITEGLDGLRERMEEYYNLGARFAKWRAVYSISSKHPSEQCIKANAHALARYSAIVQDAKMVPIVEPEVLMDGNHAIDKCYEVTSKVLIECFNELKLNNVNLKGIVLKPNMILPGASVIKKLLQKKC

SEQ ID NO: 176101 - protein, 196 aa, Unknown
  Bacterial polypetide isolated from the Sargasso Sea
MDLSSLNSIAQSMVAPNKGILAADESTPTIGKRFATINTESTEGNRQTYRNLLFTSPNVSEYISGVILFDETIRQSTNDGIPFPEHLTSLGIVPGIKVDKGINGIPFCKGETVTEGLDGLAERLSEYYELGARFAKWRAVINISADLPSNNCISLNAHALARYAALCQQAKMVPIVEPEVLMDGNHDIDRCFDVTS

SEQ ID NO: 176102 - protein, 186 aa, Unknown
  Bacterial polypetide isolated from the Sargasso Sea
MSLNNIEDIAAYIVAEGKGILAADESNPTCGKRFDSIGVESTEENRRDYREMLFRSKGMKGNIGGVILFDETIRQSAADGTLLRDLITSQDALPGIKVDKGIEPIDDCPGETVTVGLDGLDERLKEYSSMGAKFTKWRAVINIGEGIPTDKCIDANMQALADYAKCAQDNGMVPIVEPESINGWSP

SEQ ID NO: 176103 - protein, 228 aa, Unknown
  Bacterial polypetide isolated from the Sargasso Sea
MNEQGLMNTASAMVKSGKGILAADESTPTIGKRFEQIGVKSTSEMRNEYRDMLFTAETMEDNISGVIMFDETLRQSTTCDNNIPFVKLLSDKGVLPGIKVDTGAKDLAGAPGEKITEGLDSLRDRLVEYYSLGARFAKWRAVITIGKNIPSEHCIVANANALARYASLCQESNIVPIVEPEVLMDGEHSVETCFDVTSNTLDCVFNVLRIHNIMLEGIVLKPNMVISG

SEQ ID NO: 176104 - protein, 312 aa, Unknown
  Bacterial polypetide isolated from the Sargasso Sea
MSDIEKIAKTIVAKGKGILAADESTGTMTKRLSGVNVESTEKNRLKFRETLFTAESMKNYIGGVILYDETIKQKTSTGKTVPELIKSFGSIPGIKVDTGAKKLAGSPEEKITEGLDGLRERLNEYFKLGAKFTKWRAVYNISDKYPSELAIRSNAHALARYAALVQEANMVPIIEPEVLMDGEHDINKCYEVTSKVLKECYKELKLHNVNLKGTILKPNMILPGNKSKNKSNPSEIAKMTLKCLSENVPNTVPGIAFLSGGQSEIEATQNLNEINKINNTSFLMSFSYGRALQQSALKNWGKNIQDISNTQK

SEQ ID NO: 176105 - protein, 272 aa, Unknown
  Bacterial polypetide isolated from the Sargasso Sea
MSLISMRQLLDHAAENSYGVPAFNVNNLEQMRAIMEAADETNSPVIVQASAGARKYAGPNFLRHLILAAIEEFPHIPVVMHQDHGASPAVCQRSIQLGFSSVMMDGSLEEDMKTPASYDYNVSVTKRTVDMAHACGVSVEGELGCLGSLETGEAGDEDGSGAEGILTHDQLLTDPEEAASFVKDTHVDALAIAIGTSHGAYKFTRPPTGDILAIDRIKEIHKRIPDTHLVMHGSSAVPQDWLEIINKFGGDIPETYGVPVEEVQEGIKHGVE

SEQ ID NO: 176106 - protein, 185 aa, Unknown
  Bacterial polypetide isolated from the Sargasso Sea
MSELNKIALKIISSGKGILAADESNGTMTKRLTAVNVNSTPENRLLFREILFSSECMKDCIGGVILYDETIKQTTSFGKSIPELISASGAVPGIKVDKGAKELANSPEEKITEGLDGLRDRLKKYYELGARFTKWRGVYSIGNKYPTGLAINSNAHALARYSALVQESGMVPIVEPEVLMDGEHS

SEQ ID NO: 176107 - protein, 273 aa, Unknown
  Bacterial polypetide isolated from the Sargasso Sea
STKTVGKRLAGIGVENTEDNRKAYRGMLFTTEGLGKYISGAILFEETLYQNHQDGESMVKKLNDLGIIPGIKVDKGLNPLPGAGDVETFCSGLDGLVERAAKYYEQGARFAKWRAVLQITNDGCPSKLSIQENAWGLARYARSVQESGLVPIIEPEILMDGDHTIEKTAEVQEEVIKQVYIACQANGVYLEGTLLKPSMTVNGADCPTKADPMKVAEMTIRTMERCVPASVPGIVFLSGGLSEEAASIYLNNMNTLYRKALWNVSFSYGRALQ

SEQ ID NO: 176108 - protein, 276 aa, Unknown
  Bacterial polypetide isolated from the Sargasso Sea
VILYDETIRQISSKGILIPELIKKSGSIPGIKVDKGAKLLAGSNDEKITEGLDGLRERMEEYYKLGARFAKWRAVYSISSKHPSEQCIKANAHALARYAAIVQESKMVPIVEPEVLMDGSHTIDKCYEVTSKVLIECFNELKINNVNLKGIVLKPNMILPGASCNQKASTEEIASKTLDCLKKTMPEEVPGVAFLSGGQSEIEATKNLNAINKINDTNFNFTFSYGRALQQSALKTWAKSMKDIKGIQKVFDHRAKMNGASTEAKWEEKNEQNFAA

SEQ ID NO: 176109 - protein, 273 aa, Unknown
  Bacterial polypetide isolated from the Sargasso Sea
MALISMRQLLDHAAEHGYGVPAFNVNNQEQMRAIMEAADKTNSPVIVQGSAGARAYAGAPFIRHMILAAVEEWPHIPVVMHQDHGTSPGVCQRSIQLGFSSVMMDGSLMSDGKTPSSYDYNVDVTRKTVEMAHACGVSVEGELGVLGSLETGEAGEEDGVGAEGKLTTEQMLTNPEEAADFVNKTHVDALAIACGTSHGAYKFTRPPTDDILAIDRIKEIHARIPNTHLVMHGSSSVPQEWLEVINQYGGEIPETYGVPVEQIVEGIKYGVRK

SEQ ID NO: 176110 - protein, 239 aa, Unknown
  Bacterial polypetide isolated from the Sargasso Sea
MNFSNLNSIANYIVENGKGILAADESNPTCKKRFDTISVESTEENRRDYRQLLFQAEGMSNNIGGVILFDETIRQNTNNGTPLVDLIKQKEALPGIKVDKGLAPFENSDIEKVTQGIEDLDSRCAEYFNMGALFTKWRAVISIGNNLPSQGCIEENAKLLARYAKIVQKNNMVPIVEPEVLMDGSHSIEECYDATSRTLKSLFQNLEEENVDITGTILKPNMVTPGSECQEKIGVETVA

SEQ ID NO: 176111 - protein, 223 aa, Unknown
  Bacterial polypetide isolated from the Sargasso Sea
PLFSSHMIDLSEELLEENIEISKKYLERMSKMGMTLEIELGITGGEEDGVDNSDVDSSKLYTQPEEVAYAYEELSKVSNRFTVAAAFGNVHGVYKPGNVKLTPKILKNSQDYIQEKYNTGVNPVDFVFHGGSGSTLEEIREAITYGVIKMNIDTDLQFAFTEGIRDYVSKNIEYLKTQIGNPEGADSPNKKYYDPRKWMREGELTFNARLAKAFEDLNNVNTL

SEQ ID NO: 176112 - protein, 303 aa, Unknown
  Bacterial polypetide isolated from the Sargasso Sea
MSEIENIAKKIVAKGKGILAADESTGTMTKRLSSVNVESTLENRLRFRETLFSSESMKNYIGGVILYDETIKQKASSGKTIPDLIKSFGSIPGIKVDTGAKKLAGSPDEKVTEGLDGLRERLNEYYNLGARFTKWRAVYNISDKHPTELAIKSNAHALARYASLVQEAKMVPIVEPEVLMDGEHDINKCYEVTTKVLKECYKELILHKVNLKGTILKPNMILPGNKSKNKSNMSEIAKMTIKCLKESVPNEVPGIAFLSGGQTEIEATQNLNEINKINNTNFIMSFSYGRALQQSALKNWLKI

SEQ ID NO: 176113 - protein, 209 aa, Unknown
  Bacterial polypetide isolated from the Sargasso Sea
MNIEEIAKLMVTKGKGILAADESTGTMEKRLKSVNVECTEKNRLHFRETLFSSGSMKTSISGVILFDETIRQTTNSGESIPELIKKSGSIPGIKVDKGAKLLAGSEDEKITEGLDGLRDRMAEYYKLGARFAKWRAVYSISSKYPSEQCIKSNAHALARYAAIVQEAKMVPIVEPEVLMDGDHTIDKCYDITSRVLNECYKELSVHKVN

SEQ ID NO: 176114 - protein, 233 aa, Unknown
  Bacterial polypetide isolated from the Sargasso Sea
MAIISLRQLLDHAAENNYGVPAFNVNNLEQIRAIMEGANEVNSPVIVQASAGARKYAGPKFIKSMMEAAIEEFSKIPIVMHQDHGGSPADCKVCIDLGFSSVMMDGSLLEDQKTPSDFAYNVKVTKETVDMAHNLGVSVEGELGCLGSLETGMGEKEDGVGAEGVLSHDQLLTDPEEAAEFVQSTNVDALAIAIGTSHGAYKFSRPPSGDILAIERIKEINNKLPNTHLVMHG

SEQ ID NO: 176115 - protein, 204 aa, Unknown
  Bacterial polypetide isolated from the Sargasso Sea
ELSYSISSKHPSEQCIKSNAHALARYAALVQEAKMVPIVEPEVLMDGNHNIDKCYDVTSKVLVECYKELTIHNVNLKGTVLKPNMILPGADCKDKASAEEIAKKTLDCLKRNVPGDVPGVAFLSGGQSEVEATKNLNAINKINDTSFHFTFSYGRALQQSALKMWAKSMKETDKVQKVFDHRAKMNGASTEAKWNEKLEQSFAA

SEQ ID NO: 176116 - protein, 191 aa, Unknown
  Bacterial polypetide isolated from the Sargasso Sea
MTRNIVNEIANKLCLSPKGILAADESTNTIKKRFESINVESNFENRRSYRELLFKTKNLNEFISGVILYDETIKQNTSEGIPFPKYLSDIGIIPGIKVDKGAIPLSKDSDEKFTEGLDGLNERLKEYKILGAEFTKWRAIINIDLMKNYPSSYCMESNAFMLARYAKTVQDNEMVPIVEPEVIMDGNHTMK

SEQ ID NO: 176117 - protein, 276 aa, Unknown
  Bacterial polypetide isolated from the Sargasso Sea
VILFDETLRQKSKDGTSIPELISKNNSIPGIKVDKGAKNLAGSHNEKVTEGLDGLAARLKEYYDLGARFTKWRAVYNIDKDKPSTQCIKSNAHALARYAALVQEANMVPIVEPEVLMDGDHDIDTCYKITTQVLNECYNELEIHNVNLSGTILKPNMILPGSLSKKKVSNEEIAEKTLSCLKKNVPSKVPGIAFLSGGQSEIEATKNLNEINKKNDTNFLITFSYGRALQQSALKTWSKEMKNIDKVQKVFNHRAMMNGLSSKAEWLEKLENSRAA

SEQ ID NO: 176118 - protein, 314 aa, Unknown
  Bacterial polypetide isolated from the Sargasso Sea
EEIANYIVSDGKEILAADESNPTCGKRFDSIEVENSEDNRRDYREMLFRSKGMKGNIGGVILFDETLRQDAKDGTPLKELISNSGALPGIKVDKGLVPLVDGSDEVVTQGLDGLDERCSEYDSLGAKFTKWRAVIKIGDSMPSDDCIKANAKALADYAAIAQSNNMVPIVEPEVLMDGDHTIDLSFDACARSFQALFDALENNGVNIKGTILKPSMVTPGSLSEKVSIRKVAEMTVECLKENIPSDLPGVAFLSGGQTELEATAHLNEMNKIGKFPWKLSFSYGRALQQSALKAWSGKSENLFIAQDELSHRAE

SEQ ID NO: 176119 - protein, 220 aa, Unknown
  Bacterial polypetide isolated from the Sargasso Sea
MSLISLRQLLDHAAENNYGIPAFNINNLEQVRAIMEGAKELNSPVILQASKAARKYAGPIFVKKMVEAAMEEFSEIPTVLHQDHGGSPEDCKNCIELGFTSVMMDGSLKEDQKTPSDFEYNVRVTKKTVDIAHSSGVSVEGEIGCLGSLETGTGEKEDDVGAEGVLSHDQLLTDPDEASNFVDQTNVDALAIAIGTSHGAYKFSKPPTGETLAMDRIKEI

SEQ ID NO: 176120 - protein, 190 aa, Unknown
  Bacterial polypetide isolated from the Sargasso Sea
MSELNKISLQILSGGKGILAADESNATMTKRLEAVNIESNQENRLNFRKILFSSESMKSCIGGVILYDETIKQNIGAQTIPELLGDSGSLTGIKVDTGAKNLAGSPDEKITEGLDGLRERLKEYYKLGARFTKWRGVYKISTSFPSKVSIVSNAHALARYAALVQECGMVPIVEPELLMDGDHPAKICFE

SEQ ID NO: 176121 - protein, 221 aa, Unknown
  Bacterial polypetide isolated from the Sargasso Sea
MALVPLRLLLDHAAENGYGIPAFNVNNLEQVQAIMEAAYETDSPVILQASRGARNYAGEIFLRHLILAATETYPNIPVVMHQDHGNEPSTCYSAAINGFTSVMMDGSLEADAKTPASYEYNVAVTKKVVDFAHSVGVSVEGELGCLGSLETGKGEAEDGHGFEGELSTDMLLTDPEEAADFVAKTKVDALAIAIGTSHGAYKFTRKPTGEVLAISRIAEIH

SEQ ID NO: 176122 - protein, 257 aa, Unknown
  Bacterial polypetide isolated from the Sargasso Sea
PFAEHLTSLGIVPGIKVDKGVKGIPFCDGETVTEGLDGLDERLDEYYELGARFAKWRAVISISDDLPSKNCIRLNAHALARYSALCQQAQIVPIVEPEVLMDGTHDIDRCFDVTSEVLQEVFAELNNQQVTLNGIVLKPNMVISGMDAANRADIPTVASATVKCLSENVPDEVPGIAFLSGGQTSEEATAHLSSMNEMGPHPWQLTFSYGRALQAEPLKVWSGVDGNIEAAQEAFIKRSRLNSLARTGNYHPQMEEA

SEQ ID NO: 176123 - protein, 291 aa, Unknown
  Bacterial polypetide isolated from the Sargasso Sea
MLDKLKTQTGFIAALDQSGGSTPKALRLYGIEESEYSSDEEMFNLVHEMRTRIITSTPFSGERVLGAILFENTLDREIEGMSSAHYLWQKKRVIPFLKVDKGLAEESNGVQVMKPMPGLDALLAKAVAQDVFGTKMRSVVKLANHQGIKDVVAQQFEVGKQILAAGLVPIIEPEVDIHSPQKAEAEALLKLEILTQLNLLNEGQEVMLKLTLPTEANFYKELVDHPRVLKVVALSGGYSREEANAKLAENQGMIASFSRALTEGVSAKQSQEEFEATLDKAIEDIYQASKA

SEQ ID NO: 176124 - protein, 252 aa, Unknown
  Bacterial polypetide isolated from the Sargasso Sea
MSLNNIEEIAAFIVADGKGILAADESNPTCGKRFDSIGVESTEENRRDYREMLFRSKGMKENIGGVILFDETLRQSAADGTLLRDLILDQGALPGIKVDKGLQPIDDCPGETVTVGLDGLDERLKEYVAMGAKFTKWRAVINIGDGTPTDKCIDANMQALADYAKHAQNNRMVPIVEPEVLMDGEHSIDECYEATKRSLKSLFSHLEDKGVNIKGTLLKPNMVTSGKSADVQASIEEVAKKTLECLIANVPS

SEQ ID NO: 176125 - protein, 216 aa, Unknown
  Bacterial polypetide isolated from the Sargasso Sea
MALITLRQLLDHAAENQYGVPAFNINNMEQGLAILKAAAKTDSPVILQASRGARAYAGDIMLSHIVAALAKMYPTIPICMHQDHGNNEATCMTAIGHGFTSVMMDGSLESDQKTPASYDYNVQITKKVAEIAHWVGASVEGELGVLGSLETGEAAKEDGSGAEGKLNAKQLLTDPDQALDFVKKTDVDALAIACGTSHGAYKFSRKPDGDILAMDV

SEQ ID NO: 176126 - protein, 293 aa, Unknown
  Bacterial polypetide isolated from the Sargasso Sea
MSLNNIEDIAAYIVADGKGILAADESNPTCGKRFDSIGVESTEENRRDYREMLFRSKGMKGNIGGVILFDETIRQSAADGTLLRDLITSQDALPGIKVDKGLQPIDDCPGETVTVGLDGLVERLKEYSSMGAKFTKWRAVINIGEGIPTDKCIDANMQALADYAKCAQDNGMVPIVEPEVLMDGVHSIDDCYDASDRSLKSLFDHLDKKGVNIKGTILKPNMVTSGKDSDIQASIGEVAKRTLECLTENVPSDLPGIAFLSGGQSDILATAHLDAMNKIGGFSWKLSFSYGRA

SEQ ID NO: 176127 - protein, 268 aa, Unknown
  Bacterial polypetide isolated from the Sargasso Sea
DETLKQDAEDGTPLKEIISNSGALPGIKVDKGLVPLVDGSDEVVTQGLDGLDERCSEYDSLGAKFTKWRAVIKIGDSMPSDDCINANAKALADYAAIAQSNNMVPIVEPEVLMDGDHSIDLSFDACARSFQALFDALENNCVNIKGTILKPSMVTPGSLSDKVAIREVAEMTVKCLKENIPSDLPGVAFLSGGQTELEATAHLNEMNKIGEFPWKLSFSYGRALQQSALKVWSGKSENIFIAQDELSHRAEMNKLAALGQWDIKFEER

SEQ ID NO: 176128 - protein, 191 aa, Unknown
  Bacterial polypetide isolated from the Sargasso Sea
MNLEEIAKKMCEKGKGILAADESTGTIEKRFKTINVENTEINRVSFRETLFSSQAMKNYIGGVILFDETIRQKSSEGIPIPELIKNNGAIPGIKVDKGAKKLAGSTDETITEGLDGLRERLKEYHDLGARFTKWRAVFKITSNFPSPQCIKSNAHALARYASLVQEANMVPIVEPEVLMDGDHNIEKCFQV

SEQ ID NO: 176129 - protein, 242 aa, Unknown
  Bacterial polypetide isolated from the Sargasso Sea
MTLNEIAKKMCAKGKGILAADESTGTIAKRFKSINVENIEKNRLNFRQTLFNSSAMKDYIGGVILFDETIKQKTTLGPSIPELISKHGAVPGIKVDKGAKPLAGSNDETVTEGLDGLRERLKEYYNLGARFTKWRAVYKISDNFPSSQSIKSNAHALARYAALVQEAKMVPIVEPEVLMDGSHNIDKCYQVTTDVLNECFNELEIHKIDLKGTVLKPNMVIPGSECKDKPSSEEIAKKTLDC

SEQ ID NO: 176130 - protein, 280 aa, Unknown
  Bacterial polypetide isolated from the Sargasso Sea
MLFTAPDLGRYISGAILFEETLYQNHADGESMVEKLNKQGIIPGIKVDKGLKPLVGALHHETYCSGLDGLTERAAKYYEQGARFAKWRAVLQITKDGPSDFAIKENAWGLARYARAVQEAGLVPIVEPEILMDGDHHIEKTAAVQERVIKEVYAACATAGVLLEGTLLKPSMTVCGAECPDQADYKKVAGYTIRTLLRSVPAAVAGINFLSGGLSEEAASIYLNEMNAAPDLPWNVSFSYGRALQHSAIRAWGGNDIEAGQKFIIARAKANSEASIGCYV

SEQ ID NO: 176131 - protein, 170 aa, Unknown
  Bacterial polypetide isolated from the Sargasso Sea
MVPIVEPEVLMDGDHTIDKCYEVTSKVINECYKELLIHKVNLKGTVLKPNMILPGASCKQKVSSEEIAKKTLECLKKNIPTDVPGVAFLSGGQSEVEATKNLNAINKINDTAFNFTFSYGRALQQSALKTWAKSMKDTSKIQKVFDHRAKMNGASSEAKWNEKLEQSFAA

SEQ ID NO: 176132 - protein, 270 aa, Unknown
  Bacterial polypetide isolated from the Sargasso Sea
RIDYREMLFRSKGMKGNIGGVILFDETLRQDAKDGTPLKEIISNSGALPGIKVDKGLVPLVDGLDEVVTQGLDGLDERCYEYDSLGAKFTKWRAVIKIGDSMPSDDCIKANAKALADYAAIAQSNNMVPIVEPEVLMDGDHSIDLSFDACARSFQALFDALDNNGVNIKGTILKPSMVTPGSLSDKVAIREVAEMTVKCLKENIPSDLPGVAFLSGGQTELEATAHLNEMNKIGEFPWKLSFSYGRALQQSALKAWSGKSENIFIAQDEL

SEQ ID NO: 176133 - protein, 247 aa, Unknown
  Bacterial polypetide isolated from the Sargasso Sea
MDLSSLNSIAQSMVAPNKGILAADESTPTIGKRFATIETESTEGNRQTYRNLLFTSPNVSEYISGVILFDETIRQSTDDGIPFPEHLTSLGIVPGIKVDKGIKGIPFCKGETVTEGLDGLAERLSEYYELGARFAKWRAVINISADLPSNNCIRLNAHALARYAALCQQAQMVPIVEPEVLMDGNHNIDRCFDVTSKVLQEVFAELNKQKVALNGIVLKPNMVISGHGCFKQSGYSNSGQCNSKMLN

SEQ ID NO: 176134 - protein, 267 aa, Unknown
  Bacterial polypetide isolated from the Sargasso Sea
PAVCQRSIQLGFSSVMMDGSLGEDGKTPTSYEYNVDVTRRTVEMAHACGVSVEGELGCLGSLETGQAGEEDGIGAEGTLDHSQMLTDPEEAADFVQKTQVDALAIAIGTSHGAYKFTRPPTGDILAIDQIKAIHARIPDTHLVMHGSSSVPQEWLKVINEFGGEIPETYGVPVEEIVEGIKHGVRKVNIDTDLRLASTGAVRRFMAQNPAEFDPRKFLKATMVAMTDICVARYEAFGCAGQASKIKPLNLEQMFERYAAGELDPKVK

SEQ ID NO: 176135 - protein, 301 aa, Unknown
  Bacterial polypetide isolated from the Sargasso Sea
AKGRGILAADESTGTMGKRLKSVNIESNEKNRLHFRETLFTSSAMKSSISGVILYDETIKQSSSQGIPIPELIKKNGSIPGIKVDKGVKLLAGSSGEKITEGLDGLKDRMDEYYKLGARFAKWRAVYSISSNQPSEQCIKANAHALARYAAIVQEAKMVPIVEPEVLMDGDHTIDKCYEVTSKVLIECFKELKINNVKLEGTVLKPNMILPGSSCKKKANTDEIAKKTLDCLKKTMPKEVPGVAFLSGGQSEVEATKNLNAINKINDTNFNFTFSYGRALQQSALKTWSKSMGDTKNIQKV

SEQ ID NO: 176136 - protein, 249 aa, Unknown
  Bacterial polypetide isolated from the Sargasso Sea
MKIEEIAKLMVAKGRGILAADESTGTMGKRLKSVNIESNEKNRLHFRETLFTSSAMKSSISGVILYDETIKQSSSEGIPIPELIKKNGSIPGIKVDKGVKLLAGSSGEKITEGLDGLRERMDEYYKLGARFAKWRAVYSILSRQPSEQCIKANAHALARYAAIVQEAKMVPIVEPEVLMDGDHTIDKCYEVTTKVLIECFKELKINNVKLEGTVLKPNMILPGSSCKKKANTDEIAKKTLDCLKKTMPK

SEQ ID NO: 176137 - protein, 290 aa, Unknown
  Bacterial polypetide isolated from the Sargasso Sea
MKKIGFILEKHLFTSSAMKSSISGVILYDETIKQSSSKGIPIPELIKKNGSIPGIKVDKGVKLLAGSSDEKITEGLDGLRERMDDYYKLGARFAKWRAVYSISSNQPSEQCIKANAHALARYAAIVQEAKMVPIVEPEVLMDGDHTIDKCYEVTSKVLIECFKELKINNVKLEGTVLKPNMILPGSNCKKKANTDEIAKKTLDCLKKTMPKEVPGVAFLSGGQSEVEATKNLNAINKINDTNFNFTFSYGRALQQSALKTWSKSIEDTKNVQKVFDHRAQMNSASTEGKW

SEQ ID NO: 176138 - protein, 261 aa, Unknown
  Bacterial polypetide isolated from the Sargasso Sea
GNIGGVILFDETIRQSSEDGTLLRDIISNQGALPGIKVDKGLQPIEDCPGETVTIGLDGLDERLKEYSSMGAKFTKWRAVINIGDGIPTDKCINANMQALADYAKCAQDNGMVPIVEPEVLMDGEHSIDDCYTATDRSLKTLFAHLEKNGVNIKGTLLKPNMVTSGKDFIEQAGIDEVAHKTLECLIKNVPAELPGITFLSGGQSDVLATAHLDAMNKIGGFKWKLSFSYGRALQAPALKAWNGNQKMFLFLKMNYLIEQK

SEQ ID NO: 176139 - protein, 145 aa, Unknown
  Bacterial polypetide isolated from the Sargasso Sea
MSHFVSPYSAELIATAAFLASPGKGILAADESTGTIGKRLAGIGVENVEPNRRALRELLFTAPGFDAFCSGVIMFEETLGQSASDGEAFPALLARRGIVPGIKVDKGVVTLPGNAHGEVTTQGLDGLAERCAGYYARGARFAKWR

SEQ ID NO: 176140 - protein, 297 aa, Unknown
  Bacterial polypetide isolated from the Sargasso Sea
TDSPVILQASRGARNYAGEIFLRHLILAATETYPNIPVVMHQDHGNEPSTCYSAAINGFTSVMMDGSLEADAKTPASYEYNVAVTKKVVDFAHSVGVSVEGELGCLGSLETGKGEAEDGHGFEGELSTDMLLTDPEEAADFVAKTKVDALAIAIGTSHGAYKFTRKPTGEVLAISRIAEIHKALPNTHLVMHGSSSVPQEWLDIINKYGGEIPQTYGVPVEEIQEGIRNGVRKVNIDTDNRLAFTAAVREAAFADKANFDPRHFNKPARKYMKQVCLDRYKQFWCEGQASKIKQNST

SEQ ID NO: 176141 - protein, 287 aa, Unknown
  Bacterial polypetide isolated from the Sargasso Sea
MEKIVGKAEQLERIRTGEGFIAALDQSGGSTPKALQLYGISEDQYQNEEEMFKLIHDMRTRIITSPSFSHKNILGAILFEQTMERFISGIPTANFLWKSKKIVPFLKVDKGLKDLKDGVRLMKDIPDLGETLKKASEYGIFGTKMRSVIDEDNALGIDKIVDQQFEIGKIILDAGLIPIIEPEVTITISQKSQAEESLKKSLIKYLKKLQPNQNVLLKLTLPEQENFYEELVKHPNVLRVVALSGGYSLTEANKRLEENSGVIASFSRALTQSLFIHQNNDEFNLAL

SEQ ID NO: 176142 - protein, 218 aa, Unknown
  Bacterial polypetide isolated from the Sargasso Sea
MALVPLRLLLDHAAENGYGIPAFNVNNLEQVQAIMEAAYETDSPVILQASRGARNYAGEIFLRHLILAATETYPNIPVVMHQDHGNEPSTCYSAAINGFTSVMMDGSLEADAKTPASYEYNVAVTKKVVDFAHSVGVSVEGELGCLGSLETGKGEAEDGHGFEGELSTDMLLTDPEEAADFVAKTKVDALAIAIGTSHGAYKFTRKPTGEVLAISRIA

SEQ ID NO: 176143 - protein, 224 aa, Unknown
  Bacterial polypetide isolated from the Sargasso Sea
MALVPLRLLLDHAAENGYGIPAFNVNNLEQVQAIMEAAYETDSPVILQASRGARNYAGEIFLRHLILAATETYPNIPVVMHQDHGNEPSTCYSAAINGFTSVMMDGSLEADAKTPASYEYNVAVTKKVVDFAHSVGVSVEGELGCLGSLETGKGEAEDGHGFEGELSTDMLLTDPEEAADFVAKTKVDALAIAIGTSHGAYKFTRKPTGEVLAISRIAEIHKAL

SEQ ID NO: 176144 - protein, 300 aa, Unknown
  Bacterial polypetide isolated from the Sargasso Sea
MATDPAIHQQQFDRIATGKGFIAALDQSGGSTPKALALYGVMEDAYSNDEEMFAEIQKMRARIITAPDFNSDKILGAILFEKTMDNAIDGTPVPAYLWEQCGVVPFLKVDKGLADEADGVQLMKPMPDLNALLERAVAAGIFGTKMRSVVKEANAAGIKSVVAQQFEVGLQIARAGLVPIIEPEVDINSATKSEAEALLKDEIKAQLDALPEGTKVSLKLTIPNEAGLYDSLADHPAVVRVVALSGGYTTDDACARLSQNSKMIASFSRALTEGLNVAMSDADYNAALGSNIDKIYKASL

SEQ ID NO: 176145 - protein, 184 aa, Unknown
  Bacterial polypetide isolated from the Sargasso Sea
MTDLHQTALNIVSKGKGILAADESTATITKRFDAINVESNFENRLKFREILFSSSGMKDYIGGVILFDETIKQTTNKGINIPELINTSKSIVGIKVDAGAKSLAGSSEEKVTEGLDGLRGRFKEYYKLGARFAKWRAVYTISSNYPSKLAIKANAHALARYAALAQENNIVPIVEPEVLMDGDS

SEQ ID NO: 176146 - protein, 336 aa, Unknown
  Bacterial polypetide isolated from the Sargasso Sea
MTDSLEKIAKYIVSDGKGILAADESNPTCTKRFDSIGVESTEDNRRDYRELLFSADGMEGNIGGVILYDETIRQTSSDGKKLIDIISANGALPGIKVDKGLEVINDQNETITKGLEDLDDRCKEYNEMGAKFTKWRSVINIGDSIPSDECINQNMDILAKYAKIAQNNNMVPIVEPEVLINGVHDIHRAYEVSSACLSVLFEELEKKNALIEGCILKPSMVTPGMDSEHTSTVEEVARMTIDCLKNNVPDSLPGITFLSGGQTELEATEHLNAMNQIGGFQWKLSFSYGRALQQSALKAWQGLKSNKEAAQQAFSHRAEMNKLAALGQWNKELETK

SEQ ID NO: 176147 - protein, 354 aa, Unknown
  Bacterial polypetide isolated from the Sargasso Sea
MALISMRQMLDHAAEFGYGVPAFNVNNLEQMRAIMEAADKTDSPVIVQASAGARKYAGAPFLRHLILAAIEEFPHIPVCMHQDHGTSPDVCQRSIQLGFSSVMMDGSLKEDGKTPADYDYNVRVTQQTVAFAHACGVSVEGELGCLGSLETGMAGEEDGVGAEGVLDHSQLLTDPEEAADFVKKTQVDALAIAIGTSHGAYKFTKPPTGDVLSIERIKEIHKRIPNTHLVMHGSSSVPQEWLKVINEFGGDIKETYGVPVEEIVEGIKHGVRKVNIDTDLRLASTGAIRRMMAEHPSEFDPRKFFAKTIVAMRDICIARYEAFGTAGNASKIKPISLEGMYQRYASGELNAKVN

SEQ ID NO: 176148 - protein, 238 aa, Unknown
  Bacterial polypetide isolated from the Sargasso Sea
MNFSGLSDIARYIVADGKGILAADESNPTCTKRFDSISVESTEDNRRNYRETLFTSEGMKNNIGGTILFDETIRQKSRDGRLLTEVIIAQGALPGIKVDKGLNPFNQSDNETLTQGLDDLDERCSEYEKLGAKFTKWRAVINISADIPTQECIDANMDALAQYAKIAQENNMVPIVEPEVLMDGEHSAEDCLNATSRSLKSLFDFLDNYNVDITGTLLKPNMITAGSDNPDQISEGEV

SEQ ID NO: 176149 - protein, 245 aa, Unknown
  Bacterial polypetide isolated from the Sargasso Sea
MGIKVDKGLQPIEDCPGETVTIGLDGLDERLKEYASMEAKFTKWRAVINIGDGIPTDKCIDANMQALADYAKCAQDNGMVPIVEPEVLMDGEHSIDDCYAATDRSLKSLFAHLEKNDVNIKGTLLKPNMVTSGKDSNDQAGIDEVATKTLECLIKNVPAELPGITFLSGGQSDVLATAHLDAMNKIGGFSWKLSFSYGRALQAAALKAWSGKPENVFISQDELSHRAEMNKLASLGQWEEELEDR

SEQ ID NO: 176150 - protein, 317 aa, Unknown
  Bacterial polypetide isolated from the Sargasso Sea
TDSPVIFQASRGARNYAGEIFLRHLILAATETYPNIPVVMHQDHGNEPSTCYSAAINGFTSVMMDGSLEADAKTPASYEYNVEVTKKVVDFAHSVGVSVEGELGCLGSLETGKGEAEDGHGFEGELSTDMLLTDPEEAADFVAKTKVDALAIAIGTSHGAYKFTRKPTGEVLAISRIAEIHKALPNTHLVMHGSSSVPQEWLDIINKYGGEIPQTYGVPVEEIQEGIRNGVRKVNIDTDNRLAFTAAVREAAFADKANFDPRHFNKPARKYMKQVCLDRYKQFWCEGQASKIKQNSTNFFADLYAKGDLDPKVKATV

SEQ ID NO: 176151 - protein, 203 aa, Unknown
  Bacterial polypetide isolated from the Sargasso Sea
MTIEEIAKQMVTKGKGILAADESTGTMGKRLKSVNVESTEENRLHFRETLFSSSAMKSSISGVILYDETLRQTSSKGISIPDLIKKSGSIPGIKVDKGVKLLAGSKDEKITEGLDGLRERMEEYYKLGARFAKWRAVYLITQKHPSEQSIRANAHALARYAAIVQEAKMVPIVEPEVLMDGDHSINKCFEVTSKVLAECYKEL

SEQ ID NO: 176152 - protein, 357 aa, Unknown
  Bacterial polypetide isolated from the Sargasso Sea
MALVPLRLLLDHAAENGYGIPAFNVNNLEQVQAIMEAAYETDSPVILQASRGARNYAGEIFLRHLILAATETYPNIPVVMHQDHGNEPSTCYSAAINGFTSVMMDGSLEADAKTPASYEYNVAVTKKVVDFAHSVGVSVEGELGCLGSLETGKGEAEDGHGFEGELSTDMLLTDPEEAADFVAKTKVDALAIAIGTSHGAYKFTRKPTGEVLAISRIAEIHKALPNTHLVMHGSSSVPQEWLDIINKYGGEIPQTYGVPVEEIQEGIRNGVRKVNIDTDNRLAFTAAVREAAFADKANFDPRHFNKPARKYMKQVCLDRYKQFWCEGQASKIKQNSTNYFADLYAKGDLDPKVKATV

SEQ ID NO: 176153 - protein, 302 aa, Unknown
  Bacterial polypetide isolated from the Sargasso Sea
MTLNEIAKKMCAEGKGILAADESTGTIAKRFKSINVENIEKNRLNFRQTLFNSNAMKDFIGGVILFDETIRQKTSFGPTIPELISNHGAVPGIKVDKGAKPLAGSSDETITEGLDGLRERLKEYYDLGARFTKWRAVYKISNEFPSVQSIKSNAHALARYAALVQEAKMVPIVEPEVLMDGSHNIDKCYQVTTNVLNECYNELEINKVDLKGTVLKPNMVIPGSECKDKSSTKEIAMKTLDCLKKNVPAEVPGIAFLSGGQSEIEASKNLNEINKINDTNFLITFSYGRGLQASALKEFGKN

SEQ ID NO: 176154 - protein, 339 aa, Unknown
  Bacterial polypetide isolated from the Sargasso Sea
MELTTLNDVANAMVADGKGILAADESTGTIGKRFDQINLESTVENRNAYRDLLFSTKDIENYISGVIMYDETFRQSSLDSNILYPKYLSDKGIIPGIKVDMGAHNLSGTEGEKITEGLDGLNERLNEYRKLGARFAKWRAVIVISEENPSGYAIATNAHALARYASLCQSNDIVPIVEPEILMDGTHDIDDSFVVTEEVLHTVFFELYSQGVHFEEMVLKPNMVLSGYECSSQASVDEVANATIECFMRTVPAAVPGIAFLSGGQSDQHATAHLNRMNQLLGNNKPWNLTFSYGRALQQSAIKAWGGSEQNITNAQNALIHRAKLNSLATTGEYSEDME

SEQ ID NO: 176155 - protein, 325 aa, Unknown
  Bacterial polypetide isolated from the Sargasso Sea
TKTVGKRLAGIGVENTEENRKAYRGMLFTTEGLGKYISGAILFEETLYQNHQDGESMVKKLNDLGIIPGIKVDKGLNPLPGGGDVETFCSGLDGLVERAAKYYEQGARFAKWRAVLQITNDGCPSKLSIQENAWGLARYARSVQESGLVPIIEPEILMDGDHTIEKTAEVQEEVIKQVYIACQANGVFLEGTLLKPSMTVNGADCPTKADPMKVAEMTIRTMERCVPASVPGIVFLSGGLSEEAASVYLNNMNTLYRKALWNVSFSYGRALQHSCLKAWKGSDVEGGQKALIARAQANSEASKGAYVAGSQPSSDEQLFVAGYTY

SEQ ID NO: 176156 - protein, 246 aa, Unknown
  Bacterial polypetide isolated from the Sargasso Sea
IVPRIKVDTGAKPLPGHNGETVTEGLDGLRDRLTEYYSLGARFAKWRAVINIDDVLPTDFCIKANAHALARYSALCQEQNIVPIVEPEVLMDGGHSIERCEEVTNKVLKTVFNELQEHAVNLEGIVLKPNMIISGAKADNRANSDTVAEATIRCLKENVPESVPGIAFLSGGQSSEEATEHLNLMNKMGDLPWELSFSYGRALQASPLNVWSGSEDNFSAGQQAFLKRAKLNSLAHAGEYQKDMED

SEQ ID NO: 176157 - protein, 228 aa, Unknown
  Bacterial polypetide isolated from the Sargasso Sea
TEGLDGLRARMEEYYKLGARFAKWRAVYSISSKYPSEQCIKSNAHALARYAALVQEAKMVPIVEPEVLMDGDHSIDQCHEVTSKVLSECYKELKIHNVNLKGTVLKPNMILPGTSCKQKVTSSEIAKKTLECLKKNIPSEVPGVAFLSGGQSEVEATKNLNEINKINDTSFHFTFSYGRALQQSALKTWAKSMKDTIKIQKVFDHRAKMNGASTEAKWNEKLEQGFAA

SEQ ID NO: 176158 - protein, 335 aa, Unknown
  Bacterial polypetide isolated from the Sargasso Sea
MSELNSIALKIISSGKGILAADESNGTMTKRLDGVGISSTPENRLKFRNTLFTSESMESCIGGVILYDETIKQSVGSNSIPLIISKTGAIPGIKVDTGAKTLSSSKEEKITEGLDGLRERLKEYYKLGARFAKWRGVYTISESYPSKVAISTNAHALARYASLVQESGMVPIVEPEVLMDGAHNSKTCLDKTSEVIKKCYEELEINKVDLKGTILKPNMILPGSKSDEKITSEEIAKLTLQCLKNSVPSEVPGMAFLSGGQSELEATENLNLINVQNNTDFIMTFSYGRALQQSALKHWSKNIEDIKGTQEVFNNRAKMCSLAARGKWSYELDNK

SEQ ID NO: 176159 - protein, 338 aa, Unknown
  Bacterial polypetide isolated from the Sargasso Sea
MNLEEIAKKMVAKGKGILAADESTGTMGKRLKSVNIESTPENRLSFREALFSSEGMKNYIGGVILFEETLKQKSTKGISVPELIMESGSIPGIKVDKGAKSLAGSSEEKVTEGLDGLRERLNEYYKLGARFTKWRAVYNISEKYPSSQAIKSNAHALARYAALAQETKMVPIVEPEVLMDGDHDINKCYDVTTDVLNECYNQLEIHKVFLKGTILKPNMILPGVNSKNKSSSEEIAKKTIECLKKNVPSEVTGIAFLSGGQSEKEATKNLNEINKINDTNFLISFSYGRALQQSALKTWSKNMKDIKKVHSVFNHRAKMNGLSSRAEWSENLEQEFAA

SEQ ID NO: 176160 - protein, 338 aa, Unknown
  Bacterial polypetide isolated from the Sargasso Sea
RRLKMSLEEIANYIVSDGKGILAADESNPTCGKRFDSIEVENSENNRRDYREMLFRSKGMKENIGGVILFDETLRQDAKDGTPLKELISNSGALPGIKVDKGLVPLVDGSDEVVTQGLDGLDERCSEYDSLGAKFTKWRAVIKIGDSMPSDDCINANAKALADYAAIAQSNNMVPIVEPEVLMDGDHSIDLSFDACARSFQALFDALENNGVNIKGTILKPSMVTPGSLSEKVAIREVAEMTVRCLKENIPSDLPGVAFLSGGQTELEATAHLNEMNKIGEFPWKLSFSYGRALQQSALKAWSGQSENIFIAQDELSHRAEMNKLAALGQWDIKLEDR

SEQ ID NO: 176161 - protein, 335 aa, Unknown
  Bacterial polypetide isolated from the Sargasso Sea
MSELNTLALKILENGKGILAADESTNTMTKRLDDVNVPSTPENRLLFRETLFTASSMTECIGGVILYDETIRQETSKKNKIPELISSLGSHPGIKVDTGAKVLAGSPNEKITEGLDGLRERLKNYYKLGAKFTKWRGVYSISQNYPSKLSIQSNAHALARYSALVQECGMVPIVEPELLMDGEHSANDCYKKTSEVIKKCFEELILHKVDLTGIILKPNMILDGNKFKDKISSDEVAKLTLDCLKNSVPSEVPGIAFLSGGQSEIQATENLNLINKINTTNFIMSYSYGRALQQSALRFWSKNTQDIEGTQKVFNHRAKMNKLAAQGKWSKELEN

SEQ ID NO: 176162 - protein, 287 aa, Unknown
  Bacterial polypetide isolated from the Sargasso Sea
MNFSGLNDIAKYIVADGKGILAADESNPTCTKRFDSISVESTEDSRRNYRETLFTSEGMKNNIGGTILFDETIRQKSRDGRLLTEVIIAQGALPGIKVDKGLNPFNESDNETLTQGLDDLDERCSEYEKLGAKFTKWRAVINIGEDIPTQECIDANMDALAQYAKIAQENNMVPIVEPEVLMDGEHSAEDCLNATSRSLKSLFDFLDNYNVDITGTLLKPNMITAGSDNPDQISEDEVASLTLECLKKHVPDDLPGIAFLSGGQSDIKATHHLDAMNKMGGGSWKLT

SEQ ID NO: 176163 - protein, 301 aa, Unknown
  Bacterial polypetide isolated from the Sargasso Sea
MTELKNIAKKILEKGKGILAADESTGTMTKRLEAVGVTSSPDNRLLFRETLFSSAAMKSFVGGVILYDETIKQKSLTNKKIPELISSSGAVPGIKVDTGAKILANSPDEKITEGLDGLRERLKEYYRLGARFTKWRAVYSISENYPSKLSIYSNAHALARYSALVQECGMVPIVEPEVLMDGNHSAEECFNKTSEVIKKCFDELFKHKVDPSGIILKPNMILPGSNSEKKINTKEIAELTLKCLKMSVPSEVPGIAFLSGGQSEFEASKNLNSINLINDTNFIMTYSYGRALQQSAFKFWA

SEQ ID NO: 176164 - protein, 341 aa, Unknown
  Bacterial polypetide isolated from the Sargasso Sea
AENGYGLPAFNVTNLEQVQAVMEAAKEAGAPVILQASAGARKYAGESFIKHLIQAAVEAYPEIPLVMHQDHGQSPAICQGAIDLGFGSVMMDGSLREDGKTPADFDYNVDVTRRVVEMAHKVGVTVEGELGCLGSLETGMAGEEDGHGAEGKLDHSSLLTDPEEAAQFVKATQLDALAIAIGTSHGAYKFTRKPTGDILAISRVKEIHARIPNTHLVMHGSSSVPQELLAIINQYGGKMKETYGVPVEEIQEAIKYGVRKINIDTDIRLAMTGAVRKFLAENPDKFDAREWLKPAREAAKQICKARYIQFGCEGQAGKIKPISLSVMAQKYQSGDLAQVVQ

SEQ ID NO: 176165 - protein, 327 aa, Unknown
  Bacterial polypetide isolated from the Sargasso Sea
MSELNNIVNKILENGKGILAADESTGTMTKRLDGVGVPSTPENRLLFRETLFCSSEMKNCIGGVILYDETIKQTSSKKNKIPELIEGMGSCAGIKVDTGAKSLAGSPNEKITEGLDGLRDRLKEYFKLGAKFTKWRGVYNISKDFPSKLSIHSNAHALARYSALVQECNMVPIVEPEVLMDGDHSAKECFQKTSEVIKKCFEELILHKVDLKGVILKPNMILAGNKSKEKISNEEVAKLTLDCLKSSVPSEVPGIAFLSGGQSELEATENLNLINKLNKTGFIMSYSYGRALQQGALKFWSKNIKDIEGTQKVFNHRAKMNTLAAQG

SEQ ID NO: 176166 - protein, 338 aa, Unknown
  Bacterial polypetide isolated from the Sargasso Sea
MILNNIEEIATFIVEDGKGILAADESNPTCGKRFDSIGVESTEENRRDYREMLFRSKGMNGNIGGVILFDETIRQSSEDGTLLREIISNQGALPGIKVDKGLQPIEDCPGETVTIGLDGLDERLKEYSSMGAKFTKWRAVINIGDGIPTDKCINANMQALADYAKCAQDNGMVPIVEPEVLMDGEHSIDDCYEATDRSLKSLFAHLEKNDVNIKGTLLKPNMVTSGKDSIEQAGIDEVAQKTLDCLIKNVPAELPGITFLSGGQSDVLATAHLDAMNKIGGFTWKLSFSYGRALQAPALKAWNGKPENIFISQDELSHRAEMNKLASLGQWEEELEDR

SEQ ID NO: 176167 - protein, 171 aa, Unknown
  Bacterial polypetide isolated from the Sargasso Sea
MSLISMRQLLDHAAENAYGVPAFNVNNLEQIRAIMEGANEMNSPVIMQASAGARKYAGAKFIKSMIEAAVEEFSNIPIVMHQDHGATPDDCKKCMDLGFSSVMMDGSLLADQKTPSDFNYNIEVTKKTVDIAHPIGVSVEGELGCLGSLETGMGEKEDGVGAEGILTREQL

SEQ ID NO: 176168 - protein, 205 aa, Unknown
  Bacterial polypetide isolated from the Sargasso Sea
MDLKNLEAVAEAMVIPGKGILAADESTGTIGSRLSQINTESSSETRNAYRDLLFSADGIEEYISGVIMYDETLRQSSLSDGKPYPEYLSEKGILPGIKVDTGAHDLPGSEGEKITQGLDGLNDRLKEYRGMGARFAKWRAVINITEDNPSGYCISTNAHALARYAGLCQANDIVPIVEPEILMDGDHDIDDSFVVTEEVLHTVFF

SEQ ID NO: 176169 - protein, 338 aa, Unknown
  Bacterial polypetide isolated from the Sargasso Sea
MSLNNIEDIAAFIVADGKGILAADESNPTCGKRFDSIGVESTEENRRDYRELLFRSKGMKDNIGGVILFDETIRQSAKDGTLLRDVIKNQGALPGIKVDKGLQPLEDCPGETVTVGLDGLDERLKEYSSMGAKFTKWRAVINIGDGLPTDKCIDANMEALADYAKCAQDNEMVPIVEPEVLMDGEHSIDECYEATERSLKSLFEHLDKKGVNIKGTLLKPNMVTSGKDASVQAGIDEVAKKTLDCLIANVPADLPGITFLSGGQSDVLATAHLDAMNKIGGFSWKLSFSYGRALQAAALQAWGGKSENVFISQDELSHRAEMNKLASLGEWEEDLEDR

SEQ ID NO: 176170 - protein, 354 aa, Unknown
  Bacterial polypetide isolated from the Sargasso Sea
MPLVSMRQLLDHAAENGYGIPAFNVNNLEQVQAIMAAADKVNAPVIMQASAGARKYAGEPFLRHLIEAAVESYPHIPVVMHQDHGQSPAVCMAAIRSGFTSVMMDGSLEADGKTVASYEYNVEVSRKVVEAAHSIGITVEAELGVLGSLETMKGDKEDGHGAEGTMTREQLLTDPEQAADFVKQTQCDALAIAIGTSHGAYKFSKKPTGDILSIQRIKEIHQRIPNTHLVMHGSSSVPQELLAEIREFGGDMKETYGVPVEEIQEGIKHGVRKVNIDTDLRLAITGAIRRYMATNPGKFDPRDYLKPAREAAMKICLERFTQFGCEGQAGKIKPVSLDKIAEKYKSGELAQVVR

SEQ ID NO: 176171 - protein, 325 aa, Unknown
  Bacterial polypetide isolated from the Sargasso Sea
MSELHAVAHKMVEKNKGILAADESNPTCTKRFESIDTESTAESRNLYRSILFSSKDIEKYISGVILFDETFHQSELSSGLKIPEYLSSKDILPGIKVDEGLENFGSNEKLTMGLDGLSERLGKYYALGARFAKWRAVITPGNGTPTDECILANAKNLAKYAQKCQNANLVPIVEPEVLMDGDHTIDDSFDITSRTLNTVFDQLDQHNVSLQGMVLKPNMVLSGYSCSYQADIVEVAEKTVNCLSAHVPSEVPGIAFLSGGQSDEDATIHLNEMNKYETDWNLTFSYGRALQQPALKAWSGKVENSEKAEQALIDRAKANSLATAA

SEQ ID NO: 176172 - protein, 357 aa, Unknown
  Bacterial polypetide isolated from the Sargasso Sea
MALVPLRLLLDHAAENGYGIPAFNVNNLEQVQAIMEAAYETDSPVILQASRGARNYAGEIFLRHLILAATETYPNIPVVMHQDHGNEPSTCYSAAINGFTSVMMDGSLEADAKTPASYEYNVAVTKKVVDFAHSVGVSVEGELGCLGSLETGKGEAEDGHGFEGELSTDMLLTDPEEAADFVAKTKVDALAIAIGTSHGAYKFTRKPTGEVLAISRIAEIHKALPNTHLVMHGSSSVPQEWLDIINKYGGEIPQTYGVPVEEIQEGIRNGVRKVNIDTDNRLAFTAAVREAAFADKANFDPRHFNKPARKYMKQVCLDRYKQFWCEGQASKIKQNSTNYFADLYAKGNLDPKVKATV

SEQ ID NO: 176173 - protein, 336 aa, Unknown
  Bacterial polypetide isolated from the Sargasso Sea
MSELNKIALKIISDGKGILAADESNGTMTKRLEAVNITSSPENRLLFREILFSSESMKKYIGGVILYDETINQTTSFGKSIPNLISSSGALPGIKVDTGAKDLANSSDEKITEGLDGLRERLKKYYELGARFTKWRGVYNISNKYPSKIAINSNAHALARYSALVQESGMVPIVEPELLMDGDHSADICLKKTSEVIKKCFDELISHNVDLSGIILKPNMILPGNRSNDKISSEEVSQKTLECLKKSVPTEVPGIAFLSGGQSEIEATENLNLINQNNNTKFIMTYSYGRALQQNALKLWSKNTKDIQSTQNTFNHRVKMCSLAAKGKWSKELENK

SEQ ID NO: 176174 - protein, 334 aa, Unknown
  Bacterial polypetide isolated from the Sargasso Sea
MENIEDIASYIVSDGKGILAADESNPTCTKRFDSIGVESTEDKRREYREMLFRSEGMKGNIGGVILFDETIRQDAKDGTSLVEVIRNQGAVPGIKVDQGLEVINDQEETVTKGLEGLNERCSEYYSLGARFTKWRAVIKIGNTIPSKECINRNMEALAEYALIAQANGMVPIVEPEVLMDGDHSIEQCYEASSRSLDALFSMLTSKGVNIKGTILKPNMITSGSNVTSKANIDEVASMTLKCLKSHVPDELPGVAFLSGGQSDLDATAHLDAMNKIGGFKWALCFSYGRALQQPALKVWLGDNKNSSLAQAALSHRALMNRLASQGRWEQDLES

SEQ ID NO: 176175 - protein, 352 aa, Unknown
  Bacterial polypetide isolated from the Sargasso Sea
MKNNFIYGKENQKLFNLAKEKKFALPAINVSGNNTINSVLETSSELNSPVIIQFSNGGSQFIAGKGMSNENFKASIAGSVAGAYHIHKVIDNYNSKVIIHTDHCSRSILPWIDGLLDYGKVFYKKNGYPLFSSHMIDLSEESLEDNIGTCKEYLKKLTDLEMTLEIELGVTGGEEDGVDNTDIDSSKLYTQPEEVAYAYSELSSISDNFMIAAAFGNVHGVYKPGNVKLTPKILKNSQEFVSEKFNLPSNSLDFVFHGGSGSSVEEIREAIDYGVIKMNIDTDLQFAFTEGIRDYMIGESEYLMKQIGNPDGDDIPNKKYYDPRIWLRKGEETFKTRLIKAFEDLNNINTLD

SEQ ID NO: 176176 - protein, 338 aa, Unknown
  Bacterial polypetide isolated from the Sargasso Sea
MDLSSLNSIAQSMVAPNKGILAADESTPTIGKRFATIDTESTEGNRQTYRNLLFTSPNVSEYISGVILFDETIRQSTDDGIPFPEHLTSLGIVPGIKVDKGIKGIPFCKGETVTEGLDGLAERLSEYYELGARFAKWRAVINISADLPSDNCVRLNAHALARYAALCQQAQMVPIVEPEVLMDGNHDIDRCFDVTSKVLQEVFAELNKQKVALNGIVLKPNMVISGMDAANRADIPTVASATVKCLTENVPDEVPGIAFLSGGQTSEEATAHLSSMNEMGPHPWQLTFSYGRALQAEPLKVWSGQEGNIEAAQETFIKRSRLNSLARTGNYHPQMEEA

SEQ ID NO: 176177 - protein, 198 aa, Unknown
  Bacterial polypetide isolated from the Sargasso Sea
MALNYYKNELKENAQLLASKGKGILAVDESTKTVGKRLAGIGVENTEDNRKAYRGMLFTTEGLGKYISGAILFEETLYQNHQDGESMVKKLNDLGIIPGIKVDKGLNPLPGGGDVETFCSGLDGLVERAAKYYEQGARFAKWRAVLQITNDGCPSKLSIQENAWGLARYARSVQESGLVPIIEPEILMDGDHTMKRLQ

SEQ ID NO: 176178 - protein, 349 aa, Unknown
  Bacterial polypetide isolated from the Sargasso Sea
MALISLRQLLDHGAEKGYAVPAFNINNMEQGLAILNAAKKCDAPVILQASRGARSYAGDIMLSHMVQALTKMYPDIPICMHQDHGNSEATCLSAIRHGFTSVMMDGSLESDMKTPATYEYNVDITAKVTFSAHAVGASVEGELGVLGSLETGEAESEDGSGAEGKLSQDQLLTDPDQALDFVKKTKVDALAIACGTSHGAYKFSRKPDGDILAMKVIETIHGKLPQTHLVMHGSSSVPQSLQDLINENGGEMPQTYGVPVEEIERGIKSGVRKVNIDTDCRMAMAGQFRKVAMEKPSEFDPRKFLVPAMKEMEDLCLDRFERFGTAGNAKNLKPISLDDMAIQYSKGLI

SEQ ID NO: 176179 - protein, 337 aa, Unknown
  Bacterial polypetide isolated from the Sargasso Sea
MIPKTLEDIASYIVKDGKGILAADESTGTIEKRFKSIDVVSTEDNRRKYREMLFRSPAMAEAIGGVILFDETLRQKAKDGSYLRDVILNHGSLPGIKVDQGVKELEDKSNEKITTGLDGLNERCREYDALGAKFTKWRAVINIGDGMPSTKCINENMLALSKYALIAQENNMVPIVEPEVIMDGQHTIDQCYDVTKNTLSVLFEMLDKKNINIKGTLLKPNMVVSGTENSHQANYREVAEKTLDCLNSSVPDELPGIVFLSGGQSDRDATAHLDEMNKIGGFKWKLSFSYGRALQQAALKAWSGNDNNLEHAQKAFGHRAIMNMKASLGEWSETLET

SEQ ID NO: 176180 - protein, 220 aa, Unknown
  Bacterial polypetide isolated from the Sargasso Sea
AGLDGLGKRCAEYYAMGARFAKWRAVLKIDVAKGFPSALAVTENANALARYATVCQENGLVPIVEPEILMDGDHDINVCFDVTRRVHDAVFSALRAHGTQLDGMILKPNMVTAGSSHPKAQGFDDEVADMTVRALAEVVPPAVPGVLFLSGGQTEAQATDRLALMNKKDFRTAPWTLSFSYGRALQASCLKAWGGKAENVKAAQDAFAARCKANSDAAKR

SEQ ID NO: 176181 - protein, 338 aa, Unknown
  Bacterial polypetide isolated from the Sargasso Sea
MSLNNIEDIAAFIVADGKGILAADESNPTCGKRFDSIGVESTEENRRDYRELLFRSKGMKDNIGGVILFDETIRQSAKDGTLLRDLIKDQGALPGIKVDKGLQPLEDCPGETVTVGLDGLDERLKEYSSMGAKFTKWRAVINIGDGLPSDKCIDANMEALADYAKCAQDNGMVPIVEPEVLMDGEHSIDECYEATESSLKSLFEHLDKKGVNIKGTLLKPNMVTSGKDASVQAGIDEVAKKTLDCLIANVPADLPGITFLSGGQSDVLATAHLDAMNKIGGFNWKLSFSYGRALQAAALQAWGGKSENVFISQDELSHRAEMNKLASLGQWEQELEDR

SEQ ID NO: 176182 - protein, 337 aa, Unknown
  Bacterial polypetide isolated from the Sargasso Sea
MIPKTLEEIANYIVRDGKGILAADESTGTIEKRFKSIDVESTEDNRRKYREMLFRSPAMAEAIGGVILFDETLRQKASDGNYLREVILDHGSLPGIKVDQGVKELESGSNEKITTGLDGLNERCQEYDELGAKFTKWRAVIHVSDDLPSDKCIRENMNALAEYALIAQQNNMVPIVEPEVIMDGSHSVERCHVVTNQALLILFEMLDKKNVNIKGTLLKPNMVVSGTENSYQATIQEVANKTIQCLKSSVPDELPGIVFLSGGQSDLDATAHLDAMNKIGGFKWKLSFSYGRALQQAALKTWSGNDSKLEAAQMAFGHRAIMNMKAAEGQWDKSLER

SEQ ID NO: 176183 - protein, 336 aa, Unknown
  Bacterial polypetide isolated from the Sargasso Sea
MSELNNIVNKILKNGKGILAADESTGTMTKRLDGVGVPSTPENRLLFRETLFCSSEMKNCIGGVILYDETIKQTSSKKNKIPDLIESMGSCAGIKVDTGAKVLAGSPNEKITEGLDGLRDRLKEYYKLGAKFTKWRGVYNISKDFPSKLSIHSNAHALARYSALVQECNMVPIVEPEVLMDGDHSAKDCFQKTSEVIKKCFEELILHKVDLKGVILKPNMILAGNKSKEKISNEEVAKLTLECLKSSVPSEVPGIAFLSGGQSELEATENLNLINKLNKTGFIMSYSYGRALQQGALKFWSKNIKDIEGTQKVFNHRAKMNTLAAQGKWSKEIESR

SEQ ID NO: 176184 - protein, 335 aa, Unknown
  Bacterial polypetide isolated from the Sargasso Sea
MTLEEIATYIVSDGKGILAADESNPTCGKRFDSIGVESTEENRRDYREMLFRSEGMNGNIGGVILFDETIRQSASDGTLLRDLISDQGALPGIKVDKGLQPIEDCPGETVTVGLDGLDDRLKEYTEMGAKFTKWRAVIKIGDGIPTDECIDANMDALAQYAKSAQNNGMVPIVEPEVLMDGDHSIDDCYDATERSLKSLFKHLEKYEVNIKGTLLKPNMVTSGSEHEVQAGIDEVANKTIECLVKNVPQDLPGVAFLSGGQSDVLATAHLDAMNKIGGFSWKLSFSYGRALQAAALKAWGGKPENVFIAQDELSHRAEMNKLASLGQWEKDLEER

SEQ ID NO: 176185 - protein, 336 aa, Unknown
  Bacterial polypetide isolated from the Sargasso Sea
MSNLEDIAKQMVMPGKGILAADESSGTIKKRFDSINVESTEENRRNYREMLFQSKNAMENYISGVILFDETLRQESKNGQPLVEVISNSGSLPGIKVDTGAKDLAFNSNEKITEGLDGLRERLIEYFNLGAKFAKWRAVITIEDSIPSDLCINSNAHALARYAALCQENGIVPIVEPEVLMDGEHTIERCYDVTKKTLDVVFNELIAHGVNLKGICLKPNMIIDGSLTSEKSSSKIIAEKTISCFKEVVPEDVPGIVFLSGGQTEIEATENLDQMNKIGNLPWNLSFSYGRALQASALQAWSGKVENEEIASATFDHRAKMKFPSTLGKWESELEK

SEQ ID NO: 176186 - protein, 340 aa, Unknown
  Bacterial polypetide isolated from the Sargasso Sea
MSTDNPLQATIQALVQDGKGLLAADESGPTIAKRFKTISVESTEENRRAWRTLLLSTPGLGEFVSGVILYEETLGQCADDGTPLPKLAARQQIVPGIKVDAGKIPLALAPGDEITQGLDGLAARLDGYRRQGARFAKWRAVYNVSATLPGHAAIEANAEALARYAAICQEAGVVPIVEPEVLMDGDHSIDRCAQVTDAVLHAVFNALHRHRVVLAHMLLKPSMVVAGSTHATQAAPAEVAEATVRLLRSAVPAEVPGIFFLSGGQTPEEATAHLDAMNRIAGRPWLLSFSYGRALQEPPLAAWKGQAANVRAAQAALLLRARLNGAACRGQYDAAMERTA

SEQ ID NO: 176187 - protein, 335 aa, Unknown
  Bacterial polypetide isolated from the Sargasso Sea
MTELNNIVLKILEKGKGILAADESTGTMTKRLQGVNVISTPENRLLFRETLFSSLSMTECIGGVILYDETIKQKSSEKIMIPELISNMGSYPGIKVDTGAKVLSGSPDEKITEGLDGLRERLKEYYQLGAKFTKWRGVYSISKNFPSKLSIHANAHALARYSALVQECNMVPIVEPEVLMDGEHSARECYQKTSEVIKKCFEELILHKVDLKGIILKPNMILAGNKSKDKISSEEVAKLTLECLKNSVPSEVPGITFLSGGQSETEATENLNLINKYNNTNFIMSYSYGRALQQSALKFWSKDIQNIEGTQKIFNHRVKMNTLAAQGKWSKDLEN

SEQ ID NO: 176188 - protein, 352 aa, Unknown
  Bacterial polypetide isolated from the Sargasso Sea
MISMRQLLDHAAENDYGVPAFNVNNLEQMRAIMEGARETSSPVIVQASAGARKYAGANFLRHLILAAIEEFPSIPIVMHQDHGASPAVCQRSIQLGFSSVMMDGSLLEDQKTPADYEYNVEVTKVTVDMAHACGVSVEGELGCLGSLESGLAGEEDGVGAEGVLSMDQLLTDPEQAAEFVSETGVDALAIAIGTSHGAYKFSRPPSGDVLAIDRIKEIHSRLPNTHLVMHGSSSVPQDLLSEINEFGGDIPETYGVPLEEIQEGIKNGVRKVNIDTDLRLASTAAIRKHLSSNASEFDPRKYLADSTQAMKKIVIERYEAFNTAGNAEKIVPIPLEAMGSRYESGSLNQVVN

SEQ ID NO: 176189 - protein, 222 aa, Unknown
  Bacterial polypetide isolated from the Sargasso Sea
TEGLDGLDSRMKNYYSLGARFAKWRAVINISEENNLPSDASLIANANALARYASICQENNIVPIVEPEVLMDGDHPIELTLEKTSKTLSIVFDHLNFLDVYLEGIILKPSMVIEGVNCPKKNDSKMIASSTIKCLSENVPQDVPGIAFLSGGQSDDDATNNLNEMNIQSQDNNWKLTFSYGRALQQAAMTFWSGKDENIESAKKIVMERAKVNSLAAAGKLS

SEQ ID NO: 176190 - protein, 243 aa, Unknown
  Bacterial polypetide isolated from the Sargasso Sea
MSLNNIEDIAAYIVADGKGILAADESNPTCGKRFDSIGVESTEENRRDYREMLFRSKGMKGNIGGVILFDETIRQSAADGTLLRDLITSQDALPGIKVDKGLQPIDDCPGETVTVGLDGLDERLKEYSSMGAKFTKWRAVINIGEGIPTDKCIDANMQALADYAKCAQDNGMVPIVEPEVLMDGVHSIDDCYDASARSLKSLFDHLDNKGVNIKGTILKPNMVTSGKDSEIQASMARLLRELS

SEQ ID NO: 176191 - protein, 355 aa, Unknown
  Bacterial polypetide isolated from the Sargasso Sea
MALISLRQLLDHAAEHGYGVPAFNVNNLEQMRAIMQAAEATDSPVIVQASAGARKYARPQFLKYLMTAALEQYPDIPVCIHQDHGTDPDICQRSIQLGMSSVMMDGSLMADGKTPASYEYNVDVTRRTVAFAHACGVSVEGEIGCLGSLETGTAGEEDGVGAEGVLSHDQLLTSPEEAARFVADTHVDALAIAIGTSHGAYKFSRKPTGDVLRIDRIKEIHARIPNTHLVMHGSSSVPQEWLKIINQYGGQIPETYGVPLEEIVEGIKHGVRKVNIDTDLRLASTGAVRKYLAEHPSEFDPRKFLKASMEAMADICTVRYEAFGCAGQASKIKPLSLQAMYKAYQSGALDPKINL

SEQ ID NO: 176192 - protein, 355 aa, Unknown
  Bacterial polypetide isolated from the Sargasso Sea
MALISLRQLLDHAAEHGYGVPAFNVNNLEQMRAIMQAAEATDSPVIVQASAGARKYARPQFLKYLMTAALEQYPDIPVCIHQDHGTDPDICQRSIQLGMSSVMMDGSLMADGKTPASYEYNVDVTRRTVAFAHACGVSVEGEIGCLGSLETGTAGEEDGVGAEGVLSHDQLLTSPEEAARFVADTHVDALAIAIGTSHGAYKFSRKPTGDVLRIDRIKEIHARIPNTHLVMHGSSSVPQEWLQIINQYGGQIPETYGVPLEEIVEGIKHGVRKVNIDTDLRLASTGAVRKYLAEHPSEFDPRKFLKASMEAMADICTVRYEAFGCAGQASKIKPLSLQAMYKAYQSGALDPKINL

SEQ ID NO: 176193 - protein, 349 aa, Unknown
  Bacterial polypetide isolated from the Sargasso Sea
MALVPLRLLLDHAAENGYGIPAFNVNNLEQVQAIMEAAYETDSPVILQASRGARNYAGEIFLRHLILAATETYPNIPVVMHQDHGNEPSTCYSAAINGFTSVMMDGSLEADAKTPASYEYNVAVTKKVVDFAHSVGVSVEGELGCLGSLETGKGEAEDGHGFEGELSTDMLLTDPEEAADFVAKTKVDALAIAIGTSHGAYKFTRKPTGEVLAISRIAEIHKALPNTHLVMHGSSSVPQEWLDIINKYGGEIPQTYGVPVEEIQEGIRNGVRKVNIDTDNRLAFTAAVREAAFADKANFDPRHFNKPARKYMKQVCLDRYKQFWCEGQASKIKQTALIILLIFTQKVIW

SEQ ID NO: 176194 - protein, 357 aa, Unknown
  Bacterial polypetide isolated from the Sargasso Sea
MALVPLRLLLDHAAENGYGIPAFNVNNLEQVQSIMEAAYETDSPVILQASRGARAYAGENFLRHLIIAAVETYPDIPVVMHQDHGNSPATCFGAAANGFTSVMMDGSLEADAKTPASYEYNVAVTKEVVDVAHAIGVSVEGELGCLGSLETGKGEAEDGHGFEGALSHDQLLTDPAEAADFVAKTKVDALAIAIGTSHGAYKFTRKPTGEVLAISRIAEIHKAIPNTHLVMHGSSSVPQEWLEMINKFGGQIPETYGVPVEEIQEGIRNGVRKVNIDTDNRLAFTAAVREAAAADPANFDPRHFNKPARKYMKQVCLDRYTQFWAAGNASKIKQRDINYYAGLYAKGELDSKVAVAA

SEQ ID NO: 176195 - protein, 220 aa, Unknown
  Bacterial polypetide isolated from the Sargasso Sea
MSIEEIAKQMVAKGKGILAADESTGTMEKRLKSVNVECTEKNRLHFRETLFSSTSMKSCISGVILFDETLRQTSSKSISIPELIKKSGSIPGIKVDKGAKLLSGSDKEKVTEGLDGLRERMEEYYKLGARFAKWRAVYSISSKHPSEQCIKSNAHALARYAALVQEAKMVPIVEPEVLMDGNHTIDQCYDVTSRVLAECYKELSIHNVNLKGTVLKPNMI

SEQ ID NO: 176196 - protein, 209 aa, Unknown
  Bacterial polypetide isolated from the Sargasso Sea
MSIENIAKQMVAKGKGILAADESTGTMEKRLKSVNVECTETNRLNFRETLFTSSSMRDNISGVILFDETLRQKSSSGITIPELISKSGVLPGIKVDKGAKPLAGSKNEKITEGLDGLKARMEEYHKLGARFAKWRAVLSISADQPSMLSIKANAHALARYASIVQEADMVPIIEPEVLMDGDHNIDKCYEVTSRVLNECYKELELHNVI

SEQ ID NO: 176197 - protein, 357 aa, Unknown
  Bacterial polypetide isolated from the Sargasso Sea
MALVPLRLLLDHAAENGYGIPAFNVNNLEQVQAIMEAADETDSPVILQASRGARNYAGEIFLRHLILAATETYPHIPVVMHQDHGNEPSTCYSAAINGFTSVMMDGSLEADAKTPASYDYNVAVTKQVVDFAHSVGVSVEGELGCLGSLETGKGEAEDGHGFEGELSKDMLLTDPAEAADFVAKTKCDALAIAIGTSHGAYKFTRKPTGEVLAISRIAEIHKALPNTHLVMHGSSSVPQEWLEMINKHGGAIPETYGVPVEEIQEGIRNGVRKVNIDTDNRLAFTAAVREAAMADPANFDPRHFNKPARKYMKQVCLDRYQQFWAAGNASKIQQQSINYYAGLYAKGALDPKAAVAA

SEQ ID NO: 176198 - protein, 338 aa, Unknown
  Bacterial polypetide isolated from the Sargasso Sea
MSLENIEEIASFIVADGKGILAADESNPTCGKRFDSIGVESTEENRRDYREMLFRSKGMKSNIGGVILFDETIRQTAKDGTLLKDLISDQGALPGIKVDKGLQPIEDCPGETVTIGLEGLDERLKEYASMGAKFTKWRAVINIGDGIPTDKCIDANMDALANYAKCAQDNGMVPIVEPEVLMDGDHDIEECYKATERSLKSLFIHLENKGVNIKGTLLKPNMVTSGKDNNNQAGIDEVAKKTLDCLIKNVPAELPGITFLSGGQSDVLATAHLDAMNKIGGFSWKLSFSYGRALQAPSLKAWGGKPENIFISQDELSHRAEMNKLASLGQWEEELEDR

SEQ ID NO: 176199 - protein, 353 aa, Unknown
  Bacterial polypetide isolated from the Sargasso Sea
MLITLRQLLDHAAENNYGVPAFNINNMEQGLAIMSAAKKCNSPVIIQASRGARSYAGDQILQSIIKGLVSMFPEIPLCMHQDHGNSQATCMTAIQYGFTSVMMDGSLEEDGKSPASYEYNLNITKNVSIMAHHGGVSVEGELGVLGSLETGMGEKEDGHGAEGKLSESQLLTDPEQAFDFVKNTKVDALAIAMGTSHGAYKFSRKPDGNILAMHVIEEIHRRLPNTHLVMHGSSSVPQELQDIFNEFGGEMPQTYGVPLGEIERGIKNGVRKVNIDTDCRLAMAGEIRKICQTKKSEFDLRKFLKPAQDAMEKVCVDRFQRFNTAGNASKITPLSLAEMAIRYKNGELDPILA

SEQ ID NO: 176200 - protein, 257 aa, Unknown
  Bacterial polypetide isolated from the Sargasso Sea
MGIEEIAKQMVAKGKGILAADESTGTMEKRLKSVNVECTEKNRLNFRETLFSSSSMKTSISGVILFDETLRQTSSSGVSIPELIKKSGSIPGIKVDKGAKLLAGSDKEKITEGLDGLRNRMEEYYRLGARFAKWRAVYSISSKHPSEQCIKSNAHALARYAAIVQEAKMVPIVEPEVLMDGDHTIDACFDVTNKVLSECYKELLLHNINLKGTVLKPNMIIPGASCKKKATTEEIAKKTLECLKNNMPKEVPGVAFL

SEQ ID NO: 176201 - protein, 338 aa, Unknown
  Bacterial polypetide isolated from the Sargasso Sea
MSLNNIEDIAAYIVADGKGILAADESNPTCGKRFDSIGVESTEENRRDYREMLFRSKGMKGNIGGVILFDETIRQSAADGTLLRDLITSQDALPGIKVDKGLQPIDDCPGETVTVGLDGLDERLKEYSSMGAKFTKWRAVINIGEGIPTDKCIDLNMQALADYAKCAQDNAMVPIVEPEVLMDGVHSIDDCYDASARSLKSLFDHLDKKGINIKGTILKPNMVTSGKDSDVQASIGEVAKRTLECLTENVPSDLPGIAFLSGGQSDILATAHLDAMNKIGGFSWKLSFSYGRALQAAALQAWGGKPENVFISQDELSHRAEMNKLASLGKWEEELEDR

SEQ ID NO: 176202 - protein, 336 aa, Unknown
  Bacterial polypetide isolated from the Sargasso Sea
MSELNKIALKIISHGKGILAADESTGTMTKRLKAVNVNSTPENRLLFREILFSSECMKNCIGGVILYDETINQTTSFGKSIPDLISASGAVPGIKVDTGAKELANSPEEKITEGLDGLRDRLKKYYKLGARFTKWRGVYSISNKYPTRLAINSNAHALARYSALVQESGMVPIVEPEVLMDGDHSADVCLRKTSEVIKKCFEELILHKVDLSGIILKPNMILSGTQSKEKITSEEVSHKTLECLKNSVPSDVPGIAFLSGGQSESEATENLNLINKNNNTNFIMTYSYGRALQQSALKVWSKNIKEIEETQKIFNHRAKMCTLAAQGEWVRELESK

SEQ ID NO: 176203 - protein, 325 aa, Unknown
  Bacterial polypetide isolated from the Sargasso Sea
MVQKGKGILAADESTPTCKKRFDSINVESTEENRNKYRNMLFTADGIENFISGVILFDETLRQSTMEGSVPFPDHLTKLGILPGIKVDKGAKQLANTENEKITDGLDGLRDRLKEYYELGARFAKWRAVITIGENMPTAYCISTNAHALARYAALCQEQGLVPIVEPEILMDGTHTIDESYQLTTETLYNVFYELVSQGVELEGIVLKPNMVLSGYDCSDQASVEQVAEMTVDCFLNTVPAVVPGIAFLSGGQSDELATAHLNAMNQIDGTPWNLTFSYGRALQAPALKAWSGKDENISNAQESFMKRAKFNSLATKGEYSKDME

SEQ ID NO: 176204 - protein, 337 aa, Unknown
  Bacterial polypetide isolated from the Sargasso Sea
MNFESLEDIANHIVSDGKGILAADESTPTITKRFDTIDTESTEENRRDYRELLFRAEGMKNNIGGVILFDETLRQEAKDGTMLSDIIYAQGALPGIKVDKGIKPLDSSPDENLTQGLDGLDERCAEYFSLGAKFTKWRAVIKQDGSFPSDDCLKANMEALAEYAKIVQNNNMVPIVEPEVLMDGSHSIEDCYSATSRALETLFNSLTDHEVNIKGTILKPNMVTSGSTASEQANISLVAEKTVECLQNSLSDDLPAVTFLSGGQSDIDSTAHLDKMNKISSNPWKLSFSYGRALQQAALKAWSGNVENETAAQEAFSHRAKMNKLAALGEWESSLEN

SEQ ID NO: 176205 - protein, 354 aa, Unknown
  Bacterial polypetide isolated from the Sargasso Sea
MAIISLRQLLDHAAENNYGVPAFNVNNLEQIRAIMEGANEVNSPVIVQASAGARKYAGPKFIKSMMEAAVEEFPQIPIVMHQDHGGSPADCKVCIDLGFSSVMMDGSLLEDQKTPSDFAYNVKVTKETVNIAHSLGVSVEGELGCLGSLETGMGEKEDGVGAEGVLSHDQLLTDPEEAAEFVKSTNVDALAIAIGTSHGAYKFSRPPSGDILAIDRIKEINNKLPNTHLVMHGSSSVPQDLIKIINENGGKIKETYGVPVSEIQEGIKHGVRKINIDTDLRLASTAAIRKHFVNDPSQFDPRKYLIDSKEWMKKIVIARLTEFGCAENATKIKSIPLSTIASQYKSGELAPSVN

SEQ ID NO: 176206 - protein, 359 aa, Unknown
  Bacterial polypetide isolated from the Sargasso Sea
MSKKIFDFVKPGVITGDDVQKVFAIAKENGFALPAVNCVGTDSVNAVLEAAAKVKAPVIVQFSNGGAVFTAGKGLKLEGQQAAIIGAISGAKHVHAVAEAYGVPVILHTDHASKKLLPWIDGLLDAGEKHFAETGKPLFSSHMLDLSEESLEENIDICCEYLTRMAKMNMTLELELGCTGGEEDGVDNSHMDQSALYTQPEDVAYAYERLSKISPRFTIAASFGNVHGVYKPGNVKLTPSILDASQKYVSEKFGLPAKSLDFVFHGGSGSTLEEIRESISYGVVKMNIDTDTQWATWEGILGFYKKNEAYLQGQLGNPEGADKPNKKFYDPRVWLRAGQTTMIARLEKAFSDLNAIDVL

SEQ ID NO: 176207 - protein, 268 aa, Unknown
  Bacterial polypetide isolated from the Sargasso Sea
MSIEEIAKLMVVKGKGILAADESTGTMEKRLKSVNVECTEKNRLHFRETLFSSGSMKTCISGVILFDETLRQTSSGGIPVPELIKKNGSIPGIKVDKGAKLLAGSKNEKVTEGLDGLRSRMEEYYKLGARFAKWRAVYSISSEYPSEQCIKSNAHALARYAAIVQEAKMVPIVEPEVLMDGDHTIDKCYDVTSKVLSECYSELAIHKVNLKGTVLKPNMILPGASCKQKASTEEIAKKTLDCLKKNMPSEVPGVAFLSGGQSEVGSDK

SEQ ID NO: 176208 - protein, 336 aa, Unknown
  Bacterial polypetide isolated from the Sargasso Sea
MSNLEDIAKQMVMPGKGILAADESSGTIKKRFDSINVESTEENRRNYREMLFQSKNAMENYISGVILFDETLRQESKSGQPLVEVIADSGSLPGIKVDTGAKDLAFNSNEKITEGLDGLRERLIEYYNLGAKFAKWRAVITIEDSIPSELCINSNAHALARYAALCQENDIVPIVEPEVLMDGEHTIERCYDITKKTLEVVFNELIAHGVNLKGICLKPNMVIDGTLTSEKSSSKTIAEKTISCFKEVVPEDVPGIVFLSGGQTEIEATENLDQMNKIGNLPWNLSFSYGRALQASALQAWLGKVENEEIASATFDHRAKMNSLATLGKWESELEK

SEQ ID NO: 176209 - protein, 338 aa, Unknown
  Bacterial polypetide isolated from the Sargasso Sea
MKIEEIAKMMVAKGKGILAADESTGTMEKRLKSVNVESTEKNRLNFRETLFSSNSMKTSISGVILFDETLRQKSSSGISIPELIKKSGAIPGIKVDKGAKSLAGSDKEKITEGLDGLRDRMKEYYDLGARFAKWRAVYSISSSHPSDQCIKSNAHALARYAAIVQEAKMVPIVEPEVLMDGEHTIDKCFDVTSIVLNECYKELKIHNINLKGTVLKPNMILPGANCKQKVSTQEIAKKTLDCLKKNMPKEVPGVAFLSGGQSEVEATKNLNEINKINDTNFNFTFSFGRALQQSALKTWSKSMNDTKKVQKVFDHRANMNGVSTQAKWDEKLEQNFAA

SEQ ID NO: 176210 - protein, 318 aa, Unknown
  Bacterial polypetide isolated from the Sargasso Sea
LAADESNPTCGKRFDSIGVESTEENRRDYREMLFRSKGMKGNIGGVILFDETIRQSSVDGSLLRDLISEQGALPGIKVDKGLQPIEDCPGETVTVGLDGLDERLKEYTSMGAKFTKWRAVINIGDGIPTDKCIDANMDALADYAKCAQDNGMVPIVEPEVLMDGDHNIDECYQATERSLKSLFKHLEKKGVNIKGTLLKPNMVTSGKDNSNQASIDEVAEKTLDCLIKNVPAELPGVTFLSGGQSDILATAHLDAMNKIGGFSWKLSFSYGRALQAPSLKAWGGKSENVFISQDELSHRAEMNKLASLGQWEEELEDR

SEQ ID NO: 176211 - protein, 357 aa, Unknown
  Bacterial polypetide isolated from the Sargasso Sea
MALVPLRLLLDHAAENGYGIPAFNVNNLEQVQAIMEAAYETDSPVILQASRGARNYAGEIFLRHLILAATETYPNIPVVMHQDHGNEPSTCYSAAINGFTSVMMDGSLEADAKTPASYEYNVAVTKKVVDFAHSVGVSVEGELGCLGSLETGKGEAEDGHGFEGELSTDMLLTDPEEAADFVAKTKVDALAIAIGTSHGAYKFTRKPTGEVLAISRIAEIHKALPNTHLVMHGSSSVPQEWLDIINKYGGEIPQTYGVPVEEIQEGIRNGVRKVNIDTDNRLAFTAAVREAAFADKANFDPRHFNKPARKYMKQVCLDRYKQFWCEGQASKIKQNSTNYFADLYAKGELDPKVKATV

SEQ ID NO: 176212 - protein, 302 aa, Unknown
  Bacterial polypetide isolated from the Sargasso Sea
MQEKFSLRHLILAATETYPNIPVVMHQDHGNEPSTCYSAAINGFTSVMMDGSLEADAKTPASYEYNVAVTKKVVDFAHSVGVSVEGELGCLGSLETGKGEAEDGHGFEGELSTDMLLTDPEEAADFVAKTKVDALAIAIGTSHGAYKFTRKPTGEVLAISRIAEIHKALPNTHLVMHGSSSVPQEWLDIINKYGGEIPQTYGVPVEEIQEGIRNGVRKVNIDTDNRLAFTAAVREAAFADKANFDPRHFNKPARKYMKQVCLDRYKQFWCEGQASKIKQNSTNYFADLYAKGNLDPKVKATV

SEQ ID NO: 176213 - protein, 336 aa, Unknown
  Bacterial polypetide isolated from the Sargasso Sea
MSLNTLEEIAKYIVSDGKGILAADESNPTCGKRFDSIGVESTESNRRDYREMLFRSSGMKDNIGGVILFDETMRQNAQDGTPLVDLIKNQGALPGIKVDKGLAPLESSPEETLTQGLDGLDERCKEYFRLGAKFTKWRAVIKISDDIPTDACIQANMEALAKYAKIVQDNNMVPMVEPEVLMDGNHSIEKCYEVTSKSLKMLFKCLKDEGVNIGGTILKPNMVTSGSIAESQASIQKVAEMTVQCLKENVPSDLPGITFLSGGQSDVNATAHLDAMNKIGGFSWKLSFSYGRALQQPSLKAWLGKEENITKAQEALSHRALMNKLAANGAWNLDLE

SEQ ID NO: 176214 - protein, 338 aa, Unknown
  Bacterial polypetide isolated from the Sargasso Sea
MTLEEIAKKMCAKGKGILAADESTGTIAKRFKSINVENTEKNRLAFRQTLFSSKAMKNYIGGVILFDETIKQKTALGLTIPELISNSNAIPGIKVDKGAKTLAGSSDETVTEGLDGLRERLEEYYGLGARFTKWRAVYKIGSKFPSSQSIKSNAHALARYAALVQEAKMVPIIEPEVLMDGSHDIDKCYQVTTDVLNEVYNELEIHKVNLKGTVLKPNMVIPGSEASKKSTTEEIAKKTLDCLKKNVPSEVTGIAFLSGGQSEIESSKNLNEINKINDTNFLITFSYGRGLQASALKEFGKNQKNLINIQKAFDHRAKMNGLSSKGEWSENLEKEAAA

SEQ ID NO: 176215 - protein, 327 aa, Unknown
  Bacterial polypetide isolated from the Sargasso Sea
MSELNTIALKIIGSGKGILAADESTATMSKRLENVQVESSPENRLLFRETLFSSESMNNCIGGVILYDETIRQSSNSGKKVPELISNSSSVPGIKVDTGAKVLANSKEEKITEGLDGLRERLKEYYKLGARFTKWRGVYIISDKYPSKLSIKSNAHALARYSALAQECGMVPIVEPEVLMDGNHSAEVCYNKTSEVIKNCFEELELNKVDLKAVILKPNMILPGSNSDKKISNEEIAKLTLKCLKDSVPSEVPGIAFLSGGQTDIEATDNLNQINIHNNTNFIMTFSYGRALQQSALKFWSKDIKNIKGTQNIFNHRANMCRLAAQG

SEQ ID NO: 176216 - protein, 253 aa, Unknown
  Bacterial polypetide isolated from the Sargasso Sea
EVIIAQGALPGIKVDKGLNPFNESDNETLTQGLDDLDERCSEYEKLGAKFTKWRAVINIGADIPTQECIDANMDALAQYAKIAQENNMVPIVEPEVLMDGEHSAEDCLNATSRSLKSLFDFLDNYNVDITGTLLKPNMITAGSDNPDQISEDEVASLTLECLKKHVPDDLPGIAFLSGGQSDIKATHHLDAMNKMGGGPWKLTFSYGRALQQLALKTWLGKAENEEAAQAAFSHRALMNRLAASGKWSPDLEK

SEQ ID NO: 176217 - protein, 341 aa, Unknown
  Bacterial polypetide isolated from the Sargasso Sea
MSLNLDNMNDVAEAMTASGKGILAADESTGTIGKRLDQINTESTEQTRNAYRDLLFTADGLNQYISGVIMYDETFHQSSLDGGVVYPEYLASKGIIPGIKVDAGAHNLSGSEDEKITLGLDGLDERLSNYRKLGARFAKWRAVINITELNPSDYCIKANAHALARYAALCQSNDVVPIVEPEILMDGGHDIEDSFVVTEEVLHTVFDELYTQGVQYEEMVLKPNMVLSGYDANDRAGVDEVASATVQCFLRSVPAAVPGIAFLSGGQSDEDATAHLNAMNQILGDNKPWHLSFSYGRALQQPALKAWQGSGENISNAQAALMKRAKLNSLATQGKYSTDLE

SEQ ID NO: 176218 - protein, 337 aa, Unknown
  Bacterial polypetide isolated from the Sargasso Sea
MIPKTLEEIANYIVSDGKGILAADESSGTIEKRFKSINVESTEDNRRKYREMLFRSPVMAEAIGGVILFDETLRQKSSDGDYLRNVILDHGSLPGIKVDQGVKEFEGGSDEKITTGLDGLHERCQEYEKLGAKFTKWRAVINVSDEIPSNNCISENMNALAEYALIAQQNNMVPIVEPEVIMDGSHSVERCHEVTNQTLLVLFEMLDKKNVNIKGTLLKPNMVVSGTENNYQAPIEEVAEKTLQCLKSSVPDELPGIVFLSGGQSDLDATAHLDAMNKIGGFKWKLSFSYGRALQQAALKTWAGKDDNLEAAQKAFSHRAVMNMKAAQGQWDKSLEG

SEQ ID NO: 176219 - protein, 342 aa, Unknown
  Bacterial polypetide isolated from the Sargasso Sea
MSLELKNLQDIAEAMTVKGKGILAADESSPTCKKRFDSINVDSNEKNRNIYRDMLFTTKGMEEFISGVILFDETIRQSTIKDGVSFPDYLLGLGVIPGIKVDAGAKHLSGTDSEKITEGLDGLGGRLKDYYKMGARFAKWRAVITIGENEPSGTCIAANAHALARYASLCQENGIVPIVEPEILMDGDHTIEESFVVSEEVLHTVFYELYGQNVELEGMVLKPNMVLSGYDCNQQAGVEKVAELTVQIFKRCVPAAVPGIAFLSGGQSDEHATAHLNAMNQLLGDSSPWNLTFSYGRALQAPALKAWAGKDENISDAQAAFYKRARLNSLATKGDYSEDMES

SEQ ID NO: 176220 - protein, 338 aa, Unknown
  Bacterial polypetide isolated from the Sargasso Sea
MDLSSLNSIAQSMVAPNKGILAADESTPTIGKRFATIDTESTESNRQIYRNLLFTSPNVSEYISGVILFDETIRQSTNDGTPFAEHLTSLGIVPGIKVDKGVKGIPFCDGETVTEGLDGLDERLDEYYELGARFAKWRAVISISDDLPSKNCIRLNAHALARYAALCQQAQIVPIVEPEVLMDGTHDIDRCFDVTSEVLQEVFAELNNQQVALNGIVLKPNMVISGMDAANRADIPTVASATVKCLSENVPDEVPGIAFLSGGQTSEEATAHLSSMNEMGPHPWQLTFSYGRALQAEPLKVWSGVDGNIEAAQEAFIKRSRLNSLARTGNYHPQMEEA

SEQ ID NO: 176221 - protein, 296 aa, Unknown
  Bacterial polypetide isolated from the Sargasso Sea
MNKNEQLKRIRTNKGFIAALDQSGGSTPKALQLYGISEDQYQNEEEMFNLIHEMRTRIITSPSFSQSHIIGAILFEQTMERFISGIPTADYLWKTKKIVPFLKVDKGLKDPKDGVRLMKDIPDLRETLKKASEHGIFGTKMRSVIDEDNASGIDKIVNQQFAFGKIILDAGLTPIIEPEVTINISQKSKAEESLKKNLIKYLSKLEPKQNVLLKLTLPEKDNFYKDLVNHPNVLRVVALSGGYSLTEANKRLEENSGVVASFSRALTQSLFVHQNTDEFNLALEQAIFAISAASDT

SEQ ID NO: 176222 - protein, 336 aa, Unknown
  Bacterial polypetide isolated from the Sargasso Sea
MSNLENIAKQMVTPGKGILAADESSGTIKKRFDTINVESTEENRRDYREILFQTKNAMENYISGVILFDETIRQKSKNGPTLVEVISNAGSLPGIKVDTGAKDLAFNSNEKVTEGLDGLRERLIEYYNLGAKFAKWRAVITIESSIPSDLCINANAHALARYAALCQENEIVPIVEPEVLMDGAHTIDRCYEVTKRTLEVVFSELVAHGVNLKGICLKPNMVIDGTLVTDKSSPKTIAEKTISCFKEVVPEDVPGIVFLSGGQSEIEATENLDQMNKIGNLPWNLSFSYGRALQASALQAWSGKVENEETASMAFNHRAEMNSLATLGKWDAGLEK

SEQ ID NO: 176223 - protein, 304 aa, Unknown
  Bacterial polypetide isolated from the Sargasso Sea
MSELNTIALKIIGNGKGILAADESTATMTKRLESVKVESNPENRLLFRETLLTSDNMQNCIGGVILYDETIKQSSSSGKKIPELISDLNSVPGIKVDIGVKTLANSKEEKITEGLDGLRERLKEYYKLGARFTKWRGVYIISDKYPSRLSIKTNAHALARYSALAQESGMVPIVEPEVLMEGSHSADDCYKKTSEVIKNCFDELELNKVDLKGVILKPNMILPGSNSDKKISKEEIARLTVQCLKDSVPSEVPGIAFLSGGQTDIEATENLNQINISNSTNFIMTFSYGRALQQSALKIWSKDI

SEQ ID NO: 176224 - protein, 337 aa, Unknown
  Bacterial polypetide isolated from the Sargasso Sea
MNFSGLSDIARYIVSDGKGILAADESNPTCTKRFDSIGVESTEENRRNYRETLFTAEGMRENIGGTILFDETLRQKARNGKQLTEVILQQGALPGIKVDKGLKPFNNSDIETLTQGLDDLDERCSEYERVGAKFTKWRAVINIGNNLPSQECIDANMDALAQYAKIAQKNNMVPIVEPEVLMDGEHSAEDCLDATSRSLKSLFAFLDNYNVNIEGTLLKPNMITAGSNHPKQLSEDQVAEVTLGCLKEHVPANIPGIAFLSGGQSDIKATHHLDIMNKLGGGPWKLTFSYGRALQQAALKTWLGKEENEKKAQDAFSHRALMNKLAALGKWSSELEE

SEQ ID NO: 176225 - protein, 329 aa, Unknown
  Bacterial polypetide isolated from the Sargasso Sea
MSLEEIAKKMCAKGRGILAADESTGTMEKRLKSVGIESTEKTRLNFRETLFQSKAMKEFIGGVILFDETLRQKSSNGISIPDLISKNNSIPGIKVDKGAKLLAGSNEEKITEGLDGLRERLMEYNKLGAKFTKWRAVYSIGKNHPSTQCIKSNAHALARYAALVQEADMVPIVEPEVLMDGDHDINTCYKVTTNVLNECYNELELHKVDLKGTVLKPNMILPGSECKKKSNKEEIAKMTLECLKKNVPSMVPGIAFLSGGQTEIEASRNLNQINLINDTNFLITFSYGRALQQSALKTWSKDTKNVSKVQEVFNHRAKMNGLSSKGALE

SEQ ID NO: 176226 - protein, 342 aa, Unknown
  Bacterial polypetide isolated from the Sargasso Sea
MSLEFESLNDIAEAMTVKGKGILAADESSPTCKKRFDSIDIDSTEKNRNIYRDMLFTTKGMEEFISGVILFDETIRQSTIKDGVSFPEYLSGLGVIPGIKVDAGAKHLSGTDSEKITEGLDGLDGRLKDYYKMGARFAKWRAVITIGDNEPSGTCIAANAHALARYASLCQENGIVPIVEPEILMDGEHTIEESFVVSEEVLHSVFYELYGQNVELEGMVLKPNMVLSGYDCNEQAGVEKVAELTVQVFKRCVPAAVPGIAFLSGGQSDEAATAHLNAMNQLLGDSSPWNLTFSYGRALQAPALKAWAGKDENISDAQAAFYKRARLNSLATKGNYSEDMES

SEQ ID NO: 176227 - protein, 271 aa, Unknown
  Bacterial polypetide isolated from the Sargasso Sea
MDLSSLNSIAQSMVAPNKGILAADESTPTIGKRFASIDTESTESNRQIYRNLLFTSPNVSEYISGVILFDETIRQSTNDGTPFAEHLTSLGIVPGIKVDKGVKGIPFCDGETVTEGLDGLDERLDEYYELGARFAKWRAVISISDDLPSKNCIRLNAHALARYAALCQQAQIVPIVEPEVLMDGTHDIDRCFDVTSEVLQEVFAELNNQQVALNGIVLKPNMVISGMDAANRADIPTVASATVKCLSENVPDEVPGIAFLSGGQTSEEATA

SEQ ID NO: 176228 - protein, 206 aa, Unknown
  Bacterial polypetide isolated from the Sargasso Sea
MSLEEIANYIVSDGKGILAADESNPTCGKRFDSIEVENSENNRRDYREMLFRSKGMKENIGGVILFDETLRQDAKDGTPLKELISNSGALPGIKVDKGLVPLVDGSDEVVTQGLDGLDERCSEYDSLGAKFTKWRAVIKIGDSMPSDDCINANAKALADYAAIAQSNNMVPIVEPEVLMDGDHSIDLSFDACARSFQALFDALENN

SEQ ID NO: 176229 - protein, 338 aa, Unknown
  Bacterial polypetide isolated from the Sargasso Sea
MSLNNIEDIAAYIVADGKGILAADESNPTCGKRFDSIGVESTEENRRDYREMLFRSKGMKGNIGGVILFDETIRQSAADGTLLRDLITSQDALPGIKVDKGLQPIDDCPGETVTVGLDGLDERLKEYSSMGAKFTKWRAVINIGEGIPTDKCIDANMQALADYAKCAQDNGMVPIVEPEVLMDGVHSIDDCYDASDRSLKSLFDHLDKKGVNIKGTILKPNMVTSGKDSDIQASIGEVAKRTLECLTENVPSDLPGIAFLSGGQSDILATAHLDAMNKIGGFSWKLSFSYGRALQAAALQAWGGKPENVFISQDELSHRAEMNKLASLGKWEEELEDR

SEQ ID NO: 176230 - protein, 339 aa, Unknown
  Bacterial polypetide isolated from the Sargasso Sea
MNLNSLSEIANAMVEKGRGILAADESTPTCKKRFDSINVESNEANRNAYRDMLFTTPGMEKFISGVILFDETLRQSTLADNEKFPDYLTKLGVIPGIKVDKGAHPLPGCEGEKVTEGLDGLNSRLEEYYDLGARFAKWRAVITIGDSAPSGSCLAANAHGLARYAAMCQENGIVPIVEPEILMDGEHTIEESFIVTEEVLHTTFYELYSQNVLLEGMVLKPNMVLSGYACSEQASVDEVAEMTVTVLKRCVPSAVPGIAFLSGGQSDEDATAHLNKMNQILGDNSPWNLTYSYGRALQAPSLKAWEGKQENVKDAQDAFYKRAKLNSLATKGEYSPEME

SEQ ID NO: 176231 - protein, 305 aa, Unknown
  Bacterial polypetide isolated from the Sargasso Sea
FATIDTESTESNRQIYRNLLFTSPNVSEYISGVILFDETIRQSTNDGTPFAEHLTSLGIVPGIKVDKGVKGIPFCDGETVTEGLDGLDERLDEYYELGARFAKWRAVISISDDLPSKNCIRLNAHALARYAALCQQAQIVPIVEPEVLMDGTHDIDRCFDVTSEVLQEVFAELNNQQVALNGIVLKPNMVISGMDAANRADIPTVASATVKCLSENVPDEVPGIAFLSGGQTSEEATAHLSSMNEMGPHPWQLTFSYGRALQAEPLKVWSGVDGNIEAAQEAFIKRSRLNSLARTGNYHPQMEEA

SEQ ID NO: 176232 - protein, 275 aa, Unknown
  Bacterial polypetide isolated from the Sargasso Sea
MQNITTSWFVQGMIKATSDAWLKGWDERNGGNLTLRLDEADIAPFSADFHEKPRYIALSQPMPLLANTPFIVTGSGKFFRNVQLDPAANLGVVKIDSDGAGYHILWGLNHEAVPTSELPAHFLSHCERIKATNGKDRVIMHCHATNLIALTYVLENNTALITRKLWEGSTECLVVFPDGVGILPWMVPGTDEIGQATAEEMQKHSLVLWPFHGVFGSGPTLDEAFGLIDTAEKSAEVLVKIYSMGGMKQTITREELIALGKRFGVTPLASAIELY

SEQ ID NO: 176233 - protein, 191 aa, Unknown
  Bacterial polypetide isolated from the Sargasso Sea
TTLCKEAIQHGFFSVCVNPFYVPLAAINLKEHKPKVGTVIGFPLGADSGEMKYAETRFMIHQGAEEIDMVLNIGALKERSFEVIRKEINKVVEASDGNCVKVIIETCFLNNEEIKIACNIAKDAGATFVKTSTGFSSGGATIEDVKLMRKTVGADMGVKASGGIRLLEHIELLIDAGANRIGTSNAVEILK

SEQ ID NO: 176234 - protein, 256 aa, Unknown
  Bacterial polypetide isolated from the Sargasso Sea
MTDLKKAAQRAIELMDLTTLNDDDTDQKVIDLCHKAVTPAGNTAAICIYPRFIPIARKTLDELGAEDIQIATVTNFPHGNDDIAIAVLETRAAVAYGADEVDVVFPYRALMEGNESVGYELVKACKEACGDVLLKVIIESGVLADPALIRRASELSIDAGADFIKTSTGKVPVNATLEAAEIMLTVISEKNTKVGFKPAGGVRDAAQAAEFLGVAERILGADWVSPRTFRFGASSLLNSLLHTLELADAPKPTQGY

SEQ ID NO: 176235 - protein, 226 aa, Unknown
  Bacterial polypetide isolated from the Sargasso Sea
MPLSNAQLAQTIDHTLLAPDASDAQIRELCRQAAEHRFYSVCVNSANVPLAARELADTGVLVCAVVGFPLGAGLSAAKAFEATAAIAAGAGEIDMVINIGALKSGRADDVKADIDAVHRACGTVPLKVILETGLLTDDEKVRVCEMCRDLGVAFVKTSTGFGHGGATLADVALMRRTVGPVLGVKASGGVRDRAAALAMIEAGATRLGTSSGVAIVTDQGGGAAGY

SEQ ID NO: 176236 - protein, 256 aa, Unknown
  Bacterial polypetide isolated from the Sargasso Sea
MTDLKKAAQRAIELMDLTTLNDDDTDQKVIDLCHKAVTPAGNTAAICIYPRFIPIARKTLDELGAEDIQIATVTNFPHGNDDIAIAVLETRAAVAYGADEVDVVFPYRALMEGNETVGYELVKACKEACGEVLLKVIIESGVLADPALIRRASELSIDAGADFIKTSTGKVPVNATLEAAEIMLTVISEKNTKVGFKPAGGVRDAAQAAEFLGVAERILGADWVSPRTFRFGASSLLNSLLHTLELADAPKPTQGY

SEQ ID NO: 176237 - protein, 257 aa, Unknown
  Bacterial polypetide isolated from the Sargasso Sea
MTDLKLAAQRALNLMDLTTLNDDDTDQKVIDLCRKAKSPAGLTAAVCIYPRFIPIARKTLREIGAADVRIATVTNFPHGNDDIEIAVAETRAAVAYGADEVDVVFPYRAFMAGNEQVGFDLVKACKEACGSQALLKVIIETGELKEEALIRRASEISIDAGADFIKTSTGKVPVNATPEAARIMMEVIKAKNPKVGFKPAGGVKDAAVAGQYLAMAEEILGKDWVSARTFRFGASSLLASLLATLGHGDKPANTSGY

SEQ ID NO: 176238 - protein, 300 aa, Unknown
  Bacterial polypetide isolated from the Sargasso Sea
YDLKRFAGIKRDYTDEEVERLRGSIKIEYSLCKNQSQKLWKLLNSEPYVNTLGSLSGNQAVQHAKAGLKAIYLSGWQVAADANTAGEMYPDQSLYPYDSAPKLVESMNNSLIRADQIQHMEMQDGDMKKEDRTDYMLPIIADGEAGFGGPLNVFELTKKFIRAGAAGVHFEDQLASEKKCGHMGGKVLVPTGTMIKNLKAARLAADIAEVPLIILARTDANAAKLITNDFDENDKPFLTGERSPEGFFYVKDGIEQAISRGLAYAPYADLIWCETATPNLSEAKKFADAIHEKFSGKLLA

SEQ ID NO: 176239 - protein, 241 aa, Unknown
  Bacterial polypetide isolated from the Sargasso Sea
EKKCGHLGGKVLVPTATFERTLNSARLAADVMGVPTLIMARTDAEAARLITSDIDERDHPFLTGERTTEGFYRMTGGIDCAIARGIAYAPYADLVWCETATPDLAEARKFAEALKKEHPDQMLAYNCSPSFNWKKHLDEAQMKVFQKEIAAMGYKFQFITLAGFHNLNYSTFKLAEAYKENGMAAYSELQQKEFGAEKDGYSATKHQREVGVSYFDAVSNAVTKGQSATTAMDDSTETDQF

SEQ ID NO: 176240 - protein, 304 aa, Unknown
  Bacterial polypetide isolated from the Sargasso Sea
EAYVNTLGSLSGNHAVQHAKAGLKAIYLSGWQVAADANSAGEMYPDQSLYPYDSAPKLVETMNNSLIRADQIQHMEIIDGDMDKDKRTDYMLPIIADGEAGFGGPLNVFELTKKFIRAGAAGVHFEDQLASEKKCGHMGGKVLVPTGTMVRNLKAARLAADIADVPLIILARTDANAAKLITNDFDENDKPFLTGERSPEGFFYVKDGIEQAISRGLAYAPYADLIWCETATPNLEEAKKFADAIHEKFPGKMLAYNCSPSFNWKKHLSDEEIGSFQRKIGEMGYKFQFITLAGFHTQNIAILN

SEQ ID NO: 176241 - protein, 270 aa, Unknown
  Bacterial polypetide isolated from the Sargasso Sea
SAPKLVESMNNALIRADQIQHMELKDGDMKKDKRIDYMLPIIADGEAGFGGPLNVFELAKKFIKAGAAGVHFEDQLASEKKCGHMGGKVLVPTGTMIKNLKAARLAADIADVPLIILARTDANAAKLITNDYDENDKPFLTGERSPEGFHYVKAGIEQAISRGLAYAPYSDLIWCETATPNLEEAKKFADAIHEKFPGKLLAYNCSPSFNWKKHLSDAEIASFQKEISAMGYKFQFITLAGFHTQNIAIFELAEKYKKEGMAAYSRIQEQ

SEQ ID NO: 176242 - protein, 280 aa, Unknown
  Bacterial polypetide isolated from the Sargasso Sea
KAGLKAIYLSGWQVAADANSAGEMYPDQSLYPYDSAPKLVETMNNSLVRADQIQHMEMIDGDMDKSKRTDYMLPIIADGEAGFGGPLNVFELTKKFIRAGAAGVHFEDQLASEKKCGHMGGKVLVPTGTMVRNLKAARLAADIADVPLIILARTDANAAKLITNDFDENDKPFLTGERSPEGFFYVKDGIEQAISRGLAYAPYADLIWCETATPNLEEAKKFADAIHEKFPGKMLAYNCSPSFNWKKHLSDEEIGSFQRKIGEMGYKFQFITLAGFHTQN

SEQ ID NO: 176243 - protein, 279 aa, Unknown
  Bacterial polypetide isolated from the Sargasso Sea
RGSIKIEYSMCKQQSQKLWRLLNTEPYVNTLGSLSGNQAVQHAKAGLKAIYLSGWQVAADANSAGEMYPDQSLYPYDSAPKLVESMNNSLIRADQIQHMEIADGDMNSSERTDYMLPIIADGEAGFGGPLNVFELTKKFIKAGAAGVHFEDQLASEKKCGHMGGKVLVPTGTMVRNLKAARLAADIADVPLIILARTDANAAKLITNDFDENDKPFLTGERSPEGFYYVKDGIDQAISRGLAYAPYADLIWCETATPNLEEAKKFADAIHAKFPGKMLA

SEQ ID NO: 176244 - protein, 210 aa, Unknown
  Bacterial polypetide isolated from the Sargasso Sea
MEAKNRTDYMLPIIADGEAGFGGPLNVFELTKKFIKAGAAGVHFEDQLASEKKCGHMGGKVLVPTGTMVKNLKAARLAADIADVPLIILARTDANAAKLITNDFDENDKPFLTGKRSPEGFFYVKDGIEQAISRGLAYAPYADLIWCETATPNLEEAKKFADAIHEKYPGKLLAYNCSPSFNWKKHLNDDEIASFKKKFAKWDTNFSFIH

SEQ ID NO: 176245 - protein, 281 aa, Unknown
  Bacterial polypetide isolated from the Sargasso Sea
RGYGAEDVVKLQGSVVHKHSLAENGAKKLWKLVNEEPFINALGALSGNQAMQQAKAGLKAVYLSGWQVAGDANNAGEMYPDQSLYPVSSVPDVVRRINNALTRCDQIQWMEGNNPADSDFIDYFLPIVADAEAGFGGVLNAFELMKAMINAGAAGVHFEDQLASVKKCGHMGGKVLVPTREAVAKLIAARLSADVLGVPTLIFARTDAEAADLLTSDVDDNDKPFCTGERTVEGFYRTKSGFDQAVSRGLAYAPYADLIWCETGKPDLEFAKNFAEAIHKE

SEQ ID NO: 176246 - protein, 292 aa, Unknown
  Bacterial polypetide isolated from the Sargasso Sea
SGNHAVQHAKAGLKAIYLSGWQVAADANSAGEMYPDQSLYPYDSAPKLVESMNNALIRADQIQHMEIKDGDMKKEKKVDYMLPIIADGEAGFGGPLNVFELAKKFIKAGAAGVHFEDQLASEKKCGHMGGKVLVPTGTMIKNLKAARLAADIADVPLIILARTDANAAKLITNDHDENDKPFLTGERSPEGFYYVKSGIDQAISRGLAYAPYSDLIWCETATPNLEEAKKFADAIHEKFPGKLLAYNCSPSFNWKKHLSDEEIASFQQEISKMGYKFQFITLAGFHTQNIAI

SEQ ID NO: 176247 - protein, 299 aa, Unknown
  Bacterial polypetide isolated from the Sargasso Sea
KAGLKAIYLSGWQVAADANSAGEMYPDQSLYPYDSAPKLVEAMNNSLIRADQIQHMELLDGDMKKENSIDYMLPIIADGEAGFGGPLNVFELTKKFIKAGAAGVHFEDQLASEKKCGHMGGKVLVPTGTMVRNLKAARLAADIADVPLIILARTDANAAKLITNDFDENDKPFLTGERSPEGFYYVKDGIEQAISRGLAYAPYADLIWCETATPNLKEAKKFADAIHEKFPGKLLAYNCSPSFNWKKHLSDDEIASFQQEIGKMGYKFQFITLAGFHTQNIAIFELAEKYKLKGMSAYS

SEQ ID NO: 176248 - protein, 260 aa, Unknown
  Bacterial polypetide isolated from the Sargasso Sea
MEIKDGEMKSKDRVDYMLPIIADGEAGFGGPLNVFELAKKFIRAGAAGVHFEDQLASEKKCGHMGGKVLVPTGTMIKNLKAARLAADIADVPLIILARTDANAAKLITNDHDENDKPFLTGERSPEGFYYVKHGIEQAISRGLAYAPYSDLIWCETATPNLEEAKKFADAIHSKYPGKLLAYNCSPSFNWKKHLSDAEISTFQQKISEMGYKFQFITLAGFHAQNIAIFELAEKYKKEGMTAYSRIQDQEFAREKDGYTS

SEQ ID NO: 176249 - protein, 306 aa, Unknown
  Bacterial polypetide isolated from the Sargasso Sea
SLSGNHAVQHAKAGLKAIYLSGWQVAADANSAGEMYPDQSLYPYDSAPKLVESMNNALIRADQIQHMEIKDGDMKKEKKVDYMLPIIADGEAGFGGPLNVFELAKKFIKAGAAGVHFEDQLASEKKCGHMGGKVLVPTGTMIKNLKAARLAADIADVPLIILARTDANAAKLITNDHDDNDKPFLSGERSPEGFYYVKAGIDQAISRGLAYAPYSDLIWCETATPNLEEAKKFANAIHEKFPGKLLAYNCSPSFNWKKHLSDKEIASFQQEISKMGYKFQFITLAGFHTQNIAIFELAEKYKKEGM

SEQ ID NO: 176250 - protein, 288 aa, Unknown
  Bacterial polypetide isolated from the Sargasso Sea
SICKQQSTKLWKLLNTENYVNTLGSLSGNHAVQHAKAGLKAIYLSGWQVAADANSAGEMYPDQSLYPYDSAPKLVESMNNALIRADQIQHMELKDGDMKKEKRIDYMLPIIADGEAGFGGPLNVFELAKKFIKAGAAGVHFEDQLASEKKCGHMGGKVLVPTGTMIKNLKAARLAADIADVPLIILARTDANAAKLITNDYDENDKPFLTGERSPEGFYYVKAGIEQAISRGLAYAPYSDLIWCETATPNLEEAKKFADAIHEKFPGKLLAYNCSPSFNWKNIYQMTR

SEQ ID NO: 176251 - protein, 260 aa, Unknown
  Bacterial polypetide isolated from the Sargasso Sea
MKAMIKAGAAGVHFEDQLASVKKCGHMGGKVLVPTQEAINKLVAARLAADVLNVPTLLVARTDANAAELLTSDVDERDAEFVTGERTSEGFYRVKAGIQQAISRGLSYAPYSDLLWCETGKPNLEEAKLFAESIKKDHPELMLAYNCSPSFNWRKNLDDSTIAKFQKELGAMGYKFQFITLAGIHSMWHGMFDLTKNYVKSGMSAYVELQEKEFADHDKGYTFSAHQQEVGTGYFDAVNNCIVGDPSTSAMDGSTEEEQF

SEQ ID NO: 176252 - protein, 280 aa, Unknown
  Bacterial polypetide isolated from the Sargasso Sea
KRGYVNSLGALTGGQAMQQVKAGIEAIYLSGWQVAADANTSETMYPDQSLYAYDSVPAVVRRINNNFKRADEIQWAKDINPGDKEYVDYFAPIVADAEAGFGGVLNAYELMKNMITNGAAGVHFEDQLAAAKKCGHMGGKVLVPTQEAVQKLIAARLASDVMGVPTLLLARTDAEAANLITSDADDYDKPFLTGERTDEGFFRTKNGIDQAISRGLAYAPYADLIWCETGTPDLDFARTFAEAIRAEYPDQLLAYNCSPSFNWKKNLDDATIAKFQDELS

SEQ ID NO: 176253 - protein, 302 aa, Unknown
  Bacterial polypetide isolated from the Sargasso Sea
PEGRYDGIDRPYSVEEVERLRGSFPIEYTLATRGSNRLWDLLHSEDQVSSLGALSGNQAMQMVKAGLKAIYLSGWQVAADNNTAGSTYPDQSLYPANSGPELARKINRTLQRADQIEHSEGGAQREWFAPIVADAEAGFGGPLNCYEIMRAYIEAGASGVHYEDQLASEKKCGHMGGKVLIPTKQHVRNLNAARLAADVCGVPTLIVARTDAESAKLITSDADERDHEFIDASDRTPEGFYRLKDGTGVDNCIKRALAYAPYADLIWMETSVPSLEIAKQFSDAVKKEFPNQMLAYNFLQAL

SEQ ID NO: 176254 - protein, 278 aa, Unknown
  Bacterial polypetide isolated from the Sargasso Sea
MVEAMNNALLRADQIQHMEIKDGDQKKEKRIDYMLPIIADGEAGFGGPLNVFELTKKFIKAGAAGVHFEDQLASEKKCGHMGGKVLIPTSQAVKNLKAARLAADIADVPLIILARTDANAAKLITNDHDENDKPFLTGERSPEGFYYVKSGIDQAISRGLAYAPYSDLIWCETATPNLEEAKKFANAIHKKYPGKLLAYNCSPSFNWKKHLSDNEIATFQKKISEMGYKFQFITLAGFHTQNIAIFELAEKYKAEGMTAYSKIQEREFAREKDGYTSV

SEQ ID NO: 176255 - protein, 265 aa, Unknown
  Bacterial polypetide isolated from the Sargasso Sea
RALGAVTGAQAVNMVRAGLSSIYVSGWQVAADANQSAQTYPDQSLYPSNSVPQLVKRLQSALMRADLVEKSEKQLRDWYVPLVADAEAGFGGPLHAFELTRQMIEAGASGVHFEDQLASEKKCGHLGGKVLVPTSQFIKTLVAARLASDVCEVPVVLIARTDALGAKLMTSDIDDYDRSFMTGKRTSDGYWEMKGGLDQAIARGIAYAPYADALWFETSKPSIKEAKKFAEVIHANFPDKLLAYNCSPSINWKTNLQQEEIRSFK

SEQ ID NO: 176256 - protein, 280 aa, Unknown
  Bacterial polypetide isolated from the Sargasso Sea
LVESMNNALIRADQIQHMEIIDKDMKKESKVDYMLPIIADGEAGFGGPLNVFELTKKFIKAGAAGVHFEDQLASEKKCGHMGGKVLVPTGTMIKNLKAARLAADIADVPLIILARTDANAAKLITNDHDENDKQFLTGERSPEGFYYVKAGIEQAISRGLAYAPYSDLIWCETATPNLEEAKKFADAIHEKFPGKLLAYNCSPSFNWKKHLSDNQIASFQKEISKMGYKFQFITLAGFHTQNIAIFELADKYKKEGMTAYSRIQQQEFAREKDGYTSVKH

SEQ ID NO: 176257 - protein, 278 aa, Unknown
  Bacterial polypetide isolated from the Sargasso Sea
QQSMKLWRLLHTENYVNTLGSLSGNHAVQHAKAGLKAIYLSGWQVAADANSAGEMYPDQSLYPYDSAPKLVESMNNALIRADQIQHMELLDGDMNKEKRIDYMLPIIADGEAGFGGPLNVFELAKKFIKAGAAGVHFEDQLASEKKCGHMGGKVLVPTGTMIKNLKAARLAADIADVPLIILARTDANAAKLITNDHDENDKPFMTGERSPEGFYYVKAGIDQAISRGLAYAPYSDLIWCETATPNLKEAKKFADAIHEKFPGKLLANNCSPSFNWKK

SEQ ID NO: 176258 - protein, 235 aa, Unknown
  Bacterial polypetide isolated from the Sargasso Sea
MGGKVLVPTGTAIKNLKAARLAADIADVPLIILARTDANAAKLITNDHDENDKPFLTGERSPEGFFYVRSGIEQAISRGLAYAPYADLIWCETATPNLEEAKKFAEAIHKKFPGKLLAYNCSPSFNWKKHLSDQEISTFQTKIAEMGYKFQFITLAGFHTQNIAIFELAEKYKSEGMSAYSKIQEKEFAKEKDGYTSVKHQREVGTSYFDAVSNTISSGKSSTTAMKDSTESEQF

SEQ ID NO: 176259 - protein, 301 aa, Unknown
  Bacterial polypetide isolated from the Sargasso Sea
NYINTLGSLSGNHAVQHAKAGLKAIYLSGWQVAADANSAREMYPDQSLYPFDSAPKLVEAMNNALIRADQIQHMEIKDGDMKSKDKVDYMLPIIADGEAGFGGPLNVFELAKKFIKAGAAGVHFEDQLASEKKCGHMGGKVLVPTSTMIKNLKAARLASDIADVPLIILARTDANAAKLITNDHDENDKPFLTGKRSPEGFYYVKHGIDQAISRGLAYAPYSDLIWCETATPNLEEAKKFADAIHAKYPGKLLAYNCSPSFNWKKHLSDSEISTFQQKISEMGYKFQFITLAGFHTQNIAV

SEQ ID NO: 176260 - protein, 320 aa, Unknown
  Bacterial polypetide isolated from the Sargasso Sea
EDYVNTFGAYNGQQAVQHVKAGLKAIYVSGWQVAAAANSNNEVYPDQSLYSVDSVPNAVKNINNAFRRQDQIQVQEGREGFYYAPIVADAEAGFGGALNAYELARNLIEAGAAAVHYEDQLSSEKKCGHLGGKVLIPTSQAIRNLNAARLASDVAETETLIIARTDAEAARLLMTDVDEIDRKFMTGERTSEGFYRISGGLEMGCERGQAFAEYADLVWCETSKPCLKDAKQFADAVRGAHPGQMLAYNCSPSFNWKQHIPSDTEIAEFQKELGKLGFKFQFITLAGFHTTNFAVFDFAKEYKEKGMLAFSNLQQKELTI

SEQ ID NO: 176261 - protein, 259 aa, Unknown
  Bacterial polypetide isolated from the Sargasso Sea
TFAKLGAEKLWNLVTQGAKPSFRPDKDFVNCMGALTGGQAVQQVKAGIQAIYLSGWQVAADNNSAESMYPDQSLYPVDSVPTVVKRINNSFRRADQIQWKAGKNPGDEGYIDYFAPIVADAEAGFGGVLNAYELMKSMIEAGAAGVHFEDQLASVKKCGHMGGKVLVPTQEAVQKLTAARLAADVAGTPTIILARTDANAADLLTSDCDPYDQPFVTGERTQEGFYKVRAGLDQAIARGLAYAPYADLIWCETAKPDLD

SEQ ID NO: 176262 - protein, 283 aa, Unknown
  Bacterial polypetide isolated from the Sargasso Sea
QAKAGIEAIYLSGWQVAADANLASSMYPDQSLYPANSVPAVVDRINNTFRRADQIQWSAGIEPNDPRYTDYFLPIVADAEAGFGGVLNAFELMKSMIEAGAAAVHFEDQLASVKKCGHMGGKVLVPTQEAIQKLVAARLAADVMGVPTLVIARTDADAADLITSDCDPYDSEFITGERTSEGFYRTCAGIEQAISRGLAYAPYADLVWCETSTPDLALAKRFADAIHAKFPGKLLAYNCSPSFNWQKNLDDKTIASFQQQLSEMGYKYQFITLAGIHSHVVQP

SEQ ID NO: 176263 - protein, 280 aa, Unknown
  Bacterial polypetide isolated from the Sargasso Sea
KSNVSYDIKRFSGIKRDYKEEEVERLRGSIKIHYSMCEHQSKKLWNLLNTEPYVNTLGSLSGNHSVQHAKAGLKAIYVSGWQVAADANTAGEMYPDQSLYPFDSAPKLVDSINNALVRADQIQHMEIKDGDMKIEDKVDYMLPIIADGEAGFGGPLNVFELTKKFIKAGAAGVHFEDQLASEKKCGHMGGKVLIPTSTAVRNLKAARLAADIADVPLIILARTDANAAKLITNDFDENDKPFLTGKRSPEGFYYVKEGIEQAISRGLAYAPYADLIWCET

SEQ ID NO: 176264 - protein, 282 aa, Unknown
  Bacterial polypetide isolated from the Sargasso Sea
MLPIIADGEAGFGGPLNVFELTKKFIKAGAAGVHFEDQLASEKKCGHMGGKVLVPTGQAVRNLKSARLAADIANVPLIILARTDANAAKLITNDNDENDKPFLTGERSPEGFYYVKPGIEQAISRGLAYAEYADLIWCETATPNLEEAKKFADAIRAKFPGKLLAYNCSPSFNWKKHLSDSEIATFQQKISDMGYKFQFITLAGFHAQNIAIFELAEKYKSEGMSAYSKIQDKEFAREKDGYTSVKHQREVGTSYFDSVSNTISGGKSSTTAMKDSTESEQF

SEQ ID NO: 176265 - protein, 322 aa, Unknown
  Bacterial polypetide isolated from the Sargasso Sea
MYPDQSLYPVDSVPAVVKRINNSLRRADQLNIAEGNEPIDYMLPIVADAEAGFGGVLNAHELMKAMIEAGAAGVHFEDQLASAKKCGHMGGKVLVPTQEAVQKLAAARLAADIYNTPTVLLARTDAEAANLLTSDIDERDREFTTGERTPEGFYRVDNGIDQAISRGLAYAPYADLVWCETGVPDLDFARKFAEALKKEHPEQLLAYNCSPSFNWKKNLDDGQIAKFQKELGSMGYKFQFITLAGFHALNYSMFELSKGYNAEQMTAYVKLQEAEFAAEKDGYTATKHQREVGTGYFDSVTQVITGGSSSVTALTGSTEEEQ

SEQ ID NO: 176266 - protein, 235 aa, Unknown
  Bacterial polypetide isolated from the Sargasso Sea
MSKIRSANDIQADWDSNPRWKNVKRDYTAEEVAKLSGSVQIEYSLARQGSEKLWNEINNSDFVNALGALTGNQAMQQAKAGLRAVYLSGWQVAGDANTGMQMYPDQSLYPVDSVPAVVKRINNSLRRADQLNIAEGNEPVDYMLPIVADAEAGFGGVLNAHELMKAMIEAGAAGVHFEDQLASAKKCGHMGGKVLVPTQEAVQKLAAARLAADIYNTPTVLLARTDAEAANLLTS

SEQ ID NO: 176267 - protein, 293 aa, Unknown
  Bacterial polypetide isolated from the Sargasso Sea
MSAEENISYDLKRFAGIKRDYTPEEVERLRGSIKIEYSMCKLQSQKLWRLLNSEPYVNTLGSLSGNHAVQHAKAGLKAIYLSGWQVAADANSAGEMYPDQSLYPYDSAPKLVEAMNNSLTRADQIQHMEMIDGDMDKSKRVDYMLPIIADGEAGFGGPLNVFELTKKFIRAGAAGVHFEDQLASEKKCGHMGGKVLVPTSTMVRNLKAARLAADIADVPLIILARTDANAAKLITNDFDENDKPFLKGERSPEGFFYVKDGIDQAISRGLAYAPYADLIWCETSNTKLEEAKK

SEQ ID NO: 176268 - protein, 215 aa, Unknown
  Bacterial polypetide isolated from the Sargasso Sea
LNVFELTKKFIKAGAAGVHFEDQLASEKKCGHMGGKVLVPTQTMIKNLKSARLAADVMGVPLIILARTDANAAKLITSDIDENDKPFLTGKRSPEGFYYVKDGLNQAISRGLAYAPYSDLIWCETAKPNLEEAKNFADAIHDKFPGKLLAYNCSPSFNWKKNLSDKEIEIFQKEIANMGYKFQFITLAGFHAQNYAIFDLAKKYKQYGMSAYSRL

SEQ ID NO: 176269 - protein, 250 aa, Unknown
  Bacterial polypetide isolated from the Sargasso Sea
MKSAADIQKEWESNPRWKNVKRDYTAEEVAKLSGSVNIEYSLAKQGAEKLWNEINNSDFVNALGALTGNQAMQQAKAGLRAVYLSGWQVAGDANTGMQMYPDQSLYPVDSVPSVVKRINNSLRRADQLNIAEGNDPVDFMLPIVADAEAGFGGVLNAHELMKAMIEAGAAGVHFEDQLASAKKCGHMGGKVLVPTQEAVQKLAAARLAADIYGTPTVLLARTDAEAANLLTSDVDERDREFTTGERTAEG

SEQ ID NO: 176270 - protein, 177 aa, Unknown
  Bacterial polypetide isolated from the Sargasso Sea
KRSPEGFFYVKHGIDQAISRGLAYAPYADLIWCETATPNLEEAKKFADAIHKKYPGKLLAYNCSPSFNWKKHLSDDQIASFQQKIGEMGYKFQFITLAGFHVQNIAVFELAEKYKKEGMSAYSKIQQQEFAREKDGYTSVKHQREVGTSYFDAVSNTISSGKSSTTAMEGSTESEQF

SEQ ID NO: 176271 - protein, 242 aa, Unknown
  Bacterial polypetide isolated from the Sargasso Sea
MLPIIADGEAGFGGPLNVFELAKKFIRAGAAGVHFEDQLASEKKCGHMGGKVLVPTGTMIKNLKAARLAADIADVPLIILARTDANAAKLITNDHDENDKPFLTGERSPEGFYYVKHGIEQAISRGLAYAPYSDLIWCETATPNLEEAKKFADAIHSKYPGKLLAYNCSPSFNWKKHLSDAEISTFQQKISEMGYKFQFITLAGFHTQNIAIFELAEKYKKEGMTAYSRIQQQEFAREKDGY

SEQ ID NO: 176272 - protein, 270 aa, Unknown
  Bacterial polypetide isolated from the Sargasso Sea
MPQSLNEQLSREQQIAALEKDWATNPRWKGVKRGYSAADVVRLRGSLPIEHTLAKRGAEKLWDKINGGAKKGYVNAFGAISAGQAMQQAKAGLEAVYLSGWQVAADGNTSETMYPDQSLYAYDSVPTMVRRINNTFKRADEIQWGRGINPGDKEFIDYFLPIVADAEAGFGGVLNAFELMKNMIAAGAAGVHFEDQLAAVKKCGHMGGKVLVPTQEACEKLIAARFAADVMGVSTIVLARTDAEAANLITSDHDANDKPFLTGERTQEGF

SEQ ID NO: 176273 - protein, 296 aa, Unknown
  Bacterial polypetide isolated from the Sargasso Sea
ALYQENHAVQHAKAGLKAIYLSGWQVAADANSAGEMYPDQSLYPYDSAPKLVDSMNNALIRADQIQHMEIQDGDMKKENKVDYMLPIIADGEAGFGGPLNVFELAKKFIKAGAAGVHFEDQLASEKKCGHMGGKVLVPTGTMIKNLKAARLAADIADVPLIILARTDANAAKLITNDHDENDKPFLTGERSPEGFYYVKSGIEQAISRGLAYAPYSDLIWCETATPNLEEAKKFADAIHKKFPGKLLAYNCSPSFNWKKHLSDSEIASFQVEISKMGYKFQFITLAGFHTQNIAIL

SEQ ID NO: 176274 - protein, 182 aa, Unknown
  Bacterial polypetide isolated from the Sargasso Sea
PFLTGERSPEGFYYVKNGIEQAISRGLAYAPYADLIWCETATPNIEEAKKFADAIHEKFPGKLLAYNCSPSFNWKKHLSDKEISTFQQKISEMGYKFQFITLAGFHTQNIAVFELAENYKKEGMSAYSKIQEQEFKKEKDGYTSVKHQREVGTSYFDAVSNTISSGKSSTTAMDGSTESEQF

SEQ ID NO: 176275 - protein, 260 aa, Unknown
  Bacterial polypetide isolated from the Sargasso Sea
LSGGQVAADANSAGEMYPDQSLYPYDSAPKLVETMNNSLIRADQIQHMEMIDGDMDKSKRTDYMLPIIADGEAGFGGPLNVFELTKKFIRAGAAGVHFEDQLASEKKCGHMGGKVLVPTGTMVRNLKAARLAADIADVPLIILARTDANAAKLITNDFDENDKPFLTGERSPEGFFYVKDGIEQAISRGLAYAPYADLIWCETATPNLEEAKKFADAIHEKYPGKMLAYNCSPSFNWKKHLSDEEIGSFQRKIGEMGYKF

SEQ ID NO: 176276 - protein, 265 aa, Unknown
  Bacterial polypetide isolated from the Sargasso Sea
MKEEKKIDYMLPIIADGEAGFGGPLNVFELTKKFIKAGAAGVHFEDQLASEKKCGHMGGKVLVPTGTMIKNLKAARLAADIANVPLIILARTDANAAKLITNDYDENDKSFLTGERSPEGFYYVKAGIDQAISRGLAYAPYSDLIWCETATPNLEEAKKFADAINEKFPGKLLAYNCSPSFNWKKHLSDDEIASFQKEISKMGYKFQFITLAGFHTQNIAIFELAEKYKKEGMTAYSKIQEQEFAREKDGYTSVKHQREVGTSYL

SEQ ID NO: 176277 - protein, 281 aa, Unknown
  Bacterial polypetide isolated from the Sargasso Sea
NGDPKTDFFAPIIADAEAGFGGNLNAFELMKRMITAGAAGVHFEDQLASVKKCGHLGGKVLVPTQEAIQKLISARLASDVSNTPTILIARTDADAADLVTSDVDENDKPFLTGERTSEGFYRSKAGLDQAIARGLAYAPYSDLVWCETSKPDLEQAKTFAEAIKKDHPEIMLAYNCSPSFNWKKNLDDATIAKFQKELGAMGYKFQFITLAGIHSMWHGMFNLSKEYVADGMTAYVKLQEKEFEDAEKGYTFVSHQQEVGTGYFDAVNNCIQGEESSTSAL

SEQ ID NO: 176278 - protein, 287 aa, Unknown
  Bacterial polypetide isolated from the Sargasso Sea
LWKLVNEKDYINCLGAVTGGQAVQQVKGGIKAIYLSGWQVAADGNTSETMYPDQSLYAVDSVPTMVTRINNAFKRADEIQSSRGSGNVDFFAPIVADAEAGFGGVLNAFELMKNMIEAGASGVHFEDQLASVKKCGHMGGKVLVPSQEAVQKLTAARLAADTMGVPTIVLARTDANAAALLTSDVDPYDKDFITGERSSEGFYITKAGIDQAISRGLAYAPYADLLWCETAVPDMDEAKKFAEAIKKEYPDQLLAYNCSPSFNWKKNLSDSDIAKFQKELGAMGYKY

SEQ ID NO: 176279 - protein, 281 aa, Unknown
  Bacterial polypetide isolated from the Sargasso Sea
IRADQIQHMEIQDGDMDSKNKVDYMLPIIADGEAGFGGHLNVFELAKKFIKAGAAGVHFEDQLASEKKCGHMGGKVLVPTGTMIKNLKAARLAADIADVPLIILARTDANAAKLITNDHDPNDKNFLTGERSPEGFFYVKSGIEQAISRGLAYAPYSDLIWCETATPNIEEAKKFAEAIHAKFPGKFLAYNCSPSFNWKKHLSDQEIASFQVKIAEMGYKFQFITLAGFHTQNIAVFELAEKYKSQGMTAYSKIQEQEFAREKDGYTSIKHQREVGTSYFD

SEQ ID NO: 176280 - protein, 304 aa, Unknown
  Bacterial polypetide isolated from the Sargasso Sea
GSLSGNQAVQHAKAGLKAIYLSGWQVAADANSAGEMYPDQSLYPYDSAPKLVEAMNNALIRADQIQHMEISDDELKLENKTDYMLPIVMDGEGGFGGPLNVFELTKKAIKAGAAAIHLEDQLSSEKKCGHMGGKVLIPTSTMIKNLQSARLAADIADVPLIILARTDANAAKLISNDHDENDKPFLTGERSSEGFFYVKPGIDQAISRGLAYAPYADLIWCETATPNLEEAKKFADAIHNQYPGKLLAYNCSPSFNWKKHLSDKEIAEFQVRISEMGYKFQFITLAGFHTQNIAIFELAENIRL

SEQ ID NO: 176281 - protein, 286 aa, Unknown
  Bacterial polypetide isolated from the Sargasso Sea
YPFDSAPKLVEALNNALIRADQIQHMEIKDGDMDSKNKVDYMLPIIADGEAGFGGPLNVFELAKKFIKAGAAGVHFEDQLASEKKCGHMGGKVLVPTSTMIKNLKAARLAADIADVPLIILARTDANAAKLITNDHDPNDKNFLTGERSPEGFFYVKSGIEQAISRGLAYAPYSDLIWCETATPNIEEAKKFAEAIHAKFPGKFLAYNCSPSFNWKKHLSDQEIASFQVKIAEMGYKFQFITLAGFHTQNIAVFELAEKYKSQGMTAYSKIQEQEFCREKDGYTSI

SEQ ID NO: 176282 - protein, 326 aa, Unknown
  Bacterial polypetide isolated from the Sargasso Sea
YPDQSLYPYDSAPKLVETMNNSLIRADQIQHMELIDGDMEKNKSVDYMLPIIADGEAGFGGPLNVFELAKKFIKAGAAGVHFEDQLASEKKCGHMGGKVLVPTGTMVRNLKAARLAADIANVPLIILARTDANAAKLITNDFDENDKPFLTGERSPEGFFYVKDGIEQAISRGLAYAPYADLIWCETATPNIEEAKKFADAIHEKYPGKLLAYNCSPSFNWKKHLSDNEIATFQKKIGEMGYKFQFITLAGFHTQNIAIFELAEKYKTEGMTAYSKIQQHEFSREKDGYTSVKHQREVGTSYFDAVSKYISSRKKFYYCNGRVNRV

SEQ ID NO: 176283 - protein, 302 aa, Unknown
  Bacterial polypetide isolated from the Sargasso Sea
NSAGEMYPDQSLYPYDSAPKLVETMNNSLIRADQIQHMEIIDGDMEKSKSVDYMLPIIADGEAGFGGPLNVFELAKKFIKAGAAGVHFEDQLASEKKCGHMGGKVLVPTGTMIRNLKAARLAADIADVPLIILARTDANAAKLITNDFDENDKPFLTGERSPEGFFYVKDGIEQAISRGLAYAPYADLIWCETATPNLEEAKKFADAIHEKFPGKLLAYNCSPSFNWKKHLSDDEIASFQKKIGEMGYKFQFITLAGFHTQNIAIFELAEKYKTEGMTAYSKIQQHEFSREKNGYTSVKHQR

SEQ ID NO: 176284 - protein, 304 aa, Unknown
  Bacterial polypetide isolated from the Sargasso Sea
TLGSLSGNQAVQHAKAGLKAIYLSGWQVAADANSAGEMYPDQSLYPYDSAPKLVEAMNNALIRADQIQHMETMEGKIKSEDQVDYKMPIIADGEAGFGGPLNVFELTKKFIKAGAAGVHFEDQLASEKKCGHMGGKVLVPTQTMIRNLKAARLAADVMEVPLIILARTDANAAKLITNDVDENDKPFLTGKRSPEGFYYVKDGLDQAISRGLAYAPYSDLIWCETAKPNLEEAKNFAKAIHEKFPGKILAYNCSPSFNWKKNLSDKEIEIFQKEIAKMGYKFQFITLAGFHAQNYAIFDLAKKN

SEQ ID NO: 176285 - protein, 286 aa, Unknown
  Bacterial polypetide isolated from the Sargasso Sea
GKINSDARVDYKMPIIADGEAGFGGPLNVFELTKKFIKAGAAGVHFEDQLASEKKCGHMGGKVLVPTQTMIRNLKSARLAADIMGVPLIILARTDANAAKLITNDVDENDKPFLTGKRSPEGFHYVKSGLDQAIARGLAYAPYSDLIWCETANPSLEEARNFANAIHDKFPGKLLAYNCSPSFNWKKNLTDKEIENFQKEIGNIGYKFQFITLAGFHAQNYAIFDLAKKYKQYGMSAYSRLQQQEFDSEKEGYTATKHQREVGTSYFDAVSNAISSGKSSTTAMKR

SEQ ID NO: 176286 - protein, 303 aa, Unknown
  Bacterial polypetide isolated from the Sargasso Sea
IKRDYTEQEVERLRGSIKVHHTISEIQSKKLWTLLNTEPYINTLGSLSGNHSVQHAKAGLKAIYVSGWQIAADANTAGEMYPDQSLYPFDSAPKLVDSINNALIRADQIQHMELKDGDIKSKDQVDYMLPIIADGEAGFGGPLNVFELTKKFIKAGAAGVHFEDQLASEKKCGHMGGKVLVPTSTMIRNLKAARLAADIADVPLIILARTDANAAKLITNDFDENDKPFLTGKRSPEGFFYVKDGIEQAISRGLAYAPYADLIWCETATPNLEEAKKFADSIHKKFPGKLLAYNCSPSFNLEE

SEQ ID NO: 176287 - protein, 251 aa, Unknown
  Bacterial polypetide isolated from the Sargasso Sea
GVHFEDQLASEKKCGHMGGKVLVPTSTMVRNLKSARLAADIANVPLIILARTDANAAKLITNDFDENDKSFLTGERSPEGFFYVKDGIQQAISRGLAYAPYADLIWCETATPNLEEAKKFADAIHNKFPGKMLAYNCSPSFNWKKHLSDEEIGTFQKKIGEMGYKFQFITLAGFHTQNIAIFELAEKYKKEGMAAYSKIQENEFAREKDGYTSVKHQREVGTSYFDAVSNTISSGKSSTNAMEGSTESEQF

SEQ ID NO: 176288 - protein, 175 aa, Unknown
  Bacterial polypetide isolated from the Sargasso Sea
SPEGFYYVKAGIEQAISRGLAYAPYADLIWCETATPNLDEAKKFADAIHEKFPGKLLAYNCSPSFNWKKHLSDDDIAEFQKKIGEMGYKFQFITLAGFHTQNIAIFELAEKYKKDGMAAYSKIQQQEFDREKDGYTSVKHQREVGTSYFDAVSNTISGGKSSTTAMEGSTESEQF

SEQ ID NO: 176289 - protein, 269 aa, Unknown
  Bacterial polypetide isolated from the Sargasso Sea
ANSAGEMYPDQSLYPYDSAPKLVEAMNNSLIRADQIQHMELLDGDMKKENSIDYMLPIIADGEAGFGGPLNVFELTKKFIKAGAAGVHFEDQLASEKKCGHMGGKVLVPTGTMVRNLKAARLAADIADVPLIILARTDANAAKLITNDFDENDKPFLTGERSPEGFYYVKDGIEQAISRGLAYAPYADLIWCETATPNLKEAKKFADAIHEKFPGKLLAYNCSPSFNWKKHLSDDEIASFQQEIGKMGYKFQFITLAGFHTQNIAIFEL

SEQ ID NO: 176290 - protein, 224 aa, Unknown
  Bacterial polypetide isolated from the Sargasso Sea
MVRNLKAARLASDIADVPLIILARTDANAAKLITNDFDENDKPFLTGERSPEGFFYVKDGIEQAISRGLAYAPYADLIWCETAAPNLEEAKKFADAIHKKYPGKLLAYNCSPSFNWKKHLSDEEISQFQKKIGEMGYKFQFITLAGFHTQNIAIFELAEKYKKEGMTAYSKIQQNEFAREKDGYTSVKHQREVGTSYFDAVSNTISSGKSSTTAMEGSTEEEQF

SEQ ID NO: 176291 - protein, 230 aa, Unknown
  Bacterial polypetide isolated from the Sargasso Sea
KAGAAGVHFEDQLASEKKCGHMGGKVLVPTSTAVRNLKAARLAADIADVPLIILARTDANAAKLITNDHDENDKPFLTGERSPEGFYYVKHGIDQAISRGLAYAPYADLIWCETATPNLEEAKKFADAIHSKFPGKILAYNCSPSFNWKKHLSDSEIATFQQKISEMGYKFQFITLAGFHTQNIAIFELAEKYKKEGMSAYSKIQEQEFEREKDGYTSVKHKREVGTSSF

SEQ ID NO: 176292 - protein, 334 aa, Unknown
  Bacterial polypetide isolated from the Sargasso Sea
WLQVAADANSAGEMYPDQSLYPYDSAPKLVETMNNSLVRADQIQHMEMIDGDMDKSKRTDYMLPIIADGEAGFGGPLNVFELTKKFIRAGAAGVHFEDQLASEKKCGHMGGKVLVPTGTMVRNLKAARLAADIADVPLIILARTDANAAKLITNDFDENDKPFLTGERSPEGFFYVRDGIEQAISRGLAYAPYADLIWCETATPNLEEAKKFAEAIHEKFPGKMLAYNCSPSFNWKKHLSDEEIGSFQRKIGEMGYKFQFITLAGFHTQNIAIFELAEKYKSEGMTAYSKIQQHEFAREKDGYTSVKHQREVGTSYFDAVSNTISSGKSSTTAM

SEQ ID NO: 176293 - protein, 293 aa, Unknown
  Bacterial polypetide isolated from the Sargasso Sea
QKLGLKSIYLSGWQVAADANSAGEMYPDQSLYPYDSAPKLVESMNNALLRADQIQHMELKDGDMKKEKRIDYMLPIIADGEAGFGGPLNVFELTKKFIKAGAAGVHFEDQLASEKKCGHMGGKVLVPTGTMIKNLKAARLAADIADVPLIILARTDANAAKLITNDFDENDKPFLTGERSPEGFYYVKSGIEQAISRGLAYAPYSDLIWCETATPNLEEAKKFADAIHEKFPGKLLAYNCSPSFNWKKHLSDEEIASFQKEISKIGYKFQFITLAGFHTQNIAIFELAEKYKK

SEQ ID NO: 176294 - protein, 288 aa, Unknown
  Bacterial polypetide isolated from the Sargasso Sea
LSGWQVAADANSAGEMYPDQSLYPYDSAPKLVESMNNALLRADQIQHMELLDGDMKKEKRVDYMLPIIADGEAGFGGPLNVFELAKKFIKAGAAGVHFEDQLASEKKCGHMGGKVLVPTGTMIKNLKAARLAADIADVPLIILARTDANAAKLITNDHDENDKPFLTGERSPEGFYYVKAGIEQAISRGLAYAPYSDLIWCETATPNLTEAKKFADAIHEKFPGKLLAYNCSPSFNWKKHLSDEEIASFQQEISKMGYKFQFITLAGFHTQNIAIFELAEKYKKEGMS

SEQ ID NO: 176295 - protein, 301 aa, Unknown
  Bacterial polypetide isolated from the Sargasso Sea
MQKLGLKAIYLSGWQVAADANSAGEMYPDQSLYPYDSAPKLVETMNNSLVRADQIQHMEMIDGDMDKSKRTDYMLPIIADGEAGFGGPLNVFELTKKFIRAGAAGVHFEDQLASEKKCGHMGGKVLVPTGTMIRNLKAARLAADIADVPLIILARTDANAAKLITNDFDENDKPFLTGERSPEGFFYVKDGIEQAISRGLAYAPYADLIWCETATPNLEEAKKFADAIHEKFPGKMLAYNCSPSFNWKKHLSDEEIGSFQRKIGEMGYKFQFITLAGFHTQNIAIFELAEKYKSEGMTAYS

SEQ ID NO: 176296 - protein, 301 aa, Unknown
  Bacterial polypetide isolated from the Sargasso Sea
MQKLGLKAIYLSGWQVAADANSAGEMYPDQSLYPYDSAPKLVETMNNSLIRADQIQHMEMIDGDMDKSKRTDYMLPIIADGEAGFGGPLNVFELTKKFIKAGAAGVHFEDQLASEKKCGHMGGKVLVPTGTMVRNLKAARLAADIADVPLIILARTDANAAKLITNDFDENDKPFLTGERSPEGFFYVKDGIEQAISRGLAYAPYADLIWCETATPNLEEAKKFADAIHEKFPGKMLAYNCSPSFNWKKHLSDEEIGSFQRKIGEMGYKFQFITLAGFHTQNIAIFELAEKYKSEGMTAYS

SEQ ID NO: 176297 - protein, 247 aa, Unknown
  Bacterial polypetide isolated from the Sargasso Sea
EDQLASEKKCGHMGGKVLVPTSTMVRNLKAARLASDIADVPLIILARTDANAAKLITNDFDENDKPFLTGERSPEGFFYVKDGIEQAISRGLAYAPYADLIWCETATPNLEEAKKFADAIHKKFPGKLLAYNCSPSFNWKKHLSDDDIAQFQKKIGEMGYKFQFITLAGFHTQNIAIFELAEKYKQEGMTAYSKIQENEFAREKDGYTSVKHQREVGTSYFDAVSNTISSGKSSTTAMEGSTESEQF

SEQ ID NO: 176298 - protein, 233 aa, Unknown
  Bacterial polypetide isolated from the Sargasso Sea
MVKQDVGGPLNVFELTKKFIRAGAAGVHFEDQLASEKKCGHMGGKVLVPTGTMVRNLKAARLAADIADVPLIILARTDANAAKLITNDFDENDKPFLTGERSPEGFFYVKDGIEQAISRGLAYAPYADLIWCETATPNLEEAKKFADAIHEKFPGKMLAYNCSPSFNWKKHLSDEEIGSFQRKIGEMGYKFQFITLAGFHTQNIAIFELAEKYKSEGMTAYSKIQQHEFAREK

SEQ ID NO: 176299 - protein, 440 aa, Unknown
  Bacterial polypetide isolated from the Sargasso Sea
MTKATQTSRQAQIDAIKKDWAENPRWKNVRRPYTAEEVVALRGSIVPENTIAKRGAAKLWDLVNGAAKKGYVNSLGALTGGQAVQQAKAGIEAIYLSGWQVAADANLAGTMYPDQSLYPANSVPAVVSRINNSFRRADQIQWSNGVNPEDENFVDYFLPIIADAEAGFGGVLNAFELMKSMIDAGAAGVHFEDQLASVKKCGHMGGKVLVPTQEAVQKLVAARLAADVSGVETLVIARTDANAADLLTSDCDPYDRDFVTGERTSEGFYRVKAGLDQAISRGLAYAPYADLIWCETAKPDLEEARRFAEAIHAQYPDQLLAYNCSPSFNWKKNLDDATIARFQQALSDMGYKYQFITLAGIHNMWYNMFDLAYDYARGEGMKHYVEKVQEVEFAAAKKGYTFVAHQQEVGTGYFDQVTTVIQGGHSSVTALTGSTEEEQF

SEQ ID NO: 176300 - protein, 425 aa, Unknown
  Bacterial polypetide isolated from the Sargasso Sea
MSSEQKISYDLKRFAGIKRDYTQEEVERLKGSLKIEYSISKQQSEKLWNLLNTESYVNTLGSLSGNQAVQHAKAGLKAIYLSGWQVAADANSAGEMYPDQSLYPYDSAPKLVEAMNNSLIRADQIQHMELSDGDMKKENKIDYMLPIIADGEAGFGGPLNVFELTKKFIRAGAAGVHFEDQLASEKKCGHMGGKVLVPTGTMIKNLKSARLASDIADVPLIILARTDANAAKLITNDFDENDKPFLTGERSPEGFFYVKDGIDQAISRGLAYAPYADLIWCETATPNLEEAKKFADAIHAKFPGKLLAYNCSPSFNWKKHLSDEEIASFQIKIGEMGYKFQFITLAGFHTQNIAIFELAEKYKKEGMAAYSKIQQNEFAREKDGYTSVKHQREVGTSYFDAVSNTISSGKSSTTAMEGSTESEQF

SEQ ID NO: 176301 - protein, 415 aa, Unknown
  Bacterial polypetide isolated from the Sargasso Sea
MSAENISYDLKRFAGIKRDYTPEEVERLRGSIKIEYSMCKMQSQKLWKLLNSEPYVNTLGSLSGNHAVQHAKAGLKAIYLSGWQVAADANSAGEMYPDQSLYPYDSAPKLVETMNNSLIRADQIQHMEIIDGDMDKSKKVDYMLPIIADGEAGFGGPLNVFELTKKFIRAGAAGVHFEDQLASEKKCGHMGGKVLVPTSTMVRNLKSARLAADIANVPLIILARTDANAAKLITNDFDENDKSFLTGERSPEGFFYVKDGIEQAISRGLAYAPYADLIWCETATPNLQEAKKFADAIHAKFPGKMLAYNCSPSFNWKKHLSDNEIGSFQRKIGEMGYKFQFITLAGFHTQNIAIFELAEKYKKEGMAAYSKIQENEFAREKDGYTSVKHQREVGTSYFDAVSNTISSGKSSTTAM

SEQ ID NO: 176302 - protein, 435 aa, Unknown
  Bacterial polypetide isolated from the Sargasso Sea
MSRQQQAQELQQQWESDPRWKGVERSYSAEDVVRLRGSIPIEHTLAKRGAEKLWSLVNNEPFVNALGALTGNQAMQQVKAGLKAIYLSGWQVAGDANVAGEMYPDQSLYPANSVPLVVKRINNTLTRADQIQWSEGKNPGDEGYIDFFAPIVADAEAGFGGVLNAFELMKAMIEAGASGVHFEDQLASVKKCGHMGGKVLVPTREAVAKLSAARLAADVMGTSTVLVARTDAEAADLITSDVDDNDKPFLTGERTVEGFFRTKPGIEQAISRGLAYAPYADLVWCETGKPDLEYAKKFAEAIHKQFPGKLLSYNCSPSFNWKKNLDDATIAKFQKELGAMGYKFQFITLAGFHALNYSMFNLAHGYARTQMSAFVELQQAEFAAADKGFTAVKHQREVGTGYFDAVTQTVEREASTTALHGSTEDEQFFDGKKVA

SEQ ID NO: 176303 - protein, 246 aa, Unknown
  Bacterial polypetide isolated from the Sargasso Sea
DQLASEKKCGHMGGKVLVPTGTMVRNLKAARLAADIADVPLIILARTDANAAKLITNDFDENDKEFLTGERSPEGFFYVKDGIEQAISRGLAYAPYADLIWCETATPNLEEAKKFADAIHEKFPGKMLAYNCSPSFNWKKHLSDEEIGSFQRKIGEMGYKFQFITLAGFHTQNIAIFELAEKYKSEGMTAYSKIQQHEFAREKDGYTSVKHQREVGTSYFDAVSNTISSGKSSTTAMEGSTESEQF

SEQ ID NO: 176304 - protein, 399 aa, Unknown
  Bacterial polypetide isolated from the Sargasso Sea
MNKLRSANDIQKDWDTNPRWKNVKRDYTAEEVAKCSGSVRIEHTLARNGAEKLWNLINTEDFVNALGALTGNQAMQQAKAGLKAIYLSGWQVAGDANTGMQMYPDQSLYPVDSVPSVVKRINNSLRRADQLNIAEGNDVIDYMLPIVADAEAGFGGVLNAFELMKAMIEAGAAGVHFEDQLASAKKCGHMGGKVLVPTQEAVQKLAAARLASDVSEVPTVLLARTDAEAANLITSDIDPRDQEFCTGERTAEGFYRVKNGIDQAISRGLAYAPYADLVWCETGVPDLEFAKQFAEALKKEHPEQLLAYNCSPSFNWKKKLDDSQIAKFQKELGAMGYKFQFITLAGFHALNHSMFELAKGYNESQMTAYVKLQEAEFASEKNGYTATKHQREVGTGYFD

SEQ ID NO: 176305 - protein, 316 aa, Unknown
  Bacterial polypetide isolated from the Sargasso Sea
KLVESMNNALIRADQIQHMELKDGDMKKDKRIDYMLPIIADGEAGFGGPLNVFELAKKFIKAGAAGVHFEDQLASEKKCGHMGGKVLVPTGTMIKNLKAARLAADIADVPLIILARTDANAAKLITNDYDENDKPFLTGERSLEGFYYVKAGIEQAISRGLAYAPYSDLIWCETATPNLEEAKKFADAIHEKFPGKLLAYNCSPSFNWKKHLSDDEIASFQQKISQMGYKFQFITLAGFHTQNIAIFELAEKYKKEGMTAYSRIQQQEFAREKDGYTSVKHQREVGTSYFDAVSNTISSGQSSTTAMAGSTESEQF

SEQ ID NO: 176306 - protein, 424 aa, Unknown
  Bacterial polypetide isolated from the Sargasso Sea
MSAENVSYDLKRFAGIKRDYKPEEIERLRGSIKIEYSLCKQQSMKLWNLLNSEPYVNTLGSLSGNHAVQHAKAGLKAIYLSGWQVAADANSAGEMYPDQSLYPYDSAPKLVDSMNNALIRADQIQHMEIQDGDMKKENKVDYMLPIIADGEAGFGGPLNVFELAKKFIKAGAAGVHFEDQLASEKKCGHMGGKVLVPTGTMIKNLKAARLAADIADVPLIILARTDANAAKLITNDHDENDKPFLTGERSPEGFYYVKSGIEQAISRGLAYAPYSDLIWCETATPNLEEAKKFADAIHKKFPGKLLAYNCSPSFNWKKHLSDAEIASFQEEISKMGYKFQFITLAGFHTQNIAIFELAEKYKKEGMTAYSRIQQQEFAREKDGYTSVKHQREVGTSYFDAVSNTISSGKSSTTAMDGSTESEQF

SEQ ID NO: 176307 - protein, 330 aa, Unknown
  Bacterial polypetide isolated from the Sargasso Sea
MTKSFYDLVPSAPEGRYDGIDRPYSVEEVERLRGSFPIEYTLATRGSNRLWDLLHSEDQVSSLGALSGNQAMQMVKAGLKAIYLSGWQVAADNNTAGSTYPDQSLYPANSGPELARKINRTLQRADQIEHSEGGAQREWFAPIVADAEAGFGGPLNCYEIMRAYIEAGASGVHYEDQLASEKKCGHMGGKVLIPTKQHVRNLNAARLAADVCGVPTLIVARTDAESAKLITSDADERDHEFIDESDRTPEGFYRLKDGTGVDNCIKRALAYAPYADLIWMETSVPSLEVAKQFSDAVKKEFPNQMLAYNCSPSFNWKANLDLDTMKHQRR

SEQ ID NO: 176308 - protein, 426 aa, Unknown
  Bacterial polypetide isolated from the Sargasso Sea
MTKLKSAKDIQSDWDSNPRWKNVKRGYSADDVVRLSGSIAIEHSLAHQGATKLWDLINTEDFVNALGALTGNQALQQAKAGLKAVYLSGWQVAGDANTGMQMYPDQSLYPVDSVPAVVKRINNALRRADQLNIAEGNEPVDYMLPIVADAEAGFGGVLNAFELMKAMIESGAAGVHFEDQLASAKKCGHMGGKVLVPTQEAVQKLIAARLAADVSGTPTVLLARTDAEAANLLTSDIDERDQEFCTGERTAEGFYRVKNGIDQAISRGLAYAPYADLVWCETGVPDLDFAKKFAEALKKEYPEQMLAYNCSPSFNWRKNLDDSTIAKFQKELGAMGYKFQFITLAGFHALNYSMFELARGYKEEQMSAYVKLQEAEFGAESIGYTATKHQREVGTGYFDEVTQVITGGQSSVTALTGSTEEDQFDK

SEQ ID NO: 176309 - protein, 425 aa, Unknown
  Bacterial polypetide isolated from the Sargasso Sea
MNLNEQVLELKNDWEMNERWAYVKRPYSAEEVVKLRGSLQPEYTLARVGAEKLWNMLHKEDYVNCLGTLTGGQAVQGVKAGAKAIYVSGWQVAADNNSAEAMYPDQSLYPVDSVPSLVKRINSSFKRADQIEWMSSNGSPKFDFFTPIVADAEAGFGGVLNAFELMKAMIKAGAAGVHFEDQLASVKKCGHMGGKVLVPTQEAINKLVAARLAADVSNVPTLLVARTDANAAELLTSDIDERDAEFVTGERTTEGFYRVKPGIQQAISRGLSYAPYSDLLWCETGKPNLEEAKLFAESIKKDHPELMLAYNCSPSFNWKKNLDDATIAKFQRELGAMGYKFQFITLAGIHSMWHGKFDLTKNYVKSGMTAYVELQEKEFADHDKGYTFSAHQQEVGTGYFDAVNNCIVGDPSTSAMDGSTEEEQF

SEQ ID NO: 176310 - protein, 360 aa, Unknown
  Bacterial polypetide isolated from the Sargasso Sea
NHAVQHAKAGLKAIYLSGWQVAADANSAGEMYPDQSLYPYDSAPKLVESMNNALIRADQIQHMELLDGDMKKESKVDYMLPIIADGEAGFGGPLNVFELAKKFIKAGAAGVHFEDQLASEKKCGHMGGKVLVPTGTMIKNLKAARLAADIADVPLIILARTDANAAKLITNDHDENDKSFLTGERSPEGFYYVKAGIDQAISRGLAYAPYSDLIWCETATPNLEEAKKFANAIHEKFPEKLLAYNCSPSFNWKKHLSDDEIASFQKEISKMGYKFQFITLAGFHTQNIAIFELAEKYKKEGMTAYSKIQQQEFAREKDGYTSVKHQREVGTSYFDAVSNTISSGKSSTTAMEGSTESEQF

SEQ ID NO: 176311 - protein, 426 aa, Unknown
  Bacterial polypetide isolated from the Sargasso Sea
MNLNDQVAALEKDWAENSRWKHVKRPYSAKEVVKLRGSLQPECTLARKGAEKLWNYLFTEDYINCLGALTGGQAVQQVKAGVKAIYLSGWQVAADNNSAGTMYPDQSLYPVDSVPKVITRINNAFRRADQIEWMNSNGEPKVDFFAPIIADAEAGFGGNLNAFELMKRMIAAGAAGVHFEDQLASVKKCGHLGGKVLVPTQEAVQKLIAARLAADVSNTPTILIARTDADAADLVTSDVDENDKPFLTGERTSEGFFRTNAGLDQAIARGLAYAPYSDLVWCETSKPDLEQAKTFAEAIKKDHPEIMLAYNCSPSFNWKKNLDDATIAKFQKELGAMGYKFQFITLAGIHSMWHGMFNLANEYVADGMTAYVKLQEKEFEDAKKGYTFVSHQQEVGTGYFDAVNNCIQGEESSTSALKGSTEEDQF

SEQ ID NO: 176312 - protein, 424 aa, Unknown
  Bacterial polypetide isolated from the Sargasso Sea
MSAEKIIDQVNNITSFDSEFTKQDVERLRGSIKIEYSLCKQLSLKLRKLLNDENYVNTLGCMSGNHAVQHAKAGLKAIYLSGWQVAADANTAGEMYPDQSLYPYDSAPKLVESINNALLRADQIQHMEIADGDMTKENKIDYMLPIIADGEAGFGGPLNVFELTKKFIKAGVAGVHFEDQLASEKKCGHMGGKVLIPTGSAVKNLKAARLAADIADVPLVICARTDANAAKLITNDYDENDKPFLTGERSPEGFHYVKHGIDQAISRGLAYAPYCDLIWCETATPNLEEAKKFADAIHAKYPGQMLAYNCSPSFNWKKHLSDDEIASFQKEISKMGYKFQFITLAGFHTQNIAIFELAEKYRKEGMSAYSRIQEQEFAREKDGYTSVKHQREVGTSYFDAVSNTISSGQSSTNAMTGSTESEQF

SEQ ID NO: 176313 - protein, 425 aa, Unknown
  Bacterial polypetide isolated from the Sargasso Sea
MSSEGKVSFKLKRFAGIKRDYTPEEVERLKGSIKIEHSICKQQSEKLWKLLNTESHVNTLGSLSGNQAVQHAKAGLKAIYLSGWQVAADANSAGEMYPDQSLYPYDSAPKLVEAMNNALIRADQIQHMEILDGDMKEKDRTDYLLPIVADGEAGFGGPLNVFELTKKFIKAGAAGVHFEDQLASEKKCGHMGGKVLVPTSTMVRNLKAARLASDIADVPLILLARTDANAAKLITNDFDENDKPFLTGERSPEGFFYVKDGIDQAISRGLAYAPYADLIWCETATPNLEEAKKFADAIHEKFPGKLLAYNCSPSFNWKKHLSDDEIGSFQNKIAEMGYKFQFITLAGFHTQNIAIFDLAEKYKEEGMTAYSKIQQHEFAREKDGYTSVKHQREVGTSYFDAVSNTISSGKSSTTAMDGSTESEQF

SEQ ID NO: 176314 - protein, 264 aa, Unknown
  Bacterial polypetide isolated from the Sargasso Sea
FELTKKFIKAGAAGVHFEDQLASEKKCGHMGGKVLVPTGTMIKNLKAARLAADIADVPLIILARTDANAAKLITNDHDENDKPFLTGERSPEGFYYVKDGIDQAISRGLAYAPYADLIWCETATPNIEEAKKFADAIHEKFPGKILAYNCSPSFNWKKHLSDKEISSFQQKIGSMGYKFQFITLAGFHTQNIAIFELAEKYKSQGMAAYSKIQEQEFAKEKDGYTSVKHQREVGTSYFDAVSNTISSGKSSTTAMKGSTEEEQF

SEQ ID NO: 176315 - protein, 197 aa, Unknown
  Bacterial polypetide isolated from the Sargasso Sea
NAAKLITNDFDENDKPFLTGERSPEGFFYVKDGIDQAISRGLAYAPYADLIWCETATPNLEEAKKFADAIHAKFPGKLLAYNCSPSFNWKKHLSDNEIATFQKKIGEMGYKFQFITLAGFHTQNIAIFDLAEKYKKEGMAAYSKIQEHEFAREKDGYTSVKHQREVGTSYFDAVSNTISSGKSSTTAMEGSTESEQF

SEQ ID NO: 176316 - protein, 426 aa, Unknown
  Bacterial polypetide isolated from the Sargasso Sea
MNLNDQVAALKKDWAENSRWKHVKRPYSAEEVVKLRGSLQPECTLARKGAEKLWNYLFTEDYINCLGALTGGQAVQQVKAGVKAIYLSGWQVAADNNSAGTMYPDQSLYPVDSVPKVITRINNAFRRADQIEWMTSNGEPKVDFFAPIIADAEAGFGGNLNAFELMKRMIAAGAAGVHFEDQLASVKKCGHLGGKVLVPTQEAVQKLIAARLAADVSNTPTILIARTDADAADLVTSDVDENDKPFLTGERTSEGFFRTNAGLDQAIARGLAYAPYSDLVWCETSKPDLEQAKTFAEAIKKDHPEIMLAYNCSPSFNWKKNLDDATIAKFQKELGAMGYKFQFITLAGIHSMWHGMFNLANEYVADGMTAYVKLQEKEFEDAKKGYTFVSHQQEVGTGYFDAVNNCIQGEESSTSALKGSTEEDQF

SEQ ID NO: 176317 - protein, 359 aa, Unknown
  Bacterial polypetide isolated from the Sargasso Sea
MSAEKISYNLKRFAGIKRDYTEEEVERLRGSIKIEYSLCKNQSQKLWKLLNSEPYVNTLGSLSGNQAVQHAKAGLKAIYLSGWQVAADANTAGEMYPDQSLYPYDSAPKLVESMNNSLIRADQIQHMEMQDGDMKKEDRTDYMLPIIADGEAGFGGPLNVFELTKKFIRAGAAGVHFEDQLASEKKCGHMGGKVLVPTGTMVKNLKAARLAADIAEVPLIILARTDANAAKLITNDFDENDKPFLTGERSPEGFHYVKDGIEQAISRGLAYAPYADLIWCETATPNLAEAKKFADAIHEKFPGKLLAYNCSPSFNWKKHLSDDEIASFQQEIAKMGYKFQFITLAGFHTQNIAIFELAE

SEQ ID NO: 176318 - protein, 411 aa, Unknown
  Bacterial polypetide isolated from the Sargasso Sea
AGIKRDYTPEEVERLRGSVKIEYSMCKHQSQKLWKLLNTEPYINTLGSLSGNHAVQHAKAGLKAIYLSGWQVAADANSAGEMYPDQSLYPYDSAPKLVEAMNNSLIRADQIQHMELIDGDMKENKRVDYMLPIIADGEAGFGGPLNVFELAKKFIKAGAAGVHFEDQLASEKKCGHMGGKVLVPTGTMIRNLKAARLAADIADVPLIILARTDANAAKLITNDFDENDKPFLTGKRSPEGFFYVKDGIEQAISRGLAYAPYADLIWCETATPNLEEAKKFADAIHEKFPGKLLAYNCSPSFNWKKHLSDDEIASFQKKIGEMGYKFQFITLAGFHTQNIAIFELAEKYKTEGMTAYSKIQQHEFSREKDGYTSVKHQREVGTSYFDAVSNTISSGKSSTTAMEGSTESEQF

SEQ ID NO: 176319 - protein, 425 aa, Unknown
  Bacterial polypetide isolated from the Sargasso Sea
MSSEGKVSYKLKRFAGIKRDYTPEEVERLRGSIKIEHSICKQQSEKLWKLLNTEPYVNTLGSLSGNQAVQHAKAGLKAIYLSGWQVAADANSAGEMYPDQSLYPYDSAPKLVEAMNNALIRADQIQHMEILDGDMKEKDRTDYLLPIIADGEAGFGGPLNVFELTKKFIKAGAAGVHFEDQLASEKKCGHMGGKVLVPTGTMVRNLKAARLASDIADVPLIILARTDANAAKLITNDFDENDKPFLTGERSPEGFFYVKDGIDQAISRGLAYAPYADLIWCETATPNLEEAKKFADAIHAKFPGKLLAYNCSPSFNWKKHLSDDEIGSFQKKIAEMGYKFQFITLAGFHTQNIAIFDLAEKYKEEGMAAYSKIQQHEFAREKDGYTSVKHQREVGTSYFDAVSNTISSGKSSTTAMDGSTESEQF

SEQ ID NO: 176320 - protein, 276 aa, Unknown
  Bacterial polypetide isolated from the Sargasso Sea
MTKLKSAKDIQSDWDSNPRWKNVKRGYSADDVVRLSGSIAIEHSLAHQGAKKLWDLINTEDFVNALGALTGNQALQQAKAGLKAVYLSGWQVAGDANTGMQMYPDQSLYPVDSVPAVVKRINNALRRADQLNIAEGNEPVDYMLPIVADAEAGFGGVLNAFELMKAMIESGAAGVHFEDQLASAKKCGHMGGKVLVPTQEAVQKLIAARLAADVSGTPTVLLARTDAEAANLLTSDIDERDQEFCTGERTAEGFYRVKNGIDQAISRGLAYAPYAD

SEQ ID NO: 176321 - protein, 437 aa, Unknown
  Bacterial polypetide isolated from the Sargasso Sea
MALTREQQIQAIEKDWAENPRWKGIKRGYSAEDVVNLRGSLQPVHTLAQRGADKLWELIHGGAKKGYVNCLGALTGGQAVQQAKAGIEAIYLSGWQVAADNNLSSTMYPDQSLYPANSVPSVVERINNSFARADQIQWANKVGPQDKGFIDYFLPIVADAEAGFGGVLNAFELMKGMIEAGAAGVHFEDQLASVKKCGHMGGKVLVPSQEAVQKLIAARLAADVCGTTTLVIARTDANAADLLTTDADPYDAGFLTGERTSEGFYKVQAGIEQAISRGLAYAPYADMVWCETAKPDLDEARKFAEAIKAQYPDKILAYNCSPSFNWKKNLDDATIARFQQELSDMGYKYQFITLAGIHNMWFHMYELAYQYARGEGMKHYVEMVQQPEFAAAERGYTFVAHQQEVGTGYFDKVTTVIQGGQSSVTALTGSTEEDQFH

SEQ ID NO: 176322 - protein, 417 aa, Unknown
  Bacterial polypetide isolated from the Sargasso Sea
MSAEKISYDLKRFAGIKRDYTEEEVERLRGSIKIEYSLCKNQSQKLWKLLNSEPYVNTLGSLSGNQAVQHAKAGLKAIYLSGWQVAADANTAGEMYPDQSLYPYDSAPKLVESMNNSLIRADQIQHMEMQDGDMKKEDRTDYMLPIIADGEAGFGGPLNVFELTKKFIRAGAAGVHFEDQLASEKKCGHMGGKVLVPTGTMVKNLKAARLAADIAEVPLIILARTDANAAKLITNDFDENDKPFLTGERSPEGFHYVKDGIEQAISRGLAYAPYADLIWCETATPNLAEAKKFADAIHEKFPGKLLAYNCSPSFNWKKHLSDDEIASFQQEIAKMGYKFQFITLAGFHTQNIAIFELAEKYRKEGMTAYSRIQQQEFAREKDGYTSVKHQREVGTSYFDAVSNTISSGQSSTTAMAG

SEQ ID NO: 176323 - protein, 425 aa, Unknown
  Bacterial polypetide isolated from the Sargasso Sea
MIAKAKVNYDIKRFSGIQRDYKSSEVERLRGSIKIEYSMCKNQSKKLWELLNTQPYINTLGSLSGNHAVQHAKAGLKAIYLSGWQVAADANSAGEMYPDQSLYPFDSAPKLVEAMNNALIRADQIQHMEILDGDMKEKDRVDYMLPIIADGEAGFGGPLNVFELAKKFIKAGAAGVHFEDQLASEKKCGHMGGKVLVPTSTMIKNLKAARLAADIADVPLIILARTDANAAKLITNDHDENDKPFLTGERSPEGFFYVKHGIDQAISRGLAYAPYSDLIWCETATPNIEEAKKFADAIHAKFPGKLLAYNCSPSFNWKKHLSDDEISSFQVKIAEMGYKFQFITLAGFHTQNIAIFELAEKYKSEGMTAYSKIQQQEFAREKDGYTSVKHQREVGTSYFDAVSNTISSGKSSTTAMKGSTESEQF

SEQ ID NO: 176324 - protein, 340 aa, Unknown
  Bacterial polypetide isolated from the Sargasso Sea
MSSEKKVSYDLKRFSGIKRDYTPEEVERLRGSIKINYSMCEHQSKKLWRLLNTEPYVNTLGSLSGNHSVQHAKAGLKAIYVSGWQVAADANTAGEMYPDQSLYPFDSAPRLVESINNALIRADQIQHMELKDGDMKPNERVDYMLPIIADGEAGFGGPLNVFELTKKFIKAGAAGVHFEDQLASEKKCGHMGGKVLVPTSTAVRNLKAARLAADISDVPLIILARTDANAAKLITNDHDENDKPFLTGERSPEGFYYVKHGIDQAISRGLAYAPYADLIWCETATPNLEEAKKFADAIHSKFPGKILAYNCSPSFNWKKHLSDSEIATFRQKIAEMGYKF

SEQ ID NO: 176325 - protein, 403 aa, Unknown
  Bacterial polypetide isolated from the Sargasso Sea
MGDKRNYTDEHVKSLQGSVKIEHTLAKMGSKQLRNLFESEPYVNTFGAYNGQQAVQHVKAGLKAIYVSGWQVAASANSNNEVYPDQSLYSVDSVPNAVKGINNAFRRQDQIQVQEGREGFYYAPIIADAEAGFGGALNAYELSRNLIEAGAAAVHYEDQLSAEKKCGHLGGKVLISTSQAIRNLNAARLASDVAETDTLIIARTDAEAAKLLMTDVDDIDRKFMTGERTSEGFYQITGGLEMGCDRGQAFAEYADLVWCETSKPCLKDAKKFADAVRGAHPDQMLAYNCSPSFNWKQHIPSESELAEFQKELGNMGFKFQFITLAGFHSTNFAVFDFAREYKREGMLAYSKLQEKEFDFQKHGFTTVKHQAEVGVGYFDAISQAVGADSVAALADSTENEQFG

SEQ ID NO: 176326 - protein, 222 aa, Unknown
  Bacterial polypetide isolated from the Sargasso Sea
MNKIRSAQDIQKDWDSNPRWKNVKRDYSADEVAKLSGSVNIEYSLAKQGAEKLWSEINNSDFVNALGALTGNQAMQQAKAGLRAVYLSGWQVAGDANTGMQMYPDQSLYPVDSVPAVVKRINNSLRRADQLNIAEGNEPVDYMLPIVADAEAGFGGVLNAHELMKAMIEAGAAGVHFEDQLASAKKCGHMGGKVLVPTQEAVQKLAAARLAADIYNTSTVLL

SEQ ID NO: 176327 - protein, 282 aa, Unknown
  Bacterial polypetide isolated from the Sargasso Sea
MLPIIADGEAGFGGPLNVFELTKKFIKAGAAGVHFEDQLASEKKCGHMGGKVLVPTGTMVRNLKAARLAADIADVPLIILARTDANAAKLITNDFDENDKPFLTGERSPEGFYYVKDGIDQAISRGLAYAPYADLIWCETATPNLEEAKKFADAIHAKFPGKMLAYNCSPSFNWKKHLSDDEIATFQTKIGMMGYKFQFITLAGFHTQNIAIFELAEKYKKEGMTAYSRIQQNEFAREKDGYTSVKHQREVGTSYFDAVSNTISSGKSSTTAMEGSTESEQF

SEQ ID NO: 176328 - protein, 144 aa, Unknown
  Bacterial polypetide isolated from the Sargasso Sea
STPDLELAKRFADAIHAKFPGKLLAYNCSPSFNWQKNLDDKTIASFQQQLSDMGYKYQFITLAGIHSMWFNMFDLAHSYAQGEGMRHYVEKVQQPEFAAAKDGYTFVSHQQEVGTGYFDKVTTIIQGGASSVTALTGSTEESQF

SEQ ID NO: 176329 - protein, 424 aa, Unknown
  Bacterial polypetide isolated from the Sargasso Sea
MSAEKISYDLKRFAGIKRDYTEEEVERLRGSIKIEYSLCKNQSQKLWKLLNSEPYVNTLGSLSGNQAVQHAKAGLKAIYLSGWQVAADANTAGEMYPDQSLYPYDSAPKLVESMNNSLIRADQIQHMEMQDGDVQAKDRTDYMLPIIADGEAGFGGPLNVFELTKKFIKAGAAGVHFEDQLASEKKCGHMGGKVLVPTGTMVKNLKAARLASDIAEVPLIILARTDANAAKLITNDFDENDKPFLTGERSPEGFYYVKDGIEQAISRGLAYAPYADLIWCETATPNLEEAKKFADAIHEKYPGKLLAYNCSPSFNWKKHLSDDEIASFQKEIAKMGYKFQFITLAGFHTQNIAIFELAEKYKKEGMTAYSKIQQQEFAREKDGYTSVKHQREVGTSYFDAVSNTISSGQSSTTAMAGSTESEQF

SEQ ID NO: 176330 - protein, 424 aa, Unknown
  Bacterial polypetide isolated from the Sargasso Sea
MSAENVSYDLKRFAGIKRDYTSEEVERLKGSIKIEYSMCKQQSQKLWKLLNSEPYINTLGSLSGNHAVQHAKAGLKAIYLSGWQVAADANSAGEMYPDQSLYPYDSAPKLVETMNNSLTRADQIQHMEIIDGDMDKNKRVDYMLPIIADGEAGFGGPLNVFELTKKFIKAGAAGVHFEDQLASEKKCGHMGGKVLVPTGTMVRNLKAARLAADIADVPLIILARTDANAAKLITNDFDDNDKPFLTGKRSPEGFFYVKEGIEQAISRGLAYAPYADLIWCETATPNLEEAKKFADAIHDKYPGKLLAYNCSPSFNWKKHLSDEEIASFQKKIGQMGYKFQFITLAGFHTQNIAIFELAEKYKKEGMTAYSKIQEHEFSREKDGYTSVKHQREVGTSYFDAVSNTISSGKSSTTAMEGSTESEQF

SEQ ID NO: 176331 - protein, 425 aa, Unknown
  Bacterial polypetide isolated from the Sargasso Sea
MSSEAKVSYDLKRFAGIKRDYTPEEVERLRGSIKIQYSMCEQQSKKLWNLLNTEPYVNTLGSLSGNHSVQHAKAGLKAIYVSGWQVAADANTAGEMYPDQSLYPFDSAPKLVDSINNALVRADQIQHMEIQDGEMNSKDRTDYMLPIIADGEAGFGGPLNVFELTKKFIKAGAAGVHFEDQLASEKKCGHMGGKVLVPTGTAVRNLKAARLAADIADVPLIILARTDANAAKLITNDHDDNDKPFLTGERSPEGFYYVKAGIEQAISRGLAYAPYADLIWCETATPNLEEAKKFADAIHSKFPGKLLAYNCSPSFNWKKHLSDDEIGTFQRKIGEMGYKFQFITLAGFHTQNIAIFELAEKYKKDGMAAYSKIQQQEFDREKDGYTSVKHQREVGTSYFDAVSNTISGGKSSTTAMEGSTESEQF

SEQ ID NO: 176332 - protein, 403 aa, Unknown
  Bacterial polypetide isolated from the Sargasso Sea
MGNKRNYTDEHVKSLQGSVRIEHTLAKMGAKQLRDLFESEPYVNTFGAYNGQQAVQHVKAGLKAIYVSGWQVAASANSNNEVYPDQSLYSVDSVPNAVKNINNAFRRQDQIQVQEGREGFYYAPIIADAEAGFGGALNAYELSRNLIEAGAAAVHFEDQLSAEKKCGHLGGKVLISTSQAIRNLNAARLAADVAGTDTLIIARTDAEAAKLLMTDVDDIDKKYMTGERTSEGFYQITGGLDMGCDRGQAFAEYADLVWCETSKPCLKDAKKFADAVRGAHPDQLLAYNCSPSFNWKQHIPSETELAEFQKELGKMGFKFQFITLAGFHSTNFAVFDFAREYKKLGMLAYSKLQEKEFDYQQYGFTTVKHQAEVGVGYFDAISQAVGADSVAALADSTESEQFG

SEQ ID NO: 176333 - protein, 417 aa, Unknown
  Bacterial polypetide isolated from the Sargasso Sea
MLNEDWQSNPRWKDTKRNFSAEDVVSLRNSLNIEYSLSQNGSKNLWNLVNRKEEWVSALGALSGNQAVQMAKAGLEAIYLSGWQVAADSNLGDTTYPDQSLYPSNSAPNLANKINNALLRAEQVDKTDGIETTDYIVPIVADGEAGFGGALNVFELTKKFIEAGVAAVHFEDQLAAEKKCGHMGGKVLVPTSQHIRTLTSARLAADTLGVPLVIIARTDALGANLITSDIDEIDAEFVTGERTAEGFYRVNNGPEAAISRALSYAPYADLVWCETSKPDLGFAKDFAEAVHEKFPNKLMAYNCSPSFNWKASLDEQEISTFQEQLNSFGYKFQFITLAGFHSLNTSMFELATNYKGGNMSSYVELQEKEFSLEEKGFTSVKHQREVGAGYFDKVSTIISGGDASTLALEGSTEEEQF

SEQ ID NO: 176334 - protein, 425 aa, Unknown
  Bacterial polypetide isolated from the Sargasso Sea
MNLNEQVLELKNDWEMNERWSYVKRPYSAEEVVKLRGSLQPEYTLARIGAEKLWNMLHKEDYVHCLGTLTGGQAVQGVKAGAKAIYVSGWQVAADNNSAEAMYPDQSLYPVDSVPSLVKRINSSFKRADQIEWMSSNGKPKFDFFTPIVADAEAGFGGVLNAFELMKAMIKAGAAGVHFEDQLASVKKCGHMGGKVLVPTQEAINKLVAARLAADVSNVPTLLVARTDANAAELLTSDIDERDAEFVTGERTSEGFYRVKAGIQQAISRGLSYAPYSDLLWCETGKPNLEEAKLFAESIKKDHPELMLAYNCSPSFNWRKNLDDTTIAKFQRELGAMGYKFQFITLAGIHSMWHGMFDLTKKYVKSGMTAYVELQEKEFADHDKGYTFSAHQQEVGTGYFDAVNNCIVGDPSTSAMDGSTEEEQF

SEQ ID NO: 176335 - protein, 424 aa, Unknown
  Bacterial polypetide isolated from the Sargasso Sea
MSAEKISYELKRFAGIQRDYKPEEVERLRGSIKIEYSMCKQQSQKLWRLLNTEPYVNTLGSLSGNQAVQHAKAGLKAIYLSGWQVAADANSAGEMYPDQSLYPYDSAPKLVESMNNSLIRADQIQHMEIADGDMNSSERTDYMLPIIADGEAGFGGPLNVFELTKKFIKAGAAGVHFEDQLASEKKCGHMGGKVLVPTGTMVRNLKAARLAADIADVPLIILARTDANAAKLITNDFDENDKPFLTGERSPEGFYYVKDGIDQAISRGLAYAPYADLIWCETATPNLEEAKKFADAIHAKFPGKMLAYNCSPSFNWKKHLSDDEIATFQTKIGMMGYKFQFITLAGFHTQNIAIFELAEKYKKEGMTAYSRIQQNEFAREKDGYTSVKHQREVGTSYFDAVSNTISSGNSSTTAMEGSTESEQF

SEQ ID NO: 176336 - protein, 337 aa, Unknown
  Bacterial polypetide isolated from the Sargasso Sea
MKRFAGIKRDYTPEEVERLRGSIKIEHSLCKHQSEKLWKLLNSESYVNTLGSLSGNHAVQHAKAGLKAIYLSGWQVAADANSAGEMYPDQSLYPYDSAPKLVESMNNALVRADQIQHMEIKDGEMKEENKVDYMLPIIADGEAGFGGPLNVFELAKKFIKAGAAGVHFEDQLASEKKCGHMGGKVLVPTGTMIKNLKAARLAADIANVPLIILARTDANAAKLITNDHDENDKPFLTGERSPEGFYYVKHGIEQAISRGLAYAPYADLIWCETATPNLEEAKKFADAIHKKYPGKILAYNCSPSFNWKKHLSDDQIATFQQKIGEMGYKFQFITLAG

SEQ ID NO: 176337 - protein, 285 aa, Unknown
  Bacterial polypetide isolated from the Sargasso Sea
TDYMLPIIADGEAGFGGPLNVFELTKKFIRAGAAGVHFEDQLASEKKCGHMGGKVLVPTGTMVRNLKAARLAADIADVPLIILARTDANAAKLITNDFDDNDKPFLTGERSPEGFFYVKDGIEQAISRGLAYAPYADLIWCETATPNLEEAKKFADAIHEKFPGKMLAYNCSPSFNWKKHLSDEEIGSFQRKIGEMGYKFQFITLAGFHTQNIAIFELAEKYKSEGMTAYSKIQQHEFAREKDGYTSVKHQREVGTSYFDAVSNTISSGKSSTTAMEGSTESEQF

SEQ ID NO: 176338 - protein, 428 aa, Unknown
  Bacterial polypetide isolated from the Sargasso Sea
MTKSFYDLVPSAPKGRYDGIERPYSIDDVKQLRGSFPIEYTLATRGANRLWDLLHSEDQVSSLGALSGNQAMQMVKAGLKAIYLSGWQVAADNNTAGSTYPDQSLYPANSGPELARKINRTLQRADQIEHSEGGAQREWFAPIVADAEAGFGGPLNCFEIMRAYIEAGASGVHYEDQLASEKKCGHMGGKVLIPTKQHVRNLNAARLAADVCGVPTLIVARTDAESAKLITSDADERDHEFIDYDDRTPEGFYRLKDDSGFDNCVKRAIAYAPYADLIWMETSIPSLEVAKAFSDAVKKEFPDQMLAYNCSPSFNWNANLDLGTIAKFREEIGKMGFKYQFVTLAGFHQLNYGMFQLASDFRDRGMGAYSELQQAEFAAEKDGYTATRHQREVGTGYFDLVSEASAGGESSTTALGDSTEADQFDAAE

SEQ ID NO: 176339 - protein, 424 aa, Unknown
  Bacterial polypetide isolated from the Sargasso Sea
MSAENVSYDLKRFAGIKRDYTPEEVERLRGSIKIEYSICKQQSQKLWKLLNTEPYINTLGSLSGNHAVQHAKAGLKAIYLSGWQVAADANSAGEMYPDQSLYPYDSAPKLVETMNNSLIRADQIQHMELIDGDMEKSKSVDYMLPIIADGEAGFGGPLNVFELAKKFIKAGAAGVHFEDQLASEKKCGHMGGKVLVPTGTMVRNLKAARLAADIADVPLIILARTDANAAKLITNDFDENDKPFLTGERSPEGFFYVKDGIEQAISRGLAYAPYADLIWCETATPNLEEAKNFADAIHEKFPGKLLAYNCSPSFNWKKHLSDDEIASFQKKIAEMGYKFQFITLAGFHTQNIAIFELAEKYKTEGMTAYSKIQQHEFSREKDGYTSVKHQREVGTSYFDAVSNTISSGKSSTTAMEGSTESEQF

SEQ ID NO: 176340 - protein, 424 aa, Unknown
  Bacterial polypetide isolated from the Sargasso Sea
MSAEKISYDLKRFAGIKRDYTPEEVERLRGSIKIEYSICKQQSTKLWKLLNTEKYVNTLGSLSGNHAVQHAKAGLKAIYLSGWQVAADANSAGEMYPDQSLYPYDSAPKLVESMNNALIRADQIQHMELKDGDMKKEKRVDYMLPIIADGEAGFGGPLNVFELAKKFIKAGAAGVHFEDQLASEKKCGHMGGKVLVPTGTMIKNLKAARLAADIADVPLIILARTDANAAKLITNDYDENDKPFLTGERSPEGFYYVKAGIEQAISRGLAYAPYSDLIWCETATPNLEEAKKFADAIHEKFPGKLLAYNCSPSFNWKKHLSDDEIASFQQKISQMGYKFQFITLAGFHTQNIAIFELAEKYKKEGMTAYSKIQQQEFAREKDGYTSVKHQREVGTSYFDAVSNTISNGESSTTAMAGSTESEQF

SEQ ID NO: 176341 - protein, 340 aa, Unknown
  Bacterial polypetide isolated from the Sargasso Sea
IYLSGWQVAADSNLGDTTYPDQSLYPSNSAPNLAKKINNALLRAEQVDKTDGIDSTNYIVPIVADGEAGFGGALNVFELTKKFIEAGVAAVHFEDQLAAEKKCGHMGGKVLVPTSQHIRTLTSARLAADTLGVPLVIIARTDALGANLLTSDIDEIDAEFVTGERTAEGFYRVDNGPDAAISRALSYAPYSDLVWCETGKPDLGFAKDFADAIHEKYPNKLMAYNCSPSFNWKASLNEKEIETFQEQLNSFGYKFQFITLAGFHALNTSMFELASNYKGGNMSSYVELQEKEFSLEEKGFTSVKHQREVGAGYFDKVSTIISGGDASTLALEGSTEEEQF

SEQ ID NO: 176342 - protein, 372 aa, Unknown
  Bacterial polypetide isolated from the Sargasso Sea
MSLNEQVLELKNDWEMNERWAYVKRPYSAEEVVKLRGSLQPEYTLARIGAEKLWNMLHNEDYVNCLGTLTGGQAVQGVKAGAKAIYVSGWQVAADNNSAEAMYPDQSLYPVDSVPSLVKRINSSFKRADQIEWMTSNGNPKFDFFTPIVADAEAGFGGVLNAFELMKAMIKAGAAGVHFEDQLASVKKCGHMGGKVLVPTQEAINKLVAARLAADVSNVPTLLVARTDANAADLLTSDIDERDAEFVTGERTSEGFYRVKAGINQAISRGLSYAPYSDLLWCETGKPNLEEAKLFAESIKKDHPELMLAYNCSPSFNWRKNLDDATIAKFQRELGAMGYKFQFITLAGIHSMWHGMFDLTKKYVKSRYDCIC

SEQ ID NO: 176343 - protein, 424 aa, Unknown
  Bacterial polypetide isolated from the Sargasso Sea
MSAENVSYDLKRFAGIKRDYKPEEIERLRGSIKIEYSLCKQQSMKLWNLLNSEPYVNTLGSLSGNHAVQHAKAGLKAIYLSGWQVAADANSAGEMYPDQSLYPYDSAPKLVDSMNNALIRADQIQHMEIQDGDMKKENKVDYMLPIIADGEAGFGGPLNVFELAKKFIKAGAAGVHFEDQLASEKKCGHMGGKVLVPTGTMIKNLKAARLAADIADVPLIILARTDANAAKLITNDHDENDKPFLTGERSPEGFYYVKSGIEQAISRGLAYAPYSDLIWCETATPNLEEAKKFADAIHEKFPGKLLAYNCSPSFNWKKHLSDAEIASFQEEISKMGYKFQFITLAGFHTQNIAIFELAEKYKKEGMTAYSRIQQQEFAREKDGYTSVKHQREVGTSYFDAVSNTISSGKSSTTAMDGSTESEQF

SEQ ID NO: 176344 - protein, 428 aa, Unknown
  Bacterial polypetide isolated from the Sargasso Sea
MTKSFYDLVPSAPEGRYDGIDRPYSVEEVERLRGSFPIEYTLATRGSNRLWDLLHSEDQVSSLGALSGNQAMQMVKAGLKAIYLSGWQVAADNNTAGSTYPDQSLYPANSGPELARKINRTLQRADQIEHSEGGAQREWFAPIVADAEAGFGGPLNCYEIMRAYIEAGASGVHYEDQLASEKKCGHMGGKVLIPTKQHVRNLNAARLAADVCGVPTLIVARTDAESAKLITSDADERDHEFIDASDRTPEGFYRLKDGTGVDNCIKRALAYAPYADLIWMETSVPSLEVAKQFSDAVKKEFPNQMLAYNCSPSFNWKANLDLDTIETFREEIGKMGFKYQFVTLAGFHQLNYGMFQLASNFRDRGMGAYSELQQAEFAAEKDGYTATRHQREVGTGYFDLISEASAGGESSTTALGDSTEADQFDAAE

SEQ ID NO: 176345 - protein, 425 aa, Unknown
  Bacterial polypetide isolated from the Sargasso Sea
MSLNEQVLQLKNDWEMNERWAYVERPYTAEEVVKLRGSLQPEYTLARIGAEKLWSMLHKEDYVNCLGTLTGGQAVQGVKAGAKAIYVSGWQVAADNNSAEAMYPDQSLYPVDSVPSLVKRINSSFKRADQIEWMTSNGNPKFDFFTPIVADAEAGFGGVLNAFELMKAMIKAGAAGVHFEDQLASVKKCGHMGGKVLVPTQEAINKLVAARLAADVSNVPTLLVARTDANAADLLTSDIDERDSEFVTGERTSEGFYRVKAGIKQAISRGLSYAPYSDLLWCETGKPNLEEAKLFAESIKKDHPELMLAYNCSPSFNWRKNLDDATIAKFQRELGAMGYKFQFITLAGIHSMWHGMFDLTKKYVKSGMTAYVELQEKEFADHDKGYTFSAHQQEVGTGYFDAVNNCIVGDPSTSAMDGSTEEEQF

SEQ ID NO: 176346 - protein, 424 aa, Unknown
  Bacterial polypetide isolated from the Sargasso Sea
MSNSNVSYELKRFSGIKRDYTEKEVERLRGSVKISYSICEQQSKKLWRLLNTENYVNTLGSLSGNHSVQHAKAGLKAIYVSGWQVAADANTAGEMYPDQSLYPFDSAPKLVESINNALIRADQIQHMELNDGDMKSENKIDYMLPIIADGEAGFGGPLNVFELTKKFIKAGAAGVHFEDQLASEKKCGHMGGKVLVPTGTAIKNLKAARLAADIADVPLIILARTDANAAKLITNDHDENDKPFLTGERSPEGFFYVKNGIEQAISRGLAYAPYADLIWCETATPNLEEAKKFADAIHKKLPGKILAYNCSPSFNWKKHLTDDEISSFQKKIAEMGYKFQFITLAGFHTQNIAIFELAEKYKSQGMSAYSKIQEKEFAKEKDGYTSVKHQREVGTSYFDAVSNTISSGKSSTTAMKDSTETEQF

SEQ ID NO: 176347 - protein, 321 aa, Unknown
  Bacterial polypetide isolated from the Sargasso Sea
MSAEKISYELKRFAGIQRDYKPDEVERLRGSIRIEYSMCKQQSQKLWRLLNTEPYVNTLGSLSGNQAVQHAKAGLKAIYLSGWQVAADANSAGEMYPDQSLYPYDSAPKLVESMNNSLIRADQIQHMEIADGDMNSSERTDYMLPIIADGEAGFGGPLNVFELTKKFIKAGAAGVHFEDQLASEKKCGHMGGKVLVPTGTMVRNLKAARLAADIADVPLIILARTDANAAKLITNDFDENDKPFLTGERSPEGFYYVKDGIDQAISRGLAYAPYADLIWCETATPNLEEAKKFADAIHAKFPGKMLGYNCSPSFKLEETFI

SEQ ID NO: 176348 - protein, 338 aa, Unknown
  Bacterial polypetide isolated from the Sargasso Sea
MSAENVSYDLKRFAGIKRDYTPEEVERLRGSIKIEYSMCKQQSQKLWNLLNTEPYINTLGSLSGNHAVQHAKAGLKAIYLSGWQVAADANSAGEMYPDQSLYPYDSAPKLVETMNNSLTRADQIQHMEIIDGDMEETKKVDYMLPIIADGEAGFGGPLNVFELAKKFIKAGAAGVHFEDQLASEKKCGHMGGKVLVPTGTMIRNLKAARLAADIADVPLIILARTDANAAKLITNDFDENDKPFLTGERSPEGFFYVKDGIEQAISRGLAYAPYADLIWCETATPNLEEAKKFADAIHAKFPGKLLAYNCSPSFNWKKHLSDDEIASFQKEIGKMGYK

SEQ ID NO: 176349 - protein, 396 aa, Unknown
  Bacterial polypetide isolated from the Sargasso Sea
KVRLRLNTQWCKQQSQKLWKLLNTEPYINTLGSLSGNHAVQHAKAGLKAIYLSGWQVAADANSAGEMYPDQSLYPYDSAPKLVETMNNSLIRADQIQHMELIDGDMEKSTSVDYMLPIIADGEAGFGGPLNVFELAKKFIRAGAAGVHFEDQLASEKKCGHMGGKVLVPTSTMIRNLKAARLAADIADVPLIILARTDANAAKLITNDFDENDKPFLTGKRSPEGFFYVKDGIEQAISRGLAYAPYADLIWCETATPNLEEAKKFADAIHEKFPGKLLAYNCSPSFNWKKHLSDEEIASFQKKIGEMGYKFQFITLAGFHTQNIAIFELAEKYKTEGMTAYSKIQQHEFSREKDGYTSVKHQREVGTSYFDAVSNTISSGKSSTTAMEGSTESEQF

SEQ ID NO: 176350 - protein, 440 aa, Unknown
  Bacterial polypetide isolated from the Sargasso Sea
MTKATQTSRQAQIDAIKKDWAENPRWKNVRRPYTAEEVVALRGSIVPENTIAKRGAAKLWDLVNGGAKKGYVNSLGALTGGQAVQQAKAGIEAIYLSGWQVAADANLAGTMYPDQSLYPANSVPAVVARINNSFRRADQIQWSNGVNPEEENFVDYFLPIIADAEAGFGGVLNAFELMKSMIDAGAAGVHFEDQLASVKKCGHMGGKVLVPTQEAVQKLVAARLAADVSGVETLVIARTDANAADLLTSDCDPYDRDFVTGERTSEGFYRVKAGLDQAISRGLAYAPYADLIWCETAKPDLEEARRFAEAIHAQYPDQLLAYNCSPSFNWKKNLDDATIARFQQELSDMGYKYQFITLAGIHNMWYNMFDLAYDYARGEGMKHYVEKVQEVEFAAAKKGYTFVAHQQEVGTGYFDQVTTVIQGGHSSVTALTGSTEEEQF

SEQ ID NO: 176351 - protein, 408 aa, Unknown
  Bacterial polypetide isolated from the Sargasso Sea
LDGAVKRPYSAKEVVKLRGSLQPECTLARKGAEKLWNYLFTEDYINCLGALTGGQAVQQVKAGVKAIYLSGWQVAADNNSAGTMYPDQSLYPVDSVPKVITRINNAFRRADQIEWMNSNGEPKVDFFAPIIADAEAGFGGNLNAFELMKRMIAAGAAGVHFEDQLASVKKCGHLGGKVLVPTQEAVQKLIAARLAADVSNTPTILIARTDADAADLVTSDVDENDKPFLTGERTSEGFFRTNAGLDQAIARGLAYAPYSDLVWCETSKPDLEQAKTFAEAIKKDHPEIMLAYNCSPSFNWKKNLDDATIAKFQKELGAMGYKFQFITLAGIHSMWHGMFNLANEYVADGMTAYVKLQEKEFEDAKKGYTFVSHQQEVGTGYFDAVNNCIQGEESSTSALKGSTEEDQF

SEQ ID NO: 176352 - protein, 232 aa, Unknown
  Bacterial polypetide isolated from the Sargasso Sea
HEPFDLYQALRFLNPSPYMYFLNFGICQVVGASPEILVRLQGDQITLRPIAGTRRRGSNEIEDEENAKDLLSDPKELAEHLMLIDLGRNDVGKISKMGTVKVSEKMVIEKYSHVMHIVSNVEGSKKENLSFIDVLKSALPAGTLSGAPKIRAMEIINELEPSSRGIYGGAIGHISWDGDIDTAIAIRTAVIKNNKIHVGAGAGVVADSIPENEWNECLQKAHVFLDAIEMIK

SEQ ID NO: 176353 - protein, 235 aa, Unknown
  Bacterial polypetide isolated from the Sargasso Sea
LKLNLLKTQFEIYKKLRINNPSPFMYFFNFKDFQIIGASPEILVRLRNNNITIRPIAGTRPRGKNKKEDKNFERDLLNDKKELSEHLMLLDLGRNDTGKVSKINTVKVTEKFVIERYSHVMHIVSNVVGKFNKKFSKFDTLLSGFPAGTVSGAPKIRAMEIIDELENTKRKVYAGGIGYFSANGDFDTCIALRTALSKNNKFYVQAGAGIVADSKPINEYKETINKAKALLKSLE

SEQ ID NO: 176354 - protein, 345 aa, Unknown
  Bacterial polypetide isolated from the Sargasso Sea
SCIDDLNIPDARILRPQTLIIHDNYQQKIYYIVNCFSDEKITNYKTKYDLIENEISNLIFIANYDRNLVNNQLKKKIKIKSNISKNKFLQNVRKAKKYIKIGDIFQVVLSQRFEAKLTKNPIEIYKKLRINNPSPFMYFFNFEDFQIIGASPEILVRLRNKNITVRPIAGTRPRGKNKKEDKFFEKDLLKDKKELSEHLMLLDLGRNDAGKVSKINTVKVTEKFVIERYSHVMHIVSNVVGKFNKKFSKFDTLLAGFPAGTVSGAPKIRAMEIIDDLETTKRKVYAGGIGYFSANGDFDTCIALRTAVSKNNKFYVQAGAGIVADSKPINEYKETVNKAKALLKS

SEQ ID NO: 176355 - protein, 158 aa, Unknown
  Bacterial polypetide isolated from the Sargasso Sea
ELAEHTMLVDLGRNDIGRVCDYGTVKVKELMEIKRFSHVQHIVTHVVGELSDKYDMYDAFQAVFPAGTVSGAPKVRAMEIIHELEPIQRETYAGAVGYFSFNGCCDFAIAIRSIFADSKKGFVQAGAGIVFDSIAENELKETEHKANAMITALKEASK

SEQ ID NO: 176356 - protein, 339 aa, Unknown
  Bacterial polypetide isolated from the Sargasso Sea
LESLRQLINLSKVKINPGNVPYPTLVGYLGYPMIQFMENITLSNKDNINIPEATLIRPKIVAVFDNIRDTISLMTISYPCKELKAKDAYKNSNLLLTKTIKKLESSLLKSTNKKLKRIKLNFKSNFKKEDFYKIVKSAKKYIQDGDIFQVVPSQRFESKYTLEAIDLYRSLRRLNPSPYLVNLNFDKYGIVASSPELMVQLRNNKVTIRPIAGTRRRGRNASEDLNLSKDLINDQKELAEHLMLLDLGRNDVGRVSKKGSVKVTEKMIIEYYSHVMHIVSNVEGKIEKKYDAIDALKAGFPAGTVSGAPKIRAMEIIEELENLNRSFYAGCMGYFDSNG

SEQ ID NO: 176357 - protein, 313 aa, Unknown
  Bacterial polypetide isolated from the Sargasso Sea
MFYIINIFNDEKITNYQKRFEDIKSELFKLTIQSSIKNLSKSKVKVVKDIKVKSNTPKNKFLNMVNKAKKYIKIGDIFQVVLSQRFEAKLTKNPLDIYKKLRITNPSPFMFFFNFSDFQIVGASPEILVRLRDNKITVRPIAGTRPRGKTNKEDLYYEKDLLKDKKELSEHLMLLDLGRNDAGKVSKINSVKVTESFIIERYSHVMHIVSNVVGEYNKKFSKFKSLLAGFPAGTVSGAPKIRAMEIIDELESTRRKVYAGGIGYFSANGEFDTCIALRTAVAKNKKFYVQAGAGIVADSKPIKEYEETVNKAK

SEQ ID NO: 176358 - protein, 279 aa, Unknown
  Bacterial polypetide isolated from the Sargasso Sea
PSVVAVLDGAKGEVILVVPVWHNQKNDAKKSYENASKLIAGAVKKLQCEILETRNLGNPKDIDPPISNFSKSNYLKAVEKAKEYITAGDIFQVVPSQRWTQDFKLPPFSLYRSLRRTNPSPFMFFFNFGAFQVIGASPEILVRVFDNEITIRPIAGTRPRGKTPEEDKALEVELLNDKKELAEHLMLLDLGRNDVGRVSKIGSVTPTEEFIIERYSHVMHIVSNVVGELAPEHDALSAFFAGMPAGTVSGAPKVRAMEIIDELEPEKRGVYGGGVGYFS

SEQ ID NO: 176359 - protein, 222 aa, Unknown
  Bacterial polypetide isolated from the Sargasso Sea
YRALRSLNPSPYMYFLDLGDFQIVGSSPEILVRLEDNTVTVRPIAGTRPRGKTEKEDVELENDLLQDPKELAEHLMLIDLGRNDVGRVADMGSVNLTDKMIIERYSHVMHIVSNVTGKLKKEMNAIDVLRSTFPAGTVSGAPKIRAMEIIDELEPVKRGVYSGAVGYISWNGNMDTAIAIRTAVIKDKTLHIQAGAGIVADSVPKNEWDETMNKGRAIFKAV

SEQ ID NO: 176360 - protein, 200 aa, Unknown
  Bacterial polypetide isolated from the Sargasso Sea
MGSSPEILVRLINDEVTIRPIAGTRPRGKNNKEDKKFISELLSDPKELSEHLMLLDLGRNDIGKVSQTNSVKVTEKFKVEKYSHVMHIVSNVVGRLKKNLSLFETFLSGFPAGTVSGAPKIRAMEIIDELETSKRKLYAGGIGYFTANQEFDTCIALRTALIKDKTIYVQAGAGIVADSKPEHEYEETVNKAKALLQAIR

SEQ ID NO: 176361 - protein, 264 aa, Unknown
  Bacterial polypetide isolated from the Sargasso Sea
ILIKQKNILKLSDIFQVVPSQRFETNFKSKGSSLYKVLRLTNPSPFMYYFNLPNFQIVGSSPEILVRLRSELITLRPIAGTRPRGKNIKQDRKYELDLLSDEKETSEHLMLLDLGRNDVGKVARKSTVSVTAKFIIEKYSHVMHLVSNVTGKLKKNISTIEALMAGFPAGTVSGAPKIRAMQIIDELETDVRGIYAGGIGYISPDGDMDTCIVLRTGIITKNKLYVQAGGGVVYDSDPELEYMETVNKAKAVLNAAEIVLGNNL

SEQ ID NO: 176362 - protein, 266 aa, Unknown
  Bacterial polypetide isolated from the Sargasso Sea
KEDFLKAVSVAKEYIVDGDVMQVVLAQDFSKEFTREPFDLYQALRFLNPSPYMYFLNFGICQVVGASPEILVRLQGDQITLRPIAGTRRRGSNELEDEENAKDLLSDPKELAEHLMLIDLGRNDVGKISKMGTVKVSEKMVIEKYSHVMHIVSNVEGIKKENLSFIDVLKSALPAGTLSGAPKIRAMEIINELEPSSRGIYGGAIGHISWDGDIDTAIAIRTAVIKNNKIHVGAGAGVVADSIPENEWNECLQKARVFLDAIEMIK

SEQ ID NO: 176363 - protein, 160 aa, Unknown
  Bacterial polypetide isolated from the Sargasso Sea
IAEHIMLVDLARNDLGRVAKHGSIEVEPYQSIEYYSHVMHIVSGVQGNLEDDKDAFDLFAAAFPAGTLVGAPKVRAMELIDEIEPELRGVYGGTVGYFSKNGDMDQAIAIRTIVFTDEKYCFQAGAGIVADSLPKNEYKEVLAKSQILRTALKMVKEGEL

SEQ ID NO: 176364 - protein, 251 aa, Unknown
  Bacterial polypetide isolated from the Sargasso Sea
KYIKLGDIFQVVLSQRFEARLSKKPIDIYKKLRVTNPSPFMFFFNFNDFQIIGASPEILVRLRDNKITVRPIAGTRPRGKTLKEDLYYEKDLLRDKKELSEHLMLLDLGRNDAGKVSKINSVKVTESFIIERYSHVMHIVSNVIGDYNKKFSKFKSLLAGFPAGTVSGAPKIRAMEIIDELETTRRKVYAGGIGYFSANGEFDTCIALRTAVAKNKKFYVQAGAGIVADSKPINEYEETVNKAKALINALK

SEQ ID NO: 176365 - protein, 125 aa, Unknown
  Bacterial polypetide isolated from the Sargasso Sea
KFVIEKYSHVMHIVSNVIGKFNKKFKKFDTLLSGFPAGTVSGAPKIRAMEIIDSLETTKRKVYAGGIGYFSANGDFDTCIALRTAVAKNKKFYVQAGAGIVADSEPEKEYKETVNKAKALLKSLE

SEQ ID NO: 176366 - protein, 305 aa, Unknown
  Bacterial polypetide isolated from the Sargasso Sea
DIRLMRPKNVIIYDNLKKKIFFIQNIFKEENIENYKLKYLSIKKALLELQYFGNISLPENFHKTNNKIKVRSNISKSKFKKNVLKAKEYIKKGDIFQVVLSQRFEAKIDKPALEIYNTLRILNPSPFMFYFNYDDFQILGSSPEILVRLLDGKVTIRPIAGTRPRGKNKKQDSKLTNELLNDPKELAEHLMLLDLGRNDVGKVSRTNSVKVTERFKIEKYSHVMHIVSNVTGKLKEKFSLFETFLSGFPAGTVSGAPKIRAMEIIDELESSKRKLYAGGIGYFTANQDFDTCIALRTALIKNKKI

SEQ ID NO: 176367 - protein, 292 aa, Unknown
  Bacterial polypetide isolated from the Sargasso Sea
SILKPAQKKNKKSKLKFKSNFKKEQFYKIVNKAKEYIKNGDIFQVVPSQRFETKYNLKAVNLYRSLRRLNPSPYLVNLNFDKIGLVASSPELMVQLRNKKVTIRPIAGTRKRGKNASEDLYLSNDLLNDKKELAEHLMLLDLGRNDVGRVAKKGTVNVTEKMIIEYYSHVMHIVSNVEGKIDNNLDALDALMAGFPAGTVSGAPKIRAMEIIEELENLNRSFYAGCMGYFDSNGDMDTCISLRTGLVKDNKLYIQAGAGIVYDSVPKNEHQEILNKAGALMAAAEDSYKFDL

SEQ ID NO: 176368 - protein, 287 aa, Unknown
  Bacterial polypetide isolated from the Sargasso Sea
MQTQKPILELLACDAAYRENPTSLFHQVCGARPATLLLESADIDSKDDLKSLLLVDSALRITALGDTVTIQALSTNGASLLPLLDAALPAGVENEKQTNGRHLRFPAVSPLLDEDARLCSLSVFDAFRLLQGLVNVPVQEREAMFFGGLFSYDLVAGFEDLPQLEAGNRCPDYCFYLAETLMVIDHQKKSTRIQASVFTPNDAEKQRLNARLAQLSQQLTEPAPPLPVTEVPQMRCECNQSDEEFGAVVRGMQKAIRAGEIFQVVPSRRFSLPCPSPLAAYYVLKKS

SEQ ID NO: 176369 - protein, 173 aa, Unknown
  Bacterial polypetide isolated from the Sargasso Sea
GKNKKQDAKLTSELLKDPKELAEHLMLLDLGRNDVGKVSKTNSVKVTEKFKVEKYSHVMHIVSNVRGKLKKNFSLFETFLSGFPAGTVSGAPKIRAMEIIDELEDSKRKLYAGGIGYFTANQDFDTCIALRTALIKNKKIYVQSGAGIVADSNPKNEYNETVNKAKALLKAIN

SEQ ID NO: 176370 - protein, 230 aa, Unknown
  Bacterial polypetide isolated from the Sargasso Sea
CQDPLNIYKKLRVTNPSPFMYFFNFEDFQIIGASPEILVRLRDNKITIRPIAGTRPRGKNKKEDKSYEKDLLNDKKELSEHLMLLDLGRNDTGKVSKINTVKVTESFKIERYSHVMHIVSNVKGEFNKKFGKFDTLLAGFPAGTVSGAPKIRAMEIIDELETTRRKVYAGGIGYFSSNGDFDTCIALRTAISKNKKFYVQSGAGIVADSKPINEFNETVNKAKALIKALE

SEQ ID NO: 176371 - protein, 262 aa, Unknown
  Bacterial polypetide isolated from the Sargasso Sea
DIISLMAVTYPSKNISAENAYKKNILLIKKTIKKLEKSVLRPAQNKYKKSKLKFKSNFKKEQFYKIVNKAKEYIKNGDIFQVVPSQRFETKYNLKAVNLYRSLRRLNPSPYLVNLNFDRIGLVASSPELMVQLRNKKVTIRPIAGTRKRGKNTSEDMFLSNDLVNDKKELAEHLMLLDLGRNDVGRVSKKGTVNVTEKMIIEYYSHVMHIVSNVEGKIDNNLDALDALMAGFPAGTVSGAPKIRAMEIIEELENLNRSFLCW

SEQ ID NO: 176372 - protein, 228 aa, Unknown
  Bacterial polypetide isolated from the Sargasso Sea
SKSKFKSNILKGKKYIKRGDIFQVVLSQRFEAKIDKPALEIYNTLRSLNPSPFMFFFNFKDFKILGSSPEILVRSINNEITIRPIAGTRPRGKSKTEDLKLTKELLSDPKELAEHLMLLDLGRNDVGKVSKIGTVKVTERFKIEKYSHVMHIVSNVVGKQNNNFSNFETFLSGFPAGTVSGAPKIRAMEIIDELETSRRNLYAGGVGYFTANKDFDTCIALRTALIKN

SEQ ID NO: 176373 - protein, 197 aa, Unknown
  Bacterial polypetide isolated from the Sargasso Sea
SPEILVRVRNKKITIRPIAGTRKRGKNKIEDFKLQRELLADKKELSEHLMLLDLGRNDTSKGSIGGSVKVTEQFKIEKYSHVMHIVSNVEGKYNTKLSLIDAMFAGFPAGTVSGAPKIRAMEIIDKLEINKRKLYAGAIGYFSPNNSMDTCIALRTALIKNNKLYIQAGAGIVADSNPEKEYQETVNKAKAIIEAAK

SEQ ID NO: 176374 - protein, 227 aa, Unknown
  Bacterial polypetide isolated from the Sargasso Sea
LYAALRKLNPSPYMYYLNLDECHVVGASPEILVRLEKDEITLRPIAGTRKRGKNEQEDKLNEQDLLNDPKELAEHLMLIDLGRNDVGRVADIGTVKVTEKMIIERYSHVMHIVSNVVGRLSSELSFIDALKATLPAGTLSGAPKIRAMEIINELEPSSRGIYGGAIGYISWNGNIDTAIAIRTAVIKDNLIHVGAGAGIVADSNPESEWEECLQKSRVFLDAMEMIS

SEQ ID NO: 176375 - protein, 119 aa, Unknown
  Bacterial polypetide isolated from the Sargasso Sea
YSHVMHIVSNVEGKFSDKYSRFMTLLAGFPAGTVSGAPKIRAMEIIDELERSKRKVYAGGIGYFSSNGDFDTCIALRTAVIKNNKFYVQAGAGIVADSKPKNEYKETINKAKALLKALE

SEQ ID NO: 176376 - protein, 294 aa, Unknown
  Bacterial polypetide isolated from the Sargasso Sea
MSNRASNLSIQYQRPPLLLEENARLQMPNPFTVLRTLQRELHCQSDEPFAVFLGGVIGYDMVATVEQLPEVAAAENQCPDYVFYLAETLLVLDHQTGDSRLVGNVFCGEQAPANCFVIGKRLEQLKQLLQSAPTTQPLTAKVSAELNLDISDSDFMQQVEKLKQHIVAGDIFQVVPSRCFSLPCPQPLAAYARLKQQNPSPYMFYLKDAAFTLFGASPESALKFDAQSRQVEIYPIAGTRRRGFKSDGSIDRDLDSRIELELRQDEKEKAEHLMLVDLARNDVARISVPGSRYV

SEQ ID NO: 176377 - protein, 305 aa, Unknown
  Bacterial polypetide isolated from the Sargasso Sea
FFFIINTFKDEKIGNYEKKFLEISEKLFNLENLIRIKNNNLFKNSKKKIIFKSNISKKKFIDNVRKAKKYIKIGDIFQVVLSQRFEARLTKDPLKIYKKLRITNPSPFMYFFNFSDFQIIGASPEILVRLRDNIITIRPIAGTRPRGITKKQDEKFKKDLLNDRKELSEHLMLLDLGRNDTGKVSKINTVKVTEKFKIEKYSHVMHIVSNVIGKFNNKFSKYETLMSGFPAGTVSGAPKIRAMEIIDELEKNKRKIYAGGIGYFSSNGDFDTCIALRTAVSKNKKFYVQAGAGIVADSKPYNEYN

SEQ ID NO: 176378 - protein, 190 aa, Unknown
  Bacterial polypetide isolated from the Sargasso Sea
LEKGEVTIRPIAGTRPRGKNSKIDKKNELDLLKDRKELAEHLMLLDLGRNDVGKVVQEDSVKVTEKFKVEKYSHVMHIVSNVIGKFNKKCSLFETLLSGFPAGTVSGAPKIRAMEIIDELEKSKRKLYAGGIGYFTPNNEFDTCIALRTALIKDNKFYVQAGAGIVADSKPEREYYETIHKARALMKAVD

SEQ ID NO: 176379 - protein, 271 aa, Unknown
  Bacterial polypetide isolated from the Sargasso Sea
CKDDLKIPDIKLSRPRNLIIYDNLKKKIHYIENVYSDTKIKNYEETYGSIIEKFNLFQNYENIKLPEKLTFKKNKNIIKSNTSKKRFKLLVQKAKKYIEKGDIFQVVLSQRFERKIIKKPIEIYNYLRKSNPSPFMFYFNYNDFNVLGSSPEILVRLRNNKVTIRPIAGTRPRGKNIKEDKRYEKDLLKDKKELAEHLMLLDLGRNDVGKVVTNNSVKVTEKFKVEKYSHVMHIVSNVVGSFDKKFTLFETLLSGFPAGTVSGAPKIRAME

SEQ ID NO: 176380 - protein, 169 aa, Unknown
  Bacterial polypetide isolated from the Sargasso Sea
KEDKKYEVDLLHDKKELAEHLMLLDLGRNDVGKVAKINSVQVTEKFKVEKYSHVMHIVSNVIGKFNYKFSLFETLLSGFPAGTVSGAPKIRAMEIIDELEKNKRKIYAGGIGYFTPNNEFDTCITLRTALIKDKKIYVQAGAGVVADSKPEKEYAETVNKAKALMRAVD

SEQ ID NO: 176381 - protein, 170 aa, Unknown
  Bacterial polypetide isolated from the Sargasso Sea
LSEDRFYEKDLLKDKKELSEHLMLLNLGRNDAGKVSKIDTVKVTESFLIERYSHVMHIVSNVVGVYNKKFSKFKSLLAGFPAGTVSGAPKIIAMEIIDELQKTKRKVYAGGIGYFSANGEFDTCIALRTAIVRKNKFYVQAGAGIVADSEPLNEYKETVNKAKALISALK

SEQ ID NO: 176382 - protein, 250 aa, Unknown
  Bacterial polypetide isolated from the Sargasso Sea
TLKLGDIFQVVLSQRFEAKLTKNPIEIYKKLRINNPSPFMYFFNFDDFQIIGASPEILVRLRNNNITIRPIAGTRPRGRNKKEDKFYEKDLLRDKKELSEHLMLLDLGRNDAGKVSKINSVKVTEKFVIEKYSHVMHIVSNVIGKFNKKFTKFDTLLSGFPAGTVSGAPKIRAMEIIDELESTKRKVYAGGIGYFSANGDFDTCIALRTAVSKNNKFYVQAGAGIVADSKPTNEYRETVNKAKALLKSLE

SEQ ID NO: 176383 - protein, 129 aa, Unknown
  Bacterial polypetide isolated from the Sargasso Sea
KVTERFKVEKYSHVMHIVSNVKGKLRKDFSLFDTFLSGFPAGTVSGAPKIRAMEIIDELEKSKRKLYAGGIGYFTANQDFDTCIALRTALIKNKKIYVQAGAGIVADSNPKNEYNETVNKAKALLKAIN

SEQ ID NO: 176384 - protein, 206 aa, Unknown
  Bacterial polypetide isolated from the Sargasso Sea
LEDGKVSVRPIAGTRPRGRTNDEDIALEEDLLADPKEISEHLMLIDLGRNDVGRVAEIGSVELTENMLVERYSHVMHIVSHVEGNVRQEISALDVLRACLPAGTLSGAPKVRAMELINQFEPIRRGIYGGAVGYLGWSGNMDTAIAIRTAIIKDGMMHIQAGAGIVADSIPQSEWIETLNKGHAVIRAANAALVGFKDITGPLIRD

SEQ ID NO: 176385 - protein, 228 aa, Unknown
  Bacterial polypetide isolated from the Sargasso Sea
DSIFKKKINVKSNTTKSQFIEMVEKAKKYIKIGDIFQVVLSQRFEAKLTKKPLDIYKKLRVTNPSPFMFFFNFKDFQIIGASPEILVRLRDNIITVRPIAGTRPRGKSRKQDNYYAKDLLKDKKELAEHLMLLDLGRNDVGKVTKINTVKVTEKFTIEKYSHVMHIVSNVEGVHNRKLSKLNSLLCGFPAGTVSGAPKIRAMEIIDELEKSKRKVYAGGIGYFSANGD

SEQ ID NO: 176386 - protein, 269 aa, Unknown
  Bacterial polypetide isolated from the Sargasso Sea
ENNFEPKDFSLKASEEAFDSNFSKKDFLKAVSVAKDYIVDGDVMQVVLAQDFSKEFTHEPFDLYQALRFLNPSPYMYFLNFGICQVVGASPEILVRLQGDQITLRPIAGTRRRGSNEIEDEENAKDLLSDPKELAEHLMLIDLGRNDVGKISKMGTVKVSEKMVIEKYSHVMHIVSNVEGSKKENLSFIDVLKSALPAGTLSGAPKIRAMEIINELEPSSRGIYGGAIGHISWDGDIDTAIAIRTAVIKNNKIHVGAGAGVVADSIPEN

SEQ ID NO: 176387 - protein, 188 aa, Unknown
  Bacterial polypetide isolated from the Sargasso Sea
NNNITVRPIAGTRPRGKNKKEDRYFERDLLRDKKELSEHLMLLDLGRNDTGKVSKINTVKVTEKFVIEKYSHVMHIVSNVVGKFNKKFSKFDTLLSGFPAGTVSGAPKIRAMEIIDDLENTKRKVYAGGIGYFSANGDFDTCIALRTAVSKNNKFYVQAGAGIVADSKPINEYKETVNKAKALLKSLE

SEQ ID NO: 176388 - protein, 137 aa, Unknown
  Bacterial polypetide isolated from the Sargasso Sea
KVSKVNSVKVTEKFVVEKYSHVMHIVSNVVGKFNKKYSKFDTLLSGFPAGTVSGAPKIRAMEIIDELEKSKRKVYAGGIGYFSANGDFDTCIALRTAVSKNNKFYVQAGAGIVADSKPLNEYKETINKAKALLKSLE

SEQ ID NO: 176389 - protein, 259 aa, Unknown
  Bacterial polypetide isolated from the Sargasso Sea
LKWVNIAKKYIKKGDIFQVVLSQRFETNLSKNPLEIYKKLRTTNPSPFMYFFNFKDFQIIGASPEILVRLRNGKITIRPIAGTRPRGINKKQDNFYIKDLLKDKKELSEHLMLLDLGRNDAGKVSKINTVKVTERFKIEKYSHVMHIVSNVVGSFNYEHSKFNSLLAGFPAGTVSGAPKIRAMEIIDELEKSKRKVYAGGIGYFSSNGDFDTCIALRTALAKKNKFYVQAGAGVVADSKPINEYKETVNKAKALINALR

SEQ ID NO: 176390 - protein, 248 aa, Unknown
  Bacterial polypetide isolated from the Sargasso Sea
KIGDIFQVVLSQRFETKLTKNPVEIYKKLRVTNPSPFMYFFNFNDFQIIGASPEILVRLRNGKITIRPIAGTRPRGKNKIQDIRYEKDLLRDKKELAEHLMLLDLGRNDTGKVSKINTVRVTEQFKIERYSHVMHIVSNVVGKFNNKFSKFDTLLSGFPAGTVSGAPKIRAMEIIDELENTKRKVYAGGIGYFSANGDFDTCIALRTAIAKNNKFYAQAGAGIVADSKPNNEYKETVNKAKALIKSLE

SEQ ID NO: 176391 - protein, 195 aa, Unknown
  Bacterial polypetide isolated from the Sargasso Sea
MREKKTQEYEQVLKELNGIENSLYKKIKNQEINLDKKKRLKIKSNITKSKFIKNIKKAKKYIKAGDIFQVVPSQRFETTFKSKGSSLYKVLRLTNPSPFMYYFNLPNFQIVGSSPEILVRLRSDLITLRPIAGTRPRGKNIKEDRKYELDLLSDEKETSEHLMLLDLGRNDVGKVAKKSTVSVTAKFIIEKYSHV

SEQ ID NO: 176392 - protein, 250 aa, Unknown
  Bacterial polypetide isolated from the Sargasso Sea
YIKVGDIFQVVLSQRFEARLTKKPIEIYKKLRITNPSPFMYFFNFNDFQIIGASPEILVRLRNNKITIRPIAGTRPRGKNKKEDLFYEKDLLKDKKELSEHLMLLDLGRNDTGKVSKINSVKVTESFKIERYSHVMHIVSNVEGEFNNKYSKFDTLLSGFPAGTVSGAPKIRAMEIIDELESTRRKVYAGGIGYFSANGDFDTCIALRTAITKNKKFYVQSGAGIVSDSVPLNEYKETVNKAKALIKALE

SEQ ID NO: 176393 - protein, 191 aa, Unknown
  Bacterial polypetide isolated from the Sargasso Sea
GSQVTLRPIAGTRKRGANEEEDKINEKDLLSDPKELAEHLMLIDLGRNDVGKVSKIGSVKVTEKMIVEKYSHVMHIVSNVVGQISEGLQAMDVLKATLPAGTLSGAPKIRAMEIINEIEPSSRGIYGGAIGYISWNGDIDTAIAIRTAVIKDQLMHVGAGAGIVADSDPEKEWLECIQKSQVFIDAMEMIS

SEQ ID NO: 176394 - protein, 260 aa, Unknown
  Bacterial polypetide isolated from the Sargasso Sea
MIIFDSVEDTMTIITPVFMSNYDKKNYKDIYNEACNNIKNIVNILKKPIENKEIIYKKNDKIKIKSNYKKSEYLKIIKKAKEYILAGDIFQVVPSQRFESKFKQSPFSLYRSLRRLNPSPFLYYLNFKDFSIIGSSPEILVRVRNNNVTIRPIAGTRPRGKNKIEDNNLAKELLSDKKEIAEHLMLLDLARNDVAKVSRYGTLSVTEKMVIEKYSHVMHIVSNVEGKKLQNIDYLDALLSGFPAGTVSGAPKIRAMEIID

SEQ ID NO: 176395 - protein, 126 aa, Unknown
  Bacterial polypetide isolated from the Sargasso Sea
ESFIIERYSHVMHIVSNVIGEYNKKFSKFKSLLAGFPAGTVSGAPKIRAMEIIDELETTKRKVYAGGIGYFSANGEFDTCIALRTAIAKKDKFYVQAGAGIVADSKPLKEYEETVNKAKALINALK

SEQ ID NO: 176396 - protein, 170 aa, Unknown
  Bacterial polypetide isolated from the Sargasso Sea
LSKELLNDKKELAEHLMLLDLGRNDVGRVSKINSVKVTEKMLIEYYSHVMHIVSNVEGNLDTKYDAVDALVAGFPAGTVSGAPKIRAMEIIEELENVNRSFYAGCMGYFDSNGDMDTCISLRTGLVKENKLYIQAGGGIVYDSVAENEYQETLNKANALMAAAKDSYKYI

SEQ ID NO: 176397 - protein, 285 aa, Unknown
  Bacterial polypetide isolated from the Sargasso Sea
MTSNTTKKAFEKSVKSAKEFIEKGDVFQLVLSQKLESNVTQKPFELYRSLRMVNPSPFMAFFDFGDWQLIGSSPEVMVKAQQTEKGIQASLRPIAGTRPRGRNDLEDATLEKDLLKDPKERAEHVMLVDLGRNDLGRVCCPGTVFVKELMVIEKYSHVMHIVSEVEGILEAVKDVWDLLTASFPAGTVSGAPKIRAMQLINQLEKQRRGPYSGVYGSIDLNGALNTAITIRTMVVRRKNKNDFTVQVQAGAGVVADSIPSNEYQETLNKAKGMFTALACLEASDS

SEQ ID NO: 176398 - protein, 102 aa, Unknown
  Bacterial polypetide isolated from the Sargasso Sea
KFSKFKSLLAGFPAGTVSGAPKIRAMEIIDELEKTKRKVYAGGIGYFSANGEFDTCIALRTAVAKKGKFYVQAGAGIVADSKPLKEYIETINKAKALINALK

SEQ ID NO: 176399 - protein, 174 aa, Unknown
  Bacterial polypetide isolated from the Sargasso Sea
RGKTKKQDNFYKKDLLKDKKELAEHLMLLDLGRNDVGKVAKINTVKVTEKFLIEKYSHVMHIVSNVVGIHNKSLSKLNSLLAGFPAGTVSGAPKIRAMEIIDELEKSKRKVYAGGIGYFSSNGDFDTCIALRTAVTKKNKFYVQAGAGIVADSKPNNEYKETVNKAKALISALK

SEQ ID NO: 176400 - protein, 291 aa, Unknown
  Bacterial polypetide isolated from the Sargasso Sea
MIIQSSIKNLHYRTELKSRNIKVKSNTSKNRFLQMVNKAKEYIKLGDIFQVVLSQRFEAKLTKKPIDIYKKLRVTNPSPFMFFFNFNDFQIIGASPEILVRLRDNKITVRPIAGTRPRGKTLGEDRFYEKDLLQDKKELSEHLMLLDLGRNDAGKVSKINTVKVTESFIIEKYSHVMHIVSNVIGEYDKKFSKFKSLLAGFPAGTVSGAPKIRAMEIIDELETTKRKVYAGGIGYFSANGEFDTCIALRTAVAKKNKFYVQAGAGIVADSKPLKEYEETVNKAKALINALK

SEQ ID NO: 176401 - protein, 315 aa, Unknown
  Bacterial polypetide isolated from the Sargasso Sea
MAGAFFGYISYENIYNIEEISKFKKKNTLMTPELILFIPQILIVYDNVSNSLYILKHFLSGVKKAQEYEQVLNELNDIENNLYKKVNNHKINLNKKKRLKIKSNITKSKFINNINKAKKYIKAGDIFQVVPSQRFETNFKSKGSSLYKVLRLTNPSPFMYYFNLPNFQIVGSSPEILVRLRSELITLRPIAGTRPRGKNIKQDRKYELDLLSDEKETSEHLMLLDLGRNDVGKVARKSTVSVTAKFIIEKYSHVMHLVSNVTGKLKKNISTIEALMAGFPAGTVSGAPKIRAMQIIDELETDVRGIYAGGIGYIS

SEQ ID NO: 176402 - protein, 92 aa, Unknown
  Bacterial polypetide isolated from the Sargasso Sea
GFPAGTVSGAPKIRAMEIIDELETTKRKVYAGGIGYFSANGEFDTCIALRTAVAKNDKFYVQAGAGIVADSKPIKEYEETINKAKALINALK

SEQ ID NO: 176403 - protein, 171 aa, Unknown
  Bacterial polypetide isolated from the Sargasso Sea
TKKEDLSYEKDLLKDKKELSEHLMLLDLGRNDAGKVSKINSVKVTESFIIERYSHVMHIVSNVIGKYDKKFTKFKSLLAGFPAGTVSGAPKIRAMEIIDELENTKRKVYAGGIGYFSANGEFDTCIALRTAVAKKNKFYVQAGAGIVADSKPIREYEETVNKAKALINALK

SEQ ID NO: 176404 - protein, 237 aa, Unknown
  Bacterial polypetide isolated from the Sargasso Sea
REFERKINKTPIEIYNHLRKSNPSPFMFYFNYKDFNILGSSPEILVRLRGGEVTIRPIAGTRPRGKSIKEDKKHELDLLNDKKELAEHLMLLDLGRNDVGKVSKVNTVKVTEKFKVERYSHVMHIVSNVVGKFNNRFSLFETLLSGFPAGTVSGAPKIRAMEIIDELEKNKRKLYAGGIGYFTPDGEFDTCIALRTALIKNKKFYVQAGAGVVADSKPEKEYAETVNKAKALMRAVD

SEQ ID NO: 176405 - protein, 259 aa, Unknown
  Bacterial polypetide isolated from the Sargasso Sea
VNSVKNYIAEGDVMQVVLAQDFKMPFHGDSFHLYTALRELNPSPYMYYLNLNECKVVGASPEILIRLEGSQVTLRPIAGTRKRGANEEEDKINEKDLLSDPKELAEHLMLIDLGRNDVGKVSKIGSVKVTEKMIVEKYSHVMHIVSNVVGQISEGLKAMDVLKATLPAGTLSGAPKIRAMEIINEIEPSSRGIYGGAIGYISWNGDIDTAIAIRTAVIKDQLMHVGAGAGIVADSDPEKEWLECIQKSQVFIDAMEMIS

SEQ ID NO: 176406 - protein, 169 aa, Unknown
  Bacterial polypetide isolated from the Sargasso Sea
KEDIFYEKDLLKDKKELSEHLMLLDLGRNDTGKVSKINTIKVTESFKIERYSHVMHIVSNVEGEFNNKFTKFDTLLSGFPAGTVSGAPKIRAMEIIDELETTRRKVYAGGIGYFSANGDFDTCIALRTAITKKDKFYVQAGAGIVADSKPINEFKETENKAKALLKALE

SEQ ID NO: 176407 - protein, 290 aa, Unknown
  Bacterial polypetide isolated from the Sargasso Sea
KEKDVELKFESNFEKEKFKEAVEKVKEYILEGDAIQVVLSQRLNFNIKKSAFDIYRALRTINPSPYMYFLKFGDIEVVGSSPEILVRLEEQKVEVRPIAGTRKRGKNEDEDLALEKDLLKDKKELAEHIMLVDLGRNDLGRVAKFSSVEVNESFTVERYSHVMHIVSNVRGILKEGLDCFDVLAATFPAGTVSGAPKIRAMEIIEELEPNRRGLYAGAVGYIGFSGNMDTAIAIRTLVVKDKMAYLGVGAGIVADSVPENEFEETMNKGRALLKAIELAEKRVGYMILMI

SEQ ID NO: 176408 - protein, 286 aa, Unknown
  Bacterial polypetide isolated from the Sargasso Sea
KKKYNEVKKELNELILQASNKNNKRIISNILKKIVVRSNTSKNKFLNMVKKAKNYIKIGDIFQVVLSQRFEAKLNKTPLEIYKKLRVTNPSPFMFFFNFPDFQIIGASPEILVRLRNNKITIRPIAGTRPRGQNKKQDHFYAKDLLKDKKELAEHLMLLDLGRNDVGKVSKINTVKVTEKFNVEKYSHVMHIVSNVMGEFNNKLSKFKSLLSGFPAGTVSGAPKIRAMEIIDELESSRRKVYAGGIGYFSANGEFDTCIALRTAVAKNNKFYVQAGAGIVADSKPQ

SEQ ID NO: 176409 - protein, 171 aa, Unknown
  Bacterial polypetide isolated from the Sargasso Sea
TKKQDNFYMKDLLNDKKEWAEHLMLLDLGRNDVGKVSKINTVKVTEKFNIEKYSHVMHIVSNVIGFFNKKFTKFNSLLAGFPAGTVSGAPKIRAMEIIDELETSKRKVYAGGIGYFSANGEFDTCIALRTALAKKNKFYVQAGAGIVADSKPLNEYEETVNKAKALLSSLN

SEQ ID NO: 176410 - protein, 235 aa, Unknown
  Bacterial polypetide isolated from the Sargasso Sea
FEAKLSKDPIDIYKKLRVTNPSPFMFFFNFPDFQIIGASPEILVRLRDNKITVRPIAGTRPRGKNYTQDKFYEKDLLNDKKELSEHLMLLDLGRNDAGKVSKINTVKVTESFTIERYSHVMHIVSNVTGVYNNKYSKFKSLLAGFPAGTVSGAPKIRAMEIIDQLEKTKRKVYAGGIGYFSANGEFDTCIALRTAMVKNKKFYVQAGAGIVADSVPLKEYEETVNKAKALINALR

SEQ ID NO: 176411 - protein, 174 aa, Unknown
  Bacterial polypetide isolated from the Sargasso Sea
RGKNKKEDIKYEKDLLNDKKELAEHLMLLDLGRNDAGKVSKVNTVKVTESFKIERYSHVMHIVSNVEGKFNKKYSKFDTLLSGFPAGTVSGAPKIRAMEIIDELETTSRKVYAGGIGYFSANGDFDTCIALRTAISKNGKFYAQAGAGIVADSKPLSEYYETVNKAKALLKSLE

SEQ ID NO: 176412 - protein, 219 aa, Unknown
  Bacterial polypetide isolated from the Sargasso Sea
MFYVRTPEGTLVGSSPEIMVRVVDDRITVRPLAGTRPRGKTQNEDRQLAESLLADPKERAEHIMLIDLGRNDVGRVAEIGSVELSDIMSIERYSHVMHITSNVTGQLADGQTSFDALRACLPAGTVSGAPKIRAMQIIDELEPQRRGPYAGAVGYIDFGGTMDTCIALRTIVVSKGKAYVQSGAGIVADSKPENEFEETVNKAKGMLVAIAMTSARFRQ

SEQ ID NO: 176413 - protein, 281 aa, Unknown
  Bacterial polypetide isolated from the Sargasso Sea
MEFGIYNDGILYDNKKKQFFYFYYDEDRKDKIKKTDEDVGTFEMSDIDINLNKEQFERIVNKAKEYVLSGDVFQVVLSRRFSFEAKGDYLRVYEKLRELNPSPYMFHLKMDENVIIGSSPEMLLRVTGRDVETFPIAGTRKITDDEEKNEELKNELLNDEKELAEHTMLVDLGRNDIGRVCDYGTVKVKELMEIKRFSHVQHIVTHVVGKLNEKNDMYDAFEAVFPAGTVSGAPKVRAMEIIQELEPTQRETYAGAVGYFSFNGCCDFAIAIRSIFANKER

SEQ ID NO: 176414 - protein, 263 aa, Unknown
  Bacterial polypetide isolated from the Sargasso Sea
KYDAILKKFELYSCFENIKLPDQFTFKVNKNLIKSNTSKQKFMSLVKKAKNYIKKGDIFQVVLSQRFERKIHKKPIEIYNHLRKSNPSPFMFYFNYKDFNILGSSPEILVRLRKDEVTIRPIAGTRPRGRNLNDDKRYEIDLLKDKKELAEHLMLLDLGRNDVGKVAKVNSVKVTEKFKVEKYSHVMHIVSNVVGKFNNQYSIFETLLSGFPAGTVSGAPKIRAMEIIDELEKNKRKLYAGGIGYFTPNNEFDTCIALRTALI

SEQ ID NO: 176415 - protein, 109 aa, Unknown
  Bacterial polypetide isolated from the Sargasso Sea
VVGIFNKKYSNFKSLLAGFPAGTVSGAPKIRAMEIIDELEISKRKVYAGGIGYFSSNGEFDTCIALRTAVVKNKKFFVQAGAGIVADSKPINEYKETLNKAKALLSSIE

SEQ ID NO: 176416 - protein, 242 aa, Unknown
  Bacterial polypetide isolated from the Sargasso Sea
MKYLLPGFSLYRSLRRTNPSPYMFYFNFNDFSIIGSSPEILVKVENDDEVTIRPIAGTRPRGLNESEDKALENELLNDKKELAEHLMLLDLGRNDIGKVSEIGSVKITESFVIERYSHVMHIVSNVKGKLSENVDNIRALLSGLPAGTVSGAPKIRAMEIIDELENEKRGIFGGGVGYFGASGQMDFCIAIRTAILKDQDLYLQAGGGVVFDSDAEKEFQETVNKSKALIKAAEDSIHFFGD

SEQ ID NO: 176417 - protein, 255 aa, Unknown
  Bacterial polypetide isolated from the Sargasso Sea
KSHIVEGDIFQAVISQQFSLPQQKDPLTVYRSLRNINPSPYMYFFNYADRYIIGSSPEILVQSHHQKARVRPIAGTRKRSFKNEKALVDDLKSDQKEIAEHIMLVDLGRNDLGKVCEFKSIKMTDLMSIEKYSHVIHMVTNVEGKLMDNMTPIDLFKATFPAGTVSGAPKIRAIEIIQDIEPTNRDIYSGAVGYFNFDGEMDMCIAIRTIIAENDRYYVQAGAGIVHDSDPESEYEETKSKAHGVLLACLEEVST

SEQ ID NO: 176418 - protein, 305 aa, Unknown
  Bacterial polypetide isolated from the Sargasso Sea
EIKYKNIKKKLEELLFLSNLNLPNKEELKKYKSEVSVKSNISKKKFIQNVLKAKEYIKSGDIFQVVLSQRFETKLSKKPLDIYKKLRSVNPSPFMFYFNFNDFQIIGASPEILVRLRDQKITVRPIAGTRPRGKTSKQDRYYKKDLLKDKKELSEHLMLLDLGRNDAGKVSKINTVKVTESFIIEKYSHVMHIVSNVQGDYNSKFSRFETLLAGFPAGTVSGAPKIRAMEIIDELEKNQRKIYAGGIGYFSANGEFDTCIALRTAVVKNNKFYVQAGAGIVADSKPEKEYQETVNKAKALINAIK

SEQ ID NO: 176419 - protein, 227 aa, Unknown
  Bacterial polypetide isolated from the Sargasso Sea
PIDIYKKLRVTNPSPFMFFFNFNDFQIIGASPEILVRLRDNKITVRPIAGTRPRGKTLREDRFYEKDLLNDKKELSEHLMLLDLGRNDAGKVSKINTVKVTESFIIERYSHVMHIVSNVIGEYNQKFSKFKSLLAGFPAGTVSGAPKIRAMEIIDELETTKRKVYAGGIGYFSANGEFDTCIALRTAVAKKDKFYVQAGAGIVADSKPLKEYEETVNKAKALINALK

SEQ ID NO: 176420 - protein, 166 aa, Unknown
  Bacterial polypetide isolated from the Sargasso Sea
IYYEKDLLKDKKELSEHLMLLDLGRNDAGKVSKINSVKVTESFIVERYSHVMHIVSNVMGEYNKKFSKFKSLLAGFPAGTVSGAPKIRAMEIIDKLETSKRKVYAGGIGYFSANGEFDTCIALRTAIAKNKKFYVQAGAGIVADSKPINEFEETVNKAKALINALK

SEQ ID NO: 176421 - protein, 157 aa, Unknown
  Bacterial polypetide isolated from the Sargasso Sea
DKKELAEHLMLLDLGRNDVGKVSKVNSVKVTEKFKVEKYSHVMHIVSNVIGKFNKNFSIFETLLSGFPAGTVSGAPKIRAMEIIDELEKNRRKLYAGGIGYFTPNNEFDTCIALRTALIKDNKFYVQAGAGIVADSKADKEYLETINKAKALMKAVD

SEQ ID NO: 176422 - protein, 274 aa, Unknown
  Bacterial polypetide isolated from the Sargasso Sea
MVKKTIKSNISKKQFLENVKKAKKYIQIGDIFQVVLSQRFETKLTKKPLSIYKKLRLTNPSPFMFYFNFNDFQIIGASPEILVRLRDNKVTIRPIAGTRPRGKNLSEDNFYKKDLLSDKKEISEHLMLLDLGRNDIGKISKINTVKVTEQFKIEKYSHVMHIVSNVTGEFDKKKSKYDTMMAGFPAGTVSGAPKIRAMEIIDELEKNKRKIYAGGIGYFSANGDFDTCIALRTALAKNGKYYVQAGAGIVADSVPEKEFQETVNKSKALIKALD

SEQ ID NO: 176423 - protein, 235 aa, Unknown
  Bacterial polypetide isolated from the Sargasso Sea
SLRMVNPSPYMSFFDFGSWYLIGSSPEVMVKAEKNKNSQIVASLRPIAGTRPRGIDNQQDLAFEKELLKDPKEIAEHVMLIDLGRNDLGRVCEIGTVKVKDLMVIEKYSHVMHIVSQVEGILKKNADVWDLLKASFPAGTVTGAPKIRAMQLIKHFEKDARGPYAGVYGSVDINGSLNTAITIRTMIVKPSGDGKYDVSVQAGAGIVADSFPENEYQETINKAKGILKALACLDK

SEQ ID NO: 176424 - protein, 203 aa, Unknown
  Bacterial polypetide isolated from the Sargasso Sea
EILARLEDGDVTVRPIAGTRRRGKNKDDDKAMELDMVNDPKEIAEHLMLIDLGRNDVGRIAEPGSVEVTEKFGIERYSHVMHMVSNVTAKIKKGLTAMDVFKATFPAGTVSGAPKVRAMEIIDEFEPVKRGIYGGAVGYLSWQGNMDMAIAIRTAVIKDDLLYIQAGGGWVADSIPELEWKEVLNKGRVIFKAAEMVQEKLKG

SEQ ID NO: 176425 - protein, 224 aa, Unknown
  Bacterial polypetide isolated from the Sargasso Sea
IYKKLRKTNPSPFMYFFNFKDFQIIGASPEILVRLRNNKITIRPIAGTRPRGKNKKEDVFYEKDLLKDKKELSEHLMLLDLGRNDTGKVSKINTVKVTESFKIERYSHVMHIVSNVEGEFNNKFSRFDTLLSGFPAGTVSGAPKIRAMEIIDELETTSRKVYAGGIGYFSANGDFDTCIALRTAITKNKKFYVQAGAGIVADSKPINEFKETENKAKALLKALK

SEQ ID NO: 176426 - protein, 183 aa, Unknown
  Bacterial polypetide isolated from the Sargasso Sea
FMFFFNFNDFQIIGASPEILVRLRDNKITVRPIAGTRPRGKTSKEDLYYEKDLLKDKKELSEHLMLLDLGRNDAGKVSKINSVKVTESFIIERYSHVMHIVSNVIGDYNKKFSKFNSLLAGFPAGTVSGAPKIRAMEIIDELETTRRKVYAGGIGYFSANGEFDTCIALRTAVAKNKKFYVQA

SEQ ID NO: 176427 - protein, 277 aa, Unknown
  Bacterial polypetide isolated from the Sargasso Sea
VLIIHDNVKKKIFYIINVFKDEKIKNYKKKYEEIKNELISLSFLSQLKSKENVLRKSKENIIKSNTSKGKFINMVKKAKKYIKIGDIFQVVLSQRFETKLTKKPLDIYKKLRITNPSPFMYFFNFHDFQIIGASPEILVRLRDNEITIRPIAGTRPRGKNKNQDKFYMKDLLNDKKELAEHLMLLDLGRNDVGKVSKINTVKVTEKFNIEKYSHVMHIVSNVVGIFNRKYSKFKSLLAGFPAGTVSGAPKIRAMEIIDELESSSRKVYAGGIGYFSA

SEQ ID NO: 176428 - protein, 195 aa, Unknown
  Bacterial polypetide isolated from the Sargasso Sea
AHASKTQEEDEALEVDLLADEKERAEHVMLVDLGRNDVGRVSKAGTVKVEKLMEIERYSHVMHISSTVTGNLIDNLGPWDVLRAALPAGTVSGAPKVRAMQIIDDLEVTRRGPYGGGIGYVGFTGEMDMALALRTMVIPTRQAKESAGSREWMIHLQAGAGVVADSNPESEYQETVNKAAALGRAIDLAESAFTD

SEQ ID NO: 176429 - protein, 305 aa, Unknown
  Bacterial polypetide isolated from the Sargasso Sea
NNYKLKYQSIKKLFSEFQHFGNINLPENFHRSKAKIKVRSNISKIKFTKNIQKAKDYIKKGDIFQVVLSQRFESKIDKPPIEIYNTLRVINPSPFMFYFNFEDFQILGSSPEILVRLLNGEVTIRPIAGTRPRGRNKKEDDKFTTELLKDPKELAEHLMLLDLGRNDIGKVSKVNSVKVTEKFKIEKYSHVMHIVSNVKGKLNKNFSLFETFLSGFPAGTVSGAPKIRAMEIIDELENSKRKLYAGGIGYFTANQEFDTCIALRTALIKDKKIYVQAGAGIVADSNPKNEYNETINKARAFAKAA

SEQ ID NO: 176430 - protein, 294 aa, Unknown
  Bacterial polypetide isolated from the Sargasso Sea
DTGSYNQSMEEIVHIEDELKKQNNFEPKDFSFKASKEAFDSNFSKADFLKAVSIAKDYIIDGDVMQVVLAQDFSKDFTHEPFELYQALRFLNPSPYMYFLNFGVCQVVGASPEILVRLQRDQITLRPIAGTRRRGSNEIEDEENAKDLLSDPKELAEHLMLIDLGRNDVGKISKMGTVKVSEKMVIEKYSHVMHIVSNVEGSKKENLSFIDVLKSALPAGTLSGAPKIRAMEIINELEPSSRGIYGGAIGHISWDGDIDTAIAIRTAVIKNNKIHVGAGAGVVTDSIPENEWNE

SEQ ID NO: 176431 - protein, 297 aa, Unknown
  Bacterial polypetide isolated from the Sargasso Sea
SGYFSYDVIRYIENIPFSCKDDLKIPDARILRPRTLIIHDNYKQKIYYIVNCFSDEKINNYKTKFNLIENQIKNLIFISNYNANLSEYNSKKKVIVKSNISKKKFIQNVKKAKKYIKIGDIFQVVLSQRFEAKLTKNPVEIYKKLRINNPSPFMYFFNFKDFQIIGASPEILVRLRDNNITIRPIAGTRPRGKNKKEDKNFERDLLKDKKELSEHLMLLDLGRNDTGKVSKINSVKVTEKFVIERYSHVMHIVSNVIGKFNKKYSKFDTLLSGFPAGTVSGAPKIRAMEIIDELENT

SEQ ID NO: 176432 - protein, 317 aa, Unknown
  Bacterial polypetide isolated from the Sargasso Sea
NNVKNDLNIPDVRLIRPKSLIVLDNFEKKIHFIKNFFKEEKVTNYAKALNNVKSEIENLILLANNKNYYEAIELKKSIKIRSNISKQKFLNNVIKAKKYIKKGDIFQVVLSQRFKAKLEKDPIEVYKKLRVTNPSPFMYFFNFPDFQIIGASPEILVRLRNGQVTIRPIAGTRPRGKNKKEDLFFEKDLLKDKKELAEHLMLLDLGRNDAGRVSKIDTVKVTEKFKVERYSHVMHIVSNVVGKFNNKYSKFDTLLSGFPAGTVSGAPKIRAMEIIDELETTKRKVYAGGIGYFTAAGKFDTCIALRTAIVKNNYYTL

SEQ ID NO: 176433 - protein, 268 aa, Unknown
  Bacterial polypetide isolated from the Sargasso Sea
FLEKVKKAIKYVKSGDILQVVLSQRWKIKFKNNPFSFYRALRQTNPSPYMFFFNFKNFQIVGASPEILVKVANGKVTIRPIAGTRPRGKDPREDLSLEKNLLEDPKERAEHLMLLDLGRNDVGKVCKIGTVKPTEKFVVEKYSHVMHIVSNVEGTLNPDKDNISALFSGLPAGTVSGAPKIRAMEIISELEDEKRGVYAGGVGYFGASGEMDICIALRTAVIKNQYIFIQAGAGIVYDSVPENEYSETVNKAKALFSAIKLAQNQNWD
